United States Patent Application Publication US 2006/0134663 A1 - sequence listing, part 30

SEQ ID NO: 51413 - DNA, 622 bp, Homo Sapiens
tgctgtgttctttgcaacctacctgaccctggcttgctgttctggacccaggaggcatttcccctggaacctgattctcctgaccgtctttaccctgtccatggcctacctcactgggatgctgtccagctactacaacaccacctccgtgctgctgtgcctgggcatcacggcccttgtctgcctctcagtcaccgtcttcagcttccagaccaagttcgacttcacctcctgccagggcgtgctcttcgtgcttctcatgactcttttcttcagcggactcatcctggccatcctcctacccttccaatatgtgccctggctccatgcagtttatgcagcactgggagcgggtgtatttacattgttcctggcacttgacacccagttgctgatgggtaaccgacgccactcgctgagccctgaggagtatatttttggagccctcaacatttacctagacatcatctatatcttcaccttcttcctgcagctttttggcactaaccgagaatgaggagccctccctgccccaccgtcctccagagaatgcgcccctcctggttccctgtccctcccctgcgctcctgcgagaccagatataaaactagctgccaaccca

SEQ ID NO: 51414 - DNA, 582 bp, Homo Sapiens
tagttgcataccttatttcgttacatcatatatttgtaatgtgtaatatgaaatcttttgctttaatgtctttttttaaaatgtagaatgttctaaacttgaaaggcaattgaatgtagtatgatgaaaatgtgaatgttttgctgctttcatgaccaaagatacagggctagtggacatttagaataataattaaagctagagtcttgtatgtcttttctttgaaggagttctaaccttgtaaattgagaatgacttcagagaattttgattaagaaaacattaaaatcttaaccggcacaaacactccaatttttttcactgtgaagccgcaagcaattttttttctttttctttcaaaagcctgccttctgaatttatttcttgtttactcatttcagagagggtagtaaagaagatctatttctggtagtcatatcgcttgaaaggtattggtaaatgtgttttcagtcgtgaccatgtggaaagtgaacagtgttggcaaacattaccgagaaaatcatgcttttcaagatgcccttgctttgggatatccttcctagggagaaaaaaaaaaaaaaa

SEQ ID NO: 51415 - DNA, 682 bp, Homo Sapiens
taaatatgtgtccccccaccggatgtcgccaccctcactcacctgcctcttcttgagctgtcctgggccctgccacccgtacctgggctcctttgtgtagcattatcagcctcggtctggccttctggcacctcacccttgccatggctgaccccacccattccaaggcggggtcacggtaccagcagcacttggggtgaggcctccaaagcttcctcagaattgtggctgtgccacgctggaccacagggtccccctcaagcatctcggggccctattctctctgagcacctggagggctggactcaggcttgtgccaggcctgacttgggcctgggggccctagaacactcctcctcctgagcctactgccaaacgtcctcagtgttgtctgcacctgctccgactccttcagccgcccccgattcagcgcgcgctccgtccagtgcccgccctgtggggccaaggcggccgtgccttactactctgtgtcttctgcctcctctgaggaatctggccctgtctgacagtcccagaccccccgttctctcctctttagttgcatgagttttccttgttcatggaatgtttttcctgattaaatgtcggggaaatggccaaaaaaacaaaaaaaaaaaagggggcctgcaaagaaacccagagggacacacgtcaaggtacc

SEQ ID NO: 51416 - DNA, 1130 bp, Homo Sapiens
cctgggtggcatttcggacgagggaacgctggcgacactctccgtccatccgactgcccctgctgtgctgctcaaggccacaggcacacaggtctcattgcttctgactagattattatttgggggaactggacacaataggtctttctctcagtgaaggtggggagaagctgaaccggcttccctgccctgcctccccagccccctgcccaacccccaagaatctggtggccatgggccccgaagcagtctggcggacaggcttggagtcaaggggccccatgcctgcttctctcccagccccagctcccccgcccgcccccaaggacacagatgggaaggggtttccagggactcagccccactgttgatgcaggtttgcaaggaaagaaattcaaacaccacaacagcagtaagaagaaaagcagtcaatggattcaagcattctaagctttgttgacattttctctgttcctaggacttcttcatgggtcttacagttctatgttagaccatgaaacatttgcatacacatcgtctttaatgtcacttttataacttttttacggttcagatattcatctatacgtctgtacagaaaaaaaaaagctgctattttttttgttcttgatctttgtggatttaatctatgaaaaccttcaggtcccaccctctcccctttctgctcactccaagaaacttcttatgctttgtaaaaaaaaaaaaaaaaaaatccagggatctatggtcgggggcggagaaaaaaggtaatggaatgggcccttggtcatagcctgtttccctgaacccaactttccttggaccaaagtgggtaaattctgaccggcctcccctaaaagtggaggcccaatttaatttcgaaaaagccccgggttaaccctgccttaaaaggaaaccggtgtgcgatacccggggaaatttcaccccgcctcaatggagcggggcctcttttttgggaatcccaaagggatctttccgtgaaaaacactttcctttccgcgcaaaaaaacctgggggctttgccaaacaaaaaaaacccccgccttacccacggggggggatttttctttccgcgaatacaaaagacttaccacacttctatttttcca

SEQ ID NO: 51417 - DNA, 933 bp, Homo Sapiens
  misc_feature (865)..(865): n is a, c, g, or t
  misc_feature (877)..(877): n is a, c, g, or t
tttgaaactcatagcaataatgctatgctgttgtgatccctctcaagttctgcatttaaaatatattttttctttataggaattgatgtataccatgaagtcattgtcagttgtagtagctctgatgttgaatgagatatcatgttttagcattccattttactgactagggtagaagaacacttttcttggctacatttggaggatacccagggagtcttgggtgttccttatctggggaagcaaacatttcactagtctctttttttcatcctttaaattgtaaattaaggattactcaagctcaccattattcaagattgggactcgcttcccagtcgacactctgccctgcctgtcattgctgcaaagagctgctgctttgccaacctaagcaaagaaaatacggcttctcttgcattattttcccttttggttggtttgttttctagaagtacgttcagatgctttggggaatgcaatgtatgatttgctagctctctcaccacttaactcactgtgaggataaatatgcatgctttttgtaattaactggtgctttgaaaatcttttttaagggagaaaaatctcaaccaaagttatgctcatccagacaagctgacctttgagttaatttcagcacaactcattcttcagtgcctcatgactgaaaacaaaaaaacgaaagcatcttcacaatgaagcttccagatagcaccgttttgctaaaagatacattctcattgttttccaacagtgatggccttccccataaggttaaacaaactaggtgctttgtaataatttattacagtttactctatcgcatttctgtaacatgaaatgcatgcccttccttcagggngaagactgtggntccaggttaaaaaaaaaaaaaccattatttaacccactttgaaactgtcagtcctc

SEQ ID NO: 51418 - DNA, 845 bp, Homo Sapiens
  misc_feature (755)..(755): n is a, c, g, or t
ctggatgaccatgtacctcttcggcaatgtcaagctgcagcagggggatgcctggaacgaccccaccttggccatcacgctggcggccagcggctgggtcttcgtcatcttccacgccatccctgagatccactgcacccttctgccagccctgcaggagaacacgcccaactacttcgacacgtcgcagcccaggatgcgggagacggccttcgaggaggacgtgcagctgccgcgggcctatatggagaacaaggccttctccatggatgaacacaatgcagctctccgaacagcaggatttcccaacggcagcttgggaaaaagacccagtggcagcttggggaaaagacccagcgctccgtttagaagcaacgtgtatcagccaactgagatggccgtcgtgctcaacggtgggaccatcccaactgctccgccaagtcacacaggaagacacctttggtgaaagactttaagttccagagaatcagaatttctcttaccgatttgcctccctggctgtgtctttcttgagggagaaatcggtaacagttgccgaaccaggccgcctcacagccaggaaatttggaaatcctagccaaggggatttcgtgtaaatgtgaacactgacgaactgaaaagctaacaccgactgctcgcccctccctgccaacacacagacacgtataccagaccaccctcatcccgcaactaagcaagctaatgcaatagataggctcctggaatgtgctggnagatgttcatctctgggtagacaaacaatccactgtggcaactgtgtgtgagtgggctcatctacctctcacaggcgacagtacttgaaa

SEQ ID NO: 51419 - DNA, 772 bp, Homo Sapiens
  misc_feature (607)..(607): n is a, c, g, or t
  misc_feature (610)..(610): n is a, c, g, or t
  misc_feature (617)..(617): n is a, c, g, or t
  misc_feature (629)..(630): n is a, c, g, or t
ggccctgcagaaaataagcacagaaaattataatgtaggtgatcggagctctttcctttgatagagagaacagccccaatgatcctggctttttcactgaacgtatcagaatacatggatgaattggggtaaataaggttttaattcagatctagaagaaagtattgtacgtttgaatgcagatttttatccacagatagttgtagtgtttagacatgacaggacctatcgttgaggtttctaagacttactatgggctgtaaacctgttttttaaaactattttagaaacctgagacttgccgtctggcattttagtttaatacaaactaatgattgcatttgaaagagattcttgaccttatttctaaacgtctagagctctgaaatgtcttgatggaaggtattaaactatttgcctgttgtacaaagaaatgttaagactcgtgaaaagaattactataaggtactgtgaaataactgcgattttgtgagcaaaacatacttggaaatgctgattgatttttatgcttgttagtgtattgcaagaaacacaggaaaatgtagttttgtttttataaaaccaaaaattggaacgtaaaaaaaanaanaaacaanccaaaaacaaanntccctgttcggcccgccctccggcccttccaaaaaaccttttctaaaaccattcccttttgggccgcccgcgggcccccaattaagggtaaaaggtgagaacattgggttcaataaagcttggtttttttccctaagagaaa

SEQ ID NO: 51420 - DNA, 619 bp, Homo Sapiens
  misc_feature (605)..(605): n is a, c, g, or t
tgagccagggttttttggcctaaagccagcatttcctcagtctccctttgtggttcgaaggatatggactattgcaatacatttcttccttcaaatcctgccactgttttgttggcccacaactaataggacctcaaaataagccatgctgctttgcacacacactagccttcttttgtacttttcattctggatgggcttggccaaaacaggctcaggccaaagacctcccaagctgtatgtacttccagtatcctgaaacagtgtttggtgacataatgccaagggtaaacaagcctgatttaggcactgctttatccaggggcttcacccatgaaattaataaaacttatctgagtcacttgaaacttggttcccagaaaacacatttctggtttataatctccttttatgctcacctgacattaattatctgtccttgatgatgtgtttaaactgagtagcagaaaacagaggccacactttctgggaaattttaaaggaagaaaccatttttaatgagatgaaaatatttaacgaatttaaaaagctaatgacaattttgagaaaaggtttgggatgtatattgctatgtaatttaatanactgattttatgga

SEQ ID NO: 51421 - DNA, 785 bp, Homo Sapiens
  misc_feature (483)..(495): n is a, c, g, or t
  misc_feature (497)..(503): n is a, c, g, or t
  misc_feature (517)..(518): n is a, c, g, or t
  misc_feature (554)..(555): n is a, c, g, or t
  misc_feature (605)..(605): n is a, c, g, or t
  misc_feature (641)..(641): n is a, c, g, or t
gggaatcctattgattattcaaaaattcaggctgatttgtcttttatcagaggtaggattctgttttatagtatagaatctactttatccttcctttgaatagttcctttagacctgtgaaatttcttcactacatttaatagttctcctatttcccgctcccccatatcaattttccttttgtctccggggctgagtaaataaacatgttctgtcacaaatagcagcaccactttggattgattttgctctccaggacatcagcacatggccctgatcagcactaccacatccaaacataagtcactgaaaaacacttaatatttatgagttggtaatgacaagggacattgtataaagtactatttgctagattcatgcctcaaaagttattataaacagacctttattaaacacatcttgaaagatgtagaagtccctctatagtctagtatagtttacaatagaagttgtaagaccctnnnnnnnnnnnnngnnnnnnnaacatgggtcggcnncgcctcggccccttcgaagaaagcttttctagaacnncattcggtttgggcgccgcggggccccagtagggtaaagtggaacatggntcataagctggttttcctagggagaatccctgggtncatggacttaagtggcttgggaattcctcacccaaataaaaaaaaacgccccggccgggcaaacccgaaacgttttcttgaacaaaatccccagaatggggaattttctggagggtccatttactggggaatccctattcaacc

SEQ ID NO: 51422 - DNA, 932 bp, Homo Sapiens
tcatcggtcaggctcctgctgaagcctcccctcctcccatagctccaaaacctgtgacaattcctgctagtcaggtatccacacaaaatctgaagactttgaaaacttttggtgccccacgaccatactcaagttctggtccttcaccgtttgctcttgctgtagtgaaaaggtcacagtctttcagtaaagagcgcaccgagtcacctagtgccagtgcattggtccaacctccagccaacacagaggaagggaagactcattctgtaaataaatttgtggacatcccacagcttggtgtgtctgataaggaaaataactctgcacataatgaacagaattcccaaataccaactccaactgatggcccatcattcactgttatgagacaaagttctttaacattccaaagctctgacccagaacagatgcgacagagtttgctgactgcaatccgttcgggagaggctgctgccaaattgaaaagggttaccattccatcaaatacaatatctgtgaatggaaggtcaagactcagccattccatgtcccctgatgcccaggacggccattaaatgttaccctgccacaccactgcacttcacttccacttcagaccaacttcatactaatggaacattttggcaaatgtatattcagatgtacactaatatattatctattaaaatattagaatttgtgttgtggcttttaatgccagaagaaaagttaccagaatttataatttatagtaattttttgatcttttttttgccttaagagttgaatatgctgctttagaactttaaaacaaggtgtaaatgattttcatttttttacaaatgaaaaataattcctttgtattgatttcacttaccagcacattctctacaatggtgacttagamaaaagtataagattcatagacttta

SEQ ID NO: 51423 - DNA, 918 bp, Homo Sapiens
gggggcggcgcccgacagaggcctcctgatccaggactggcaggattgatcccacctccaagtctccgggccaccttctcctgggaggacgaccatctctacccctagaggactgtcactctagcatctttgaggactgcgacaggaccgggacagcaggccccttgacagcccctcccacaggatgtgggctctgaggcctaaaccatttccagctgagtttccttcccagactcctcctacccccaggtgtgcccccttagcctccggaggcgggggctgggcctgtatctcagaagggaggggcacagctacacactcaccaaaggcccccctgcacattgtatctctgatcttgggctgtctgcactgtcacaggtgcacacactcgctcatgctcacactgcccctgctgagatcttccctgggcctctgccctggcctgcttcccagcacacacttctttggcctaagggcttctctctcaggacctctaatttgaccacaaccaacctgggcttcagccacatcagtgggcactggagctggggtgcacatggggcctgctcaccttgcccacacatctccagccagccagggccctgcccagcttcaatttacagacctgactctcctcaccttcccccctgctgtccagagctgaacatagacttgcacttggatgtcacctggagtgtcacatgggagtgttatggcaacatcataccaaagcctactgttgcacatggggcccaaaccagtaaacagccaccttcttggaaagggaattgcaagggctttggggggtgatgggaaaagaactttttacaatggataccaatttaacctgccctggaaagggcataggtggggaaaaaaaaaaaaaaaaaaaactccaagggcattctttggcgggtg

SEQ ID NO: 51424 - DNA, 905 bp, Homo Sapiens
  misc_feature (897)..(897): n is a, c, g, or t
tgctgaatgttgtttttttgcatgaacataagatagaaacaaaaacttctcatccagttaactagagtgaatgtagggagaattgttttgcttgtaacatggagagtttattttcaagtgaggaaagagaaaaaaattactcagacttgttcctggtgaagtgcattctctgtttgtatactttttgatggagaaattgatctatagaactgcttaattttttgaggcatttagacagcaatgaaaggtagttctccacaggacaccgaatcaaaaggagagaccagactctggcctcatacccagcctatttgaaacaagctatctagtttctcctgcagacaccttgtcaacaacatgcaacagtgtcaggtgccttgcaggaaaataatctgagtcccaagctagcctgtgctcatccacaatcacaatgaacatgtcaaggaagaatttgcagagactcaagggaagcacaatgggataaggtaatcactttcagtgaaaaactgttttcttgaaaacaggcttggacacaattgaaagctggcttcctgcaaacacaccaagagtctgtaatctagcctatccattatatgtcctttattattcatgatatcctattcttctaccttgttgcctggtaactttttctgaggactgagtttctgcagcgatgtggtgcactcttcctgtgatgaggaaacatctgggcccccttctgcaggctttggaagatgatgtgtcttgtcaaggggtaaagggcaaatggatttaatttctgcttaaaactatcatagacgttccaaatagaatatgtaaaaatttctctgtattagaaaaaagaaacgtgataccaattggaaaatttcccttttccttaattaatccccgaaaagnctgtcaaa

SEQ ID NO: 51425 - DNA, 771 bp, Homo Sapiens
tctagcgaggtgacagcgtagaaccagatctctcggcttccgttgagcaccaagcaagatggcagcttccgagacggttaggctacggcttcaatttgattacccgccgccagctaccccgcactgtacggccttctggcttctggtcgacttgaacagatgccgagtcgtcacagatctcattagtctcatccgccagcgcttcggcttcagttctggggccttcctaggcctctacctggagggggggctcttgccccccgccgagagcgcgcgccttgtgagagacaacgactgcctcagagttaaattagaagagagaggagttgctgagaattctgtagtcatcagtaatggtgacattaatttatctcttagaaaagcaaagaagcgggcatttcagttagaggagggtgaagaaactgaaccagattgcaaatattcaaagaagcattggaagagtcgagagaacaataacaataatgagaaggtcttggatctggaaccaaaagctgtcacagatcagactgtcagcaaaaaaaacaagagaaaaaataaagcaacctgtggcacagtgggtgatgataacgaagaggccaaaagaaaatcaccaaagaaaaaggagaaatgtgaatataaaaaaaaggctaagaatcccaagtctccgaaagtaccaggcagtggaaagactggggccaaatcagaagatgtaggttcctccaaaaaaggtttctggctagaaaacaagcccttggtttaaaaggcaaaaaa

SEQ ID NO: 51426 - DNA, 618 bp, Homo Sapiens
ggttcccttttgggccatcaagaacagctggggcactgactggggtgagaagggttactactacttgcatcgcgggtccggggcctgtggcgtgaacaccatggccagctcggcggtggtggactgaagaggggcccccagctcgggacctggtgctgatcagagtggctgctgccccagcctgacatgtgtccaggcccctccccgggaggtacagctggcagagggaaaggcactgggtacctcagggtgagcagagggcactgggctggggcacagcccctgcttccctgcaccccattcccaccctgaagttctgcacctgcacctttgttgaattgtggtagcttaggaggatgtcggggtgaagggtggtatcttggcagttgaagctggggcaagaactctgggcttgggtaatgagcaggaagaaaattttctgatcttaagcccagctctgttctgcccccgctttcctctgtttgatactataaattttctggttcccttggattcagggatagtgtccctctccatgtccaggaaacttgtagaccacccttttctaacagcaactaaagaggtgtccttgtaacaacacaaccacacagaaaaccc

SEQ ID NO: 51427 - DNA, 935 bp, Homo Sapiens
  misc_feature (595)..(595): n is a, c, g, or t
  misc_feature (779)..(779): n is a, c, g, or t
  misc_feature (890)..(890): n is a, c, g, or t
gggcatccaacgcaatgatgaacaacaatgaccttgtgaggaagaggaggcttgcggacctgactgggcccatcattcccaagtgccggagtggtgtctagtgtgtggcggtggagtccatgcctttgaactggatgtgttctattgatgacctgtgctctgcaggggaaaccagaaggcaaaatgctggcagcatgaaacccttttgtggttcagttctttatgcactaaggttttaggttgactagtggttgtagttgaaaattttataaaataccgttaatgtgaagtttttctttagtcacagaagttgaatctggttattatttaaaaactagaagcccccaaaccagcagatcttactgaagatgatgttccagcagcagcgacttagccccaggagcccagtttcaatggccttgctgtgtggtgtttcaagtgcatttaaaatgtgtgacacagaaacggcacactcttccacatgcttttgaagtattataaaacactttattacaaatttgtcttagctattagcaaataaaactgattatcattctttattaaccctccttggaattttgaaaacctcgattanagttgccaaattgattactggatccagaacacaattttcccctcagaacagatagacagactgaagccactgaactctgccaggagtcaacatgagattccttttgctggatatgcagaaatgataggaaaaaaaccaatggtgaaaattttcagtttcaaaaaccaaccctttcattaccaantcccagcaacaaacattgtccctgagtgttcttttagaacatttggggatttatgtacaattttatactggaggttagacctttttcccttatgaatgcccacccttatgnatggatgtgaaaaatctacggccaaataacttttgaaaaacacct

SEQ ID NO: 51428 - DNA, 569 bp, Homo Sapiens
ccgccgcgtgctggaggagggcagcgtggaggcgcgcaccatcgaggacgccattgcagtgctcagcgtggcggaggaggcggccgaccggcacccagaaagacgcatgcgggcagccttcacagcctttgaggaagcccagctgccgcggctcaaacaagagaaccccaacatgcggctgtcgcagctgaaacagctgctcaagaaggagtggctccgctctcctgacaaccccatgaaccagcgggccgtgcccttcaatgcccccaagtgagcccagaacttggggagccagttcacccacgggtggtccaggtcacgactctgcacgcccttaggccaggtcagctgcgagggtcacagagcgttccgggggccaaggcgccgggccctggggccatgctcttatcaccagccacccgtcctcccgccagagggtccctgccccgagtgacaccccatcccctcccatcccccggcgcgtgtgtgtagagcctcagggctgagtgcccaataaaggtggcggcaaggctgcggtgaggcaaaaaaaaaaaaaaaaaaaaaaaaat

SEQ ID NO: 51429 - DNA, 1082 bp, Homo Sapiens
ggacgcgtgggcatggcgattccaggcgctgaacaagctcccctggacccttgggcctgcatctgactcccagctgcagagtcagaagctgagtccaggcaactgcttggccactcccgatcgctcctccctggacacccggttaccaaagtcagcaaagaagatgcggtaatcgccgcctgatctccacatggtgaacacaacactcccaccaacacctccttgactggtcggtcttcagcaccgggggtgggcaggcaggtgttctgtgttgacgagaattgcacaggctaaacacaaacacggaaccagagtgagaacacctcactcacggcagcccaggctgctccctaccaggtgacggagcgcgccggggctgtgggtgccaggggctgagtgctagggactcgtcatgagtggggatccccacgttcctgtcactgctgtcaaacagaaggtaaacagtcttatgaatgtatttccttaggaaaacttgtaaaaactttcattaggatatctatttaatactgaacttggcctacttgtgatagactataaacaaattgaggaaatcactatttctcacttctgtattttctcaaaaataatttggttacagagttcaatatactgtgtaccattgatcttctattgtgaaagcaagaatttcatcagaatatttaaattatgagtgaaaatgggcactgtacattgcagtatacttttatcaaatctgggtaagctaatcccaaatggcgtgcctaatgccctccagtgggagtgggcagggccgaccggggtgccatcacgagatctgtacagtacctgacccacctctacaacactcaccgggcgcaaagaaagacaaccaacacaaaaaagcgggccgcggcaaaaaccacagaggaccaactagagacccacattgaacaagaccccccagagggcaaacaacagagacgcggacacaccagggacacacgagcagcgacgacaagagggaaacgaccagccaccccgcagcaccgacgaccccggatcgtcgtacgaacgagacagcagtaacctacaccgacgccggc

SEQ ID NO: 51430 - DNA, 762 bp, Homo Sapiens
ccccaatcacctcatctggctcatcttcttctactggctcttccactcctgcctgaatgccgtggctgagctcatgcagtttggagaccgggagttctaccgggactggtggaactccgagtctgtcacctacttctggcagaactggaacatccctgtgcacaagtggtgcatcagacacttctacaagcccatgcttcgacggggcagcagcaagtggatggccaggacaggggtgttcctggcctcggccttcttccacgagtacctggtgagcgtccctctgcgaatgttccgcctctgggcgttcacgggcatgatggctcagatcccactggcctggttcgtgggccgctttttccagggcaactatggcaacgcagctgtgtggctgtcgctcatcatcggacagccaatagccgtcctcatgtacgtccacgactactacgtgctcaactatgaggccccagcggcagaggcctgagctgcacctgagggcctggcttctcactgccacctcacacccgctgccagagcccacctctcctcctaggcctcgagtgctggggatgggcctggctgcacagcatcctcctctggtcccagggaggcctctctgcccctatggggctctgtcctgcacccctcagggatggcgacagcaggccagacacagtctgatgccagctgggagtcttgctgaccctgccccgggtccgaaggtgtcaataaagtgctgtccagtgacaaaaaaaaaaaaaa

SEQ ID NO: 51431 - DNA, 642 bp, Homo Sapiens
ggactacaggcccacgccaccgtgcctggctggacatgtaaatttgaagtgaatggttaaacatccagctagctgaaagcatggcagaccctaacagaaaagctacagtgtgtttttgcagctatgaagtgaatggtttcctggggaaaattgtgactttgtataactgttgttgaaaccagaataaattatatttcacttgcatatgcataaattattaaaattttcagaagtcagtgatacagaagtactattttgcaatgttaatctgtttgagtctttggagaaagtggtttcattgtaggtacatagtgcactgttaatattttaaacaagtagttcactcttccatttaagggatagcagttccttgtataaaatgactggatgtgtataaaggaattatgttgtcatgtgcctttaaccagctttagtaattactataatctcatatttatgatagttttgttaggtgacaggaccaaatgaaaatattttatgttttctcatcactttagattttatcattatgtacattactgggtttttagcatttcctaatgtgaagttttaatcacttttaagtatacatttttttctgtatcatttaaataaaatatttttataactttaaaaaaaaaa

SEQ ID NO: 51432 - DNA, 883 bp, Homo Sapiens
ggcaacaagtgatctggaacactatgacaagactcgtcatgaagaatttaaaaaatatgaaatgatgaaggaacatgaaaggagagaatatttaaaaacattgaatgaagaaaagagaaaagaagaagagtctaaatttgaagaaatgaagaaaaagcatgaaaatcaccctaaagttaatcacccaggaagcaaagatcaactaaaagaggtatgggaagagactgatggattgggatcctaatgactttgaccccgagacatttttcaaattacatgatgtcaatagtgatggattcctggatgaacaagaattagaagccctatttactaaagagttggagaaagtatatgaccctaaaaatgaagaggatgatatggtagaaatggaagaagaaaggcttagaatgagggaacatgtaatgaatgaggttgatactaacaaagacagattggtgactctggaggagtttttgaaagccacagaaaaaaaagcaattcttggagccagatagctgggagacattagatgagcaacagttcttcacagaggaagaactaaaagaatatgaaaatattattgctttacaagaaaatgaacttaagaagaaggcagatgagcttcagaaacaaaaagaagagctacaacgtcagcatgatcaamtggaggctcagaagctggaatatcatcaggtcatacagcagatggaacaaaaaaaattacaacaaggaattcctccatcagggccagctggagaattgaagtttgagccacacatttaaagtctgaagtccaccagaamttggaagaaagctgttaamtmaacatmtatttcatmtttttagmtmmmttmmtttttctctgcthmatwaatattttaaa

SEQ ID NO: 51433 - DNA, 897 bp, Homo Sapiens
cgttctgcagccttaaggttgaacatgagtgcacgtccatgtcagtgctgtgggactcctgtgcgtgcctcggactgcgtgtgtcggcgggacgcaggcacacgtgggtgtgtgtgcatgtgtgtttgtgtgagggcagcgtgtcctccagtgtgcatggtgtgtgggcttgggccccatccctggcccgagcatttcatcctgtgggggaggggtgctgacctagtgggaggagccccactgtgatccatgagctgccctgcccacgcctcccctccctgtagcaacacctctgggtgtttggagtttagcttttgtgggtttgctctccctatcccatctcctgtactacacagttcatggcagggtggggaggggtggggttggttcgggtgggtgagggtctttttcctctgtgtgcgatgttgttatctgacagttctccgtccctactggcctttctcctcgtcttcatatttgtacggtacaagcaataaagacactcatttcagaccagggcccagcctgcactcacgccagcccaaccactctgggctttgccttggtgatggagtcagacccctgggccccagctcctcctgtactagccgttcccttcagcaaagagggcactgagctcagggtgacggcagcttggggtgtgtgcaaggaactccaggctgaaaaagggggggttggaccttggggcttctggggcttaagggggtatggggaaaagcttccccccccatggtggggggtgggcgccggaaaataaaaatcaactcccggggcccccccaatggctggcttcatgggttaaaaaaaaccgctggcggtttgggaacggtaacccacggcccttgcgaaaaaaatccctggggttttaacccccca

SEQ ID NO: 51434 - DNA, 719 bp, Homo Sapiens
  misc_feature (41)..(41): n is a, c, g, or t
gccttcgaggcacgtgaccgcaacctgcaagagggcaactntggagcgggtcaacttctggtcagctgtcaacgtggcggtgctgctgctggtggctgtgctgcaggtctgcacgctcaagcgcttcttccaggacaagcgcccggtgcccacgtagcccctgccatggaaggaagaacgggacaaaggaggggcagcagggtgtgtgcatatgagacttgggggtccctccccaattttagtttcctgccaaaacgggagtgtgcagtcagggcctgcggtctggccccatgagtctccttccgtcctcagcgggcagggaacacctctggcttgtagaagggacggctcagtggctgcaccgacggtcctggaaatctcacatggtgggcactgcagcgttggaacgtgagcctcggatttcctggcccctctactgtaaatgtgccttagcctaagcctcccatcctgtgttagcgttgcctggtgcggggcagggcctaacaaggaaacctgggccctccaagccaggttgaggtctggtaacagaatgccaggaagggggcctggaagaccacctgccccggcccctctcctgcaggggccccacacaggcatgagggatggcccggccaaagtctaggcagaagcctcctataacaaagggtggtgttggcctgggcattggagtccataaattatggtcagaaaaatcaaaa

SEQ ID NO: 51435 - DNA, 499 bp, Homo Sapiens
tttttgtaaagaaatatttaattgtattttgtgtttatacaggtatttcacacaataatttgttcttaatgcagccactataacttgataagtcattgcactatttaaaaagttttagtaatatcatgaatttaatttgcttaagatttagtacatttcagaacttttgaacttttgacaaattgcattggaaaaagaagtctgttaatagtgatttagtctccccgcctcattcccacccccaacaaagcactatcattttcatttggaatgggtattttctgtttcatgatgtattttcaaatagagttcaggatctgcaattcagttcaacacaagtttgttgagctttaaaatgtatttgaagtaatatttaaataggcatttaaaatttcaaattagatgttaaatttatgcatagtaattttgcactgtaaaataattcccttctcccattccttgtctgccattctgaatatgcttattaaaatattttttt

SEQ ID NO: 51436 - DNA, 699 bp, Homo Sapiens
  misc_feature (605)..(605): n is a, c, g, or t
  misc_feature (675)..(675): n is a, c, g, or t
ctcgcgctacctgccagccccgggaggtggtggtgcccttgactgtggagctcatgggcaccgtggccaaacagctggtgcccagctgcgtgactgtgcagcgctgtggtggctgctgccctgacgatggcctggagtgtgtgcccactgggcagcaccaagtccggatgcagatcctcatgatccggtacccgagcagtcagctgggggagatgtccctggaagaacacagccagtgtgaatgcagacctaaaaaaaaggacagtgctgtgaagccagatagggctgccactccccaccaccgtccccagccccgttctgttccgggctgggactctgcccccggagcaccctccccagctgacatcacccatcccactccagccccaggcccctctgcccacgctgcacccagcaccaccagcgccctgacccccggacctgccgctgccgctgccgacgccgcagcttcctccgttgccaagggcggggcttagagctcaacccagacacctgcaggtgccggaagctgcgaaggtgacacatggcttttcagactcagcagggtgacttgcctcagaggctatatcccagtgggggaacanagaggagcctggtaaaaaacagccaagcccccaagacctcagcccaggcagaagctgctctaggacctgngcctctcagagggctcttctgcca

SEQ ID NO: 51437 - DNA, 575 bp, Homo Sapiens
cgcgtccgcctggcccctcagggtccctggtggcagctcacctctcccttggattgtccccgacccttgccgtctacctgaggggcctcttatgggctgggttctacccaggtgctaggaacactccttcacagatgggtgcttggaggaaggaaacccagctctggtccatagagagcaagacgctgtgctgccctgcccacctggcctctgcactcccctgctgggtgtggcgcagcatattcaggaagctcagggcctggctcaggtggggtcactctggcagctcagagagggtgggagtgggtccaatgcactttgttctggctcttccaggctgggagagcctttcaggggtgggacaccctgtgatggggccctgcctcctttgtgaggaagccgctggggccagttggtcccccttccatggactttgttagtttctccaagcaggacatggacaaggatgatctaggaagactttggaaagagtaggaagactttggaaagacttttccaaccctcatcaccaacgtctgtgccattttgtattttactaataaaatttaaaagtc

SEQ ID NO: 51438 - DNA, 722 bp, Homo Sapiens
atttgtctctaaaagtcttcatcgctaaaagataccataatttgctgaggcttcttaagctttctatgttataatttatatttgtcactttaaaaaatccatttcttttagaaaaaattagggtgataggatattcattagttaagatggtaacgtcattgctatttttttaacatcctctttagaggtaatttttgttaacataaccaaaaattaaattgaaacaaaatgtcccaactaagaaaatatatagagcattttatttttttttagtgttgtaaaatattaacctctgtgagatcctttgtatcttaatgcattacctttacacatatttattcttattttctctcctttcagagtttacatttttatatttaatttactatttcagatttttaaaatagtatagaaaaaagtaggagtgatagagaacaaaaatactcttatacagtgcaacccaaataccgcgaatgcatcagctaaagcagcgtgtaaataggagtgatgagaaagttaatggagtattttattttcaaagttcctgataagcattggaaagaaatcgacatggataatgaagatttcctttttccttgcctattttttcattgtaaatatttatatactactgaccaagatgttggggtgggggggattgttttttgtaaaaatgtcattatcaggtcacataaatctgcctttatgttgcataagtgaaa

SEQ ID NO: 51439 - DNA, 585 bp, Homo Sapiens
ggagatcctgacagtggctgccatgctctctgtcaacaactccatcttctaccgaccaaaggacaaggtcgtccatgctgacaatgcccgtgtcaacttctttctccctggcggtgaccacctggttctgctaaatgtttacacacagtgggctgagagtggttactcttcccagtggtgctatgagaactttgtacagttcagatcgatgcgccgagcccgggatgtgcgggaacagctggaagggctcttggaacgtgtggaagttggtctcagttcctgccagggggactatatccgtgtacgcaaggccatcactgctggttacttttaccacacggcacggttgactcggagtggctaccgcacagtgaaacagcagcagacagtcttcattcatcccaactcctccctctttgagcaacagccacgctggctgctctaccacgaacttgtcttgaccaccaaagagttcatgagacaggtactggagattgagagcagttggcttctggaggtggctccccattattataaggccaaggagctagaagatccccatgctaagaaaatgcccaaaaaaat

SEQ ID NO: 51440 - DNA, 895 bp, Homo Sapiens
acaatgctcccagttctgttaggacaggcatactgttactttgcaatatccactttataaaatagctcctgcccagtggctcttggttcctgtcaaatgtggacctgtagtttaagaatgacaggtggttagagacccagatatttaaaaataggtgttcaataagggaatactgattgtgcattgtatctggatagcatgcctaattgtgcatttctgaaagttaccaattcaaaatgtaattggaacagttatctttgattagacaagcctgggaagagaatgttgaggtgcagagctcaccagccaagttcatgcccctctcgggcctttgtggctgagaagtgggacagaaagatgattaaggtaatgtgtcctccctgtagcattgtccagggccgttgtgtagatatttgacttcactgacagaaaagaaaccagggagtttgtagagactgtgcatttttagtataacattttcaccatctgatatggtttggctttgtgtccccacccaaattgcatctcaaattgtaatccccatgtgtcaagggagggacctgatgggaggtgatggacctttggggggtggtttcccctatggtgttatccttataaagagggaattctccccagaaccgctggttttaaagacagcagtttccccctggttgccctggccctcccctggtgccttggggaaaaaggccttggttcctcccccctccccggaatggtaaagtttccccgaggggccccccccgcccagggtggatctccggccctatttcaccccctttgtttctcccagccatctcccgctctccccgtacactaccctttcatggccttcgggcactaccccatccaataaccgcctcacattggggccact

SEQ ID NO: 51441 - DNA, 572 bp, Homo Sapiens
ggaggtgaaggagattctaaagtcctctctggtaaacattccacgggacactgtcaacctctataccagctctggctgcctctgccctccacttaatgttaatgaggaatatatcatcatgggctatgaagatgaggaacgttccagattactcttggtggaaggctctatagctgagaagtggaaggatcgactcggtaaaaaagttaagcgctgggatatgaagcttcgtcatcttggactcagtaaaagtgattctagcaatagtgattccactcagagtcagaagtctggcaggaactcgaacccccggcaagcacgcaactaaatcccgaaatacaaaaagtaacacagtggacttcctattaagacttacttgcattgctggactagcaaaggaaaattgcactattgcacatcatattctattgtttactataaaaatcatgtgataactgattattacttctgtttctcttttggtttctgcttctctcttctctcaacccctttgtaatggtttgggggcagactcttaagtatattgtgagttttctatttcactaatcatg

SEQ ID NO: 51442 - DNA, 647 bp, Homo Sapiens
gtgatactcaatgccttcagcaaatcagagactagcaagctgggaaaacaaagctcctgtgaggttagcctactactctctgaagacgggaccacgcccaaatccaagaagactcaagctggcctttccccttatccccagaaacccagttcctcaaaggacagtgaggacaccagcaaagagcccagcctttctacccagacgttacctgtgatcaagtgctctgggcagacttcaagactttctgcttcctccactttccagtcaatcagtgactccctcctggctgtgagcccataactggcctctctccaaaagcctctgcccaggagcatgggcatcagctacctcacgggaaccagcctgctgttcagaccagtctgaccccctacccctttcaccctgtccctcctcagagtattttttgaagtggttgcattatagagatgggtatttgtagggccggagggatggtagtgatggggagaaggtgaggaagggtcaccctctgtcacctgtctgcctggctggcacctcatatctcagcagagaagccagtggtggccacgcagcttataaagcaggttttggtttctaaagtagatcagacggtagtcggcacgccgcgctcgtcgtgctcactaaac

SEQ ID NO: 51443 - DNA, 778 bp, Homo Sapiens
  misc_feature (706)..(706): n is a, c, g, or t
  misc_feature (720)..(720): n is a, c, g, or t
  misc_feature (752)..(752): n is a, c, g, or t
  misc_feature (754)..(754): n is a, c, g, or t
  misc_feature (774)..(774): n is a, c, g, or t
aataaatccctttcagcaaaattgcggaggatcattcatccactagggccccacctgaggcacagcgctgactcatcacggtggtaccagtaggtcagccatctggaaacagaagtggccctaattgggccaaaatgtggtaagactcgctggcctcaggcagggccaggccagttccatcacttctctgcacacctattcccagattccatccagagcaaagctgatgtttatcgtctcattgtacttaggctttcgtactttaaaaaattatgactttttaaaaataagccttcagcagacagaagtgaagaaatttagcctgggttgcctcagcaacaaagtctgcggttcctaagagccacatgttggggaagtggggtgacccaaacttggtgacataggttgattgatcagaccctcagccttacaagcaagagctcatgcagatccacagagccatgcacatcctgtcttcctgaccttcctcaggtggcaccacctgcgccccatggacctgctgtatcggtgtcatgtggaggtctgatgaatcctttaaaacctaactgtgatgtcgtaaatgtaactgtgctacctttatatctactgaagggcagcgtctgcatccgagggaaattcaacatgaaacaaccatcgttttagttgcactcagtctgtccatatgacatacacatgaagtgaatgnttccttatgttttnaggtctacaatggtttagtacatgtaaataangnaaaaatttgataaatatggnaaaa

SEQ ID NO: 51444 - DNA, 941 bp, Homo Sapiens
gtccaccctgccccagagtgctcctaccctcttggtccttttaaagccaaggtgcgatttgggcacctgactgtccagtttaccttaacaagtttgggaatccatgtgatgtttttgatacttcttcctcatttgggacattcagtaggagcatttgggcttccggggcccctgagaccaaagaagaggggccaagtaccctgggaaatcagctgaaggtcaacaaaagactggttgtgagttgcagctgtcccgaaggccccagttgggaagccatgggcagtccagatcaagccaccacgtgccctacgatggcctaacaggagtgcccattggcagattacacatgtaaatatgacctcagacaaaaaggaaccagaggcccaagggcaataataaggtggaatttgcaggtcagcccaggaattggcagaggaagtaggtgtctgataaccctttgtggagaatgagattccccccacctgtgtgagaaaaataaacagctctggagtcttgttcctgactccagaggaacgagagcattccaggaaagagagattccctggaaaattgacaatgtgaatcctagggggaaattggggattgtgtctttccctgttgaaaactgtttggactgggaataaatatcttcaggaaacataaaaaacaagaacaaacacaaaaaacaaacacaaagataagagagaaacaagaaacatcagaggggggggcgcgaaaagaaacccgcagagggggaccaaaaaatcgcggaacacaaatatattgagaaaagagcggcccccacaaagaggagcgacacaataaagagaaagagaaagagcgcagcatattaaacaacgcgaggcaggaaaaacgagcagcaccggaacattcgtgagaaaaccccactatcggggacacacaatggggacacaaccacg

SEQ ID NO: 51445 - DNA, 631 bp, Homo Sapiens
taatagtgagtttcaggcccctgggcattttgtaccatgtaattatcctctggtgatgctgtttctcgttagtggcagtagtgcctccgtctcctagtgataatgctccaagtctatgaactgttaaatcagcattcattttaagaaaagcaactttagtttcaaagatacttttaagcttctaaattgatcatttaaactatttctttaaataagagagccaaattagaggctcatactttagcttgtgaagaagataatgaattttttaaagggaactttctatgcaatgttcaggataaatgcatactgctggccaatcagtgtcatctcctgggtaaattttgatgtcgcattataaagacatgcataattgatggtttctagattatctagtccaaacaatagagtttattttttcttcatctgaaccaacatgctacagtagctaagaagtattaaaactatatacatccatataaagatgaaatatgaactatctcattagaagtcatagttgaccacagacatgttattcttctgaaagagccacattttggttttatttcttgtcacatgatttcttttcttgatggatgaaaaatatgaaaggaaacttttatatctgttg

SEQ ID NO: 51446 - DNA, 833 bp, Homo Sapiens
cgaagaaatttcggcctgaactacctagggcacttcctgctgaccaaccttctcttggatacgctgaaagagtctgggtcccctggccacagtgcgagggtggtcaccgtctcctctgccacccattacgtcgctgagctgaacatggatgaccttcagagcagtgcctgctactcaccccacgcagcctacgcccagagcaagctggcccttgtcctgttcacctaccacctccagcggctgctggcggctgagggaagccacgtgaccgccaacgtggtggaccccggggtggtcaacacggacctctacaagcacgtgttctgggccacccgtctggcgaagaagcttctcggctggttgcttttcaagacccccgatgaaggagcgtggacttccatctacgcagcagtcaccccagagctggaaggagttggtggccgttacctatacaacgagaaagagaccaagtccctccacgtcacctacaaccagaaactgcagcagcagctgtggtctaagagttgtgagatgactggggtccttgatgtgaccctgtgatatcctgtctcaggatagctgctgccccaagaaacacattgcacctgccaatagcttgtgggtctgtgaagactgcggtgtttgagtttctcacacccacctgcccacagggctctgtcctctagttttgagacagctgcctcaacctctgcagaacttcaagaagccaaataaacattttggaggataatcaccccaagtggtcttcaaccataaactttgtgattccaaagtgcccagttgtcacaggtgccataaataattacattttc

SEQ ID NO: 51447 - DNA, 603 bp, Homo Sapiens
acgcgtccggggaatttggcgacgtaattcccgactatgtgctgggccagagcacctgtgccctgttcctcagcctccgctaccacaacctgcacccagactacatccatgggcggctgcagagcctggggaagaacttcgccttgcgggtcctgcttgtccaggtggatgtgaaagatccccagcaggccctcaaggagctggctaagatgtgtatcctggccgactgcacattgatcctcgcctggagccccgaggaagctgggcggtacctggagacctacaaggcctatgagcagaaaccagcggacctcctgatggagaagctagagcaggacttcgtctcccgggtgactgaatgtctgaccaccgtgaagtcagtcaacaaaacggacagtcagaccctcctgaccacatttggatctctggaacagctcatcgccgcatcaagagaagatctggccttatgcccaggcctgggccctcagaaagtaagagctctgggaaagaacccaaggagttgggggaaggagagagccccaaataaacacaacctgagaccccaaagttttaaggtgaaaaaagaaccaaagaccagacaca

SEQ ID NO: 51448 - DNA, 642 bp, Homo Sapiens
ggttccaggatcaggcagcctatagagtgtgagcatctatgtgtagctacccttgttgggtgggctcttagactgatggggtaggatatgaagtgaaagacttcaaatgcaagtaaggtagtttgggctccttaattccaaacatcccatgagtatatcaagatgaataaggaccaagggacctctgtgactcatagaagggctggctgaatcctgaagtagcatagtgggacctggtctacaatttatgcacatgcactgacagccttgctgtgccacgtgtctcaccaagacccagttgggaaagagcgtcatattgccaacaggttgggtttctctggcctccacctgattaatgggccctttatctttggtgtcccctaggagtgtccagttgttttattgctgtattttgttattgcagtacttaataaaaattgttgatagggcccaaaaccctacagaaattctatgtctgtaaaaaccaacaaaggcattggacttgtgtgaatgtacagggtttttttagtagtaattttaaatttaaatgttttaagtgatcatcagtgttcctttttacttataaagttggattcttttttagatttgtataaataaaactgctgctttacactgtaaaaa

SEQ ID NO: 51449 - DNA, 564 bp, Homo Sapiens
  misc_feature (157)..(157): n is a, c, g, or t
  misc_feature (434)..(434): n is a, c, g, or t
  misc_feature (442)..(442): n is a, c, g, or t
  misc_feature (560)..(560): n is a, c, g, or t
atttggaggagtgatcaaataccgaaattgaactttctaaaacctacacatagcatgcgtttaaattctattatataaagccccaagtgctttaccttctaaaacatgcttctctataggtgcaaagttataagatatgtagaagaaaacatccatncagaatcttctggagaatatggtcagagtcttaaacaggcccagtgctgagttctttgtccacttagtcacacatcttttgtgggaatgggaaaggaaggagacagccaaactctgacaaaggcttttccttatagaataacccaaagcctaggtgagggttgatatataatgtcccatgatttaatatatgtggtttgggggaaaggacaagaaaaaactataattccacatataagaaggtagttgcccatttacaagttccagttatgtgtgtnaaacaganaaattaagtaccaaacctattaggaaatttttttaaaaagtggatttaacttaaattactgtggtacttgaggttggctttgggatatggattttctaaaaagtgatggtttattggntatc

SEQ ID NO: 51450 - DNA, 658 bp, Homo Sapiens
ctgaggcacaagccaaaatagatcgttacactcaacagggttttggaaatttgcccatctgcatggcaaagacccacctttctctatctcaccaacctgacaaaaaaggtgtgccaagggacttcatcttacctatcagtgacgtccgggccagcataggcgctgggttcatttaccctttggtcggaacgatgagcaccatgccaggactgcccacccggccctgcttttatgacatagatcttgataccgaaacagaacaagttaaaggcttgttctaagtggacaaggctctcacaggaccctatgcagactcctgaaacagactactctttgcctttttgctgcagttggagaagaaactgaatttgaaaaatgtctgttatgcaatgctggagacatggtgaaataggccaaagatttcttcttcgttcaagatgaattctgttcacagtggagtatggtgttcggcaaaaggacctccaccaagactgaaagaaactaatttatttctgtttctgtggagtttccattatttctactgcttacactttagaatgtttattttatggggactaagggattaggagtgtgaactaaaaggtaacattttccactctcaagttttctactttgtctttgaactgaaaataaacat

SEQ ID NO: 51451 - DNA, 585 bp, Homo Sapiens
cgatgtatgtattataattttttagaaataccaccatcgtgtcacgtcgacgatgccaaattatgttagcgtgagcagaaacaccgtgggggaggaaggcagcagctgaagaaaaaagctcaaatgatctagtcactttcgatactgtacttcagatgcgaaatggatattcgagtggaaacctgacaaagtgcgcctgctttgatgtgaactggtatagacaatgaccagtggctgggtcagtgggatgtctctctgtgagcacaaaggcttatcaaatgacactaaagataagttcaacaaccatcacattggaagggagaaggcgaacatttcatgtttggcgggcatgtgagtgcacaagatggaaagagcgattggagcatcctggtataattacccccattgtgctcttaatggaaatttcaaaggacgggagtattctgttggttggtgtccaggtttgtggcactgttccaagaggccttacacacacacacaaatatataattttctatacatatatatcctctagcttgaaacttttgctcaagtttatttatgtcactggctggctggatccaa

SEQ ID NO: 51452 - DNA, 907 bp, Homo Sapiens
  misc_feature (781)..(781): n is a, c, g, or t
  misc_feature (787)..(787): n is a, c, g, or t
  misc_feature (794)..(795): n is a, c, g, or t
ttctctccctggacgcctctcccctggtctggaatcttccagttctgccagaattggcctttcccagatgctgcaaacttccagttgaacccctctttctgtgtggcccctggggctgcgagaccaaaatccatgagttctgtgtaccctagacctttggaaggtgagagcagggccctgagaaaaggcagccacctcctctccctggctgaacccctgccaccctactcctcaccagaattgtcagtggcctttcaccacagtggtccttcctgcctgagccctgcactgtcccagaccacacagaagtctggtcacctctgggcgcctgggatggtcaccgaagagaagcacgctgtccccgtctctcctggcttctgccagaaaatcgaacaagtgcaattaacacactgttactgccgaagcctgaaactcccaggacttgtccttgatccttccagaaaccaccaggtccggcacttggagccccccggagagggacctcccagccgagccctcaaagaactccatgaaatcaggaactgcttgatgaaatgtatctccttgtacctggaagatgaagcccaaacacccacacctctgtctcccccagggctcgggatgtctccagcagcccggccacgcagcttcccaggtgggctcggggaggtgggagcagggaccatctctgtcccctcaccctcactcccatccactcggagaccacccctcccccagccagatacggaataaaactacagacgcagacgttcgggaaaanaacaanacccccnnaccaaaaccgcaaaaaaaaaaaaggccggccccggcgatctaaaactagcggccttttaaacccgggggggggaaatcccctgaacccacccggccgtggatgccccagggg

SEQ ID NO: 51453 - DNA, 644 bp, Homo Sapiens
tctagatctggtcctgataatcccaaaggactctatgctgatggtggcggttgcaaactttgtggctctgtggaacatttaaagaaagattgccctgaaagtcagaattcagagcgaatggtcacagttggtcgctgggcaaagggaatgagtgcagactatgaagaaattttggatgtacctaaaccgcaaaaacccaaaacaaaaatacctaaagttgttaatttttgataacagctagcactatcatgagttactacctcattgttactttctaaaccaggcccgcttcacgagttagagttgagctcccctgtagccaggactatgctgtagatatcagtatgatctgggtgtggccaaaaacaattttctttattctgtctatcaaatagtacttctaccactgtttggagaaaattgaagaaaagaataagatgattaaatgaattctctaaaagaacatattttaagagacagaacttagacataaccaagtagttgtatacctgattgtaacaatcatcttttataaaagcaaaattatgcataaatgtaaaacacccctaaacaaagggaacaaatgaatttatggttatattgtttacttggctcaaagtatcaatttattattataatagaaa

SEQ ID NO: 51454 - DNA, 969 bp, Homo Sapiens
tcatttatggctttatgtggttttagcactttaagaagtttaattttttgtaatttttaatatgctctttcagtgtatctcagcgggtactccagcttgtggcattcccatgtgactggggagaagacaaaattggtgtttagattctggaggagaaaaaatgagttacaatgtcaggtgtttttaaaaattccttttagagacagtcttttgggaaccaaagtattttactgtaaatctttaaaataacagaattcagtgctctttcatttgttaatgctgtccagatttttcacacagttatactcagttaatactagttttcagaacattagtccaaggctatttcaagttttccattgaatatatgcttatggttaaaagaaaaacgaatggttttataattctgtgtattttgtcatatgccttagcagagtaagtcatttttccattttacttaggaatagctttttcgaactgaaaattcatggtaaaataggatttctatctaatgttatccattgcttatttgtattcaattccattgtctacagtttgcttacctgttgactaagaatgattggggtcactaattggtgcggtatgtgggtcgtaaaaaaaaaaagcaaaaaaaactgtgttggcggggcgggcaaaaatttaaacactttggggccggccgagaatgaacggtcaagttcggaaccgccgaagggtgttcccaaaaggggcggccgaagccaacgcgtggagtcgctaacggacggcaacacccgcacgcgcgctgagagaccacagaccaccaacgatatctgtgcaccatacaccagtcacatcgcactacgtcaacccacgcacacatcagcaccgaccaacctacaccacacacagccatacaagcgaagaccagcagcaccagagacgagcaacaagcccagacaaggagcacacacgaaccgccaccgagag

SEQ ID NO: 51455 - DNA, 641 bp, Homo Sapiens
ggcgcagaacgggcctctccccctcaagtaccgtgtccagccagcctgcaagcggctcaccctagccacggtgcccaccccctccgagggcaccaacaccagcggggcgtccgagtgtgagtcagtcagcgacaaggctcccagccctgccaccctgccagccacctcctcctccctgcccagcccagccaccccatcccatggctctcccagttcccatgggcctccagccacccaccctacctcccccactcccccttcgacagccagtggggccaccacagctgccaacgggggtagcttgaactgcctgcagacaccatcctccaccagcagggggcgcaagatgactgtcaacggcgctcccgtgccccccttaacttgaggccagggaccctctcccttcttccagccaagcctctccactccttccactttttctgggcccttttttccacctcttctactttccccagctcttcccaccttgggggtggggggcgggttttataaataaatatatatatatatgtacataggaaaaaccaaatatacatacttattttctatggaccaaccagattaatttaaatgccacaggaaacaaactttatgtgtgtgtgtatgtgtggaaaatggtg

SEQ ID NO: 51456 - DNA, 502 bp, Homo Sapiens
tcctttggtttgtagaattaggactgaacttttgactcaaattgctacagttgccatcacctttctgtggtaatactactgatatttgcttttctatataaagaaatgttgcctaaggctgtctggtatttcttttcaagggttttccagtatgaatgttaatgttgtcagtgtatgtatgaatatgaaagtgctttgttttgtttgttgctgttttttgtttatgtgtgtgtttttaatttttttgttcttatcagcagtcttgtgttagcactgggtaagctttaattgtcccttagccaatcaaacattaaggactatggaggtcttttttttttttatttaacatgtcattgttcatctattaaatcttgatcagggtttcaagaatgactgcagtgggttttggaaacagacttatcattattgatttgaggtttcccagagatatagttcacagttaattgttgcgctctaatacaactgaccatttaaaattgaa

SEQ ID NO: 51457 - DNA, 902 bp, Homo Sapiens
ctggaccggtccggattctccggatattggaaagatttgccaccctccagaaaggagagacgcaatctcccctccctcccatcccccaccttcgctggaacagcttcctctcactgaacggagacgcccccttggacgaactgcctaatcgtttggttctgaggcctggtttgctcttaattaatatatgaactcctcagaccttaaaccttttcctaagctttctttactgcactggagttctgactccctttgagttgtgtgttactgggggtggggtggggtcatgggttttgttgtttttgggggctaattggtgcatattcaggtaccacctttgacgtgtggctctttctcctgaccatcatgggaagtgtctgctggattccattttctaagagtttctgagggtgaggctcttatttttttttttaagggatcctgtctatttcctgcacttcgagaagaatcaaaatgttcctgaatttcaaatacctcatgcaaaatgtctcctgaaataagggaaaaaaaaaaaaccacaactttgaaaatcttaatgttgaagttagcaatgccgaaaggtttctgtcttaaaaaaaaaaatccttgtacttatcaattttgccccttaggcagtcagttttgttgagaactgtgtcctgcatcctggcgcagaacctacctgatgcggttcctctccacgcatctcgaggcggcgttacctccagattccgtaaagttagagtcacattttttctttgcagcgaaactccctcctgggtgaaaaatgaatttggatattttatttcccttccctgtttttggggaaaacaagaagcttcaaacccaaaaaagcttgaaggggaaatgaaaacacccccctttcaccggaaacctgaaga

SEQ ID NO: 51458 - DNA, 550 bp, Homo Sapiens
ttaaaaagatactttatatggttgaagatgaaatcattcctaaattaaccttttttttaaaaaaaaacaatgtatattatgttcctgtgtgttgaatttaaaaaaaaaaatactttacttggatattcatgtaatatataaaggtttggtgaaatgaactttagttaggaaaaagctggcatcagctttcatctgtgtaagttgacaccaatgtgtcataatattctttattttgggaaattagtgtattttataaaaattttaaaaagaaaaaagactactacaggttaagataatttttttacctgtcttttctccatattttaagctatgtgattgaagtacctctgttcatagtttcctggtataaagttggttaaaatttcatctgttaatagatcattaggtaatataatgtatgggttttctattggttttttgcagacagtagagggagattttgtaacaagggcttgttacacagtgatatggtaatgataaaattgcaatttatcactccttttcatgttaataatttgaggactggata

SEQ ID NO: 51459 - DNA, 624 bp, Homo Sapiens
tattgagtggcatgtgaggaagtagctacaggcaagacaaccagttaggaggatgtcttagttgttgaggaagatgaaggcctgaactaacattgtggtattagtagaggagagaggacagatttttaaagttttaggaaagaaaattgggcaagacttacaagactgattatatctaagaggtaaagatggttctctgggttcctgataaaagtgtctagatagatggtagagggcaattccaagagggcaactccaagatagaaaatttggaaaaagaacaaatttaggggaaacagaagataagcgagttcaggttccagtcatgcggtgttggagatgcctgtgtcatctgatgaagactagtacgcagctggatagcagagtccgaaactcaggtggaggtgaagttatgagggaattatcacaatctagtttggattcatatttcttaaatatgtatgacaacttaccaactggaatgttctagctaatatctcaacttagaatccatctcactaccaatgggcaaacacttgtgttctaaagttacttgcaagtagtttatactgccaacttgatatatatacatgctatagtatgaccattttgtgtacttccaaa

SEQ ID NO: 51460 - DNA, 567 bp, Homo Sapiens
acgcgtccggcccctccagacccctcccaacgtcagggggaaggaaacgttgactttcactgcactttgattcgtctctaaaccatttgctggggattcctgagagcagagctcccagcgggccctgcctcccaagtcccgccgcaaggctacctcgggtgtgtggatgtgcgagggcctcccccgcttgcgaaggggacatgcgtgctggaacctgtcggaactccatgccttcctcgcctgctcacctgctcgacgctggaatcgggacaggtgcaaagggacgcagacgtctgggacagctaaggcccgtgtcaccggagggctccgcacagtcgttctggtttcaacaaataagcaaaactcgggcaagtactgcagctatttggaaatgttttccaaaccacagtctctttagaactaagcctatttgaaacggtcggtgtaggcttactgagatcaggagacagggaggccccgcacatcacacagataaagtcagacaattgtaattaatacttttgctgcctcaagttgttttttaaataaagtactttgaaatgcatg

SEQ ID NO: 51461 - DNA, 655 bp, Homo Sapiens
acgcgtccggcaccacagacctgccaaaggctttccacgtttgtgcagcaatcctcgagtgtttagagaagaggaagatatcctggctggcactctttcagttgacagagagtgacctcaggctggggcggctcctcctccgtgtggccccggatcagcacaccaggctgctgcctttcgctttttacagtcttctctcctacttccatgaagacgcggccatcagggaagaggccttcctgcatgttgctgtggacatgtacttgaagctggtccagctcttcgtggctggggatacaagcacagtttcacctccagctggcaggagcctggagctcaagggtcaggcagggcaaccccgtggaactgataacaaaagctcgtctttttctgctgcagttaatacctcggtgcccgaaaaagagcttctcacacgtggcagagctgctggctgatcgtggggactgcgacccagaggtgagcgccgccctccagagcagacagcaggctgcccctgacgctgacctgtcccaggagcctcatctcttctgacgggacctgccactgcacaccagcccagctcccgtgtaaataatttattacaagcataacatggagctcttgttgcactaaaaagtggattacaaaaaaaaaa

SEQ ID NO: 51462 - DNA, 719 bp, Homo Sapiens
attggcatttcagagctcagcaggctacccctggtttcctggagagttgggctaggcctgaagctccccctcccccacctctgctaggcagcccaggcctggtctgggagacagcccctcaccctgcctgggctcttggccaagcggccttggatggatgaagtcagagaggtggggtgagggtgagcttactcaggacccccagaggaagccctcagcctctgccctccccccacacagggcgggagcccaggcctgttcctggcagctgtggctgcagctgtgctcctgctccctcctggaatgtgcgacaagcccaaatgttccggggaggcggccggggcagggggcttagaagtgctaatatggttctgtgttttgcctgaaacgataccaggttcccctgaatagcaactttacaaggtccatgtgggagggaccaacccagatgccctgctgagtgtccctgaaaccatggcagctccatctgtcaagatggcaggggccggagtgagggggctgctggcttaacagcaggcatctgggcaggccagtcctcaaagcagctcctgaaggtctgtgttgcactgtcaccagtctcaagctatgcctctaatttcaccagggatattgactaagaagacaataaaatctttttctttgtgtaaaacaaacacaaaccaaacaaaaaaaggggggggcgcccaaaaggtttcccg

SEQ ID NO: 51463 - DNA, 904 bp, Homo Sapiens
  misc_feature (15)..(15): n is a, c, g, or t
  misc_feature (44)..(44): n is a, c, g, or t
  misc_feature (46)..(46): n is a, c, g, or t
  misc_feature (749)..(749): n is a, c, g, or t
tccttggcccgtgtngcaggcacggccctgtgccgctccgtggngnagggcagcgtggtgtgcgagtgccgcccagctggaccggcccactctgcgatcaggaggcccgggacccctgcctcggccacagatgccaccatggaaaatgtgtggcaactgggacctcatacatgtgcaagtgtgccgagggctatggaggggacttgtgtgacaacaagaatgactctgccaatgcctgctcagccttcaagtgtcaccatgggcagtgccacatctcagaccaaggggagccctactgcctgtgccagcccggctttagcggcgagcactgccaacaagagaatccgtgcctgggacaagtagtccgagaggtgatccgccgccagaaaggttatgcatcatgtgccacagcctccaaggtgcccatcatggaatgtcgtgggggctgtgggccccagtgctgccagcccacccgcagcaagcggcggaaatacgtcttccagtgcacggacggctcctcgtttgtagaagaggtggagagacacttagagtgcggctgcctcgcgtgttcctaagcccctgcccgcctgcctgccacctctcggactccagcttgatggagttgggacagccatgtgggaccccctggtgattcagcatgaaggaaatgaagctggagaggaaggtaagaagaagagaatataagtatattgtaaaataaacaaaaaatagacttatttttatatggnaagggactattttcatcttttatatataaatatattacaccatctgcgtatatgtaccatatagtgagttatttttaccagttttgggttgggtattggttggggttttaaaaataagtggttaaaatttaggaaaaatagctaataaaatgctt

SEQ ID NO: 51464 - DNA, 606 bp, Homo Sapiens
attttgcaactacctcaggacagaaaagatttatggggattttaaaaatcattgaataactagttaaatgaaattttagctacacactgcctcccaaatattagttgtgcctggttcttgtaatttgattttacagaaaaggaaatgacacttgagatccttggaatgaacacagcttctaaagtgtgcatatacttttttaacgtctcttcttccattacaatgtgtgttttgcaaggacaggttcattttttttagcccactttgtgaactccattgtgcttttttctggtgttttatgcaagttgactactaatgactaatgagaacaataatgaatgcattgttgctgcattagtgtaatgtggtgtggttttgcacttaaaagaggtattcatatgctctagttgtaaatgttcatgaaaatccacttctctactagtcgaactgcttttagtgtctcaccagtggttttacatctgcagagttttgagggctgtgctgacctttgagaggatttgaaattgcttcatattgtgatcctaaattttatattcactatattccctaaagtataccttaataaatattttatgatcaaaaaaa

SEQ ID NO: 51465 - DNA, 612 bp, Homo Sapiens
ttttttttttttttgtttgcaactgcgttttattgaaagaaagagtggaggggttaacttggtcagagccactctatgagttggacttcagtcttgcctaggcgattttgtctaccatttgtgttttgaaagcccaaggtgctgatgtcaaagtgtaacagatatcagtgtctccccgtgtcctctccctgtcaagtctcaaaagaggttgggcttccatgcctgtagctttcctggtccctcacccccatggccccaggcccacagcgtgggaactcactttcccttgtgtcaagacatttctctaactcctgccattcttctggtgctactccatgcaggggtcagtgcagcaaaggacagtctggagaaggtattagcaaagcaaaaggctgagaaggaacagggaacattggagctgactgttcttggtaactgattacctgccaattgctaccgaaaaggttggaggtggggaaggctttgtataatcccacccacctcaccaaaacgatgaagttatgctgtcatggtcctttctggaagtttctggtgccatttctgaactgttacaacttgtatttccaaacctggttcatatttatactttgc

SEQ ID NO: 51466 - DNA, 627 bp, Homo Sapiens
gtacattgtcctgacactggaaaagacatttggaatttactttttgacctggtctgccatgaattctgccagtctgatgatccacccatcattcttcaagaacagaaaacagtgctagcctctgttttttcagtgttgtctgccatctatgcctcacagactgagcaagagtatctaaagatagaaaaagtagatcttcctctaattgacagcctcattcgggtcttacaaaatatggaacagtgtcagaaaaaaccagagaactcggcagagtctaacacagaggaaactaaaaggactgatttaacccaagatgatttccacttgaaaatcttaaaggatattttatgtgaatttctttctaatatttttcaggcattaacaaaggagacggtggctcagggagtaaaggaaggccagttgagcaaacagaagtgttcctctgcatttcaaaaccttcttcctttctatagccctgtggtggaagattttattaaaatcctacgtgaagttgataaggcgcttgctgatgacttggaaaaaaacttcccaagtttgaaggttcagacttaaaacctgaattggaattacttctgtacaagaaataaactttatttttctcactga

SEQ ID NO: 51467 - DNA, 711 bp, Homo Sapiens
  misc_feature (648)..(648): n is a, c, g, or t
atctatcttgtgtgtgcgttagacttgatgagaaggtgtgaactctgcagaaagtctcttcttcatcactgaattcagtcacttggagatgacaacttcaaatgctaacccgatgaccccagaaaaccgtgtgagattcgtaccgaagaaccttgtggaatccctttgcttaggcccaacctggtcgatagctcgagaaagaattttttccaaggaaatgtctcggatatgggtactgtatttgaaagctgttagctttgtcaacacgcattgtccttgtcatttgggccccgagctctgaccctcgtgtctgacgcggccacctctttctggaggggctgaggacagatgtgcctgcttgtggagaccaggctgggcctaagcgaagggtcatcgcagccccagcccggagcgtggagcccttggggggtggtcgggtgggatgtgcgttctccgctcgtggtgatgtcaggagctcctcggagggaacagagcggctgtgtatgcagcctgcaggtttccatacactgaagcttttacctcaactttaaaaaaaaaaaaagaagaaaagatttaaaaaaaaaaaaaaaggagactttttttgtaaggttcggcaattttctacggaagtccagcccgctgtgagtncccgcctggctagcgctgcccctgctgctgctgccgcgccacccttgggaccacttcccgagt

SEQ ID NO: 51468 - DNA, 662 bp, Homo Sapiens
ccacgcgtccggtaacttagtgctagaagtctctccaggctattaccatgggcatttgttctctgttggagctgtaagcagatgaacccaagtagagaagatagatcttggaaggagagatccattgagtccagaagccagatcagcaaatggaggaacctcggaggtgaccagaaagatatccatcggttgcccaaggctgtaagtagtgatggttttagcgatgaataacgtaattggctatgaagtactgtggcagagctgctgttttctgaaggtgagaagccatttttagctcagagcaacccttaagagaacttttggcagattttgttggcattattgaaatatatatagaaaagttgctgattgcaatggttatgggaatggaatttaatgacatttgtaatttattacactcattggtttttattgattatagtattgtctgactttttattttctactatggttcctttagcagaaaagtaacttttgtgcatatattgaagtggtttttcagctatgaattctttagggtagaaatttatttagcaaatgtgaattcttttgagaaagtatgaagttttgcagaaattgactgtgaaatgtcagagaaaaataaaagtcacttacttgaaacctaaaaaaaaaaaaaaaag

SEQ ID NO: 51469 - DNA, 553 bp, Homo Sapiens
cagacacgcgccaccatgcccggctaatttttgtatttttagtagagacggagtttcaccatgttggccaggctggcctcaaactcctgacctcaggtgatccacctgccttggccttccagagtgctgggattacaggcgtgagccactgtgcctggcttccatcctcttctatcatttttttaaatctcttctcctatcataaaattaatttctcattttttggtcaggtagaattgggaaagtcccacactgtcctcctattaccttaacatcccaagcttcctttccttttttggtctttatgaatatatttatatggacagaattaagataaacaaaattgattgccccattctctcacttccccatcttgtcttcctagaccccacagagttaaaacttgggattcccctggcccccccagaacacttgtatattgtttgtttgaggttcgtgccgcagtaacagacacagtatttaattgcacatacagatgtttgctgggtatattcactgtaaattttatttaatctgtttttttgtttgtttg

SEQ ID NO: 51470 - DNA, 692 bp, Homo Sapiens
ctgcgggaggctgggagccctgcctgcccatccctcctgcaccagcgctgtccctgcacactttggttcagtcccggtgcccctgccaagatgtggaaggggccgggtgaagacaggcttgagggctgccccagcaggctctgggtatgacctgcctctggccctggtcctgggcggggcctgtgggtggagtagtacccccaggccctgccctgggtgacagactgggaggaaaccaggctggacctgggcaggcgggatgtgttggccacagggagaggcggaccggcacccggtgggacctcctaggactgggccttcttccagggggcccctggcagcagctggggtgtcgggcagaatgtgacttgtggcttaccatggacttgaatgggacttggctggcctcaggatcttgtgcctggaaatagcctgaggtggctcaggaagcggagaaagggtgccagaccattctctggcggggaccagggcccaaggccccagggctggaaggagaccaaggggcagcgccctggagggacatcagtgcttcctcttccacccaattcccccatgcggttccatgtttttcccaccagcctgttggcgaagttgctggtccggcattcagtagctgcttcttccagagaaatacagttagttcctattttatgttacacaacaaaaaatag

SEQ ID NO: 51471 - DNA, 625 bp, Homo Sapiens
ctcaatgtgggaaggattgttatataagacaaccaaatgatgacatgagacaataaatgctataggaattatggaggaataattagctatttattttcttggttagggaagagatattattagttgtagaagtaattactaacttctacattttttattgtggaaatcaaaaatatatatatgaaaataaaatgttataattgacttcagtgtcccataaaccagcttcaacaattaccaaattgtgaccaatctttacacacatgcacaggtgtccctcagtatctgtggggcattggttctaggaccacttatggataccaacatctatggatgctcaagtccctgatataaaatggtggactatttgcatataacctgtgtacatcccgtattatttaaatcatccctagatcacttataatacgtaatacaatgtaaatgccatgtaaataactgttatactgtattaaggaataacaacaagaaaaatgtacatgttcagtacagacgcaattttttttgtgtgtggaatattttcattccaaggtcagttgaacccatggacataggaggctgactgcgtgtgtgtgtgtgtgtgtgtgtgtgtgtgtgtgtgtgtgtg

SEQ ID NO: 51472 - DNA, 1049 bp, Homo Sapiens
  misc_feature (719)..(825): n is a, c, g, or t
  misc_feature (827)..(878): n is a, c, g, or t
agtttttagtcctaggccagtagatggcagcagcttttcattgcagacaaaacctcttgaaacccttcccccatggcacaaactcgcccatgatggaaagcatctagatttctgcctccttttacagttaatccaggagagggagtcctttgccaactgatgaccaacagttccaagccagatagtctcgtgaacagtgacaatacagaaataaggtgttatttctgttcagatctccaccggcctttgttcttttaaaacttgaatataggtgggagacataagaaaggaaagaaaagacttaaaactggagtgacaggacaaataatcattactttcaattcatgactgctttatattcatttgatgaaatcatttgtatacaaaccagggagagttttctttacacccttgacaatatatcacatactcttcaagatcataataatatcattaatataaatttaaacaacatggcttgttagaaaatatgctaattgctatggtctcattatgtttgcttagcttttatttgtttttctgtgaacagttagagagctaatttttttcaaaggtgattgtaagtcatattttatatagcattttgcttgattatttgctctgtactgaatttgtactctattgccattagatcttacaataatgttccactctgcaaatttttaaggttcaaataaagtttaattgttttgcaaaannnnnnnnnnnnnnnnnnnnnnnnnnnnnnnnnnnnnnnnnnnnnnnnnnnnnnnnnnnnnnnnnnnnnnnnnnnnnnnnnnnnnnnnnnnnnnnnnnnnnnnnnnnannnnnnnnnnnnnnnnnnnnnnnnnnnnnnnnnnnnnnnnnnnnnnnnnnnngggggggccgcgcttaaaaaaaaccccccggggggggccccccatttattccgcccaccccctttttttttttaaaaaaggggggcccccctaatagggggggcctcatttaaataaaaatggagggcggtggggccgcggggttttttctacaccacgcggggtgagtgg

SEQ ID NO: 51473 - DNA, 793 bp, Homo Sapiens
attttgtaaatggcaggcaagcttctggctgtcgaaaacatctgagtaatttattcagtagacaatatgtccttgatccaggttctttgccagctataagggaatccctgtccttgagaggctcatagtctataagtaacattacagaatttgttagcatacccattcattattagttttacctaaacgtgttaggatcactactggtggaaattgtaaccagcctttgggcatcttaaagggtgacatgtggcatgccttttttttttttttaagaatttaatgtttttcaagattgtagttttgatcagcgcaacaattcaagtttgcaaagtaacaggatagtttgcctcttcactttacccctggataaaggcactttcactgcctgttactkatcagcagaaactgacttgttgccattaagttaacttgacttcttatgttttcyctatgagtttgttgtaattttcttcttgaaattgttatttttcactgaaagtwatgacaaatttaatgtatgtwattktytatgcattttaagttaaactgcctaaaatgtgatttgagaaatatacatatgtttgtattataaattgtaagcaatcagtttgagatactaggttttatcacctgctgctgtatttgtaaacaaagacaaatgttgctttaagaagtaattataattaggaataggctatggatgtkataattggtattttttaagawaaacttgtttgcttttgtgtattatacctggaaactttttttaaaaaatgtattttcatggttt

SEQ ID NO: 51474 - DNA, 608 bp, Homo Sapiens
ggactgcagtgccatccgcccaaggacgacgaggcgcctttgcgggcgctgctgctcggccgaggccgctgccttccggcccgcgcgcctgctgttgcagaggagaatcctaaggagagtaaaccccaagcaggcactgcccgcccacaggatgtgaaccgcagagaccaacagaggaatccaggcacctctaccacgccctcccagcccaattctgcgggtgtccaagacactgagatgggcccatgccgtagacatctggactcagtgctgcagcaactccagactgaggtctaccgaggggctcaaacactctacgtgcccaattgtgaccatcgaggcttctaccggaagcggcagtgccgctcctcccaggggcagcgccgaggtccctgctggtgtgtggatcggatgggcaagtccctgccagggtctccagatggcaatggaagctcctcctgccccactgggagtagcggctaaagctgggggatagaggggctgcagggccactggaaggaacatggagctgtcatcactcaacaaaaaaccgaggccctcaatccaccttcaggccccgcccccatgggcccctcaccgctggttgg

SEQ ID NO: 51475 - DNA, 524 bp, Homo Sapiens
  misc_feature (272)..(272): n is a, c, g, or t
gcacgagggttaacttcagttttttgaatgcaacaggatacctcccttccaaactgaactgtagaagcagagcagcagcagttatgtgatgcaacacttgatggtacagtaaatttactggcatttttctccttaaaaattaaaatccttgacatagaccatagcatggcttgaaatgctatgtctgcatgataatttaaaatggaagatttaaactttgcactccaaaagcttatttggatttttttcttgcactgttttgtgtaatgcanaataatgattttatttctacagctttgtagattctaacatttatgtatctttattttcatattgtacagtaattttactttaaattatttaaataggctattttatttatttcaaatgcagttgtattagttctcattattgaactgtctgtgcactgtatgtagcaagcatttttcatctgttgtatacaagtggaaagggtattaaaagtgtaactgtgctattatttcaataaagacctcttgacattt

SEQ ID NO: 51476 - DNA, 554 bp, Homo Sapiens
cacgctctcttttatctctcattttattcccttgttgatttctgttaacttgaaagatttgggattttttcccacctcatcatagatgggaacttttgttttcagtgcaaacaatgttggagctgtaatagtaagagctttcttaacaaagctttgtattactgtgtggttttgttttttttgttgttgtttatttgattttgatttttttttcttttatgtgatctttgggaaaacacattcagaattatatctcgtttctacttaaatgtagtgcttagggttaattttttgtactgaagtctttattggtgggtgcatgctactgggaacaagtttttgtacaaaagcttcaatcagaatcactgtgcattactgagactctgtttatcactagccttctgtccctcccgcagaagactgttggattgaacaaaataatatgtattttgatttacttaaagtgcttgtaaatttcttagggacctgccacttttgactgtggatcagttgatgtacacttgtattattaaagcactcaataaatcaaaaaa

SEQ ID NO: 51477 - DNA, 828 bp, Homo Sapiens
  misc_feature (19)..(19): n is a, c, g, or t
acgagtgagccactcctgntcccgaagctcccgcccccactgggccctccttcctcctggtgctaatttggggaccccagggccgccccggcctcttctccatcctgcttggaccaggtcctgggtcttcccaaccataccccgagatcaggccccacctgccagctctactgggcttggagcacgtccgggcagtggagggagggacacagcctgggacaggaagcctcttgggttggagcaggagaccctcatttgccacccagaccaatgtgagcctgcccccagccccctctcattggaagtggcaaggggcttccctcctgggggctagctacactcgtccccagaggcacattcgtgcacattctcacagacaccgtctcacacgttggctttggacaaccaggccccaacttggtccctgccctagggacctccagcctggtgcccagtgctcaggccacctcctggtccagtcaccacctgcagcctcggcagggcaggtacaggggccacctcggatgggagcctgggtccctgcctccgctctgcccctgggtggctgggaggagaggccctctcgggggtgacctgggcgtcagccgtggaaccccctcctcctccctggagtctgcctgagtcactcgagccgcgagccttcgctgaagtgcccttgctataaccccctctgcttctggtgtgtgacgaggccccgatgttcttgattttcccagagaagcaaataaacagcgtgaacagcaaaaaaaaaaaaaaaagaaaaaaaaaaaaaaaaaaaagggggggagcaaaaaaaaaacaaaagga

SEQ ID NO: 51478 - DNA, 891 bp, Homo Sapiens
  misc_feature (736)..(736): n is a, c, g, or t
  misc_feature (740)..(740): n is a, c, g, or t
  misc_feature (742)..(772): n is a, c, g, or t
  misc_feature (774)..(809): n is a, c, g, or t
tgagatccgcgtgaaaagtcctctgcccacgagagcagggagttggggccacgcagaaatggcctcaaggggactctgctccacttggggccaggcgtgtgactgacgctgtccgacgaaggcggccacggacggacgccagcacacgaagtcacgtgcaagtgcctttgattcgttccttctttctaaagacgacagtctttgttgttagcactgaattattgaaaatgtcaaccagattctagaaactgcggtcatccagttcttcctgacaccggatgggtgcttgggaaccgtttgagccttatagatcatttacattcaatttttttaactcagcaagtgagaacttacaagagggtttttttttaatttttttttctcttaatgaacacattttctaaatgaattttttttgtagttactgtatatgtaccaagaaagatataacgttagggtttggttgtttttgtttttgtattttttttcttttgaaagggtttgttaatttttctaattttaccaaagtttgcagcctatacctcaataaaacagggatattttaaatcacatacctgcagacaaactggagcaatgttatttttaaagggtttttttcacctccttattcttagattattaatgtattagggaagaatgagacaattttgtgtaggctttttctaaagtccagtactttgtccagattttagattctcagaataaatgtttttcnccgntnnnnnnnnnnnnnnnnnnnnnnnnnnnnnnntnnnnnnnnnnnnnnnnnnnnnnnnnnnnnnnnnnnnaggggcggcccggctcctaaaagtatcccctcgaaggggccccaaagctttacccggtaccccaagtttttcttttgtaaaa

SEQ ID NO: 51479 - DNA, 685 bp, Homo Sapiens
gacatgagcgctctaatagcctccttctcctcatttttaaactggcatacattactttcaaaataggtatagatattctgtcccgccttttgagctattagcctgttcctgtttccctttgtcacctaagcaaggctttttctgagaaggtagtgaatggtttcaaatgttgcatactataagaataatcattgggtaactgttgtttagaccaacacttagaaatactatatttgtgccttttcatttttaattttaatgtgtgttgatatttggagcacaaataatgaaggtgccataatatggcttgccaatgttacctccttgaatagtcatgtgtcattgtcttgaattggtaattggagaaccttgcatgaaatatgtgatcgtgtgtgtgtgtgtgtatgcgcgtgtgtgtctgtgtgtttgtgtacatacctgtatttgcttggggcttgtgtgtggtatgttacaaagagtgaatttctggaaatagaaatcagttaaatgttgaaagttcaggttagcagaaatatttcatttaaatatgctttactttggaggacaattgattaacagaggaaatgataattttcaaaaatgtgatcaatttactgcatgatgaaatgtgaaaacagtgcctttttaggacatcaattataataaaattgttttaaaatattac

SEQ ID NO: 51480 - DNA, 622 bp, Homo Sapiens
ggcttccctacgcggccacgtggctgccgtgtaccagattgcgtggtcagctgacagtcggctcctggtcagcggcagcagtgacagcacactgaaggtgtgggatgtgaaggcccagaagctggccatggacctgcccggccacgcggatgaggtatatgctgttgactggagtccagatggccagagagtggcaagtggtgggaaggacaaatgcctccggatatggaggagatgagacggcccgaagttctctctgacccccacctcgactcggcctctgccagctgccttccctgccagagaacaaaggctgagatggcagtgcacacaccctccccaccagtggggacctgagaatgcgtgtggcctgctgtcctcgatagaccggaatggggttttcccacagatccccgcctgtggcacaccccagagccagaaatcgaaggtcacaggaagttgtcactgaacttggcccgtgtctgctactctgtaccttgctggtacagacaggggtggtgggcagccaggctctatgagtgggcccctagtgtcagctctgtacagggtcagatcccaggttctatgaccaaataagtaacttaaaaaaaaaaaaaaaaaa

SEQ ID NO: 51481 - DNA, 759 bp, Homo Sapiens
  misc_feature (713)..(713): n is a, c, g, or t
cccaaagtgctgggattagaggcgtgagccactgcacctggcctgtagcaaataatttttaagcattctcaagatgtatgatgttgggtttaacatcatatgttcacagtgttttaaataagaaataatctgtctttagtatacaggatggttctttgtttgcctgaaaagtataagaatacaatttacttttcccaaactctttttccttatttttttctttcaaataactttaattatttaatcccatactgattaaaatatgtctgtctaaagggatctactactatttgcttttaaaaaagtgttccctatttatttaggaaaaagtgaagcaagcaactgaatttatatgtaaaaataacatttagacctgtggatcaaagattattttcaaaaatgagatatcaatttggtatcagtaaaaagtgtcttttctcttagtatataaataaataaaatgcaaattaagagtgtaagcagttgtgaatcattacaagcagtctgggataactaactcctagggataaccatttctatcctgttccaaagtcttattttatagtttgaaaagcactttgcacacagttcttgtatataaaagtaaagatgtaattataggatatagtgttcctgctttgtttaataagaacctcatttaaacttgacagctatggtatttttttaatgataacttcctttctgtttattgnaaaactaagttaaaaataaaaggctaatgagaaaaaaaaaaaaaaa

SEQ ID NO: 51482 - DNA, 665 bp, Homo Sapiens
  misc_feature (549)..(549): n is a, c, g, or t
  misc_feature (635)..(635): n is a, c, g, or t
ggatttccaccagggctggaaaggttacttcaaaatgaatgtggccaggcagaataatgacagtgactgtggtgcttttgtgttgcagtactgcaagcatctggccctgtctcagccattcagcttcacccagcaggacatgcccaaacttcgtcggcagatctacaaggagctgtgtcactgcaaactcactgtgtgagcctcgtaccccagaccccaagcccataaatgggaagggagacatgggagtcccttcccaagaaactccagttcctttcctctcttgcctcttcccactcacttccctttggtttttcatatttaaatgtttcaatttctgtattttttttttctttgagagaatacttgttgatttctgatgtgcagggggtggctacagaaaagcccctttcttcctctgtttgcaggggagtgtggccctgtggcctgggtggagcagtcatcctcccccttccccgtgcagggagcaggaaatcagtgctgggggtggtgggcggacaataggatcactgcctgccagatcttcanactttatatatatatatatatatatatatatatataaatgccacggtcctgctctggtcaataaaggatcctttgttgatacgtanaaaaaaaaaaaaaaaaataggtgcggccgc

SEQ ID NO: 51483 - DNA, 596 bp, Homo Sapiens
agtttagatttgactggtttatcaagtctaggactgccatggaattccagagacgctgtaacactctgatttcattgattgagaaagaaaatatggaaattgaggaaagagagagagcagaaaagaagaaacgggcaactaaaactccaatgtcacagaaaagaaaagcagagtcagctactgagagctctggaaagaaggatgtcaagaaggtgaaatcctaaagcctagaaataaagttttaaatgggaaactgctattttcttgttcccatcttcaaatgctaattgccagttccagtgtattcatggtactctaagaaaaatctctttggttttgatttcttgcatattttatatattttacaatgctttctacctgaaatgtgtagctttatattttatggcattctagtatttttgtgtactgtattttgtgcatttcatgtcttcatcaaaatcctctcagtccttgttcttttgaagcttgtgctgaggttttagcttttctatgttttatatgccgctgctttgaaagagaacctagattctatagttgtattattgttgtttcatactttaaatttatatggctgt

SEQ ID NO: 51484 - DNA, 736 bp, Homo Sapiens
tgtgtttttcaaaaacttaaggctgggtgtgaaacaccttctgtggacaaggatttgtaaacttctctcctccccctagctgcggccccagcctaactgatagttacttgattcagtgtgctagacacttaaatagcatctatgtctctttcaagggaatttgtcaaataatgctgtttagctaattgttgcaagcaattgcatattaacagctgtgattttgttggacagcaagtattatggccaaagccagtttcttggcatttcaaaaataatgcaataaaaactagttgaggttagctgaggctggaaatgcctttttcatggtaaatgattcacttctatatttttctttctttttctttttttttctttggttttcatcctggattcatcccctgatcttaaatcaaaacgtcagatcaatgaactatgaactaaagtatttttcttaagcctattgagtgatttattttttaaaaaatgtttaaatgcatatgcttttctttcagcacaaacaacagcaaaaacttttgtaataactaacttacctttgcatgtatgaagaactgagtcatttatttccctaacttactcctctttcaagtaacaggtggcagatcataaaatgaattctttattgtatctacacactccacattctttactgtgtcctactactgtatcttggctccctgctgtattaaacaccatcttaagcaaaaaaaaaaaaaaa

SEQ ID NO: 51485 - DNA, 499 bp, Homo Sapiens
accacgcgtcggggggagcttagccccctgcgtcacccactccctgcacttctgctgcaatcaaggtggttctggtgcgggggtggggtggggggtgaggccttgtggccaatgggggaccccccaagagccagcttggacaatgctcttcttgccccttagttactggctggctgtggcttcagtggtgtgtaagcaggtggaatactcacccaccaagctctggggtaccccgagggcctgacaagaggatggggtgggggtggcatcctccaaagaccagcctccacccccactccagcctcagcggggccccagcgatgttttcttgttgtacaagaaccaggtccgagtgttgcctcctcttccttccggaagccaaactgctcctttattttttagagctgctgatgtgaatctcagagtcttaagagagaagccaaatatattcctcttgtaaatgaagaaataaacctatttaaatcaaaaaaaaaaaaaa

SEQ ID NO: 51486 - DNA, 598 bp, Homo Sapiens
gcagctttagaaatgcaggttctagggcttctcccagccttcagaagccaactaactctgcagatggggctaggactgtgggcttttagcagcccacaggtgatcctaacatatcaggccatggactcaggacctgcccggtgatgctgttgatttctcaaaggtcttccaaaactcaacagagccagaagtagccgcccgctcagcggctcaggtgccagctctgttctgattcaccaggggtccgtcagtagtcattgccacccgcggggcacctccctggccacacgcctgttcccagcaagtgctgaaactcactagaccgtctgcctgtttcgaaatggggaaagccgtgcgtgcgcgttatttatttaagtgcgcctgtgtgcgcgggtgtgggagcacactttgcaaagccacagcgtttctggttttgggtgtacagtcttgtgtgcctggcgagaagaatattttctatttttttaagtcatttcatgtttctgactggggaaggcaagttagttaagtatcactgatgtgggttgagaccagcactctgtgaaacctttgaaatgagaagtggcagatggatatttcc

SEQ ID NO: 51487 - DNA, 653 bp, Homo Sapiens
  misc_feature (7)..(7): n is a, c, g, or t
  misc_feature (641)..(641): n is a, c, g, or t
  misc_feature (651)..(652): n is a, c, g, or t
ccccagnctccaccttgggccaggcccgcatctgctgcccagcaacgagtgcgtggagctcttcagaaccgcctacttctgcagagacttggtcaggtactttcagggcctgggccccccaccgaagttccaggtaacactgaatttctgggaagagagccatggctccagccatactccacagaatcttatcacagtgaagatggagcaggcctttgcccgatacttgctggagcagactccagagcagcaggcagccattctgtccctggtgtagagcctgggggacccatcttccacctcacctctttgttcttcctgtctcctttgaagtagactcattcttcacacgattgacctgtcctctttgtgataattctcagtagttgtccgtgataatcgtgtcctgaaaatcctcgcacacactggctggtggagaactcaaggctaatttttttatccttttttttttttttaattttgagatatacgccctctttcatctgtaagggactaggaaattccaaatggtgtgaacccagggggcctttccctcttccctgacctcccaactctaaagccaagcactttatattttcctcttagatattcactaaggactttaaaataaattttattgnaagagggaanna

SEQ ID NO: 51488 - DNA, 753 bp, Homo Sapiens
  misc_feature (714)..(714): n is a, c, g, or t
  misc_feature (732)..(732): n is a, c, g, or t
caggaatagtccagttccgtggcattgtactagcaaaagggtctgatcaaaggtctcctgtggagcttgcatggttccctttcatactacgaccataattaaaaccactaattctcttttaaaatgctgcaggatgccatgtaggcatctgtctggagtgtcctttgtgatgtcataagctgttaaggaccagtgccgagggcttttgagtgaaatgccagtcatgaaggtgcttcaagacaagggtgcctctaaaagcttgacagggccttgactgcacaattcgagctgaatttgccccttgtcagctgccagtaaataaatctcaaagggggaaaagctgaagtttcattacctgatccatggggctttgttggttttggcatcacacaggggaagctcttgcccctccattctctggatttgaagatgtccattggagcctgcagtgcctggacagggttcagagcggaaccttttgaagagtgtcaatagttgtaacagttcagctgttaggaagacaaataaatggaggagctcattaatccgcttttggctctcagtgccttttgcccttttatcacagccttattaggctcctactcatcttgaaccagaaaaaaatgaattgaagttgttgagtactaattggcaaagacttttaatcatgggccaagaactttcactgacttgaaagtaacttctccacagggnaaggaccaaaaacctggnttaccttaaaacaaaaacctg

SEQ ID NO: 51489 - DNA, 762 bp, Homo Sapiens
aaagagaatctaaaaaaaaaaacaaaaaactgttgtctaatatatctacagtaaatgttacactagagcttttattttcctctgtagcttttcagaagaagcaatttaccttggatttgtaaatcaagctgaaacttttttgatgttcatgtactcatatgtcttgtaggtggtaggtgtcacttgtgtgtatgtgtaagtgaagtatgatgcatgctcattcacttggtccctttgaaataagggaaaggatcacagtgctgctgggccatgatggtatgtagaagggtctgtcagcacacatggaaagcccccatttgcacagatgtagaactttaataatccagatgcaatcattggaagtatttaatatgcaattggtagcaccttagctaattaatctgcatatgaagcattttctgatatatttaataagaggtatagaagctcttcaagcattaaaatagagttgatgtttcattccatttgttttatccatcaaaaaatgcactctcacagtggagttgaagtctaatacatgatacatgtgggcctgttagtcttcgaagcttccagatggttttgtgttttgaggtacaaaaaaatgtgagatctagaaaatgcatatatttaggcgggtatttgaaagatagaagcattatttataactgaagagtataacacttatcttcttaagtaaatgctctcatacttgtatacatttttgcaggtaccaaacttcaaaagtatgtaagcttggat

SEQ ID NO: 51490 - DNA, 949 bp, Homo Sapiens
  misc_feature (741)..(741): n is a, c, g, or t
  misc_feature (745)..(748): n is a, c, g, or t
  misc_feature (754)..(754): n is a, c, g, or t
  misc_feature (756)..(756): n is a, c, g, or t
  misc_feature (758)..(758): n is a, c, g, or t
  misc_feature (760)..(760): n is a, c, g, or t
  misc_feature (764)..(764): n is a, c, g, or t
  misc_feature (783)..(783): n is a, c, g, or t
  misc_feature (785)..(786): n is a, c, g, or t
  misc_feature (796)..(797): n is a, c, g, or t
  misc_feature (882)..(882): n is a, c, g, or t
  misc_feature (903)..(903): n is a, c, g, or t
  misc_feature (937)..(937): n is a, c, g, or t
cgaattccaggccagccagctgctcacactggacaccacctctatccccctgcgcctctgccctgtcgcctcctgcccggacgcccgcctgctggccggctgcgagggcggctgctgctgctgggacgtgcggctggaccagccccaaaagaggagggtgtgtgaagtggaattcgtcttctctgagggctccgaggcatctggacggagagtggatgggctggcatttgtgaatgaggacatcgtggcctccaaggggagcggcctgggcaccatctgcctgtggagctggaggcagacgtgggggggccggggcagccagtccacagtggcagtggtggtcctggcgcggctgcaatggtcgtccaccgagttggcctacttctcgctcagcgcctgccctgataaggggattgtgctctgtggggatgaggagggcaacgtgtggctctacgacgtcagcaacatcctgaagcagccacccctgctgccggcagccctgcaggcccccacacagatcctgaagtggccccagccctgggcccttggccaggtggtgaccaagaccatggtgaacacagtggtggccaatgcctccttcacctacctcaccgccctgacggactccaacatcgtagccatctggggggaggatgtagcctcacaccatcgcaaaggaccagggacacagctaactaacttattcagctttgggccgagggggggggggggggggggccncttnnnngccccntntntnttcncctcttctttgggcccccntnntccgtgcccnnccccccctcccgggctcctttgccgggcggccggcccttccccgccttgcccccgcgcccggtggtccttgctccttttcctgtncccggttctccccggggcccnggtgggttgtttttggccgggctctccccgggtnggggtgcgtggg

SEQ ID NO: 51491 - DNA, 830 bp, Homo Sapiens
  misc_feature (37)..(37): n is a, c, g, or t
  misc_feature (78)..(78): n is a, c, g, or t
ttattattacttatttttgacgtgttgaaatgttcanaggttgctctagattgcgagaagagacaaacacctcccagnagacagttcaagaaagcttcaaactgcatgattcatgccaattagcaattgactgtcactgttccttgtcactggtagaccaaaataaaaccagctctactggtcttgtggaattgggagcttgggaatggatcctggaggatgcccaattagggcctagccttaatcaggtcctcagagaatttctaccatttcagagaggccttttggaatgtggcccctgaacaagaattggaagctgccctgcccatgggagctggttagaaatgcagaatcctaggctccaccccatccagttcatgagaatctatatttaacaagatctgcagggggtgtgtctgctcagtaatttgaggacaaccattccagactgcttccaattttctggaatacatgaaatatagatcagttataagtagcaggccaagtcaggcccttattttcaagaaactgaggaattttctttgtgtagctttgctctttggtagaaaaggctaggtacacagctctagacactgccacacagggtctgcaaggtctttggttcagctaagctaggaatgaaatcctgcttcagtgtatggaaataaatgtatcatagaaatgtaacttttgtaagacaaaggttttcctcttctattttgtaaactcaaaatatttgtacatagttatttatttattggagataatctagaacacaggcaaaatccttgcttatgacatcacttgtaccaaaataacaataacatgtg

SEQ ID NO: 51492 - DNA, 510 bp, Homo Sapiens
ggcacgaggcttcagtgttcaggcaattagtatttagaaagctcttgtcatgagatggctctgggatgtgatgatgattgttgggattgaaaaaacggtagtatcatggagagatcataataaattcttagtattaaaagtggttttgctttcagttagggagaaaaattagattgtactatttttcctctatgatttccttcagttatcttccaaatgttgttttttccccacagcccccttaacattgttctctatgcacttctcaatacattttcatttgtttctcaagcctctttgtggatgactcctaaatataacttcttccactagctctagatccgtatttccaataaaatcccctacctgaatattcaagttaaacatgtccagaatacttactgattttattgttaatagccactattctgttgtctggaattaaaacctgtataactaatttgcatccctttatcttcttagtcaataaaacctacaatcctctttcta

SEQ ID NO: 51493 - DNA, 659 bp, Homo Sapiens
taaagattgtgaagtggttattggcaaacgtttgtaaatgtgaccatgtataaagtatttatactctttaattcacactgttagagagcaaaatcatctaagtattgccacatgacaagattagtaaacaggaatactagaactatgtttgcatgatacacaagcaccaataaagactaatccatacacagttaacctaatgccaaataaatactggttaaataaatgtatggcacagaatataatttgactatcaagacttttagcataatgaaaaaccctctctctatatatatatgtgtatatgaattatgtgggcattcttgatacttcaagttctagtttgaaaaaaatacataactaatttaattttacacaaaaatatttatgcagattttcagaatttcatatcaggaaatgacctttttatgtctgttaaatatcaaaacaatttgctacagtgttaatctgcatggtctttaagcctgctgtagttgagttgcagacagtgcatgaaaaagtattccgctgggaattgagccatgccaccaaagccaagaggagcgcatggaaacccggtagtctagaactaatcagattactgattttagggcacagcaccagatgaattgttgtatatgcttgaaaaaattgattct

SEQ ID NO: 51494 - DNA, 704 bp, Homo Sapiens
ctggaccactgaatgtcactgttccttgaatcatgggcctaccagattgcctgccagaggcaggactgaccagcccttctgggccccaggcaagccagacactgagtgacaccaaaggctttgtaactatgtcttgagggtctgctgccccagcctggcagcaggaaccgccctccccaaacacccacagccactgacccatccaggactccagagagtcaggtcaaccccgaggaccccttgggcccttctggggtactcctttcggcccccctggtagagtctcgggagttcacacagggtggcaaacaccccctagagctcctctgcctgaatcctgccccctagcctttgaccactgtcagccacctgtgtcccttgagccttcgggtcttcacttcccacttggacatcactgctggacattcccatcgagatgacacctgggttccaatcccagctctgcctttgaagcacttgcggccaccgtcaagtccctttgctctcggaccctgggtttctcatcctttaatgacggtgggttcagaagctctcccatcttcacagcaaccctggcactggcttctcaatgggagggaagcagcagagaaactgaagtgttagacactatgtgtcccaccaccccattacagagacatatgacaatgttcagcaggtcatctttaatgcagaggaggagatgg

SEQ ID NO: 51495 - DNA, 657 bp, Homo Sapiens
cgtccgctcccagcaggccatggactagtcactaaccccacactcaaaggggcatgggtggtggagaagcagaaggagcaatcaagcttatctggatatttctttctttatttattttacatggaaataatatgatttcactttttctttagtttctttgctctacgtgggcacctggcactaagggagtaccttattatcctacatcgcaaatttcaacagctacattatatttccttctgacacttggaaggtattgaaatttctagaaatgtatccttctcacaaagtagagaccaagagaaaaactcattgattgggtttctacttctttcaaggactcaggaaatttcactttgaactgaggccaagtgagctgttaagataacccacacttaaactaaaggctaagaatataggcttgatgggaaattgaaggtaggctgagtattgggaatccaaattgaattttgattctccttggcagtgaactactttgaagaagtggtcaatgggttgttgctgccatgagcatgtacaacctctggagctagaagctcctcaggaaagccagttctccaagttcttaacctgtggcactgaaaggaatgttgagttacctcttcatgttttagacagcaaaccctatccattaaa

SEQ ID NO: 51496 - DNA, 402 bp, Homo Sapiens
tgtgtttgtaggtcctggactgattaaagttcatttgaggaaaaagcacattttacaacaaaaaaataaaagtgtagatttaatgtatgtgactggggtttggggttcatacctggtggatcttgaggggctgggattagggtggttcaggaaaatgtgatgctgtttccccatgtttagccatggtcaaaaaatggatttctcctttttctaaaatgtccagcaactgcctactgttgatcaaatgttgaagtattcttgtttcccttttaagccaatccatgtgcccacataacattatgcccaagtggagagttcactttaatttccaaagtatgtttcatgcagccccctgtcagctgctctgtggaaaaggggttctgttatgaaataaatgttgca

SEQ ID NO: 51497 - DNA, 508 bp, Homo Sapiens
gcacgagccacagcctcgggctgccagcctgtggcactgtcctcggtgtgtcctggagctgtgctgggcagcagggcctcgcgtaaggaactgctggaacccactgagcccttcccggggtttcccgccgcactcagtgtgttccttcaggctagtgaggtttcattctgttttatttgcaagcttatcaaaagtttgtggaagatacattgttgggttccagaggctggagtcatgctgcccacatcttgtttgggaaagcaaaagctcccagtgagctggtgtccccgtgtgtctttcatgggactgtcccctttagagatcccacctgtcagagccacagcttcggggtcctgtcatcacatcccctgggaggggaggcaggaggaggccgagggccccaggatgtctgcctggtcccttctcactgtgaggacgcccttggcacacctttctcaagtcacacaaattattgcagttacatacagaattgctgacaggagcagga

SEQ ID NO: 51498 - DNA, 983 bp, Homo Sapiens
  misc_feature (665)..(665): n is a, c, g, or t
  misc_feature (731)..(731): n is a, c, g, or t
  misc_feature (858)..(858): n is a, c, g, or t
  misc_feature (860)..(860): n is a, c, g, or t
  misc_feature (862)..(862): n is a, c, g, or t
  misc_feature (864)..(864): n is a, c, g, or t
  misc_feature (866)..(866): n is a, c, g, or t
  misc_feature (870)..(871): n is a, c, g, or t
  misc_feature (873)..(873): n is a, c, g, or t
  misc_feature (875)..(875): n is a, c, g, or t
  misc_feature (878)..(881): n is a, c, g, or t
  misc_feature (883)..(885): n is a, c, g, or t
aaaggactgtgacaatgttgcaaataaagtgttcagtactggactgtacataaacattccacattgtgtgtgatgaaatttaaagacaagaatgtctagagttaatttcaaaataagtgaagtgtttgacggaatggttgagatttttttgtttatgttagccatcagggtcataactgttaccattttatctaaagacatatttatatttagtttctcccttggaaattctttattttgcaggtgaaaaagtgacatactttttgttattgtcttcctcaagcagtttaggtgcatgatcttcatttacatagaatacttgggtctcagaattgatgcaacataagcaggtttttttggtgacttacaagagcaatagtttgaagctatctcatttaagcctctcataatgcataatcatgagtagttttgaaatttgcaacctgtgaggtagagcataaactcaagaaaatagccttgaacttgcagacttttgacacaagttctccacaaagtgtgaagagagccccaggcattcctgattggtcaatgggagagcctaactttcattgttttcttcagtacaaagagtatccaaaagctaagtttttgtattccactactttcagttcaataaaacctagagttgtttcatctgcgcctanagtgtatggcacaattttcttaagaattagggaaccaggtgcctacagttaaaggaacgtttcagntcctttcattcattcctgggttttttcttttatttctaagaagttgaagaaggatgagtgatagagaagaaagcaccaccttgatttttttttttaagaaatgaatatatatatggatatggtttgngngngngngggnngngnggnnnngnnnggggaattctggggcttaatttttgccctggatccccaaatccccctcccttccacccaaaaggtttggccgaaaataatttttctggcctggaaggg

SEQ ID NO: 51499 - DNA, 572 bp, Homo Sapiens
ctctccctctctgggcatgtctgctacaaatggacaagattatttcagaggtcactgaagactgtgattacatgcacctgccttagaaggtaggattttcttcccagggacctcctatcaccctaccctgcttcttgaggtccctggagccccaggtgggctgaggggcagggagccggctgtgcccagtatgcctcctggaccctccagttctgccacaggtctgccgatgccctgtccactgcctacacatgacagacaagtaaccccctcatgggggatggggacctacctggctcctcagccagcacccagcttaacccctgccatcccatgctgggccctccaggccaagagtctcagctggccgagagtccaggccttgcctcccccgaccgccatggagggggcagcccggcacagctgctgggagcccttgtgtgtctggtcacactttttaggcgtcacgccaaaggccagcctcctggccccaatacccatttttggaaagcccctgtggccgtgtggatgtcggtacacgttgttctacataaattctatttatcgctatt

SEQ ID NO: 51500 - DNA, 948 bp, Homo Sapiens
cttgaatgttatttaaatcaaaccagatgtaaaacactcacatacaagttcatactttaaaagaggaaagctacttaacaatgacaaatatttcacaataataatttttacttatataccatctttcaactgaacatttcagttcttccaagagcttcttagagtagtatattttgggggcagtcaaggaataaactacagtgtaaacatatcccagatgaaaactgctgtatggaaaaatgacagaaagtaactgattgacactgttgattcacagttcagcctcctatctgggaaagacatttctttcctctgctcactttaagaacttttaccgactccaaaaatctcaggaattaaacttttaacagttacagcaataaagaatagttagtactccaaaaatattatatttaagatgctcaacaagaaaaaaatgcaaatgtaatatttttttcaaattacttctttattgacttgtccaaatttcaaaagtgcctacccttcaataaaacttttttattctgatctccataaattacttagtcttctatgtatagctatcaaggaaataaaaccaattttgccacagccacaactgtaaatgtttttgtacccatgctgaaactcataacaacacagacataaaatagctgtgaggtttgctttttggtgtcagtatcttaagaatcattaaatacaccgctttgggtaaactctttgcaaggcgtaattagcactagtacagtgaagccagattccaattcgtcgttttccaaaaattgtccatggtctccgtgtattcgatcccgtgaacatttcgtggaagtttgtcctaaaggaagggttgcccaaattgttaaaagccctggaagtaaacccgctatattaaaaacccaaacactttgtgtatcaaaaacacctctcttctagtatttatcaaactgt

SEQ ID NO: 51501 - DNA, 767 bp, Homo Sapiens
gctaaaggagcatctatcagattaagttagaacatttgctgtcagccacatattgagatgacactaggtgcaatagcagggatagattttgttggtgagtagtctcatgccttgagatctgtggtggtcttcaaaatggtggccagccagatcaaggatgtagtatctcatagttcccaggtgatatttttcttattagaaaaatattataactcatttgttgtttgacacttatagattgaaatttcctaatttattctaaattttaagtggttctttggttccagtgctttatgttgttgttgtttttggatggtgttacatattatatgttctagaaacatgtaatcctaaatttaccctcttgaatataatccctggatgatattttttatcataaatgcagaataatcaaatacattttaagcaagttaagtgtcctccatcaattctgtattccagacttgggaggatgtacagttgctgttgtgtgatcaaacatgtctctgtgtagttccagcaaatcaagctgagctttgaaaaagtttgtccttaggtttttcgttgaaagcgtggattttaaattcccaagaagaaaaaaaaaaaaaaaacacaaaacacgaacacaaacaccaacaaaacgacaccaaaaccgacgcacgaaaccacaagctaacaagcacaacaaaaaaaagggggggggggcaaaaaataaccgggggcgccacaataccaccccctttttaacgggggcccccggggggaca

SEQ ID NO: 51502 - DNA, 688 bp, Homo Sapiens
ccccgcgtccgatgaaatggtttatagtagaatatctaagctagcactttattttaaaaagtaacttattaattaatcacacattgatggtacaccttgtatttagcaaatgtttgcatgttgataaaatctcctatgtcttctttcttaaatccagttgctgattttgtaaaatacagttgtgataaagcagcattacgggggggaaaaagctatattccaactggtgttaaatgtattcaacaaaatcttacatcatacagtatttatttcttaattaatagaacttcagtgatatacttggtagatatctcaagccttttgtcttttacacaatggtgctctatcctattgttttcttttcaaagaagcatctgaacacttgcatttctattttcctatccaaaggcatccacatctaagtgtgtttttaaagttgattaaaattatttttctgttaaagcattctgaaagtgtttgtctttacctagaatgatttgtacacactcgtggtcaactgaacatgaatgtcagtagtagtctaattatgggaagggtaaacgtgttagattaaggctcttaaagctctaaaccatataaactatggacttgtatcatgatttaactgttcttagatctttcttacacagtgattcattcctctatttggacagtggctttatgaaat

SEQ ID NO: 51503 - DNA, 608 bp, Homo Sapiens
ccatgaccacgtggccatcggtgcggactgcgagcgcctgtcggctcagatcgaggaatgcatcttccgggacgttggaaacacagacatgaagtataagaaccgtgtacggagtcgtatctccaacctgaaggatgccaagaaccctgacctgcggcggaatgtgctgtgtggggccataacaccccagcagatcgctgtgatgacctcagaggagatggccagtgatgagctgaaggagatccgtaaggccatgaccaaggaggccatccgagagcaccagatggcccgcactggcggcacgcagacagacctgttcacctgcggcaagtgcaggaaaaagaactgcacctacacacaggtgcagacccgcagctctgatgagcccatgaccacctttgttgtctgcaacgagtgtggaaaccgctggaagttctgctgacccctcgtgtagatgtgctgcagccttgggccctccccggcccacgtcctccgttgacacagcttctctggagaccctagaaggcggcatgtcctgccctcaacctgcctgcctggattgcacctttctgccctttccccctcattattaaatgtttctttttgca

SEQ ID NO: 51504 - DNA, 881 bp, Homo Sapiens
  misc_feature (710)..(710): n is a, c, g, or t
  misc_feature (747)..(747): n is a, c, g, or t
gaaacccaagagcggggcctggtacagttcctgctccaggctggtgcccaggtagatgcccgcatgctgaacgggtgcacacccctgcacctggcagctggccggggtctcatgggcatctcatccactctgtgcaaggcgggtgctgactccctgctgcggaatgtggaggatgagacgccccaggacctgactgaggaatcccttgtccttttgccctttgatgacctgaagatctcagggaaactgctgctgtgtaccgactgaagccaggcagggtctgggatcctcagggctccacctctccatctggaagccggagccataactgctgcagtttgggcccaggctatgtgctcttctggtgccctagggactgctgtggccagagcctggggccagccagtacagtcctgagccgaggaggagggactgcaagtggaagagagccagtctggaaggaagagctttccaggtggacagggcttcttggaagacccccaaagccccaggtatcctgggtgaagcctgtttgcctctcttgaaaatggcaggtgctcttgttttacccatgttgggtcagcctgaaactgccaaccagtaggaagcatggactctcctgagtgagaagagactgaaataggagcaagcagaaccctgagaggtgtcccatcttattgctgttgaggaccctgaaacaccgttgtttnaagacttcacacagaaggctctgaactgagccactgngggaaggggaagtttcagtaacatgacactaaaatggcagagacgttaaaaaaaagtttttcccttctaagagctgttttgcgcgcatgcatgtctgtgtggcattggggctttttagaacagcctgcccttgt

SEQ ID NO: 51505 - DNA, 562 bp, Homo Sapiens
tggctgcgtactccactggtctgtctttggataataggaattcaatttggcaaaacaaaatgtaatgtcagactttgctgcattttacacatgtgctgatgtttacaatgatgccgaacattaggaattgtttatacacaactttgcaaattatttattacttgtgcacttagtagtttttacaaaactgcttcgtgcatatgttaaagcttatttttatgtggtcttatgattttattacagaaatgtttttaacactatactctaaaatggacattttcttttattatcagttaaaatcacattttaagtgcttcacatttgtatgtgtgtagactgtaactttttttcagttcatatgcagaacgtatttagccattacccacgtgacaccaccgaatatattactgatttagaagcaaagatttcagtagaattttagtcctgaacgctacggggaaaatgcattttcttcagaattatccattacgtgcatttaaactctgccagaaaaaaataactattttgttttaatctactttttgtatttagtagttatttg

SEQ ID NO: 51506 - DNA, 722 bp, Homo Sapiens
aagctggtacgcctgcaggtaccggtccggaattcccgggtcgactactactactaaattcgcggccgcgtcgaccagggagatgccgtggatccaggttcagggactaaatacacttggcagctgaagatgaattggaatggtcacgttttttaggctggacagcgtcccgccacagctactacctgacactgagctcatgcagagagatgatggctgatgttccttctcccttgggacatgggtctggcacctgtgggctgtcgatagtgccctctgagcagagggtcacggtcatgtcagtttgggggaattctctgttgtgcctcagagactcccccctttctttcctccctccccttctcattttgatgtctaaagcatcaagtccctcttcctcagagtttctctagctgcagtggaagattctgttttcctgtggggaaaatgctcacttgagattttgcagggacccgggtctgtctggtttctgatgacatagtaagagaaaggtcttttttcaggttggctggtgaaaggaattgcatgtgactcacacaaacaggagctagcccaatcatacactgactcgcgtgggtgttaaaatgtttatcatgcctaagggagacatttataattaaaccatttatgctacataaaaaaaaaaaatcgacgcgggccgcgaatttagtattagtaggcggccgctctaaaagaaccaa

SEQ ID NO: 51507 - DNA, 642 bp, Homo Sapiens
cttctgctccattaaaaagtaaaaattgtcctccaaatataaaactccttaatagatatttttgaaattaaaatctttaaattttataaatcagctgttgccactacacaactatgatggcatgtgcttataacatttttataacattccgtctgtgtctattccctaaatatcatgagtttataataaggaaattgataaaaatacagtaatgaaataaaaatctgaatgtttctaagaaaggttttggaaggaaaaatgacctgaaatcagtgcgtactgcaaagtacagccaataatttttgttctttgttttcacccccaccctcactggaattctcaccaaaaatagtttgatacttaaaaaacagaagtaaatacttttctcaatattgttttggctatgcaaatatttgttttgcttaatgtcctccatttacacttctcagcaaatgtagttgcaaacaaatgctttctttttatttttcccttggtttgaggtatgtaaatagccaaaaatgtacattgaatttcacattgtaaaagttttattttatcccttgtatgatattactcaaaaaatccctgtgtatatgaaagtgcataataaatatatttgctttacagaaaaaaaaaaaaaaa

SEQ ID NO: 51508 - DNA, 623 bp, Homo Sapiens
cggcggggggcctctgggagcatcttcagcaagttcacctccaagtttgtacgcaggaacctgaatgaacctgaaagcaaagaccgagtggagacgctcagacctcacgtggtgggcagtggcggcaacgacaaagaaaaggaagaatttcgggaggccaagccccgctccctccgcttcacgtggagtatgaagaccacgagctccatggagcccaacgagatgatgcgggagatccgcaaggtgctggacgcgaacagctgccagagcgagctgcatgagaagtacatgctgctgtgcatgcacggcacgccgggccacgaggacttcgtgcagtgggagatggaggtgtgcaaactgccgcggctctctctcaacggggttcgatttaagcggatatcgggcacctccatggccttcaaaaacattgcctccaaaatagccaacgagctgaagctttaacaggctgccaggagcgggggcggcgggggcgggccagctggacgggctgccggccgctgcgccgccccacctgggcgagactgcagcgatggattggtgtgtctcccctgctggcacttctcccctccctggccttctcagttttctcttacatgtttgtg

SEQ ID NO: 51509 - DNA, 425 bp, Homo Sapiens
  misc_feature (395)..(395): n is a, c, g, or t
gcacgagatgcatatagcataaacaactgttagttgttttaagttattatcttaaataaatcctgagcaaatgaatttggaaacattttgcaaagaagaaagtgaaatataacactgtccaaaggaaggtagaaaaacaaagatttactgtttatgtcttcctaagcctttttaaagacttaatgttcttttcccccccccgtgactgattatatactatatcacaccatgtcaggttttgtgcctctgagaattgcagtaatccaataacttttgtatatgtgtgctccttgatcatcagaatattatggccatcttatggcggatattttgggagtttattgcaaacatggtcattcattttctaaataaaatttgtgtgtttcttcactcantaaaaaaaaaaaaaaaaaactcgagggggg

SEQ ID NO: 51510 - DNA, 934 bp, Homo Sapiens
  misc_feature (761)..(761): n is a, c, g, or t
tttattttaaagaactattgatatcagtatttttcctgagagatattgatcgacttggtatccagaaggtcatggaacgaacatttgatctgctgattggcaagagacaaagaccaatccatttgagttttgatattgatgcatttgaccctacactggctccagccacaggaactcctgttgtcgggggactaacctatcgagaaggcatgtatattgctgaggaaatacacaatacagggttgctatcagcactggatcttgttgaagtcaatcctcagttggccacctcagaggaagaggcgaagactacagctaacctggcagtagatgtgattgcttcaagctttggtcagacaagagaaggagggcatattgtctatgaccaacttcctactcccagttcaccagatgaatcagaaaatcaagcacgtgtgagaatttaggagacactgtgcactgacatgtttcacaacaggcattccagaattatgaggcattgaggggatagaaatactaaatggttgtctgggtcaatactgccttaatgagaacatttacacattctcacaattgtaaagtttcccctctattttggtgaccaatactactgtaaatgtatttggtcttttgcagttcacagcgtattaatatgctacagtactatgtaaattaaagaagtattaacagcattgattacctttgtatatcattactgtcttgttgctgtgcttccctcacatttaagtgggttttcatcnttgctccctgctcccccaggctggcttacagtggcttctttaacgggaggccccagtagcatttggcttatttatccattccctaaaatcagcattaacagggtaaaggtttggtgcactacccctcccttttaaatccatgggtggatagaattttgggctaaccgcccctc

SEQ ID NO: 51511 - DNA, 666 bp, Homo Sapiens
  misc_feature (500)..(500): n is a, c, g, or t
  misc_feature (608)..(608): n is a, c, g, or t
  misc_feature (635)..(635): n is a, c, g, or t
actcccccatccatgctacctacctccccgtttctgtttcagttttaagacaatgaagcagcattcactgcgtcattgtaacatgaagggataaaaatgaaggagaaggagggtttgggatgggtgtctaaggcaggagttgacatcgggcaaccaaagaaatgagttttggggaggaacacaactcccatcccagtcagtttccttcccatggctgcatcttaagatggatgcacggagaaaccgtctgcctggctccctgtcttcattctccacgcagcctggtgatggcaggcctgggtttggatttcagaatcctagctccgggctccactcgtgtggcagcaagactgcttcgttccagcgtttagaaacacacctgtatttgattctcagccaggggagcactcgctgcactggtgggaggcggttgggaaagttgcaggaaaaccttagtcttccatccttctgacccatggtggaaattcacaccatggatntttaatggatctttgttctaggcagctgggaatagacatggtacttaccttagagttttccaatttatctcaattttatatggcttgtgattcattttcttaatccanatatatatgaacgtgtgtggtcttaanaaaaaaaaaaaaaaaaaaaggacgcggccgc

SEQ ID NO: 51512 - DNA, 728 bp, Homo Sapiens
gagatagacagtagaatgcaaatacctccctcccctaaactgactggacggctgccaaggaggccccaaacccaggccccatgcaaaggcacgtggtttccttttctcctctctctgcatctgcgctttccagataagcccaaagacagcaacttctccactcatgacaaatcaactgtgaccctcgctccttccatttctgtccattagaaaccagccttttcagcatctcacccattagcagccccatcacccagtgatcagtcgcctcagtaaagcagatctgtggatggggagcctacgggtggtaagaagtggtgttttgtgtttcatctccagcttggtgttccatggcccctaggcgaggtgatcagggagtggggccaatgggcccccggccctggctttgggaccttgtgctgagggatgatttgctcctgaccttgattaacttaacagttcccagctggaagggacactttcaggacccagtccactgtatggcatttgtgatgcagaattatgcactgacatgaccctgggtgacaggaaagcctttcgagaggcccaaggtggcctcgccagccctgcagtattgatgtgcagtattgcaccacagctctgcggaccttggccattgccgcagtcgcagcttccttttttctgtttgcactgtttgtttgtatgatgttagctaattccactgtgtatataaattgtattttttt

SEQ ID NO: 51513 - DNA, 768 bp, Homo Sapiens
  misc_feature (660)..(660): n is a, c, g, or t
  misc_feature (662)..(662): n is a, c, g, or t
  misc_feature (674)..(700): n is a, c, g, or t
ggggaagatccaggctgccctgaaactggaacacattgatggggtcaatctcacagttccagtgaaggccccatcccgaaaggacatcctggaaggtgtcaagaagactctcagtcactttcgtgtggtagccacaggctctggctgtgccctggtccagctgcagccactgacagtgttctccagtcaactacaggtgcacatggtactacagctctgccctgtgcttggggaccacatgtactctgcccgtgtgggcactgtcctgggccagcgatttctgctgccagctgagaacaacaagccccaaagacaggtcctggatgaagccctcctcagacgcctccacctgaccccctcccaggctgcccagctgcccttgcacctccacctacatcggctccttctcccaggcaccagggccagggacacccctgttgagctcctggcaccactgcccccttatttctccaggaccctacagtgcctggggctccgcttacaatagtcctccctctgttcctgaccccctcacacacactggaaagtgagggtgggggctctgcagtcagacaaacctaagatcacatcctggacaggccacttgcttgctgtgtggcattgggcaagtaactttacctctctggacttgtgataatnanagttcctccctnnnnnnnnnnnnnnnnnnnnnnnnnnnaacatgtccgggcgcccttcggccctccgagaagcttttctagaacccatttcgtttggccggcccgg

SEQ ID NO: 51514 - DNA, 707 bp, Homo Sapiens
ttttttttttttttaaaagaaagggttttatatgttctattgtaaaatatggaaattaaacagggacttcagaaagccgcacagaaagatcaccttccgatggtgtgatgtgctcctgacattcggccgaggtctgtattctgaaaaagatttaatggcctgtgaaacacgtggattctgttgcactggatttgtaataaatgacgctgaacttcctgcttccaagcagctcaaccctgatgctgaactgacaccaggcgaatgtcagggctcccaaaccactagtgccaaagggtcatgttgaaaagttcagaatatttatttgtcagaatataataattgccccccaccttagtatttttgcactttacagaaatttagatactgtttttcagtggcttgagcgttttgccttttcaaaggataactattattttcttgaaaatggaatataatcatgagaggaagaagatgtaaaaaatgtcaaatgttgattggttgtgtaaaagttttgtcatagacatgtattggggagcttccaattagcatacatagacacatgtgtcagtggccaagacctgcttatattttgctttatagatgtagtcatagcatgttgttattgcctcatgtaaataaaaaggctattaagttttcccagtaatatttattaatctgtatgtgttttaacataaaatacttatttc

SEQ ID NO: 51515 - DNA, 533 bp, Homo Sapiens
agcctttgcaactacagctgcaaccagagcatgaacctcaaacgtcacatgctgcggcacacaggcgagaagcccttccgctgtgccacctgcgcctataccacgggccactgggacaactacaagcgccaccagaaggtgcatggccacggtggggcaggagggcctggtctctctgcctctgagggctgggccccacctcatagcccaccctctgttttgagctctcggggcccaccagccctggggactgctggcagccgggctgtccacacagactcatcctgaactaggtccttcttccccatgttttatacagacggaccagaagccacctttttctcccccgctggccaggggctccacacagactaacgtaggcactataaggaccagcccaaccccatgggcgggggggcccatatggaccaggggaccttgccttgactgaggcacttcacgagctcagtgagaagggccctgtattcacctccactgcccccaggggctgtggacaaaccggctgggggact

SEQ ID NO: 51516 - DNA, 667 bp, Homo Sapiens
tgtagaattttggaaagggtctaattcatacatgcttaaagtataacctacgttagatagtttgttgtcaaagtctgttctagtaaagtgaagattcaagtcagtctgttcagttacttgaagcaaaacgaaatctttcatttcagtcaaatcactgcagtcatgaaatactgaacaattgccttaagtctttgcttgactcactgggatagactgaggctttgggtgtgtctgtattagcatttcattagtacttcacatgcttttgatgtactcttgagattgctttaaattttgtattgaaacaacaatacattttgcactgtagtaatgggagcactaactcttacaacagttagtgaatcgttttaaagaatcagttcagtgtagacattttgaaaagattgtttcctgtgctttacgatagcttagtgcaatgtgcacttctgttttacttgccattttcctgctctgttttctctgtgacatgaagcaacagaaactgagatcaaagttaagattatatcctgtttgtagtatcagatatttttctgtgtacaattataggattgtaatctaaactggaatttttaggcagtaagtcaccacaaaatgttttagataagacacaataaaattattataaataaaagcttaatggttgtaa

SEQ ID NO: 51517 - DNA, 730 bp, Homo Sapiens
gcaggcagtgctggttcctctgcctgtgtccccaccactccccagctctgtcatgcaggcctgtcctccccaaccccagctggacgtgcctcccaggcctgctgtggttctgacacacaggatcccaggcaaggcaccacttcctcacatgaatgaggagcagcaagtcataaccactcccttgggtatacaatttgctgtgtagtgaagtggaaccaggctcaggctgctggtcccaacctcagagccccaccgcagcccagtagggatgcagcacgccccagagggctcatgtgggccccagatggcaatgccaccattgttgatgtgactccagagccagttattaggaagagcaagctcaccacagaggagtggaactgaggccccccagatgttgcctccggtgtccaagccacagcggtctggctgttgggaagatggccaggaatggactcataccattggcacattaggctaatcctggttttatgtgaagtcagcaattaagtgttcccactagaactgacctaagccactgattaatatttaatgagggaaggtaggggagaatctagccattttataatgccagaaatctatatatgttatctgatgccatttttctgaagtagcctcacatgtggtccccctgcagttcagcagttaacagatgacttttttagtgtaataaaatgtttatcatctatgaaaaaaaaaaaaaaaaaaa

SEQ ID NO: 51518 - DNA, 1137 bp, Homo Sapiens
  misc_feature (1130)..(1130): n is a, c, g, or t
ccgttaccgtagcgactgggcttctggactgtatatcctagctgccttgtcaacatcttcgagcatcggcagctccggaggccggggtaactggcagcaggtaggaaactatgtgaaagaatctcctgatgtcataatttccgggtgtcaccggaacatttgatcatcattcctttggcaattccagccttctgtggaaaggccagtagaaagcattgatttattcacctctacaggaatcagactcagcctcttttggttttcagtgaagtatgccttttcaatttggaacccagccaaggaggtttccagtggaaggaggagattcttcaattgagctggaacctgggctgagctccagtgctgcctgtaatgggaaggagatgtcaccaaccaggcaactccggaggtgccctggaagtcattgcctgacaataactgatgttcccgtcactgtttatgcaacaacgagaaagccacctgcacaaagcagcaaggaaatgcatcctaaatagcaccattaagtcttttgtcaaggtctgactaggtcaagggtaatggaccagtatcatctggtgatctggtaaacaaataaaagtggtggcacctttagatgatgacaacagttgagctctttacttttagtaagaccgacagaaatgtagtcggtaaagcacatgtagtgataggctatcagttatgtctgatacataagacagaataatatttcacaattagaaagtaccttagagatcatcttgctcacagtagatcattaatatcaataattaaagatgaagcttaatccaccatggtcatcagtcaggtggggcttattctaaatgcttaatgtgtcttaagctcatttccttgttcatatttgggtttgctacttggctaaatcctttcaccttagtaccctaagccagtttcctggcttgatactatttgataatgctctgctcaggratgattaawattgggtgrgaawggrgcccgggggtgkgkgtttkggacagtattcharatmaaaaaagtyctwrtcctgggtaayykcargsattgaascmctcccaragggccccgatkktggkwaaatattgaaagargcaarcgtgggkyccmcccsnttttcca

SEQ ID NO: 51519 - DNA, 541 bp, Homo Sapiens
caggtagtgagtctatttgtggtcactagcactgtctcctaaacttgtaagaggtctgaagctattctttgatttttgctagtgctattaacttatgtagacctgttaaaaagcagagcaacacaattatagttatcctactgagccatggattctgagttttgttttaaaagtgaaagccaagttggtgtatgtaaaggatttccatgtagctgtggtgctagttattactggctacattatatgctaagtgtatttgtgttccccaagtgtacaagccttctatcaaaagtatgttctataactcatatattcaaggtgtagggtatgaaaatgcaaagtttaggagagcactttaccaagctggtgtcctccaaactgaaattgtttgtaacgatagtcttttacaggttttcctttaaagatgtttgtgtgcttttaattgacaactaacttcttgctgctgtatagtaaaatattaatatatttttatcattaaactgctgcatgactatcatctttgagtgaagagaaaatgtta

SEQ ID NO: 51520 - DNA, 551 bp, Homo Sapiens
tttggtgggggatggggaggttgttttcgttttttggatttttttgtcttttggctttaagtatcatattttcttttgcctgtatccaactgcttctttgagtattttcatctagtttaatgtgagtaatagatgctgtgctgtcattgaagtgttcaacattttgttcatttaaacaaaagtgtaattcatacatatatagatacatatcttaattgatttctcaactattttataagtaactggaatttttcattagatcttatacagagaagtattttattaaaaattcaaaagggaagacttttatgtgctcattttgtaatttttgattttaaatatctttacattgtctgccaattaaagtgttttaaacttgcattggaatggactccgaatgtatttttgtggtgttacgttatccgtagatttctagcatgaagttagcctcacgatgctgtgcaaaggattttaaaatatgagagtcactgaaagagtttaaacatctgttcatgttaaatgctctatggattttaattaaagacttgaga

SEQ ID NO: 51521 - DNA, 594 bp, Homo Sapiens
agagattatagggagcatgggtgaagcactttgaggaagaactggattccatggcaaaacatgaatccagggaagataaaatttttcagaagtttaaaactcagatagcccttgaaccagaacagattcttagatatggcagaggtattgcccccatctggatttctggtgaaaatattcctcaagaaaaggatattccagattgcccctgtggtgccaagagaatattggaattccaggtcatgcctcagctcctaaactacctgaaggctgacagactgggcaagagcattgactggggcatcctggctgtcttcacctgtgctgagagctgcagcttgggtactggctatacagaagaatttgtgtggaagcaggatgtaacagatacaccgtaaaggcatcttaaagccttgaaaaatgttaataatcttttataccttgcaattccatttctgggattttatcctaaggaaatacttataccaaaaatagaggtgcagagatgttgacggattgcttacacagtgtctacttattagtgaaacaaaagtgtccagtgacagggaattaaataaattttggtacatccac

SEQ ID NO: 51522 - DNA, 522 bp, Homo Sapiens
atgtgaacgttgagtacacatgagtgcgtgtatgcccccaggctgggtcagctcttctgtggattgcatggcgtgtgattaaaagcccatgtgttcccacacatccacatcatgggaaggttaatgtgtgcctccttggaactgggtgttggtgtccatggaacttcctctctgtatctcaggtcagtaggcgcagaaacgcctcatgatgaagattcttgagccccatttccaagacccctcacatccaatcctgtcctgtaacatccatcaaggatttccataggggtgactggtgcccacccaagactgcaccagtgcctgctcattgaggagagtaactgctggccaggcagaaagaatatgggctctgcaatgagacagacctggaggggactctcccgttgagcactagcagctggaggagttgggagttcatggctatcatggttgtgttaatcgattgtggggatgaaatgtcattgtgtatggaaggcggggctcatggctgattggcaataa

SEQ ID NO: 51523 - DNA, 531 bp, Homo Sapiens
gcacgaggattgtcatatcaattagtgtgggtccatctgtagcaaatgggttgagtgtgtcagtatgtggttggttactgtgtattcgccaggaatcaccccgataggctgccaccctattaggtgatacctgtttaatatgttgtccaggtagactagtagttgcatcagtttgctgtaacaagtaaccagtgaggtaacacagtggtgaagcaggtcaggggaggtcaggaggatgtctgagagaaagaagtccgggagatgaatggctgtctaggaaggaggatgtcagtgcacggttagtgtttgagcagagggcagacttgtaaagtacctgtagtgaaaagaatgtggggacccgattagcagaaaggtgtttgcacgtactttatacaaaatacagaatactttatattggaagtgaaagaaatgaacgtggacttttacacatgtgcatatttttctggaggctatatggattatttgaaatgaaaagcatactaattggactttaataaatcattttcaatc

SEQ ID NO: 51524 - DNA, 626 bp, Homo Sapiens
tggattgcatttatagctatgcttttttgggtttatactgggaatttatttttactaaattatttaacttttctaattatgtaattatgtaagctagcttttcatgtttatgtatgtatggtgtccccttgtgttatttttcttcctcttggtttttgaattagtgttaaatagaatactgtctggattcttaaaatattttcatttccatcatggttataacaaatttgctgcatgcccaaactgacaacagcaatcactgagggaacaggttttgaatctttcttttgtgttatgaagtttatcgtctctacttgcttgagatttttgttattttgggggtttgggggtgctttttgttttgtttttgccaaatgtaacatgaaagcagatgctgcagctttagtctgttatgctgatttagtaaaaaaaaattttttacatatattgcttgctttcgatgcttctgtgaaatttttttctaaagcttttgtgcagctgtatggtaaaaatatggtgattaatttgaagagcttacattgaaagacaatgtaataggaaataaatgtagattgcagttggtcaagaattttgtagagaggataacaagacttaattactgaaaa

SEQ ID NO: 51525 - DNA, 664 bp, Homo Sapiens
gtatttgggatatgagtttggggaaagagttgcagtaaagttccatgaagacaaatagtgtggagtgaggcggggagcatgaagataaatccaactctgactgtaaaatacatggtatctctttctccgttgtggcccctgcttagtgtcccttacctggcttagcgttctgtttcaccagtttccaagtttattgccctcaaaatctttagaatagttaaattggcttgtttaaggttcttgctgccccacaacacaccttgcccatgcacaaggaatgaattttttcctaccattatggctttgtgcttgttcttcctcttacctgtaatagcctcaccttccctagttctttgcattcgtccttagaatactgtattgttacagctgaaagacagtaaagaccatttagtcctcaccttctgttttagagttgagcaaactgaagcccacagaggtggaacttaattacctaagagccacaataagccactggtatctgggggactagaacacaaatccaacgcttttcccacctctttggatgttttccccaattatcctccttcactccctgtcatagttaccgatggtgtcccgttgtgtgggtttactctgtgctaagttgtcttacacttctcaaatgctactcagtatatagcct

SEQ ID NO: 51526 - DNA, 1204 bp, Homo Sapiens
  misc_feature (1120)..(1120): n is a, c, g, or t
  misc_feature (1139)..(1139): n is a, c, g, or t
gactttttggaaatactttagtggcatttcactgtcaaatatgaagttcaaggcaaaatagtattttctattactgtgcaggggaaagggatggatcgatacatgcaaatttaatgtagtaactcacttttccatatattttgaatgtatatttctatttatgataccaatttataaaaaataattacacagaaaaaatggaataggaaaaattatgcatctagcacatttaaactgtgcaaatatgaaaatttttcgaggattacattttatctgaaggctgcatattttaactggctttaaaactgtaacacatcacataaaagatactttaccaggtatgtattgcattatatcattgcaataattattggaagtctagatatcgagccatcccaggtgttgggcggggggagggttgtggcaagattgtcttttcaattttggagagttttcctgtggctacaaggcaagtaacgggttggaaaaagtctgactgtaagcgttggacaccttcatagtgtagtgttttagtgactttttttatacggctcttgtaaattagataccgtgtagtggtgtttcaaaatgtttgcttatgcactagttcgaaaaattttcccggaaattggttcttgaaaactccaaactgcccggaaaactaacaatacccctccgcaacatggcaccatgcctcccctccctgcttattccccctacggacctaaatgcatcatctcaaaatttccccgcctgcgagacctcacgtccctactaaaactacttgtacaactgttcctctccctttatttaactacctaacccctcaccaacataataatctgatcattcttcttttgtcctccctcctacttcatcagtccccatctacttagcctcctgccacccgatctaattgtatctgccagcaagcatataccctaacacaacgaacgcacactttctctcttcgcgtgtttataccgacctctgcgcttctactccctccttcaccccactcagcctcccataagatgtctcccactcgcccgttcatccaaatcgctagtgtccactcaatctcctcacgcattctgctcgccactagtccaatctctcnccatctgcggtcgatccgngtcgacgaaacatcacgtatctcaccactacatgacctcgattctgccacatctccaaaattaca

SEQ ID NO: 51527 - DNA, 600 bp, Homo Sapiens
cagaacacaggcaaattcaagtccatggtccctccaccccctgtggctccagcaccttctcctctggccccccctctccctcttgaggatcagtgcattactgcctcagacactccagttgtcctcgtcagcgttggagctgacctgcccgtctctgccttagacccaagtcagcttctttgggctgaagagccgacgaacagaaccactctctactcaggcactggcttaagtgttaacagagaaaatgcaaaatgtttcacaaccaaagaggagctggggaagacagtgcctcagctactgactcctgggctgatgggcgaattttcagaatcctttagtgcctcagaagatgaaggccacagggaataccaagccaatgactctgactcggacgggcctatcttgtacaccgatgatgaggacgaagacgaagatgaggatggcagtggagaaagtgctttggcaagtaaaatacgccggagggatactcttgctatcaaacttggcaacagaccatctaagaaagaactagaggacaaaaacatcttgcagcgtacatctgaagaagagaggcaggaaatccgacaacaaattgga

SEQ ID NO: 51528 - DNA, 633 bp, Homo Sapiens
ctgcaggaacagcggagaacagttcaggacaagaagaaaacagccgggcgcaccagtcgtagtaatccccccaaaccaaagggaaagcctcctgctcccaaaccagccagtcccaagaagaacattaaaactaggagtgcccagaagagaacaaacccgaaaagagtgtgagctaactagtttccaaagcggagacttccgacttccttacaggatgaggctgggcattgcctgggacagcctatgtaaggccatgtgccccttgccctaacaactcactgcagtgctcttcatagacacatcttgcagcatttttcttaaggctatgcttcagtttttctttgtaagccatcacaagccatagtggtaggtttgccctttggtacagaaggtgagttaaagctggtggaaaaggcttattgcattgcattcagagtaacctgtgtgcatactctagaagagtagggaaaataatgcttgttacaattcgacctaatatgtgcattgtaaaataaatgccatatttcaaacaaaacacgtaatttttttacagtatgttttattaccttttgatatctgttgttgcaatgttagtgatgttttaaaatgtgatcgaaaatataatgcttctaa

SEQ ID NO: 51529 - DNA, 547 bp, Homo Sapiens
gcacgaggtgggtacacgtggcgtgccatgagtggggaagagcaacaggcgagatgcctcattctactggaacatcactgtgggtgaacagagatttccaggttttccctcttaaaatatttgtcccacaccgacaagagtccagtcaccaggcctcaaaggaacttctgcttgtagcagccgcctcccctgtgccccagcctccttaatgtgtgcactctcagagggcacagctcgcgaggctgggtttgggggccaagtggcttgttcattccagcatctaacatcataaaggtgggcccagatttcttgattcgaccacagtgctgttcctaccacacaaatatccattcctgttttgttgaagcagccactggtcctcttgtttcccctgcagacggagggacctggcagtgcccattcattcagccccctcatgcatacttttattaggcgatagactagttaagaaaattgtttctatgtactgtatattttgtacctgtttacacttctaatattgatataactgatattttgaaaaata

SEQ ID NO: 51530 - DNA, 802 bp, Homo Sapiens
caagggacgtgcaatttttgccagtggcagtccttttgatccagtcactcttccaaatggacagaccctatatcctggccaaggcaacaattcctatgtgttccctggagttgctcttggtgttgtggcgtgtggattgaggcagatcacagataatattttcctcactactgctgaggttatagctcagcaagtgtcagataaacacttggaagagggtcggctttatcctcctttgaataccattagagatgtttctctgaaaattgcagaaaagattgtgaaagatgcataccaagaaaagacagccacagtttatcctgaaccgcaaaacaaagaagcatttgtccgctcccagatgtatagtactgattatgaccagattctacctgattgttattcttggcctgaagaggtgcagaaaatacagaccaaagttgaccagtaggataatagcaaacatttctaactctattaatgaggtctttaaacctttcataatttttaaaggttggaatcttttataatgattcataagacacttagattaagattttactttaacagtctaaaaattgatagaagaatatcgatataaattgggataaacatcacatgagacaattttgcttcactttgccttctggttatttatggtttctgtctgaattattctgcctacgttctctttaaaagctgttgtacgtactacggagaaactcatcatttttatacaggacactaatggggaagaccaaaattactaataaattgacataaccaacattaaaactcataaatt

SEQ ID NO: 51531 - DNA, 997 bp, Homo Sapiens
ctggtacccgcgtccggaattcccgcggatggaataatgtatacgggctgtaaacttctacaaaaaatgtttgctgtctttaatatggtgtcaagttacttggtcctttgaaaacaaaacaaaacttccatacacagcactgcccagtaaagcagtgttggaatattggaaacctagacatttgaggatccttcttgctcacaagcattggaacagaatcctccactttaggactcagagaagctatggagtcccacaggctaggtatagcacacaacttagagaacggtagttaaagcacgtcaaccacaattgaatttaatgatctaaaaaatatttcttaactctgagggttaaactgaagatacgttttcaaataaaagcttttaaatttcttaggaaacaaactgtgacatcgcttttaaaaatgacattcaaatgtttataatgtgtgtttttgagttggcttggactagtgcaagttcactgctggcaatggttatgccagtagttaagttaaaataagttgttaccttcagattgatgtcttgtataaccagacaatcatcttcaagcaaaaaaattggccaggaaatgtctttttaaaaaaaaaaaaaaaaaaaaagatgtgtcagccagaacagttaccattcagaccatactggaatgattttgaaatctttactatggttaaagtggcggaaggcctcgaatggcatttccatattcactctatgtaaagattgaaccccaaagatgagtttaatttcggggtggaattgaaacccagccagtgcgaaaaaaaaaaaaaaaaggctaaccccttgaaaaatttttcctttgctaaaattcacgctggttagcttgttaaaaacctggcaccaaaaattcgttaaaaaggtgccgggggggctccccaatggggaaaattctttgagattggcggggtccttaatggccttgggccctctgggtttctccattaaaaaaagcaaac

SEQ ID NO: 51532 - DNA, 636 bp, Homo Sapiens
cattgtttgtaaggctgtggatgatggttacaatgtgcagccagacaccgtggccccaatctggaacctgcgaggtgttctcagcaatgcctggcatcgtgtccatgtctatgtctccccatgagcatggaaaggagccacctccacccctttccccacccattagcctcactgcttcagaaaaatctttcccacctttcaacttcttggatcacaactctggccttcctaagccatacccaagtacacatatagcacatttcacccaaggaccttccctctttggacactatgttacatacccctcttggcctttgaacctgtgccaggaagtgtgagctgttacagcaaggggctagaagtgaaaaaagtaattctggagacaagcactattttctcttcctaccccacctccatttctaatgcctactgccatcaaggccttgttttgcttttctttttggattgttcagagaaatgtgtgtggcatgtgtaagaaaagtgtatatactatcttatactacctctccaggttgccagagagttgcgaggagagcaaggggcacaaccgtctccctttatagttctacttttctaataaatagtctgtttaagatcataaaaaaaaaaaaaaag

SEQ ID NO: 51533 - DNA, 564 bp, Homo Sapiens
ttcccagcctacacccagacccagctcagaccttcgtgaccaccccatccctttctccggctggctgggtcgggggcatccctctctgtcgctggcttccagaggcaggacaggcctcctggtaagcccgcaaagttgctgacctcctgacttcgtctgccttttattaatatctgtattgctgataaccgtgctcttgactatgtgtcccaggtcatgtcccaggtcatggagaagcccgtgccacagtgaccctccccatactcctgggggggctgctctccatcctggatcgtaaggaggcatcatcaggctgtgttcctggaaccccaataaccctgggcccccagggccagcctgttgtagagggaggctatctgaccgccggtctggcagaggagatgggtgggcagctcccagacaccccaaaggacccggttctcttcccagagcgtcctaaggttactcttggaacctgatctttgttccctcatcccagggaaatgacacactctgtatttctgttttatttagaaatgatttaaaaaacattatacaaaggct

SEQ ID NO: 51534 - DNA, 883 bp, Homo Sapiens
  misc_feature (4)..(4): n is a, c, g, or t
  misc_feature (19)..(19): n is a, c, g, or t
  misc_feature (153)..(153): n is a, c, g, or t
  misc_feature (276)..(276): n is a, c, g, or t
  misc_feature (659)..(659): n is a, c, g, or t
  misc_feature (686)..(686): n is a, c, g, or t
  misc_feature (689)..(689): n is a, c, g, or t
  misc_feature (744)..(744): n is a, c, g, or t
  misc_feature (835)..(835): n is a, c, g, or t
  misc_feature (850)..(850): n is a, c, g, or t
  misc_feature (858)..(858): n is a, c, g, or t
  misc_feature (871)..(871): n is a, c, g, or t
taangatgtagttacaatnccaagctgaatttggtgtgctggacaaggaatgtgatattgccacacttagtaacaacttgaataatgccaacaaaactgtagataatattccacctctggcagcttcagttgaacaaactctcgatgtaaganaagaaagcacctttgtttctgatttggagaaccagcccagtaacattgtgtctcttcaaactgagccatcaaggcaattgccatcgccacggacatcattaatgtcagtatgtcttggtaganactgtgatatgtcttaaaactgccaaagcatttcattgagaattatgatgttataaaaaggaaaaaggaagaatgtcgtctactgcagtctatttaaagatgacatttggtgaaaactctcttcctccttacaatattttaaatgatttttttttggtgttaatttgtaaaaatcattatttgttcaaaatgtatgccccaccctcaaagatatgcacttttaagtgaagaaaatgatactgctagcagcttatttaaaacttggggtcctttttaaataagaaaaattatataaattttagaagttatttcataaagccatacggtattgacatatttttaaggtagtcaatgagtatttttgaattttttttttttgaaanttattctggaaatgtgttataagctanganaatccctttgggacagtctttatttttcctcttaaaaatttatatgattcaaaancatttcttcaggttaaattgaaggcattttaatcttgcacagtttatcttcctgccaaaataaaaaatttactaatttccctttaaaatancttgtttaacctggnaatgccanttaaaacaaaatntttttttccccc

SEQ ID NO: 51535 - DNA, 742 bp, Homo Sapiens
  misc_feature (34)..(34): n is a, c, g, or t
  misc_feature (45)..(45): n is a, c, g, or t
tttttgtatttgaaagaacctcatactttttgtnagcttttattntacatttaatttaaagtgacttttagcactaaaatgcctagaagattttactccagacctataaggaaatgtttagtttttatgaaaaatgacaagtcgatggttaaacttctcatgtctttggtgctttggccctaatagcactggacaacaccacgaccacatggaaacatatttttggaagcaaaactttaattttatataacgtatgctatggagagctaagacaatttaaggactacttgttttctattttttttcttaataaaatggaatccactgtgttgaagactcttgatatcatgtgcttgtctaaccattttttgttttataaattagaataaaatatagttgtgataatggtcatcgaatggatttgtttggaaagctacatcttatttgtgaaatgttttttaaatcagagtaactatcaactgattcagctttttgtcgttttgttcttggctataatacttgtgactcatgaagaattatgttgacaaacaggataaattccacatgcattttatttcccagtgagttgtataaactttatttttgttgaaggttgtatgttaaatcaatgttacattcttatatcacttcttgagaaggaagttccgatttgaaattgtatcatttccttcaaaatgaagggcagtgcttagttaaataaaagattgatgatatcttttaa

SEQ ID NO: 51536 - DNA, 522 bp, Homo Sapiens
  misc_feature (463)..(463): n is a, c, g, or t
agagacggggtttcgccgtgttggccaggctggtctcaaactcctgaccttgtgatccacccacctccgcctcccaaagtgctggaattacaggcatgagccaccgcgcccggcccaatcatgtgtttttgttgaaatgatcctaccagtgattagtggctattgagagttttacagggttatacattgttaagggaccaagaatcaagtacaaaaaattaaaaaggaactgtaaaatcccttggtcattcataaataaatatctaaattaggaatactaattaattgaattttcactcatgagtatgttctgaatatttaatatttatttctattattttcatatgttaagatattccattaaatctaacttaaaagaattgtatgtataaattggcattaggatacaaatgtaaatgtttttaatgaaattttgcaactttttaatattttaacatagttntctatttgtctttatttcaagtaccagaattacaaaatatctaagtaatatatttttgt

SEQ ID NO: 51537 - DNA, 673 bp, Homo Sapiens
gcttctccgtctggtttcatgggctggaggctcccctgccccaccccttctcgcccacggttggggtctgcctggaatacgctgaccgtgccttggccttctatgctgtacgggacggcaagatgagcctcctgcggaggctgaaggcctcccggccccgccggggtggcatcccggcctcccccattgaccccttccagagccgcctggacagtcactttgcggggctcttcacccacagactcaagcctgccttcttcctggagagtgtggacgcccacttgcagatcgggcccctcaagaagtcctgcatatccgtgctgaagaggaggtgatgccgggcacgggcgctcctgctgccgtctctgctccaggaagctgcctcctctgggccctctccttcgtctgggaaggcaccagcatgagtcccacacacccagccttctcatttctagaggcttccacctttttatacactcagccttccctctcccaggcaggaggacccccagaccctgttcccctgcagacctcacttctgggagacagagctacagctgggacagctccaagctaccctaacccctcctttccccagtttctagaatagtgtctgggatgtagtagatgctcaataaacacttgtttgatgaaaaaaaaaaaaaaaaaaaaa

SEQ ID NO: 51538 - DNA, 604 bp, Homo Sapiens
cacatctcaaggaattcagctgttgaaatcatttgaactaatcaaggaataaatcctaatgttctgggactttattttcacatgttaaatgctggaatatattatgaaaatgttttcaagaaatcacttaagtgttcatagaccagtatttctgacaggtaaaatgctaaaataagctacctgtaataagtgtggattatatttttgggttttgtagaatattgcaaattaaccacacaaaaaatgtttaatttatgcaacaagcatgtttgtgcaaatttcatgggactttaaaaagaataagtatttgagaaaatatctggttcacttacactacatttactgtattattcttttatagcattaggtgccttgtattttaaatctgtgacaaaccatggcaaatttttaaaggggaagtattattataaaatgaagaaatatgtatttctaaaggctatattgctgtaaacttaattgataaagctctgtttaatttagagatttgaagaaatagtctcccttcaattaagaaaatttcataatggaatgatttaaattgaagtgacacagagtattatttatttttttcacatatgaatgg

SEQ ID NO: 51539 - DNA, 612 bp, Homo Sapiens
cacaaagctgtcagcgcagtggaagaggttgcacttctccgagagaggacaggtttctgttaagatcaccaagtagctgtgctttaattagagccagacaagctttcaaggtcctttaagtatttgatgatcaactgaacacgtttctattcaaggagaaaacaccattcagtaagaagatggagtagatatcagataaaacaattcacgtttaatatgtaaatgtaccaattatgtgattcagtttcaactttcaagtacttcctgagaggttagtacattattattgagctctcacagaaagcttaatcatagatataattaacctgatccaaatgagtaaagtggaccttagaaaggctaagtgatctttctctggctatccagctagtagtaatgaagtcaggtcttgaaccccggttctgctgactgaattggatgcactatagtacaggcttttagcaccgaagtgtggtcctcagaccagtgcctgccaaccagatgttactggtctgtgaggaaataagtacagatactgacaggaagcttttataaacaatttattggagtgtttttgtttctgttgggtctaattaaaaaaattggagcttg

SEQ ID NO: 51540 - DNA, 960 bp, Homo Sapiens
  misc_feature (800)..(800): n is a, c, g, or t
  misc_feature (948)..(948): n is a, c, g, or t
gctggaccggtccggattcccgggtatcgtcgaccacgcgtccgcggacgcgtggggtaaaacaccttaggtcaggaataataaaccaatgagttagctcagggccggtggacatgttcactggtggaccagttggcattgacctaaacggacagagaaatgcacatggaggagaactacgttgaaatcaagatcctatgtctgttgtattttctctttgcctggagtaaatagcattataagtcattccacccttattagataaccaaagcatattggtctcaatagctttctcctgaaaaatgtgattgaatcttacctgtagcagttcactcttaaggttgaaagaactgtcaatatagataaaatccattccttattattattgattggtgtgacatttgaaaatgtgtctaaacaatatttgtaagtaaaagaaccagtcataagcctcaaatgtgttcagtgtgtaccaagctggaatgggagactggcccctcttggctttaaagtagcatgttgtctttttctagcagcttcttcctagtagacattccagggatgggaggggccagggatcatgtcttactcatttctgtatcgccagcccctggcatagtgtctggcttatgttacgtgaataaatgaatgcttgccaagatctcttcttccctcaagtttctggaaaacctgagggttcgtgatacctgttcccactcctcatcagcgggctggcaagaaagcaaataaggggaaacatttttaacattccaagcaagagaaggaagaacgactatttnggaggaggtacaccagaagattgctcagtgtgcagcctgctacctcacttttggctctgggatgcctggtgggtagaagggaaagatattatgtagttagcaccttacatatttgatgctcaggaaaaaagtgcaagaagatccctantagaacataaaa

SEQ ID NO: 51541 - DNA, 649 bp, Homo Sapiens
  misc_feature (582)..(582): n is a, c, g, or t
  misc_feature (595)..(595): n is a, c, g, or t
  misc_feature (641)..(641): n is a, c, g, or t
  misc_feature (644)..(644): n is a, c, g, or t
  misc_feature (649)..(649): n is a, c, g, or t
ggggggtgtgttgtcatagagatggtgactggcaagaggccttggcatgagtatgagcacaactttcaaattatgtataaagtggggatgggacataagccaccaatccctgaaagattaagccctgaaggaaaggacttcctttctcactgccttgagagtgacccaaagatgagatggaccgccagccagctcctcgaccattcgtttgtcaaggtttgcacagatgaagaatgaagcctagtagaatatggacttggaaaattctcttaatcactactgtatgtaatatttacataaagactgtgctgagaagcagtataagcctttttaaccttccaagactgaagactgcacaggtgacaagcgtcacttctcctgctgctcctgtttgtctgatgtggcaaaaggccctctggagggctggtggccacgaggttaaagaagctgcatgttaagtgccattactactgtacacggaccatcgcctctgtctcctccgtgtctcgcgcgactgagaaccgtgacatcagcgtagtgttttgacctttctaggtttcaaagaagttgtagtgttatcangcatcccataccnttgttttaatctccctgttgttgagtgcactgactgtgaaaccttnacnttttn

SEQ ID NO: 51542 - DNA, 550 bp, Homo Sapiens
gatgatttgatccataagatttaaatgtgccaccattatagtattcctagacatgagcttgatgaatggtattctgtaattataacgtgccacacattattgtgtcttaattgcccttagcctgaattttaatgatcaatttgttattgttgcagatgtgaatattgtgcataaacttactaaatttatgtaaaattgtataaaatagaattagaagtcactaagttctttctgtgtagaagtaataaatttattgtaacacaatgcagttgtgtatatgacattctgtaattccttgaactggatcatatattcataagttctgtagatacttatgcatgaacattttctcatttagttcttgggttcattatttgtattgtgtttactacttgtgatcatgtagttgtgccttactttgtgagaaaggttagctcagtaaatactgcaatttctaaactcagtgattggaaggttattaattataaatgtaactgataaagtacgtgacagcatttaaatctgtataaagaacaatggaaggatcctt

SEQ ID NO: 51543 - DNA, 774 bp, Homo Sapiens
  misc_feature (732)..(732): n is a, c, g, or t
ctcacttgtgcatttttggcctgcaaagtagatgaattcaatgtatctagtcctcagtttgttggaaacctccgggagagtcctcttggacaggagaaggcacttgaacagatactggaatatgaactacttcttatacagcaacttaatttccaccttattgtccacaatccttacagaccatttgagggcttcctcatcgacttaaagacccgctatcccatattggagaatccagagattttgaggaaaacagctgatgactttcttaatagaattgcattgacggatgcttaccttttatacacaccttcccaaattgccctgactgccattttatctagtgcctccagggctggaattactatggaaagttatttatcagagagtctgatgctgaaagagaacagaacttgcctgtcacagttactagatataatgaaaagcatgagaaacttagtaaagaagtatgaaccacccagatctgaagaagttgctgttctgaaacagaagttggagcgatgtcattctgctgagcttgcacttaacgtaatcacgaagaagaggaaaggctatgaagatgatgattacgtctcaaagaaatccaaacatgaggaggaagaatggactgatgacgacctggtagaatctctctaaccatttgaagttgatttctcaatgctaactaatcaagaagagtaggaagcatatcaaacgtttaactttatttanaaagtataatgtgaaaacatagaatatattaaaacttttcta

SEQ ID NO: 51544 - DNA, 622 bp, Homo Sapiens
cggaaggacagcagcttctcggaatgcatgttgttcaggctccgcaggtccggcagcttgagcagcagcttggtgaagcgggaagtctccaagggccggttcttcagcaccagagcccgaagagcccgcagcagcgtctcctggagctgctccaccgaagcggaattctccatgcccgagcggtctgtggggaagacgacagcagtgaggcggactccccgagctcctctgaggaggaaccggaggtctgcgaggacctggcaggcaatgcagcctctccctgaagccccccagaaggccgatggggaaggagaaggagtgccataccttctcccaggcctctgccccaagagcaggaggtgcctgaaagctgggagcgtgggctcagcagggctggtcacctcccatcccgtaagaccaccttcccttcctcagcaggccaaacatggccagactcccttgctttttgctgtgtagttccctctgcctgggatgcccttccccctttctctgcctggcaacatcttacttgtcctttgaggccccaactcaagtgtcacctccttccccagctcccccaggcagaaatagttgtctgtgcttccttggttcatgcttctac

SEQ ID NO: 51545 - DNA, 651 bp, Homo Sapiens
gaattttgtgaaattttactttttccaagtgtttccaactttaaaaagagaagtgaagacaaataggttggaatggtgaagacaaatggattggaatttcacaggctgtgaataattccttaggatctggcaaaccgtgaagtcttatttgaagaccttatctcctgagagttcttttggagtaggaaaaagaaccctatttgaaatagaccgtttttctcttgtttttaatctgtttaatatttctgatttttaagcagctttcaaaacaagtgtggtggaaaaaaagaaatagtagtaggaagatgtttagggcagcagaactctgggtctaaataagtacatgttcccacttgttgccgatttttgagagtactagggccatctttctcaattttgtattatttgtgtgcatgtttatatcaaagatgcccattttgttaaaatgctatttcctttattaccttggaaactgactcagcctcatgttgctcctaattagtgtttaaggctcccatgagttgcagataaaatgatttattttaacaagtagaaggaggtgattcaccttttggattgtaaatatatgaaaatgtctacaaggtctttatctgctttctgtcagcatttatattaaatgataaattaatg

SEQ ID NO: 51546 - DNA, 1056 bp, Homo Sapiens
atcttgttactcaaaggataagacagacaataatacttcactgaatattaataatctttactagtttacctcctctgctctttgccacccgataactggatatcttttccttcaaaggaccctaaactgattgaaatttaagatatgtatcaaaaacattatttcatttaatgcacatctgttttgctgtttttgagcagtgtgcagtttagggttcatgataaatcattgaaccacatgtgtaacaactgaatgccaaatcttaaactcattagaaaaataacaaattaggttttgacacgcattcttaattggaataatggatcaaaaatagtggttcatgaccttaccaaacacccttgctactaataaaatcaaataacacttagaagggtatgtatttttagttagggtttcttgatcttggaggatgtttgaaagttaaaaattgaatttggtaaccaaaggactgatttatgggtctttcctatcttaaccaacgttttcttagttacctagatggccaagtacagtgcctggtatgtagtaagactcagtaaaaaagtggatttttaaaaataactcccaaagtgaatagtcaaaaatcctgttagcaaactgtcatatattgctaagtttgttcttttaacagctggaatttattaagatgcattattttgattttattcactgcctaaaacactttgggtggtattgatggagttggtggattttcctccaagtgattaaatgaaatttgacgtatctttttcatccaaagttttggacatcatgttttctaacggaaaaaaatgttaatatggcctttttttggattactaaaaatagcttttgaggattaacgcaaaaataaaataactccttgtaccaggtccagaaattggcctattaaaacctgaatttgggcagtattttataatgggccatttggcttgtgggttacaaaaaaacttccccccgggggtaataaaaatccattttgaacccaaattcccaattgcttggggaaaaaaaagatttttaccccgctttaaa

SEQ ID NO: 51547 - DNA, 597 bp, Homo Sapiens
  misc_feature (64)..(64): n is a, c, g, or t
cacaaggctgggctggggagccctggaaccgggcccagcatagcctgccccgggcggcagcccntggagcggacagaaccctcgccacccccttcagctccccgggagcccgatgaggggctgccctgtcctggctgctgcctcggccccttcagctttggcttcctgtccatgtgcccccgccccacaccagctgttgcccgctaccgcaacctgaactgtgaggcgggcagtctcctctgccaccgagggcaccacgccaagccacccacacccagcctgcagctgcctggggcacgctcttagcagtggagcccgtggtctcaggcctccaactttggccttcaggacaccctgtaagaacagagcacacttgctggacagtgccagttccagatgggctgaccggctcttctccccgtgtaggggagccccagcatggactcaagggacagagcacttccagtcgaccccccggctcgcgttcccgtggggatcactgaaccagacacagcattgctgacacatgagactaacacgtgcaattatttaaaaagatttcaataaaactgcctggctggctccgggccgccccta

SEQ ID NO: 51548 - DNA, 571 bp, Homo Sapiens
attcgggcaagtgcaaagtcttggcctatgtgtgacaaagaggtatatattaaaggaaaagaaaaatgacatgaataagaaaattccgtcaacaaggttggagtagggagttgttgaggggtttagttgttttaaaaggtatgtgagggagtggtggggtggatttgtgtttctgactttttttctttaagcaaattccatatgttaccaaaagcacatgctgtatattttcttcccctttgtgtgtatatagtattttgaaagataaatgaatgggtatttgtatgtgggatgtacaaaatgtggccgctctcttgtggaaggaaaaaacataaatgaagttaatgcacttcttttcctagcccaaaagtcactgtgattatatttttttaatgaagtttagaaaaaaagctgtggtcttctcaatggtaaaattagtttcaaaatgctgcttctcttatcattagtctagtaattgttgaacttttctgcaaactgcattttacaaaattgaaacttggaagctgtattaacttttatagttcaacatgtatttaataaactatactat

SEQ ID NO: 51549 - DNA, 729 bp, Homo Sapiens
gctggggctgcccgtgctgactcttcaaaggcatcccatcctgcagatggtgttcacagggagagtttgtgggggccggcactccctcatctactggggctcattctggaagaaggtccagaagaattggagacccctgcccctcacccaaactttggaggtggcagggtgaacagcaggccaagttcaggtcccaagacaggccaaggccagtgcggtttcccttccactgcctcagtttacctgtattcagaagacagtctaggaagagttgagcagagttccctctaaaagagtagggagctgataacagtcccaagccctcctctttctctatgccaaaatcatttccgttatcctgagatgggggtgagtggatggatggtgtactgaggggcctctgccctgcccagagcccccaccatcgtagtgggggcaggggacttcctgcccacaaccccctccaaccctcacctggcgtgcccgggtcaccagcagcagcagcggcgttccatcgctcccaagatctgggtgaaggggagaacactgccatcttatccctacccccccggggccctcaagcttattttcttgttgaagaaacacaaaaccctcgagattcatgtactgtatgttggagaaaaaaaattacctaatgttcccccaaaaaagacagtatattttgtactttgtaaagtgttaattaaattgaaaaaaaaacgaaaaaaa

SEQ ID NO: 51550 - DNA, 689 bp, Homo Sapiens
  misc_feature (663)..(663): n is a, c, g, or t
tgggagtttacaatcagaacctggaccctaaagaacagtgactgcaaaggcaaagaaagtaaaaaaggaattggccattagacgttcctgagcatccaagatgaacattttgtagtgcaaaaagacttttgtgaaaagctgatacctcaatctttactactgtatttttaaaaatgaaggttgttattgcaagtttaaaaaggtaacagaattttaactgttgcttattaaagcaacttcttgtaaacatttatcattaatatttaaaagatcaaattcattcaactaagaattagagtttaagactctaaacctgatttttgccatggattccttctggccaagaaattaaagcacatgtgatcaatataacaatataatcctaaaccttgacagttggagaagccaatgcagaactgatgggaaaggaccaattatttatagtttcccaacaaaagttctaagattttttacctctgcatcagtgcatttctatttatatcaaaaggtgctaaaatgattcaatttgcattttctgatcctgtagtgcctctatagaagtacccacagaaagtaaagtatcacatttataaataccaaagatgtaacaattttaaaattttctagattactccaataaagtgttttaagttttcctatganaaaaaaaaaaaaaaaaaaaaaaatgg

SEQ ID NO: 51551 - DNA, 993 bp, Homo Sapiens
gatgccgcgggctgcgggagtgccctgctctggcctcgcttgttgctcttcggggactccatcacccagttttccttccagcagggtggatggggagcatcgctggctgacaggctggtcagaaaatgtgatgttctgaatcgtggattttcaggttacaataccaggtgggccaaaattatccttccaagattaatcaggaaaggaaacagtttggacatcccagtagcagttacaattttctttggggccaatgacagtgcactaaaagatgagaatcccaagcagcacattcccctggaggagtacgctgcgaacctaaagagcatggtgcagtacctgaagtccgtggacatccctgagaatcgagtcattctcatcacgccgaccccactttgtgaaacagcctgggaagaacagtgcatcatacaaggttgcaaactaaatcgcctgaactctgttgttggtgaatatgccaatgcgtgtttacaagtggcccaagactgtgggactgacgtacttgacctgtggaccctgatgcaggacagccaggacttctcatcttatttatcagatggactacatttgtctccaaaggggaatgaatttttgttctcgcatctctggcctttgatagagaaaaaggtctcttctctacctttgctgcttccttactggcgggatgtagcagaagcaaaacctgaattaagtctgctgggagatggagaccattagccaatcacaggagacccaaatctgcttgttatctacagaactcaaagttgtcaatacgtagaggtacgcttttttcctcaggcttaaacctttgccactgatattaataataaaagtattagatgatttttcagggaagttttatacttaggtccattgtgtttcgacagtatttattaatgcagatatcagtgctacagctataaaatataccctgagcagcttgttaattctataaatgacaagactatgttttta

SEQ ID NO: 51552 - DNA, 676 bp, Homo Sapiens
gctgaaggtgtgacagcttagtggacaagtttgtatatagtgagaattttacgacacttttaaaaatgtgtaatgttaaatgtccagtttgctctgtttgcctgaagttttagtattggttttctaggtggacctctgaaaaccaaaccagtacctggggaggttagatgtgtgtttcaggcttggagtgtatgagtggttttgcttgtattttcctccagagattttgaactttaataattgcgtgtgtgttttttttttttaagtggctttgttttttttttctcaagtaaaattgtgaacatatttcctttataggggcagggcatgagttagggagactgaagagtattgtagactgtacatgtgccttcttaatgtgtttctcgacacattttttttcagtaacttgaaaattcaaaagggacatttggttaggttactgtacatcaatctatgcataaatggcagcttgttttcttgagccactgtctaaatttggtttttatagaaattttttatactgattggttcatagatggtcagttttgtacacagactgaacaatacagcactttgccaaaaatgagtgtagcattgtctaaacattgtgtgttaacacctgttctttgtaatcgggttgtggtgcatcttgcactacctggagttccgtttc

SEQ ID NO: 51553 - DNA, 692 bp, Homo Sapiens
gcaaagatggcaacatgcagactgcaaagccttccgctatgaaggtgggggagaagctggccacaaagtcttctccagtgaaagtaggggagaagcggaaagctgctgatgagacgctgtgccaaacaaaggtattgctggacatcttcactggggtgcggctttacttgccaccctccacaccagacttcagccgtctcagacgctactttgtggcattcgacggggacctggtacaggaatttgatatgacttcagccacgcacgtgctgggtagcagggacaagaaccctgcggcccagcaggtctccccagagtggatttgggcatgtatccggaaacggagactggtagctccctgctaggtttgctgtcttccctctccctcaggccatactctcctttaccatactactggactggactcaggctggaggcagatagacacagtatagggggaatgggcttgcttctcccaaacccaccagttctccactgtctcttctggaccaggaattagttgctgtgggtgccacagctgaagtcagtttgtcttgctggtttaaatagatctttcagagctgggtgctgggtttgccatctttttgttttctttgaaaagcagcttagttaccctttttataaataaaatatcttgcagttaaaaaaaaaaaaaaaaaaaaaaaacgcgg

SEQ ID NO: 51554 - DNA, 668 bp, Homo Sapiens
  misc_feature (148)..(148): n is a, c, g, or t
  misc_feature (224)..(224): n is a, c, g, or t
  misc_feature (227)..(227): n is a, c, g, or t
gcggccgcggctgtaggctttttttagtttgaacaaacgttcttgtctaccccagtagtcacagatgccatctttgcaacagaaagagtggtggtggcaaaatttctagaatgttaaaaaaaaaaaaaaaaaaatccacacccatgtngccttctcaaaaccaactgaacttctataaagcatctctggttctttcaaagtttgtgttgtaaggagcaatgtanatnatgctataatactttatatttttgcttataatgacaaccaccagttctttttcacttaagttaggttgagaaattttatttaatggccactgaagggccattttcaattgggaaaatttatttacatctgtggtaaactttattttgatgaaaagttgcactagtattttaccaccagatgagaaaaagatgagcagcatttaaaaattaatgtatttaaaataaagtacagagaaagacatgtatataattatcaggctttgttttgaatggaatcttttcccccaattcttaatgtaaagatcttgtgctataacttttaaagccatacaaataagagtgctaaactgtggacttaaaagtaggtgtgtaaatatttttaatcagtattacttggaaaataaaatataacaaacccaaaaaaaaaaaaaacctcgtgcc

SEQ ID NO: 51555 - DNA, 889 bp, Homo Sapiens
  misc_feature (806)..(806): n is a, c, g, or t
tctgagggagactgcaaatgctattgtcagtcagcaaactccacaaaggctccttgaagttcgtggaaggctgtatgagcttctaactcattgtattcctcctgagataataatgaagggccttctctcagaactgttacataattgtgatggacaactgaaaggggaggtggcacaaatggcagcttactatgagcatcgtctacagctgggtagcaaagccatttatcacttggaagcgtttgtggccaaattcatggcactttataagaagttcatggaggatggattggaaggcatgatgttctgacttctgtcagttattcttgcaaagatttctcagtatcagtatttacatacagcttatattaaaagagctgtgggtaaattaactgaacttaatcatgtcgtatttgcgtttttttggtaataacttctctgtgaactattaatcatcctctgagttaaataattgctcctatactattgaagtatgtagttttgtacataacttagagactttagagtctaagaaaatgatcttaatttactttaagcattggttattcaagtattcattgttgatcctcctattctcttccgtctaatctctcacctgctaaaggagatttacacattagaaagcaaagattattttcatttatccagatgaccattttctgccacaggtaacatgattgtttgacacaccattatatttaattctagtttctctcaatgaataaatgtatttttgtaggaaatgtaagatttcattctgaaacataattattggtatggacaanattgcagataccatttctgttgaggctgcaaatttccaacttttatttcagtgggtcaaattaataattagggcggtactaat

SEQ ID NO: 51556 - DNA, 758 bp, Homo Sapiens
  misc_feature (719)..(719): n is a, c, g, or t
tagatcatgaagtcataggcttccaaggcataggaagagatcttgcaggtctagtattttaataatgcactattacccagggcagatattatgagaaactgtttcttctctaagggtttatggcagactttgcttttttaacatgtgagaaatgaattttttattttgtgatttatgtgatttcttttgctgagtgaaggaaaggagaaattgttgctattgtcagcatcttaaaggtatttccagtcaaggcaaggctaagtgctttgtgatagtattaagcaagtcatgttttgaatggattacctgtagtgactcattggaatgatataattatacaagtaatgccaaaaaccaagtcaaagcctaattaaccaaagcactcatttaaaaatcatcatgtttggacctatctggacctctcagcactgtaaaatagttttggttttgtggcatatgaatagctgtttaacaaatcaaagttagctttttgcttctcagcttttttgggcaatacaagttaagttcttaatggggagacattatcatggcatgacttaagggaacattggtttgtgaaggaaaaacagattatctaaagccatctctatgtttctggtcacataaagattaatgagttctgtggttatatcagctttgtatatttcatcttagccattctatcctagaaagattttaatggggagcttaagatgtanataaaataattttgccaaccaaaaaaaaaaaaaaggggg

SEQ ID NO: 51557 - DNA, 602 bp, Homo Sapiens
cagcaacatgggcttgagtgagtccagcagccttgggtcagccaaacaccagcagcagtctcctgtcagccagtctatgcaaaccctctcggactctctctcaggctcctccttgtactcaactagtgcaaacctgcccgtcatgggccatgagaagttccccagcgacttggacctggacatgttcaatgggagcttggaatgtgacatggagtccattatccgtagtgaactcatggatgctgatgggttggattttaactttgattccctcatctccacacagaatgttgttggtttgaacgtggggaacttcactggtgctaagcaggcctcatctcagagctgggtgccaggctgaaggatcactgaggaaggggaagtgggcaaagcagaccctcaaactgacacaagacctacagagaaaaccctttgccaaatctgctctcagcaagtggacagtgataccgtttacagcttaacacctttgtgaatcccacgccattttcctaacccagcagagactgttaatggccccttaccctgggtgaagcacttacccttggaatagaactctaaaaagtatgcaaaatcttctttgt

SEQ ID NO: 51558 - DNA, 444 bp, Homo Sapiens
ggcacgagggaatttgtcaattgatggaaagattttaagtgatgactgtgccaccctaggcacccttggcgtcattcctgaatctgtcattttattgaaggctgatgaaccaattgcagattatgctgcaatggatgatgtcatgcaagtttgtatgccagaagaagggtttaaaggtactggtcttcttggacattaatctttgaatacttgctgactgctaagaaatgaccagaggggaagaggagtttgacatgttagggcattaaagcaaaggtggatttaagaattaaaccattacatgccccttccaaaaggcagaaatccattcaaacgtgactgtcccaaatgccttatgtcaaataaagcagattgcactgatggacatcagacttgaaggaaatgtttccaattttatatttaaggggggtggtgggtgggagg

SEQ ID NO: 51559 - DNA, 623 bp, Homo Sapiens
gcggccgctgaggcgagtggaaacctgaggtcaggagttcgaaccagcctggccaacatggtgaaactgcatctctactaaaaatacacgaagaaaaaaaaaacagtgggaacagagttgtcacctacctaacagggctctgagagagccgggaggcccaaagtggctggaagaaggtaaaggaaaaatcctgtcttgggctcaaggtcacagagtggggcccagggggagttcctgctgagggcagggccttgccaggcttcagtctccagtgccaaaggaggaaatgcccaggctgtcagcatttccagatgagagcagaagggagaagcttaaacccaagtcacacatccagcaatggagtccgacagcccagcaccatctgggaactgagaagcacctctgcccggcccccacaccgtgtggaaagtgaggagcacctctgcctggccgccaccccgtctggcaagtgaggagcgcctctgcccggccgctgtgcaaccttccaagtgtgaagtgacagccttgtgtgtgatgttttctgccttccccaagtttgcactttcgacattaaagtttactttttagttaaaaaaaaaaaaaaaaaaaaaaaaacctcgtgc

SEQ ID NO: 51560 - DNA, 634 bp, Homo Sapiens
ccgcctgcgacccgcgccacggccgctacctgacggtggctgccatcttccggggccgcatgtccatgaaggaggtggacgagcagatgctcaacgtgcagaacaagaacagcagctacttcgtggagtggatccccaacaacgtgaagacggccgtgtgcgacatcccgccccgcggcctgaagatgtcggccaccttcatcggcaacagcacggccatccaggagctgttcaagcgcatctccgagcagttcacggccatgttccggcgcaaggccttcctgcactggtacacgggcgagggcatggacgagatggagttcaccgaggccgagagcaacatgaacgacctggtgtccgagtaccagcagtaccaggacgccacggccgacgaacaaggggagttcgaggaggaggagggcgaggacgaggcttaaaaacttctcagatcaatcgtgcatccttagtgaacttctgttgtcctcaagcatggtctttctacttgtaaactatggtgctcagttttgcctctgttagaaattcacactgttgatgtaatgatgtggaactcctctaaaaattacagtattgtctgtgaaggtatctatactaataaaaaagcatgtgtagaaaa

SEQ ID NO: 51561 - DNA, 693 bp, Homo Sapiens
gtccgtagaaattaaaggtgccttatatcccaatgtcacggctacatccctatggaaattaatcagaagcacagtgtgtacggaagcattgggacttctgctggtgaaacaagagaccattcagcaagacacattgaagtggcacggagctgcttttgttttataattcttttttccccccttttccttcttcttttttattattttattattttttttgtactttgctttaaacggaaagcacttaaatagatgactatgtgtaaaagctctgtgcaattgaaatcatttttcttcattttaaaaaaataacgtattgcacaccaaatgaactcaaagtaagctttagaccaggacgattcaggttatgaatgagtttgttcactgtagttccgtttgttcatgaaccgaagggaaaacaggcctccccgactccctccagtctcccagcctgcctcttggtgaccactgtgctgggcgtgcagggcccgcgggctctggccggagccgctggcctgacgaggcaggatagggagtatccgtgattcagaagctgagacccttccccagtgtctgaggccacagccatcccttccagcacttaatcttgtcttgttgaaatggactgactgctactgacctgccggcgtgcgtgagggtgattataaaaggatgtttccttgaaaaaaaaaa

SEQ ID NO: 51562 - DNA, 687 bp, Homo Sapiens
  misc_feature (24)..(24): n is a, c, g, or t
attgttttaattgaatatttaatnataatagactttgtatgaactaagctgatttaatcagtttaaaaacctctcattaccttcttagattaaagaagctaatactgttttgagatagaaggaaatattttgtggggcatgtgacttttgtgttaaggcagtttacccatcttggctgatgtggggaaagtgcaaacttccagtagaatcccggtcttttcatccaagtgcttgcaggggcagccttgtagtctgcaaagaaccatgcagaaaccaaagagcttgcttttttgtctttgtaattccttagggtctgtgatatatgccaggaaatctgattgaaactaatatgctttttattctcccattattccctaaattgttatatcacaggcacttgcctacattgggaaagtaaggacaaataatacccatttaaagtaacttgcctatattttgactgtctttcgtaagcacttgctgaactgctgacttaactcagttttaagatttcctctttccccccaacttttccacatttcttaaatgagggtgtaatttactgcaaacatgtacatttaatataatattgctgttagattcgtggtacactttatgaagcaaaaacatgaaaaggaaaccacaactctaataaactttaaattaaagattaaaaaaaaaaaaaaa

SEQ ID NO: 51563 - DNA, 927 bp, Homo Sapiens
cggcggtcgagatcgtgctgccatggctcagcctctgkttccagagcctcagctcctacctcttccctccttgccakcccctgatgcctgccagacttttgcctctgctggagcccctgcctgaccagcttcccctccctgtctggttgggatttgggggctgagctgtctggggtcccagggccaaccaatgcagtgccggctcccgcggggcctggctggagccctcctcaccctcctgtgcatggggctcctgtgtctgcggtaccacttgaacctgtccccgcagcgggtacaagggacccccgagctgagccagccgaacccggggccccctaagctacagctacacgatgtcttcattgcagtgaagacgacccgggctttccaccgcttgcgcctggagctgctgcttgacacgtgggtttccaggaccagggaacagacatttgtcttcaccgacagcccagacaaaggcctccaggagagactggggtcccaccttgtggtcaccaactgctccgcggaacacagccacccagctctgtcctgcaagatggctgctgagttcgacaccttcttggccagtgggcttaggtggttctgccatgtggacgatgacaactatgtgaacccaagggcgctgctgcagcttctgagagccttcccgctggcccgcgacgtctatgtgggaaggcccagcctgaaccggcccatccatgcctcagagccacagccccacaaccgcacgaggctggtacagttctggtttgccactgggggtgctggcttctgcatcaatcgcaaactggctttgaagatggctccgtgggccagtggctcccgtttcatggacacatctgctctcatccggctgcctgatgactgcrccatgggctatatcattgagtgcagctgggsggccgc

SEQ ID NO: 51564 - DNA, 1112 bp, Homo Sapiens
  misc_feature (644)..(655): n is a, c, g, or t
  misc_feature (657)..(734): n is a, c, g, or t
  misc_feature (736)..(738): n is a, c, g, or t
  misc_feature (740)..(750): n is a, c, g, or t
  misc_feature (752)..(755): n is a, c, g, or t
  misc_feature (760)..(764): n is a, c, g, or t
  misc_feature (772)..(773): n is a, c, g, or t
  misc_feature (776)..(778): n is a, c, g, or t
  misc_feature (783)..(783): n is a, c, g, or t
  misc_feature (790)..(790): n is a, c, g, or t
  misc_feature (808)..(809): n is a, c, g, or t
  misc_feature (841)..(841): n is a, c, g, or t
  misc_feature (880)..(880): n is a, c, g, or t
catttttgtattttaatagtctacaggctatataaaagaacatggctttttgactgataaaagtgattacagatgttggctcaagttcagggccaccatcatatacctaacaagagttcatgattctttaggtaatgtcaaaacattttgtatttttccatcttaagctttataacattttgtgagtaagacaaatgttatttaaaattcttgttgtcagtccagcaattgaggctttcatagttcagtgttataatattcagtagggaccctcaacaaatatataaaaatatgttgctcactctataatcctcctatggctaacctctaggatagttctgccactatattttacttctttgccatcagcaagagtaggatttcatcaaggcaaggtaggaatctaaatgaaattgatatataaatgaattgatctaaatgtaaaagcaaatgaaaaatgcatgtgttttttcctgtcaaacatgtatacccttatgtatagagaccagtagtcacgtatggtgactgaaacaggattatgtaatccctaaaaagcagaatatgtaaaaatcacatgtatgcgtttggtttaggaatgtgcttttgtacttccacttgaataaaggtgtgtttggtattctgannnnnnnnnnnnannnnnnnnnnnnnnnnnnnnnnnnnnnnnnnnnnnnnnnnnnnnnnnnnnnnnnnnnnnnnnnnnnnnnnnnnnnnnncnnncnnnnnnnnnnnannnnccccnnnnncccccccnntcnnnccccnccccccncctctttttgcccccatnnttttccctattttttggcccctctttcttttnccttgccccccctccccgccttgtttacaacctcccctnaactgggaaactctggcgaaacttaccctccccttccggaggagaacccctctctttgggggggggggtgacccaattcgggagattaaaccgcccctcaacggaaaattttaaaacgctcttggggggggaaattacacgaccgttttaaaagaggggacaccggttggtgtttaaccccactctggacatagtttcccctgggtgcgcctgaaaaaagggtccctccctc

SEQ ID NO: 51565 - DNA, 756 bp, Homo Sapiens
  misc_feature (629)..(629): n is a, c, g, or t
tccttcctggaggttctaggggagactctgtctcctgctccttcaggctgctggcagaatccacatcctttcggtggcagggccaaggtccccactttcttgctgactgtaaactaaggccacttccagcttgtagaggctgcctacattccttggctcttggccccctcctccatcttcagagctagcaggttcagtctgtgtcacgaaccatttctctggttccctgcagacaggaaaggttgtccctaaggactcatgagattaggttgggcccagccagataatacatgataatctccctcctcaaggtttttaatattaaacacatctgcaggacacattttgccatgtaaactaacattcactggttccagggattaaggaatgaacctcttttgttggggaagggtggcattctgctgaccacagcactccaaccaaaagccaaaaaccaaagcaagacttactaacgcatatcaaataaattaaaggtacaaaatcgtgaatctcagttatcttaaatattccaatactatttacaaaattattcaaattctcacgccttccaactcaaaattagcaatctaaagtaatttccatatcctagatggaaaccctcatgctanactgtctgattatgcatggttctaaatggtttcagtggcaaatataacattgtactactgattaaactgaacttaaaagcatcaataccaccattgctgcacttaaaaaaaaaaaaaaaaaaaaaaa

SEQ ID NO: 51566 - DNA, 895 bp, Homo Sapiens
agagcctgtcatagggaactgcatggatagaagttctccaggacaagcagtggagctgccggatcacaatgggctcgggtacccagcacgcccctccgtccatgagcaccacaggccccgggccctccagagacaccacacgatccagaacagcgacgatgcttatgtacagctggataacttgccaggaatgagtctcgtggctgggaaagcacttagctctgcccggatgtcggatgcagttctcagtcagtcttcgctcatgggcagccagcagtttcaggatggggaaaatgaggaatgtggggcaagcctgggaggtcatgagcacccagacctgagtgatggcagccagcatttaaactcctcttgctatccatctacgtgtattacagacattctgctcagctacaagcaccccgaagtctccttcagcatggagcaggcaggcgtgtaacaagaaacagagagttttgtgtacagcttgggaatgaaaaggttgattgtaaacccacagtatctagcagcgttgtgccaaattgcccttgtgtttctctccacccaaaatatcacagctgctttcctcacatttggttcatccgtgtgctgttcttttgggttctgagagggttttgccatgtttgcttgtatgaccaagtcaccaaggaaataaacaggaaggaaatccatgttctccatcttttgtgaaagtatatttgagttggtggttttttgttttgtttgggggtttgtgttttgttttgtttttggtatgttttcttccagaggtgatatactttcttttttttcttcctttcttttttttctttcgttccttttttgaaacaggagagcaaagcagttagagttcagaggccagcggchcaggggccac

SEQ ID NO: 51567 - DNA, 681 bp, Homo Sapiens
  misc_feature (468)..(468): n is a, c, g, or t
  misc_feature (662)..(662): n is a, c, g, or t
actcctttagtacactgagaaaaatcttatagtaaaactagcctttcacattaaggttttggtgtgtattttgttaaataactaacatgctgctctattttctgggtgtagaaagtatttggctctaggaaacatttacttgtttgtgaaaacaataccccaaggtaataggaaaagtttgagttaagtgtttttaattcagtcagtgaattcagaataagtacattcatgtataacatagggacagttctgctgctgttatttatatgcaattcttctggtaaatagcaatagaataaaacatatttcaatgtttgtgtataggttttatattattattccactaggaatggcataagaatttatagataaattcttgtaacattaaaggattaaaatgtttttacattgtttttgcgtgactccttcttgtgcccatatctgataagctttatggattattgcatntaaatccttttatttggagggttttacttccttgctaacatataaagttataaatgaacgacaaggaggagatggacaatgtgtatttaatggtaattctttaaatagtgtgtaaataaaataccatagtgtgccttaaagaaatgtgtttgtagtgccttaatttaaattaaaatatttttgactgccaaaanaaaataacccaattaaaac

SEQ ID NO: 51568 - DNA, 826 bp, Homo Sapiens
  misc_feature (767)..(767): n is a, c, g, or t
  misc_feature (783)..(783): n is a, c, g, or t
  misc_feature (790)..(790): n is a, c, g, or t
  misc_feature (809)..(809): n is a, c, g, or t
ggactttgttaaaaaaaaattgcattttatatgattcctgccatttgctgctaaatctgggctggtcagaatgctgcagcgatacttgatctatataaaaacctggcagtaaaatgtagagtgaaagttaaatcctcttgctgttttaactttatcataaagatgacataggcaagctgtgcagctttacattttaaccaggggactctgtggcatttaaaaccgtctagaaatggttgtactttaatgccagtaataatctgcttcctctattgtcattaaaatatatacgtttagtgtatcacacaaaccaatcttataagggtaatgtaaaaaccccaacaattgtacatgttctgtttttgaaaattgtggcatgtatttttgggtgaagatcattagagaagagttctctaaaggttttctgtgttcatacatggtatacagatagctcataatgaagtccagaatcttacttttaagtgaaggcattgtgaattcacctcaagtaaacccattgttccaaagcaattataaactttgactctagtactactatgatttaaaaaaaaaaaaaaccaacaaaaacctttttttcctagtttcagatacactgggattctttatagagtttggtctccatatgaaagcatgctgtccagtcgctcttgttaagatctttgcctgagttttgaatttgggtgccacaccttttccagtcaaatataattgctttggtctactgtaccatggtatggattcctggncctttccttatatccnttcatgnaccgaattatgattgtggncttttattattgtgccc

SEQ ID NO: 51569 - DNA, 587 bp, Homo Sapiens
gtcctttgtggtgcttgttccttgaaaatgtttggtcattctagtgttttgctttcttttccttataataaatgacccttttcctccataacttttgatttctaaggaaaatattagcatacatttcaaactaaatgttttacagtggcttatcttttttttccccctgaaaagactaatttggtcaaataaaccactaagtattaagcatggacagctgttgttagagtagcagattcagttttttgatatatcttaattgtgtactttgtgaattttaatttaaagaaagcaactgaaattgaaatcttgagggcagctgtatctactaatgagccttattccatttcctgatgttttaaaagaagaaacactgccttgattatacgaatacactcagaaagtacatttagcttgtagtgttgaattctcttaaaggaatgcttgaattttttcattattgttttattgtttttatatacttgccttatttgaatgtttagcagtatccccttcccacttatatattgtgtgatatgattttgcttgcctataggagttaaaaacttttccatgtgaaatactct

SEQ ID NO: 51570 - DNA, 621 bp, Homo Sapiens
cacgcgtcccactattcgttgctgaagagcttaacttttttaaaggctttctcttatacatttagaagatgagtcagttgaattagtactggacaaacagttggagattagtttgcaaataagcacatcatatcaaatacaatattccagccaaccagttaattctcttcctggttacattcattgggtctatttgcctaatgttgacaattagattcttggaccaagtgagggtgtactctgatccacaaagctcttttataaaccaggtttgaggttgtgtgtgtgtgtgtgtgtgggtgtgtgtgtgtgtgtgtgtgtgtgtatgtttgcatattatagctctctttaagacagacatctaaaaagattttggttattctgggctgccagcagtacgtgggaaaggtggaatgtgcaataggaacagatctgtgcattttgtgacatcgtccttcctgctgtgcacatcagctgtgatgacattttgagggtagttttaatttagctcggttctcttgttggtgccagtattacattgaagactacctatgatagaggcaatgttgctttgaaaatctcccttcaggcggaggttgcagtgagccgagattgtgccat

SEQ ID NO: 51571 - DNA, 583 bp, Homo Sapiens
  misc_feature (458)..(458): n is a, c, g, or t
  misc_feature (548)..(548): n is a, c, g, or t
gagatgacactacagagctgagcagtgctgagagatacaaccccagaaccaaccagtggtctccagtggtggccatgacatcacgccgtagtggagttggcctggcagtggtcaatggacagctcatggcagtaggaggttttgatggcacaacatacttgaagaccatagaagtttttgatcctgatgccaatacatggaggttatatggcgggatgaattaccgtcggctagggggtggcgtaggagttattaaaatgacacattgtgaatcccatatttggtgaacacagagaagacagtcttgtatatattcctctgtattctggggagctttgaccttggagctttgtacagcttgagaaaacattagaacaaattttattatttgccggtgcctcaacaaatggaaatacaatccaatgaaagtacttcacctgcaagatgcacaataattntcaactctgtgcagaagaatatttatttttggttttaatttatcatggttttttgttgttttcgttttgaacttatccttcctcccacanaaaaagaaaagaagaaaaaattccaagcagcaaaa

SEQ ID NO: 51572 - DNA, 808 bp, Homo Sapiens
tctgaactctcttgaaggacatgaatggcctaaaactgatttttttttttccgttaaaatgtgtgtgtcaagatacggagatttcagggttaaagtatatttcagttttctttagggcaacatatatttgaatttaaaagcactttatttaaaaaaaaaagaagttttcagttctgaagaagtcatttacagtttgcatcattttaattatgagtctgacaaaaccttctccagagaatcaagcaagacctggatgtgaagaaggtttgggtaaactgcatgtaaaggctacaaatcacaatctgattcctcccaaatataaaggcatatggaacataatgtattaaccaaagtatgttataaatcaaaaatggtcaaggttcagcatattctatatgaagatcacaaggtggtatcgttttagatttctatgaaggctttcatttgtacatccctttgaaaaaatataacagatttaaaatgttttgaatttaacttgtttagaaaaactaatgcttaaaacaatatttgaactactgtatttataatttattacctctaattgctttatttcagtgtatgagacattactgttttaatgtttgctttgaacataatttaagaaccagatttattttctatagtgataaacccttttttctcagaactccatctttgtactcttcagatgaatatatagacactgtggcatacattttttttcattaaaaacttatggcttcatacaacactagttcaattttttaaataaactttttattatggtacatgtaaaaaaaaaaaaaaa

SEQ ID NO: 51573 - DNA, 565 bp, Homo Sapiens
ccacatcagagtcttgaggatgacgctcagcctgcagattccggtgaaaagaagaagagtttttccacctttggaaaggactccccaaacgatgaggacactggggataccagcacatcatctctgctctcggaaatgagcagtgtgttccagcgtctcttaccgccttccctggacacctattctgaatgcagtgaggtggatcggtccaactccctggagcgcaggaagggacccttgccagccaaaactgtgggttacccacagggggtagcggcatgggcagccagtacgcattttcaaaatcccaccaccaactgtgggccgccacttggaactcactccagtgtgcagccttcttcaaaatggctgccagccatggaggagatccctgaaaattatgaggaagatgattttgacaatgtgctcaaccacctcaatgatgggaaacacgaactcatggatgccagtgaactggtggcagagattaacaaactgcttcaagatgtccgccagagctaggagattttagcgaagcatttttgtttccatgtatatggaaata

SEQ ID NO: 51574 - DNA, 924 bp, Homo Sapiens
  misc_feature (889)..(889): n is a, c, g, or t
  misc_feature (891)..(891): n is a, c, g, or t
actgaattcaaaagaaaaatcttgctgctttttgtccagggcttgttctattcaacttctaatttgaaagctgtacaaagtaatagaagttccatttaaatatgagttcaaaactgtatttactttttatgtggccctctctttaggggattctaattttacttagggtctctaagtgcagcataatgttcctgatgttaacagaagactgtatttttaaagttacaaatttgtatatggaattaagtaatggcgctatatacgctgttgtggggaggggggaagaaaaggaggaaccaattaaataggaccttttaaaaattgttaattttgtaaactttgcttctcttataagttattgtgattcattttagttactgtgttttattttgaaaatatttaaatattgcacttctataaatagtatgataaatgcacagacaattgcagtaaattcttttttaagctaggatatttgaaatgacaacctttggttaagtgtgtcaaggttgcaacagaattttcacaatttttttgttgtttgcaaattgttactaatattgaagaggtaagggaggcaatgcaaatgatttttaatctttttttattatcttttcagcagtttatattttttgtgactttatgcaaccatatttttactttgtcttgacaactgaaagatgtataaagttttttgccagaaatgtactgtatacatagttttaagtataacagattttactgatatgtaaaaattttgccattaaaataaatgatttctccctggagagaaacttttctaccaggttgggggcatatggggacctaatatatcatatccaaatttaaataatttccctgaaataaactccattggcttttacctcgngngggggtgtaagcaccattttttattagggcggg

SEQ ID NO: 51575 - DNA, 542 bp, Homo Sapiens
caggttggggcatatgggagcttaatatatcatatctaatttaaaataatttcactgaaataaactccattgcttttacctaatttttttcttgagatgcttttgtagtttttcagagttttagatgattttatacaaaatcctctgcctagcactgctctttttgatgttgtagtgacaccatttacattgaattaatgcttggtagcctggggctagatgtggaactccatggatctgtgttctgactggcacctttggaatgaaagaaaagtgtgtgctgtccaaattttttccccttaattctttccctcatcttctcacccataatagaaattttatttccattgtgagttctgacaagaatgaaattccacatacaacataactgtaaattgttggtaggtagaagttaatatttgtggttcatgtatattttgaccagagtatatttaagtatataatttcagcttccttgatttagaaatatgatataataaagaaaaactccatttaaaaaaaaaaaaaaaaaaaaaaaaatg

SEQ ID NO: 51576 - DNA, 976 bp, Homo Sapiens
  misc_feature (685)..(685): n is a, c, g, or t
  misc_feature (693)..(695): n is a, c, g, or t
  misc_feature (766)..(766): n is a, c, g, or t
  misc_feature (787)..(792): n is a, c, g, or t
  misc_feature (795)..(795): n is a, c, g, or t
  misc_feature (798)..(800): n is a, c, g, or t
  misc_feature (802)..(819): n is a, c, g, or t
ctggaccggtccggattcccgggatgaagataccagatcccttcccacccctttgcaccggtcccactaaggggcagggtcgagagaggaggggggatagggggagcagacccctgagatctgggcataggcaccgcattctgatctggacaaagtcgggacagcaccatcccagccccgaagccagggccatgccagcaggccccaccatggaaatcaaaacaccgcaccagccagcagaatggacattctgacatcgccagccgacgccctgaatcttggtgcagcaccaaccgcgtgcctgtgtggcgggactggagggcacagttgaggaaggagggtggttaagaaatacagtggggccctctcgctgtcccttgcccagggcacttgcattccagcctcgctgcatttgctctctcgattcccctttcctcctcactgcctcccaagcccaccctactccaaaataatgtgtcacttgatttggaactattcaagcagtaaaagtaaatgaatcccacctttactaaaacactttctctgaaccccccttgcccctcactgatcttgcttttccctggtctcatgcagttgtggtcaatattgtggtaatcgctaattgtactgattgtttaagtgtgcattagttgtgtctccccagctagattgtaagctccctggnagacaggnnnacacctctacaaaaaataaaaaaagtaccctccccctggtctcgcacagtggtccccaggaaccctgcggntggcagtaaagggcgcaaccnnnnnnaanaannnannnnnnnnnnnnnnnnnnggggcgggccgcctcctaagagtaattccctccggaggggggccccaaagctcttacgccggtaacccaagcctttttccttgtgtaacaaagttggggtcccccctaataagtgggaggtcccgggaaatatattaaaagctaaagggggcacccg

SEQ ID NO: 51577 - DNA, 664 bp, Homo Sapiens
ttgactcaggtggtgtccttcttcctcaagtcttgacaattcccgggcccttcagtccctgagcagtctacttctgtgtctgtcaccacatcttgtcttttcccctcattgcatttattgcagtttatatatatgctacttttacttgttcatttctgtctcccctaccaggctgtaaatgagggcagaaaccttgtttgttttattcaccatcatgtaccaagtgcttggcacatagtgggccttcattaaatgtttgttgaataaaagagggaagaaggcaagccaaccttagctacaatcctaccttttgataaaatgttccttttgacaatatacacggattattatttgtactttgtttttccatgtgttttgcttttatccactggcatttttagctccttgaagacatatcatgtgtgagataacttccttcacatctcccatggtccctagcaaaatgctaggcctgtagtagtcaaggtgctcaataaatatttgtttgggtggtttgtgagccttgctgccaagtcctgcctttgggtcgacatagtatggaagtatttgagagagagaacctttccactcccactgccaggattttgtattgccatcgggtgccaaataaatgctcatatttaaaaaaaacaaaaaccacaag

SEQ ID NO: 51578 - DNA, 585 bp, Homo Sapiens
cagtggtggttcttgaaagatctaagttttccacaccaattttagacttatttccaacaaaaaagacagatgagctttgtgtaggaagttcataagtagcaattttgttttagtaacagactggctccaacactgcaacatggggacatttgccaactcgaacaaaggctgagaagcagccacaccgttgtttagggtagaataggctgtgtatttacatgaatgtataatatctatgtcagcagtattggctgagtccattagctctccagttggtttaatgattgggtttatttttgtttgtttgtttattaaaaaaatggaactgtacacttgtttggtgctaattaatacatcaaaatatactggggcttcctttttcaaattaagtgtgcatgattgtatatggaacaaatactaaggtcccagggtgggagggctagggaaagggatatggagttcttacttgacttgaatgtgcacctgagggtgctttgtgtaatatattgtacactacagcatcttatattttttgagttgagtttcaataaattacaatttttcacccaaaaaaaaaaaaaaaaa

SEQ ID NO: 51579 - DNA, 656 bp, Homo Sapiens
gtagagacagggtttcaccatgttagccgggatggtcttgatctcctgacctcatgatccacccacctcagcctcccaaagtgttgggattacaggcgtgagccactgcgcccgggcaagacctttttttaaaaaaaaaaaaaaaaaaacttccattctttcttcctccagtctgttctcacataacagagtagttttggtttttaattttttttggttgtttgctgttttttgttttttaaggtgagttctcactatgtttctcagactggtctcgaactcctggcctcaagccatcttcccgcctcagcctctcaaatagctgggcttacaggcatgagccaccacacctggccaggatttggttgtttaaatataaatctgatcacccccctgcttagaacccttctgctttctattacccctcatttaaaatgtaaactcttcaccttggtttatgagaactggttcttgccttccccttgaacctcattaaatggtgatttcttgctaagctccagcccgagtggtctcctctcagcttctaattttgtgctctttcctgcccttttcctgggccttctcagctctccacccccaccactcttgactcaggtggtgtccttcttcctcaagtcttgacaattcccgggccc

SEQ ID NO: 51580 - DNA, 632 bp, Homo Sapiens
ttggaaaggggtgcggacttctgtattggggagaaggtcttggatgaactggggcagagaactgccagagagagtacctaggaatacgttgttagcaggagaaagaccaagttcagatgcagacttgggaaagtaggtaacttgaccaaaggtagcaaaattagactacccaactggattgtgaatgcagtttatgaaatggatcaggacaggagcaaaaatagattttctagaaactgcagactcctgtgattggagcagtatacaaagtacagcaacatcagactagatctcacctgaggtgctgggtgagaaatcttagggaccagatggaagagggcctgtgtataaagacattaggaaggaggtttgggagggcagcctgacttgtctccagagaaagttagaactggttgacttagcaaccaagggacactgggtcaaagacgaggaatcaggacgtcggtgcctagtgactgagcgccagcccagcccatttctctacattgccatgggctaaacccagtgtgcttgtaaactcttcagttcctttgggttatggattttggatctttttctggggttccttaataaaatttttttttgaaaaagggggaaaaaaaagtaataaa

SEQ ID NO: 51581 - DNA, 589 bp, Homo Sapiens
tttgtctttcttctcttaatttttaaatgcctcttttcttgagcattccatctctctttttgaccctctcaggactgggcttagctgtccagagccctgccggagggtgctgggggctgtccctctgcaggcactgtgttttcctcaggggctgtcctcagaacacccctcctgctccctggggctcctcagggagccatttcagctggagtctcaggtctcaaaaacaacttctccaggaggccaaaaaaagactgggttggcttctggtcctcatgatggcttttatcctcctgggacactttgggtatattcatgggcattgtttccatctgtcttttctacctgtgccacccctgccctgattccacggctgcctcaggcaggcaggcaaggagctaggccggtgcccggccctggcagcaaggggtctttgtgcagttggagatgctgccgttgtggcagagcgtcctgcagccccgcttccatcagcaggctctggggtgggggctttgcaggggatgctctctgatgtttgttccgttgtttaaataaaatgcacttatttttgtttaaaaaaaaaaaaaaa

SEQ ID NO: 51582 - DNA, 491 bp, Homo Sapiens
ggaagctaaggcctagaaggttaaggatgtccccagggtcacacagtgagcggggctcagagcttgagtgtctttgtgctttgtgtacattgtgttctccctagggtgctttagaccctgtttgttttcttctgcatgaggctgatttccagtttgtcatcaacctctttatcttataatttaggatagagttgaacgttagtcttgaaagattttctaaagtagtctttcaaactgttcctcagaggcctaggattttccaaaagtaccttaggaaccttgtaggctgcagtgggggtgtggcgatagagcaggaggcagggagacagggctgcagggcctcccaccttccaacagacaggctctgctgtatctgttgtacatactgggattctgtaaaggacattatctggggtgttgtatgtatttttgtgtgttctgctttttttaaataaacttgaaaagctactgaataaaaaaaaaaaaaaaag

SEQ ID NO: 51583 - DNA, 570 bp, Homo Sapiens
gtgactgccccaactcctggaagctgtgtccttgcacctgcatccgtagttccctgaaaacccagagaggaatcagacttcacactgcaagagccttggtgtccacctggccccatgtctctcagaattcttcaggtggaaaaacatctgaaagccacgttccttactgcagaatagcatatatatcgcttaatcttaaatttattagatatgagttgttttcagactcagactccatttgtattatagtctaatatacagggtagcaggtaccactgatttggagatatttatggggggagaacttacattgtgaaacttctgtacattaattattattgctgttgttattttacaagggtctagggagagacccttgtttgattttagctgcagaacgtattggtccagcttgctcttcagtgggagaaaacacttgtaagttgctaaacgagtcaatcccctcattcaggaaaactgacagaggagggcgtgactcacccaagcatatataactagctagaagtgggccaggacaggccgggcgcggtggctcacgcctgtaatccc

SEQ ID NO: 51584 - DNA, 727 bp, Homo Sapiens
attttttttatttcaagtgatgtaatttaaaacctaagttgtgtttcaaaacagcaacaaaactgtattgtattttttttgctgtaattaactgtataatgtaaacctaattattttatcatggtttaaattttttgcatatttgctttatcttatgctgctgatttttttaactgaatttgtaagattttgtttatcaaagcaactattatgtggtgacttgcctatatcatgaattatttaagatttttatagttttttttaattagaatttatttcagatgttttgttcatgatactatccttcagggttatgtgcttatcaatgaaataaccccagaggagtgagggaaaataacgtgtagccagttatattcaggaataactactgtaaatgatgaacgtgttaggagacctccaatatttgctacttgccaatcctaatttagttacaagaattggtaggcaatcctacttaattttggcaaaagccccgtcatctaaatggcagaataactcagagcatgtctttgaagatgctgggcgtctaccaccaccttatgtccccaccctacccaacaaaaataagtaaaaagaatatggtgtattctacaaatttgtgggcattgctcaaagtttatgatcacataaaggcagaagatacttcatgaataatacatttcaatgcaaataaacagatgggttcacttctaaaaaaaaaaaaaaa

SEQ ID NO: 51585 - DNA, 816 bp, Homo Sapiens
  misc_feature (660)..(660): n is a, c, g, or t
  misc_feature (709)..(709): n is a, c, g, or t
  misc_feature (804)..(804): n is a, c, g, or t
tttttttttcttttttttctatatatattttttgttgaattctattttatttttaattctctcttctcctccagacacaatggcactgcttatctccgaaatggtgtgatcgtctcctcattgagcagcggctgccaccgcgctgtgggtagtgtgtgaccgtggctgtactgtatagtgaacatagttggcatatctttgtttgaagtttgttggtgactccaccaaactggtgtgaaaaaagaaaaaagctcaaaaaaatccacaaaaagacaaaacacacaaaaaaaatcctgcctatattttactcagtttcaaactttattagtctatttttaattataaaaccagaaagctacaatttcttttctttcccctccacccccccccccccacccatttgttggcttttttgttttttaatgtcagatctgttgagttggttttttttggttttggtttttgtttttgtttttgttttttactgagaaaggaagggccaagggatgaggtgggaaccgggccctgggggcgccacagactaaggcagagactctcctacctggcgcccagccccaaccagctggccgctcctgcccatgcttttttttttttttttttacatttttataattggagcccctggtgaggttacgcgtngcatgagaaccactctacaccacgacgctggtgcctcagtgttggccanactctggagtcactgactggtttgactttcatacggtgaatatgcatttggtctgtactgatcatggaataaacacatctctcttttttttaaanaaaaaaaaaaaa

SEQ ID NO: 51586 - DNA, 727 bp, Homo Sapiens
  misc_feature (721)..(721): n is a, c, g, or t
  misc_feature (723)..(723): n is a, c, g, or t
  misc_feature (725)..(725): n is a, c, g, or t
  misc_feature (727)..(727): n is a, c, g, or t
tgaatgacaattttctcgagggtgaggaggaaaatgagctgaccttgaacgagaagaatttcttcccagaatacaactatgactggtgggagaaaaagcccttctctgaggatgtgaactgggggtatgagaagagaaacctcgccagggtccccaagctggacctgaaaaggcaatatgacagggtggcccaactggaccagctccttcactacaggaagaagtcagctgagtttccagacttctatgattctgaggagccggtgagcacccaccaggaggcagaaaatgaaaaggacagggctgaccagacagtcctgacagaggacgagaaaaaagaactcgaaaacttggctgcaatggatttggaactacagaagatagctgagaaattcagccaaaggggctgactgtcattggagcggtgggcactgttaagaagcagccatcacatgatctgtttttcaccacttcactgaaagacaccatttatatacccaagggcagaaagtagaacttactattcattaaatgtttgacacaattggaattgtctttaatttctgtcagaatgctattgaaaatgtgaattgcatgacttgtagcatattcttttctgcaaaatagacatattaacatgcttatgacaatgactgtgctactgtctttggaaaaatgtttgtctcagttggaaataataaaagattcacctgagaccaanananan

SEQ ID NO: 51587 - DNA, 689 bp, Homo Sapiens
aaaagctgagccctgacgcagttgcccagctggcattccagatggccttcctgcggcagtacgggcagacagtggccacctacgagtcctgtagcactgccgcattcaagcacggccgcactgagaccatccgcccggcctccgtctatacaaagaggtgctctgaggcctttgtcagggagccctccaggcacagtgctggtgagcttcagcagatgatggttgagtgctccaagtaccatggccagctgaccaaagaagcagcaatgggccagggctttgaccgacacttgtttgctctgcggcatctggcagcagccaaagggatcatcttgcctgagctctacctggaccctgcatacgggcagataaaccacaatgtcctgtccacgagcacactgagcagcccagcagtgaaccttgggggctttgcccctgtggtctctgatggctttggtgttgggtatgctgttcatgacaactggataggctgcaatgtctcttcctacccaggccgcaatgcccgggagtttctccaatgtgtggacgaaggccttagaacgacatgtttgatgccttagaaggcaaatccatcaaaagttaacttctgggcagatgaaaagctaccatcacttcctcatcatgaaaaactgggaggccgggcatggtggctcatgcctgtaatccca

SEQ ID NO: 51588 - DNA, 675 bp, Homo Sapiens
  misc_feature (630)..(638): n is a, c, g, or t
  misc_feature (640)..(672): n is a, c, g, or t
ggtggcaattcggacgaggcccagctgcgggccacggccgaggccctgctggcactgcctgtgttgaggcagccgcgggcctggggtgtgctgtggtgcatggcagcggaggccctgagccgagggtgggccctgtggcaggccctgcttgccctgctctgctggctctggcatgggctggctcaccctgccagctggctacagcccctgggcccgccagccaccccgcctggctcaccaccctgcagtttgctcctggacagcagcctctccagcaactgggatgacgacagcctagggccttcactctcccctgaggctgtcctggcccggactgtggggagcacctccaccccccggagcaggtgcacacccagggatgccctggacctaagtgacatcaactcagagcctcctcggggctccttcccctcctttgagcctcggaacctcctcagcctgtttgaggacaccctagacccaacctgagccccagactctgcctctgcacttttaaccttttatcctgtgtctctcccgtcgcccttgaaagctggggcccctcgggaactcccatggtcttctctgcctggccgtgtctaataaaaagtatttgaaccttgggaaaannnnnnnnnannnnnnnnnnnnnnnnnnnnnnnnnnnnnnnnnaaa

SEQ ID NO: 51589 - DNA, 555 bp, Homo Sapiens
catgggcattcggatcacgcagagccttgcttcatccaccgctactaccgaaggagcccccacaggcccctggctggcctgcacctatcgccagtcctgctcgggacatttgccctcagtggtggggttactgctgtttcggaggtattcctctgctgtgagcagggctggccagccagactggcacacattgctgtgggggccttctgtctgggagcaactctcgggacagcattcctcacagagaccaagctgatccatttcctcaggactcagttaggtgtgcccagacgcactgacaaaatgacatgacttcagggaagcctggacacccgaggcacctggaccagctatgggtagttctgtgggtggaacacattctgtgtaagagccccactgagggctctgcagcggagtgacagcaaccccagagatgaggcaccagagagtgccactgcatgagacacctgtgaccattcgaagtctgaaatgcggggggggagtttcatttttaagtgaagaccaaaagccctttaaaaataatagttttttatc

SEQ ID NO: 51590 - DNA, 445 bp, Homo Sapiens
aaaagtggcatgcatattgctttaaatgatcacctaaagcagagacgggaagtggccaaaaccgtcttttgcctggtccttgtctttgccctctgctggcttccccttcacctcagcaggattctgaagctcactctttataatcagaatgatcccaatagatgtgaacttttgagctttctgttggtattggactatattggtatcaacatggcttcactgaattcctgcattaacccaattgctctgtatttggtgagcaaaagattcaaaaactgctttaagtcatgcttatgctgctggtgccagtcatttgaagaaaaacagtccttggaggaaaagcagtcgtgcttaaagttcaaagctaatgatcacggatatgacaacttccgttccagtaataaatacagctcatcttgaaagaaaaaaaaaataaaaaaaaaaa

SEQ ID NO: 51591 - DNA, 776 bp, Homo Sapiens
tgagggagtactgatgtctggaggtatctgccctgtcagccgggacaccatagactatttgctttcaaagaatgggagtggcaatgctatcatcatcgtggtcgggggtgcggctgagtctctgaggctccatgcctggcaagaatgcagtcaccctgcggaaccgcaagggcttgtgaaactggccctgcgtcatggagctgacctggttcccatctactcctttggagagaatgaagtgtacaagcaggtgatcttcgaggagggctcctggggccgatgggtccagaagaagttccagaaatacattggtttcgccccatgcatcttccatggtcgaggcctcttctcctccgacacctgggggctggtgccctactccaagcccatcaccactgttgtgggagagcccatcaccatccccaagctggagcacccaacccagcaagacatcgacctgtaccacaccatgtacatggaggccctggtgaagctcttcgacaagcacaagaccaagttcggcctcccggagactgaggtcctggaggtgaactgagccagccttcggggccaattccctggaggaaccagctgcaaatcacttttttgctctgtaaatttggaagtgtcatgggtgtctgtgggttatttaaaagaaattataacaattgtgctaaaccattacaatgttaggtcttatttaagaaggaaaaagtcagtatttcaagttctttcacttccagcttgcctgttctaggtggggggctaaatctggg

SEQ ID NO: 51592 - DNA, 385 bp, Homo Sapiens
ctggtgggggcaggggtcacagagcagtcatagacaccatggaccagggcaggagaagggcagatggcacatgggcacaacagggccttgtccttagagcactggggggtcatggctgggaggggcatggcaggggctggcatccctgtagagccagaggggccacccagggcagtgacattccagatatgttgggctcacctcatccttgctgtgagactggagttccatggggacatgaagtcagtacaccgcagagctgctcagctgctctacctctcgctgacttttttgttgcacatatacattttctttcaattagcatttatttcagcttttatttaagctttttgacagtacatgtaaaatatatgattaaaccatt

SEQ ID NO: 51593 - DNA, 906 bp, Homo Sapiens
ctgggccagtgcctgacctcgtactgggagcagaagaagctcatggctccaggctgtgagcccctgactgtgcggcgtatgatggatgtcctggccccccacgtgcatggccagagcctggctggggcaggcggtggaggctttctctatctgttgaccaaggagccacagcaaaaggaggccttggaggcggtgctggccaagaccgagggccttgggaattacagcatccacctggttgaagtggacactcagggcctgagcctgaagctgctggggaccgaggcctcaacctgttgccctttcccatgaagctggcttctctctgcaacaggagaaaacctggagctacagtgtcccccaccttccttgccccatgggaacctccacctcctactccccacccacctctgcgaatctgctcccaaaggaagctgaccagagcaagatctgggcaagcagagagtgcctgggacaggactgtgacctggtggacaggggcctagatgtagcctctgttcctcctggacataggaaggtcccaagcttagtatcccacgtggcctttacaaatcctatggctggccttctcattccacaagggccctggaaagggttgacagccagccttggcatatggctgggagtcccttagcaaggccaaccctgaagaggccctttgaggcattccctatggcttagagttgtagacttacactcaaccctcatgtgagcgtgggagtgagggtggcggtcccttgccaagttggtagcagtgacccagtgattcactgccatcccaggccttaactagcaaaactacggagcgtgccaagtgacctggtgcctgtgggaagtgggttctcaggactggcattcttggaataaattcactctgttcttgca

SEQ ID NO: 51594 - DNA, 729 bp, Homo Sapiens
ctagtgagctcggtggcggcccagagactggttttggacactcttccaggtgtgaagatctccaaagcccgtgacaaatctccctgccgcagccagggctgcccacctagaactcaggataaggccacccatccccctccagcgtcccccagttctctggtgaaggtgcccagtagtgccactggaaagcggcagacctgtgacatcgaaggcctggtggagctgctgaaccgggtgcagagcagcggggcccacgaccagaggggccttctgaggaaagaggacctggtacttccagaatttctgcagctgcccgcccaagggcccagctccgaggagaccccaccacagaccaaatcagcagcccagcccatcgggggatccttgaactccaccaccgactcagccctctgacagctacccaacagtccaggacagctgcatggcacccggcgggccgagcatgccatgggtccgctctgcatgccctgtctgtgccatgagtgtccctggccccttcctgccatgggcaggcccgcaggaagagccggtaggggtggaaaggggactcagatgagacacaccccacagctgccacgcttgtccctcaacaagctcaccccaatccttgcagcaggcacatgggggggtgagtcagccctggaaaaagctgccacatgaggaggcgtggaggccactccactggcagttcaagggagaggggggggc

SEQ ID NO: 51595 - DNA, 650 bp, Homo Sapiens
ggcaacctataggtttctacacaaaaagaggcacacatccgcattctgccttagttataatatgcatttgtacggatattgctttaagaaattttatgtaatctactaatgctattgattactcattccactgatccctgaagtctctcaactagtagagaaaataaccgtgatttagcaagaagcgacatggggaagggtgacaacaatatacattgtttgattagatacagactccttactgtgtcagactcttgaggttcttttggaatagtgggtagcaccacttcaccagaagagtctgatattgcaatttgctgggtgatgaagatttcatcttgaagcttactttcatccctgcaataatgacaaaataacagaaccgtcaacaactctacacacatgaaacctggtttagaataacagacttgtcatattactttcaattagcacattcaagatgcccacaagaaccatcgtgttgggctcatgtttattacttaagcaagagagctcttacccaaattcctttgtttccccactgtcagaaacaacatagtctggaactggaggcctagaactctggttgtatttcctgtaagtgggtaaaagtcacaagatatgaatgaggcgtgtcctctcatgcctca

SEQ ID NO: 51596 - DNA, 560 bp, Homo Sapiens
gcgggccgcggctggtaggtaacaaaaccgttgaacctcccattagccaagtgggaaatgtagacactgcttcagaacttgagaagggggtgtctgaggctgcagtcctaaagccttctgaagagttacctgctgaggctacctcatccgttgaacccgaaaaggattctggctcagcagcagaggctcctcgttagagactggaatttgtgaaaatgtgacagtgacacttcctggagtgtagagcttgaggtgtacagatgctgtattatatccgctcccgctgtactgcagccccgcgccagctggtggggaactgtaagcaatttgattgcttcccttctatttaaaaatagccacaaaataacaaaaaatactgaaaatatgaataaatattaccctttttgctgtaactttttaaaagttttgactttaaaaagtttacaaatcgtaattagaagtgctctctatttttttttttttttttaatttaagacaaggtaacggtgaaagctcctcaaaacaatagggatgtttttaataaactctattttcgtaac

SEQ ID NO: 51597 - DNA, 965 bp, Homo Sapiens
aagctgttacggaaagaaaatctggacttgaaattgacaccttataaggtgttagccaccagtacaaaacatggcttcatgcagtttatccagtcagttcctgtggctgaagttcttgatacagagggaagcattcagaacttttttagaaaatatgcaccaagtgagaatgggccaaatgggattagtgctgaggtcatggacacttacgttaaaagctgtgctggatattgcgtgatcacctatatacttggagttggagacaggcacctggataaccttttgctaacaaaaacaggcaaactcttccacatagactttggatatattttgggtcgggatccaaagcctcttcctccaccaatgaagctgaataaagaaatggtagaaggaatggggggcacacagagtgagcagtaccaagagttccgtaaacagtgttacacggctttcctccacctgcgaaggtattctaatctgattttgaacttgttttccttgatggttgatgcaaacattccagatattgcacttgaaccagataaaactgtgaaaaaggttcaggataaattccgcttagacctgtcggatgaagaggctgtgcattacatgcagagtctgattgatgagagtgtccatgctctttttgctgcagtggtggaacagattcacaagtttgcccagtactggagaaaatgaaactgggattgacccatcaagatgcttggctcaataagaaaaccacgttargagcaacctttgtatattggagacttcagagtaaccagcaaggaagagaaatcttaatcttcaagttaccatattttccaaatattacatggtacctgagttctgcttccttggatgtcattgcttaaatatagtcttgaagggcttgttttgaaatattgtatatattttttyawatgtatacattkttwataaattaagaattgagaaacatt

SEQ ID NO: 51598 - DNA, 718 bp, Homo Sapiens
ggcagctagactgttctccagcctttctttacttcctctttgaaaggacatagccctggtttctttttgacacaaaggaaagctatgcaaatcatgatctgtatgtagaattggtcacaagtatgttgttgcataggctgtacagttgggaagtagaaaccaaatgctacccagagacctaacccaattaagctctttgtatttctccttcaagaaataaatcttccttccttctttcttcctctttcttttaattttaaaaaaattcatcctgatttttttattttctatcttatttaaaaaataaaaataggccaggcgcggtggctcacacctttaatcccaacactttgggaggcgggtggatcacttgatatcaggagtttgagaccagcctggccaacatagggaaaccctgtctctactaaaaatacaaaaattagccaggcctggtggcacgcgcctgtaatcccagctacttgggaggctgaggcaggagaatcacttgaacctgggaggtggaggttgcagtgagtcaagatcgtgtcactgcactccagcctaggtgacagagtgagactccaactaaaagaaaataaataaataaatatataaatatataaaataaataataaaagttaaactatttgcttgatggactcccagggttccaattctgggaaaaaatttaaacagggtaatttcccttcaaacatta

SEQ ID NO: 51599 - DNA, 737 bp, Homo Sapiens
  misc_feature (737)..(737): n is a, c, g, or t
gtagaatgctacaaaccctaaacttaatatatactaattcctgaaaaagactttgagacagtactatgtcagttcagccacctattttgcattgttttctataaggaggcaaagcatatgtgttttcctgttatgcaccttttatagcctttaccactgtgtaatgttcacaaacaccaaagtaaaggaaaaatgcaggatgttaccgtaaaatccagctgctattcatggagctgaaaaacaaagcacaaataatagatagctaagttaagaactactaagtagtttatagaagtagggaaaaacgtaatactgctttttattcatgtctttaaagcctttttcagaataagtgccaatcactgatgttgtaaataatggtgccttaactttatatgcttccctggcacttcgtttctgatttttttcctgatttgataaataattagtacatagttttcactcacttgcagcttactaaagacaagaaattatgtacatgtactaatgtttttcccacaaaaaaatcctttacttctgatgtatgacttagttatctaaatagttaagcctaatacctgactaagactcaccaatgtgattgtacaataaattctatcattccattaaaatcctacatctatccccaggaatggtaatctcacctccctacatctatactccactccctcagtaaataagtgacaattgttcaaccatgttccccattcctgagn

SEQ ID NO: 51600 - DNA, 689 bp, Homo Sapiens
aatgattatcgagtagttaaccaatttgccagacattatcagactggacagccactgccaaaaaatatggtgtctcgtctttgtgaatctaaaaaggtttgtgctgcagctgatatgcaacttcaggtcttttatgccactctggatcaaatctaccatgggaagcatcccctgaggaattcaaccacagacattctcaaggaaacacaagagaaattctatggcctaccatatgttccaaatactgcctggcagctgcgattcagccacctcgtggggtatggtgctagatattactcttacctcatgtccagagcggtcgcctccatggtttggaaggagtgttttctacaggatcctttcaacagggctgccggggagcgctatcgcagggagatgctggcccacggtggaggcagggagcccatgctcatggttgaaggtatgcttcagaagtgtccttctgttgatgacttcgtaagtgccctcgtttccgacttggatctggacttcgaaactttcctcatggattctgaataaaagaaacactctacacctcttaaatcaaggtcatgtagataatgactttgttataaatgctacagctgtgagagcttgtttctgatttcattgttcgcttctgtaattctgaaaaactttaaactggtagaacttggaataaataattt

SEQ ID NO: 51601 - DNA, 916 bp, Homo Sapiens
atctgaagaccccaatctcagaaattcaaatttaagcatggggcccaagagtatgcattcttaccagataccttgggcagtgactgtcaaaagtttggtcccaacaaacagcattaacgtcacctgggaacttgttggaaatgcagcctctctcagggcctcatctcagatcagatctactaaatcagatactctaggggcaggggcaggggcaggggctagcagttgtgtttaagcaaactctgcaggtgtctttcttatcctagtttgagaaccaatacccaacaacctacgtgattttggtgcaagtagtgtttgaaacacactgaagattactgccctattacwaagacatttttcaaaaagcatgttttaaatcagtgtagtccaggatcacactatattaaatataaagataacttaaaggatcattggatcattcattttggccaaatttttagcttctccaaagtgactaacatcagggcctacaataaaatctgtaattctccaagtttagtaattttatattgaggcaggaagggctcattaagtactaataagtacataatttattaaaaacatacataagtgtcatcaaaaaggtccacaattgttagtaaaaaaaattaaattgaagtagtaaatgctgttttataacatacatttttctgctaattcattctgttttgtgtgacctaataaagcaaaagaaaaataaaaaagcaattctccaagtacttcatagagcacataaaaccagatttcatgatgatgatgtattcactatcttttagattaagatctttgttatttggtaaatgatttcagtatggttttaaaacataaggcttttgatgtcttatgttctctaataatggtatgcttgtattttctagtgggaagtcatagataa

SEQ ID NO: 51602 - DNA, 582 bp, Homo Sapiens
atcgtctgccgctttggtgacttctgacagctctctccatggaaggaggcggcggccgcgatgagccttcagcctgccgggcaggggacgtgaacatggatgaccctaagaaggaagacattcttcttttggccgatgaaaaatttgacttcgatctttcattgtcttcttcgagtgcaaatgaagatgatgaagtcttcttcggaccctttggacataaagaaagatgtattgctgccagcttggaattaaataatccggttcccgaacagcctccgttgcccacatctgagagtccctttgcctggagccctctggccggggagaagttcgtggaggtgtacaaagaagctcacttactggctttacacattgagagcagcagccggaaccaggcagcccaagctgccaagcctgaagaccctcggagccagggcgtggaaagattcatacaggagtcaaaattaaaaataaacctctttgagaaagaaaaggaaatgaagaaaagccccacgtctcttaaaagggagacatactacctgtcagacagccccttgctggggccccctgtggggtgagcct

SEQ ID NO: 51603 - DNA, 746 bp, Homo Sapiens
  misc_feature (652)..(653): n is a, c, g, or t
  misc_feature (660)..(671): n is a, c, g, or t
  misc_feature (673)..(711): n is a, c, g, or t
  misc_feature (716)..(720): n is a, c, g, or t
  misc_feature (737)..(737): n is a, c, g, or t
gcgggatcctgggtccctcataagcactttggttttaccgcctgcaacctcactgtgcccgccccgcaccatgccctagccccaggtctagccgggcccattgcagggggcagcacttgggggcatctccggcacttgggtgggaccaaggagatgccaccatagacctttccctcgccttcttcctccctagtccgggttccattcttttcaccagcacccatcgcccaaggggtaccgaggggggcaaggggtgtccagtccaagcccacccccgcctcgccttccgcaaaactgtgagcaaaaagcaatagaagcctcgcccccgcccttccccttcgcaggattcgccgagtctgtagcctccccgatccaagttcctagacctcatggctgtcccctcccaccagtcacctccactgcacaactcgggcgggggtgtgacacctctcccccacccccgactccgtggtttccgtatcgtcaacccttcagccgccgacccgggaggggtctggcctacactggtcttccccttcccatcaactctttctgcttgacaatgtagcaacccaggccccccacccacggtcctcccctttttcctctccctgacaataaagtctgaatttgttctgccctccgcccctannaaaaaannnnnnnnnnnnannnnnnnnnnnnnnnnnnnnnnnnnnnnnnnnnnnnnnnaaaannnnnaaaaaaaaaaaaaaaangggggggcc

SEQ ID NO: 51604 - DNA, 687 bp, Homo Sapiens
tctagatcgcgagcggccaggagttcgaggctacaatgagctgtgatcgtgccactgcactccatcctgggtggcagagtgaggccctgtctcaaaataaataatccagtcccccccaagaaaggaatgaagtgctataatgagaaaaatcctagtacctaacatatagtagacagtggagagtggttctctttcgtttctcaggggcagacagatggggtgctggagtcctctatcaaagagtcagagctctatcccagatgtgtaatgaacgtggtcacagacatattgtcccattaccatttaccttccctataaccactgtgcctccagccttgtagaatagacacataggagcgcagcaatacgtctaaaaataggagtgagagagggcagggcatgcccgttcttgtggtagaagaaaagaatgtcaaagaaagcagctgggactaatgaactttacattagccatattccattatttcagcttaagtcaaatgtcggtcctcatgaggcaactggctttgacaggagctacgctaattaccacttaccaacctttaatttctgggtaaaagcaaaagagaaaaactaatggatttttcattttccagagagacaagaataaaataatagtagtctgtagaaaaaagaaaacctgcatcaattacaagaattattaatgta

SEQ ID NO: 51605 - DNA, 611 bp, Homo Sapiens
aacatttaattaaacaattaaggcagcattttgctatgctctgattgttccttagaccacatatgttcttatgaagcagcattatgcaaggggaaaaaagcactatgtctgtgtatgtatgtatatagtgtaatacgtatattttaacaaacctgtccttgatattagttaaggtgacacataagggtgacacagaatgtgtaatgcaaatttcatagtaatagtaactttataaaataatattataaaatacaggatttaaacctttctaaatagatcctaaaactgtctctcacattatatagtagatgtttgtttataatgtttacaaaacattttggtgaatttcctcaatgttttataaatgtacattttttaagtccttaagctgactcttagccatcatgtagcttaaggagtctgaaatctgccattaaaactgcacctttaagccaggtgtggtagcatgtgcctatagtcccagctacttgggaggtggaggtgggaggattataaatagagactttccttaagactttaaaaatgtatttaaaactattttttattaaatactttgtgatttcctattaagctttaaaataaatcattgt

SEQ ID NO: 51606 - DNA, 1060 bp, Homo Sapiens
tggtcgtattgatggtgaacctttcctactggattctttgcatgccacatagcaggattcattgcctttctctcatcatggatggcatgcagcagcacccaagtattcttcattctttgcagggaaaaaattgtgcatgggggctgaaatgtagtatgtgtagctcaattagtctctcctctgtgatgcaaaatggaatattcaatggcagatctgcccttctgagatgctgaccatccaaaacaccttgtttatggtgcaccatgattagctcacacacaatgccaaggctgtgcttctattatctgatacatagtttgacaatgggtaattctactcagaccctccctactgattggctaggatgcctgtcaggaactcattatgctactggttgtttggggatccccatagtggactactttcaggaatggcatgaattgtaaccaactgagtgctgcccccactgttacggaagtttataaaaccttagttccagaagacccaaaggagagtactggtttgtcgttggtgcttggcctagatccagccaccactctgaaactcatcacatcttcattgacagggagggagcccaggacatatgtgtggctcattgaccagaaggctttcttagtcccaacagcatgaaacatgcacttatggatacccagcttttagggctacgtgcaaatgagcatcctctgtaaccgtcctcgtgattctcttcaataaataggctttcctgagtctcaccaaaaaccaccacccgatatcaccacgcaacacacaaacctgttgtggcgcgccttgcggccgcctggaaaaagattttcttgaacaccaatctgcgtgtggggccgtcggcgccccccctgatgttgtgcgatcaacttcgcgcaatcgcggtcttcccacgaagaacacctgtcgcgacacagagtgtgtgtccgtcttcccccataaaaagacggcgccggcgacgcacgacggtttcggcaaacacaccagcgaggttccggcgctgtctggcgtctatccacgagggacacagcagcca

SEQ ID NO: 51607 - DNA, 724 bp, Homo Sapiens
  misc_feature (673)..(673): n is a, c, g, or t
ctccctcgcccctgcagccgcccttcggcccaaccccaccgccatcctggatgaggccccaaagcccaagaggaaggtggaggtctgggagcagagcgttggcagcctgggcagccggcccccgctgtcgaggctggtcgtggtgaagaaggcaaaggccgacccggactgcagcaacgggcagcctcaggcggcccccaccccaggagccccgcagaacaggaaggaggccaaccctacacccctgacgcctggcgcgtcctccctgagccaactgggtgcatacctggacagtgacgacagcaacggcagcaactgagccctcccaggaccccctcacggggtcaaagtcacacgtccagcttcagccacattgaggccagcattgctggtggtcagggcaggaggccttggcgtgactggaggccggacagacaagcgccagcgtgctccaacacatagggccaccaggggcctcagccccaggaggtcccttctctgtgccctcaccagcctctcaacacctcggggacccctgctgctcctgcccccacctgtcactgtgcttagggctgcaacatccctggagcagcttccaacactacttcagggtggcagtgtttggggcactgggcgagcctgccggcctctagatggcctcatctcttccttncacaaactgtctagaaccaataaaaggaaacctgccaaaaaaaaaaaaaaa

SEQ ID NO: 51608 - DNA, 524 bp, Homo Sapiens
tacgtgttattattattatattgttttataaatggaggtacaggatatcacctgaattattaatgaatgcccaggaagtaattttcttctcattcttctaaaactactgcctttcaaagtgcacacacacgcgtccacatacactgcattcgttgctccagtataaattacatgcatgagcacctttctggcttttaagccaatataatgggctgcaaaatgaagacaccagagtgtatgcatacaaatctcactgtattaaagatgcaggttttctaattgtacccttcttgtctctctggcaatcttgcccttaatatccctggagttcctcatcagtgtcattttctgttatacacagttccacaattttgtctctagttgacttcaaatgtgtaactttattggtcttgccctattataattgtcatgactttcagattgtatctgaactcacagactgctgtcttactaataggtctggaaggtcacgctgaatgagaagtaaattattttatgtaata

SEQ ID NO: 51609 - DNA, 561 bp, Homo Sapiens
gtaatatgtttgttttctttttctttcttttttttctaccaaaaaaaagtaagtaaactaaaacacaaaaacatataaataaaatccatccctcttgtcggggacctgcaggggggcaaccttaatccaaacacctggctatcaaataatcagaatgtattgtctcagacaggatttcagttccgggaggcaggggcatgatgggggagggggccggaggctgagagacaaaagttccagagcctccctcgaaggttctctactactgtattctgtacataatgtaccatcccatgtggaatctgtgagtgtcctcttaagtagcgtgggctagccaatctgccgttcatggtgtattgtaaactccgaattccatatgtaataggatgcaagtctaagcgtttcatgtggacataaatgtatctaaataaaactttccctagcactgtggctgacctcacccttacttttatactttagtatgaaactgatgagaactttggtagtgagtattttttttatatatatacatatatatgtatctatctatatatatatctc

SEQ ID NO: 51610 - DNA, 500 bp, Homo Sapiens
aagggctgcagctgagctgggggttgaatttctccaggcactccctggagagaggacccagtgacttgtccaagtttacacacgacactaatctcccctggggaggaagcgggaagccagccaggttgaactgtagcgaggcccccaggccgccaggaatggaccatgcagatcactgtcagtggagggaagctgctgactgtgattaggtgctggggtcttagcgtccagcgcagcccgggggcatcctggaggctctgctccttagggcatggtagtcaccgcgaagccgggcaccgtcccacagcatctcctagaagcagccggcacaggagggaaggtggccaggctcgaagcagtctctgtttccagcactgcaccctcaggaagtcgcccgccccaggacacgcagggaccaccctaagggctgggtggctgtctcaaggacacattgaatacgttgtgaccatccagaaaataaatgctgaggggacacagtc

SEQ ID NO: 51611 - DNA, 564 bp, Homo Sapiens
cgcgtccgcgtagagaaaatttccacaaactaggaaatgtagagagttattctatagaatactcaaaagaggaaagtatgtgatttttggaaacaggaaaatcttcaaacttctttcttcacttccctttgtgtttagctgaccctccaatgtgatcattgcctttggagtttgggagaggtacgggaagtggcctgatccctgcttccatacttcactcctccatccatccttccctccctcttcccctccagctaaatggacaattctagccaacattgagtcactcaataagtctcaacagtgggtgtgtttgctgagattgtccagcggttgagcagtttggtctcacctccctcgctagttgagaccaaaaagagacaaataactttttcatggtctttgaaacataatgcttatttcgtggtcaatggctttaaaaaaatctgtttcttgttttcttcaacaaactcactagttttcccttaaatgatattgtaaaaattaaagtaatcttgaaaatgttttgacaaaagtaaaattaaaggggacatcttttcttgg

SEQ ID NO: 51612 - DNA, 646 bp, Homo Sapiens
tgggagcgcaaaacccaagaagcggccagaacgcacctccggctccggcggacgcgcgaccgttgtgcaccaccagggaccgccgcgcctactctgcacgggagcagggacagcgctagatttcgtgtacaaaacctgtgtacccctctatatatatgttacatagaatgtatatatgttgggaacatgctcgcttctcccgtgtgtcgccgccgtgcgtcgtgcgcccgcaacagagccccaaccgggcctttgccgggtaaggggctaccgcgacgccacttgtccacgcagccaccaccggcccgggccagtccctgccagtccgtccgcctgtccgtccgtgtcctcagctctgtccacgcttcgataggcctgacgcagcccccagcccagggccgccctagcaacttcctgtacatatgactgtaaaatggtaaacgtgtgtattatatctggcctcgttatatagtgtatatatatgtatacatatacatatatataatatatatgaagactgtaaatgttaagacgactagtgttcttattagtatattgcttcacactgaagattgtgtgtatcgagctgtttctaaaagatgtttattttccttaagagtaaaaaacagtcattgcattcagaaaa

SEQ ID NO: 51613 - DNA, 694 bp, Homo Sapiens
  misc_feature (622)..(622): n is a, c, g, or t
  misc_feature (628)..(628): n is a, c, g, or t
tgctatcagatttttgacaccgcagttgcagaagatgtaatctaatattgccatccaatttagcatacataaaatgttgccactcaccttccctgtttgagcttcttttcctgacctgagttttgtatcagcaatgttgatgatgttagcatgggtatgggattagaaaatgtccttaccttaaatctcttggcttttactgggtgcaaggtaaataatggctatggattttgttttgctttctgttttgcttttgtacaaagagacctgcttaaacaagtactgctgagataagtgtctgatcaagctacagtgtactttaagtagaaatggcaaagttgctttgttggggtgctgatactgatgattttaggataaattcatttctttaaacttgtaatacatggttttattgcttgtttctctccaggatagtagagatttctctatttcacctcaacctaataaaagtggtcagatttataatgttaatgacttaatattatccttttctaatagtctcatgtaaaatatgccgctattacaacttacaactaattgaatgagatgttaacttagtaaaatagtttgatttttacctgacagtgtttgtcaaatttgngtatgntatttgccaaagacagatataaattacctggtttaatattagtgaagaataaataggtgcacacaa

SEQ ID NO: 51614 - DNA, 413 bp, Homo Sapiens
ttttctcaaaggccctcagtgagataaattagatttggcatctcctgtcctgggccagggatctctctacaagagcccctgcccctctgttggaggcacagttttagaataaggaggaggagggagaagagaaaatgtaaaggagggagatctttcccaggccgcaccatttctgtcactcacatggacccaagataaaagaatggccaaaccctcacaacccctgatgtttgaagagttccaagttgaagggaaacaaagaagtgtttgatggtgccagagaggggctgctctccagaaagctaaaatttaatttcttttttcctctgagttctgtacttcaaccagcctacaagctggcacttgctaacaaatcagaaatatgacaattaatgattaaagactgtgattgc

SEQ ID NO: 51615 - DNA, 592 bp, Homo Sapiens
tactatagcatagtatgctactattgctacttctggtgtgatttgtaatgtttcttaatcattggacatcaattatttttagagagtaatgtataatttcatagcattttaaatttagtgtatcatgcgagttttttttggtagatgctgaagaatgtggttgctaaacaaagaatgctaaagaatgttcaaactttatagataactttattgttattatttattttcacacatttaattcctattaagtacagccgcaagaaagaaaaaatgatgaagttgcaaatggcagtgtgctgtcacctgcaacagaagtgcgtaccagaagtatgactcatgcaaagcattttaccgtacaaatatcctggtgcgatgatgggcctggcaacattttctactgtacttttgtttaaatttaatgaaacaaaaaattcctaagaaataccaccctaccactaacaaaatggtataaagaatctcccagccaggccaacatggtgaaaccctgtctctactaaaaattagccaagtgtggtaatgttcacctgcagtcccagctacttgggaggccaaggcacgagaattgcttgaa

SEQ ID NO: 51616 - DNA, 676 bp, Homo Sapiens
agttagagcaaaagacagtggtaaatgttttattccgtctccatgaggaattgaaggagttggtctccacctagagatacatttgatttacagcttaagtaattcagaggctaagctctaagcttttttctctcattgctggaatgatttaagcagaagtccttttgtgtacttttaaaattgtatctttccaggagcccctcagattgtaccttgctttctcaccaatagacaccttcccgacacttttttaatgttgtagctgagcactttaacaagttgagcattccatgtttcattcttagaaccttctttaatagagggtcttccctcaacagcctgtgcctctggtctacctttgaccaccactgataactaatatattggtcacaatgactggaatgtgactagtgatctcaggagatggcactgtcctaaagtgctgtcagggtggcaccactgctctctgaacaacttaccttggtcagagggactcaggtttgggacagcacaagctgaaggctggagagtaacttgcatagtaggaccatacctcttcctttcccatcccacccacatatgatagacagcccctctgttgagatatggaggggacagatactggaatcgggggtgggacttgcagttacttaaaattttttaataaactgtgccc

SEQ ID NO: 51617 - DNA, 851 bp, Homo Sapiens
ccacgcgtccgcccacgcgtccgggaattgtttgggggcttctgttttgtttggcgagagagcgatggctgccgtggggagtactggggagccctcgcggcaagcagggtgggggggacttgggggcatgccgggccctcactctctcgcctgttctgtgtctcacatgctttttctttcaaaattgggatccttccatgttgagccagccagagaagatagcgagatctaaatctctgccaaaaaaaaaaaaaacttaaaaattaaaaacacaaagagcaaagcagaacttataaaattatatatatatatattaaaaagtctctattcttcaccccccagccttcctgaacctgcctctctgaggataaagcaattcattttctcccaccctcggccctcttgtttttaaaataaacttttaaaaaggaaaaaaaaaagtcactcttgctatttcttttttttagttagaggtggaacattccttggaccaggtgttgtattgcaggaccccttcccccagcagccaagccccctcttctctccctcccgccctggctcagctcccgcggccccgcccgtcccccctcccaggactggtctgttgtcttttcatctgttcaagaggagattgaaactgaaaacaaaatgagaacaacaaaaaattgtatggcagtttttactttttatcgctcgtttttaacttcacaaataaatgataacaaaacctccccgtctgcgggtgctgtctgtctccccccctttccttccctccctggagttttgaagcggatgtttgtttctttatagatgtggttaaaaaccctgataatggggaattgaaattaccc

SEQ ID NO: 51618 - DNA, 531 bp, Homo Sapiens
gatgaagatcgcagacttcgggctggcccgggacgtgcacaacctcgactactacaagaagacaaccaacggccggctgcccgtgaagtggatggcgcctgaggccttgtttgaccgagtctacactcaccagagtgacgtctggtcctttggggtcctgctctgggagatcttcacgctggggggctccccgtaccccggcatccctgtggaggagctcttcaagctgctgaaggagggccaccgcatggacaagcccgccaactgcacacacgacctgtacatgatcatgcgggagtgctggcatgccgcgccctcccagaggcccaccttcaagcagctggtggaggacctggaccgtgtccttaccgtgacgtccaccgacgagtacctggacctgtcggcgcctttcgagcagtactccccgggtggccaggacacccccagctccagctcctcaggggacgactccgtgtttgcccacgacctgctgcccccggccccacccagcagtgggggctcgcggacgtg

SEQ ID NO: 51619 - DNA, 630 bp, Homo Sapiens
ttttttttgattttttgtgcttctttgctttaggctcttctagaggagccctcgccccgcaccccgaccgcttctcccacgacagaactgcacttgtagccggagacaactgtaacctctctgatcggtttcacgaacacgaaaatggaaagtcccggaaacggagacacgacagtgtggagaacagtgacagtcatgttgaaaagaaagcccggaggagcgaacagaaggatcctctagaagagcctaaagcaaagaagcacaaaaaatcaaagaagaaaaagaaatccaaagacaaacaccgagaccgcgactccaggcatcagcaggactcagacctctcagcagcgtgctctgacgctgacctccacagacacaaaaaaaagaagaagaaaaagaagagacattcaagaaaatcagaggactttgttaaagattcagaactgcacttacccagggtcaccagcttggagactgtcgcccagttccggagagcccagggtggctttcctctctctggtggcccgcctctggaaggcgtcggacctttccgtgagaaaacgaaacacttacggatggaaagcagggatgacaggtgtcgtctctttgagtatggccaggcctcgtgcc

SEQ ID NO: 51620 - DNA, 652 bp, Homo Sapiens
gcgtccggtttctgtgtgagtagttaacatgtagatctttagaattgatttttctgaagagtgaaacagcgctgcttccaatatctgttcaaaattcatttattgaaaagtccactcatatgtctgatttgaaatgctgtttcattatgtgttaaattctttcactgagctcttccatattcctagtaaatgatgcattactttggtatgttctcagatttgggtaaagccttcctcatgttctataaaaattggttaactgctggtgagcacatctcttgaagttttgatatgggttgcacaacatttataggactgatttggagagaccgacaataccgagtgcagtcctcccttggtatctagttccaggacccctgtggataccaaaatccaagcaatgccctgcagatcatgggacctatgcatatgaaaagtcggtccttgtatttgagggttttgcatccctcaaataccatatgttttatttgtgtttggttgaaaaaagtttgcatataagtgaaacttagcatttcaaacctgtgttgttcaaagatcatttgtatttctcttcaagaacaatgaatgtcttcattaaatcatcttttgtgggagagcttttggtttcatagattttcatatatatatatga

SEQ ID NO: 51621 - DNA, 560 bp, Homo Sapiens
agaagagctatgacgtcgcatgcacgcgtacgtaagcttggatcctctagagcggccgcctactactactaaattcgcggccgcgtcgacgactattctcatccctgttttggacgtttactagactttgatttccttaatagcccatttctgttaacctcttatcactaagaaagaaaggaaagaaggagatgaatagaagaaagaaaatggaaagaaggaaaaaaggaggatagaaaaaggatggaagaaagaagcattgaaaacaacgacattcttcccacttcttggatttttaaaccacagtctggagtgatagctactgtagaaaggaaatagactttgtatgaactctttaagttgaaaagtaaaaaatatatgtggtttggatgtgtgctttaattcagctttagaaattaataccactacccgtgaattatatggcctgacaatatgaaataggtgtactggactgaagaacagtactccacaaacatgggtggtaacaagagtttcatccccagaggcccaaacggggcacaaaaagggtggtttagatg

SEQ ID NO: 51622 - DNA, 877 bp, Homo Sapiens
  misc_feature (677)..(679): n is a, c, g, or t
  misc_feature (681)..(683): n is a, c, g, or t
ccacgcgtccggcttatgtgaaccccttggtgaaggtcccttttccttggatgtgtagttatatgatctttttaaatgtacagatattttgctataaaatcggtgcagttttttatggtttttacacttctctttaattcccacctaagcctctgggtaatattgtaaatattgttttaaaatgcatcagcctatgctatacaatctgaatgttattttaacttatagttttttttaatatatatatttaactataaggacagtttagggaacaagttacctaccacatttcactttagtgtacctatttacagaaagattaaactgccacctgcgggcacattcccataaatgtgtactttactttaaaaagaacatgccacgattttgtctttctgtggactcaacattcacttcgattaaaaatagcaatttgaccaagttggacttccactacaaagcagctgttttccaaagttcaatgctgacatatatgtatattaaaataattgcctatttattaatctacaaatagacaacgttggcatgttcttttctgtttgtctattaatgggcctgcttcttagcaatattagaatgttttataaaagcaattcatgttacttttctggtcttttcatggcatatgagcaaataataaactatttacactactnnnannnaaagcagaagagacgaccaaccaaaacaaaaaaccccggccccgccaatataaggtcacctatttccccccccgccaggatcctcgggaacgtcgtcctccctccgttactatgaggcctcaaacgaggcgaaccccaccgcggccactcctccgaccggggagaggcacctgggcttctgagaaggacagcgg

SEQ ID NO: 51623 - DNA, 586 bp, Homo Sapiens
gcacgagaaccatttctaggtgaaggcagaaaaatccacattagttactcctcttcagacatttcagctgagataacaaatcttttggaattttttcacccatagaaagaggtggtagatatttgaatttagcaggtggagtttcatagtaaaaacagcttttgactcagctttgatttatcctcatttgatttggccagaaagtaggtaatatgcattgattggcttctgattccaattcagtatagcaaggtgctaggttttttcctttccccacctgtctcttagcctggggaattaaatgagaagccttagaatgggtggcccttgtgacctgaaacacttcccacataagctacttaacaagattgtcatggagctgcagattccattgcccaccaaagactagaacacacacatatccatacaccaaaggaaagacaattctgaaatgctgtttctctggtggttccctctctggctgctgcctcacagtatgggaacctgtactctgcagaggtgacaggccagatttgcattatctcacaaccttagcccttggtgctaactgtcctacagtgaagtg

SEQ ID NO: 51624 - DNA, 647 bp, Homo Sapiens
gctttttgtacaagccattttgtgtaaattatttatatttaatattattccctgctttgtcaggagcaggtactaggctctggggcagtgaggaactagatccttctctcctcagcctagggtggaggtcactgcactaccacccacctctggaagactggctgtgaaaagtcaggtggcagaaacctggggccacatagagcctctctcttttcctgtttcttggctctagaagatcagcactgcactgttagctgagagtgcgggcaagacataaactgtccagagtttgaaggttctcggaaagaccggagggcttctccccacagaaggcggagagagctggggctcagacatgggtgtgcaccttaataaaccctgctgtctgmaaacctgactctgcttcttgggagcatggtgagcagccctggtgctcagcagccatacctatgggacacacactacgaaaaggatgcctttagggtttgggggagattttactcctttcttcaacaactattcactggacaagttctctgctcccatgacgcgccaggcacagttctgcaagtatattgtgaatgtattgttctagtgggatacacaaataagtcagtkaaaatacataaataaaaacataaacctgc

SEQ ID NO: 51625 - DNA, 634 bp, Homo Sapiens
tggaggagcacttgcttgcagcctggcttcagcctctggcactgctggagtggtccctgggagcttctgcactgtcggctttggggacgtctcacccacttgggttacagtaggccttccccacccagagagaagtgtttccaccccagagacattgtctgtcagcccctgaagtgctcgcctcccccagtgcccgtcaccagcccttcctatctgtggggtccaagtcaggcttcccctgcggccaccagccatagggagcagccatcagcccccgagtcagaactgcttctgtctgtccatacctccaggctctcccggagagggggacggatatttatttcctaaagtttgcacttaattgtgaggattctcaggattgttgggggctactgaaaagaggaatgtgttgaatgtcgcgtttgctgtccactcgtcctagaagtttagtgtttttgtcactgtcatgtgtttctgtgggcagagctggttctggagggtgggtcagtgcacccgaggctcagagcatccatccaccccactggccctccttccagataccctctctctaattgggttcttgcatgtaaaatactccacaataaataaataattgaacaaaaaaaaaaaaaaa

SEQ ID NO: 51626 - DNA, 966 bp, Homo Sapiens
tggacaaatatgttttgtggaatattactgctgccctgatgaagaagttcctgaatctgagtcttgagtatgacaattcactgatatttatgtgtacatttatgatagatgaagttcttattctgagtacagtactctttgtcatttcatattggattttctatagagaagaagcacaatggggaagataggagcaaggtcatgtaccctaatagttactatgttttgtaaatccattttgtagagggcatgtaaataaatgttttcctgtagtcatagattattcaggactgtcctttagttctgtcttttgaactcatgggaataattgtgagtcagcgtaacatttcaagagtctaaaggtggccgggtgtggtggctttaatcccagcactttgggaagccgaggtgggcggatcacctgaggtcaggagttcgagaccagcctgaccaacgtggagaaaccccatctctactaaaaatacaaaaaattagccggacgtggtggcacatgcctgtaatgccagctactcgggaggctgaggcaggagaattgcttgaacccgggaggcggaggttgtggtgagctgagatgacgccattgcactccagcctaggcaataagagcaaaactctgcctcaaaaaaaaaaaaaaaaaaaaaagtctaaaggcttaaagtttgatgcagctacctgaaaagatcttttatttatttattattagaaaaagcaaaggcatatgggcattggtttattagtttgaattctagagactagatcttaaagtagtggttctcaaagtgttggtgcccgccccaaacatcagaatgggccttgcaaatttggagcaaactctggggggaggaagcccagcatttctgtaattttaaccagcttcccttcgggagattctggaggcccgggtaaaattttggaaccccctgtttttaaagggaaccttttttt

SEQ ID NO: 51627 - DNA, 571 bp, Homo Sapiens
  misc_feature (541)..(546): n is a, c, g, or t
  misc_feature (549)..(549): n is a, c, g, or t
  misc_feature (551)..(551): n is a, c, g, or t
gggatccaacttaaagtaaaagttggaaagggcaagagtcttttaagcggaacttcaattctgttgtcatggttacttatatataatgaatataaatagacaaataggacttggaaaatgtggtatattctaagtcaagatgctatgaagttgttatagtttaagggacattcttaagaaggaattacttaagtacattactcttctcattttcaaggacatgaaaaagtaaaggatggtctggcactattttattttatttttttttgacttgtactgaatatatgtactttgaagatttacatctataactagaaagtatgctaatccgaggtctggttattaggccagattcttgttcagttattttttaaactaatgttgcctcctttttagtaagattctacgaaagttttttaactattaaagttatttcttaaggggtagctcttatacttcctctgctctctttttcagtttccataaaaagctgttttcttagctattactccaaataaagttctttggtttgccaaaaaannnnnnaananaaaaaaaaaaaaacatgtcg

SEQ ID NO: 51628 - DNA, 786 bp, Homo Sapiens
ggagtataaaccttgggagaatctaagtaaacacatttctaaaagcatagttaccttcctattttctggctcttaccttcttggagtatttaaatgcccatttgccaaaagcagacctgaacatcaagcctgttaattcttcaaagaatttaggtatttgtttcaccgaaatgaagtgacttaatagccattcagcgtattagtattacagaggctcttgcccagccacatccattcattgatttttatggctactcttcccagttacattttatgcatctgtaagctttccttccttagcaaaattgcattcaaaaatgtgtaaaaatgagtaaatacagaatatcactacagagacttgtatcctcaggtttattgatttcacattgtgaaataaacagcaaaggtcttagttttcaagtgaaaactttttggtaatcacaaaattacctgacacataccacgcttaaaccaacccccaaatttagcatattcattttgccatgagccagtcttgagattttcttaaaagatttcttattttgcctctgatgtagtgaaaaacggggtaagtatgctaactttcttgtatatgttggggggtacttattcaactccatttcttgtccttacaagatttataaatgtggtatgtttatagtgtggatatatatgttgccactgcaaaggtggtgcatatgtatatatgtgcaaaatgggtaaggcctgttctaactatgaaatttttcttaaagaccaattcaataaaatttaatactggatatc

SEQ ID NO: 51629 - DNA, 841 bp, Homo Sapiens
  misc_feature (793)..(793): n is a, c, g, or t
  misc_feature (797)..(797): n is a, c, g, or t
  misc_feature (841)..(841): n is a, c, g, or t
ggagttttttattgggcttttttaaaaagttaacttttaacatagctgctcagggattaaatcagattggaaaacccattctgactccacatactgctacaaagaaatacatcgttgtttatattgagctgcaggagatagtacactttaaacttaagaaagttaaatgtttcacaataacattgcaatataatcttcagctattctctttccattggtaaaatctctgatggtgtgataactctttgccaacctacgaaacccatatctggaagaatcaccagctcccgtgagcagcttcatgtaaatagatgcactccaagcagattgcatgcctcaggtgtttgtcttctagtaatcatggagtgtgcaacacccagagtaacactacaaggggcaggactgcaaacagcaggtcctggctaaaaacccttaatgctgcattgctgccagttgtaaagagatgcctgaatggaggcaagttctgccctgtgggtgaaactgatgatgtactgtactgtcatatataaatccactaaatccagctacctggaactgtggccatgcatttttttttttctttacagacccagtgtgatagtaggccatgcatctgagatacgatattccttgggtactagaggggagaaaaaaaatcaagtaggttcaggcttatgttgtattttgagagtctggttttatttgaacagaaaatactctacagaaagcctctgtaaataatgctccaatttgcacccggacgattcaatcccttaaaaatggatcttatttnccanacaagcccgattaaaaccacaacccttgttggccgccttcggcn

SEQ ID NO: 51630 - DNA, 700 bp, Homo Sapiens
  misc_feature (2)..(3): n is a, c, g, or t
  misc_feature (6)..(6): n is a, c, g, or t
  misc_feature (564)..(564): n is a, c, g, or t
  misc_feature (648)..(648): n is a, c, g, or t
  misc_feature (661)..(661): n is a, c, g, or t
tnntgnatcatgtcatgtgtgtttataaagccagctctccatatcccccagtgtctccaggagctgcttttgtgacctcactgcctgatctctttatcatcttcaggtgcttgacccttgcacagagagaagcttcctgggctacagggcatggcagcctgtcctttcggggagtgagattagatttagtccctgcactttgcctctctagaagcagcttctcgcctttccctcccgagggctggcaggagtcactgtcagtcacccttcatggggtctgaaaggttgcatgggctcacctggtcttagacaaggacagttgcagcttccgcaccaggcagacctgcagtttgagtggctggggataggtggagcggcggcctgaccacagtgccctggacagcagcacatcacatcaagttaacactggttgccttccaactagttattacggtgtcctgtgggacaattagactggaggagccaaaggaatgtgcaggggcactgggtttctggttggagagagctctcggtaaacagaagttcgcattccttcagatctgngggaccagagtaaatatcattatgcacaagcagcttaagcaatctatctgagtgccgttcccgaacgacactggtcctttgctntgccgtgaccttngaggctgcctaagaaggtcttcctgaggagcttccaaac

SEQ ID NO: 51631 - DNA, 921 bp, Homo Sapiens
  misc_feature (570)..(570): n is a, c, g, or t
actggaaagatggcttccttctccaattagcctgaatgagctttagtaagcaattgagagaactgtgtttttccgacaaacggtcacatgtccatcgttatggcatgtgcagaaaaacagagttatccacacaagtcaggagcaaaacccaagtagatgcctctaggggcatatggccctcacatcacaagccagaacctaagctaagcattttttaaattgagtttgagactagcctgggcaacatagtgagaccccatctctatttaaaaaatgaacagaattacctgggcatagtggtgtatacctgtagtccctgctacttgggaggctcaggtgggaggatcacttgagccccaaagatggtggctgcagtaagccaagatcacaccactggcactccagcctgggcaacagagtgagaccctgtctcaaacaaaaacaacagtaacaacaaaaaaatatgtagcgacttgaataggaaaccatagtatttcattgttttaatttgcatttattttatttctagtgaaacttttatatacgtatcggtcatttctatttccgttnttcgagaactgccaaatgttgccgtagtagccaaaatatcaggttgctatctgcgtttcaggttgatctgaagaataaggcattaagcatggaaagaaagaaaaaaggtcttaatacggcgcagctatctttgtgaggtatttcgtcgctgcgtcgtttaagggctggaactgggtctactatggctggcaaccttttgcagggaatcgagagggtccgcctcctcagtgcgtggaggccttcggtcgcgggtttgtggaagtattggccgcggttgtcttttcggggctgagaaggtgggttttcccaatgcttgcccgagttggggttgcccacgtttggggataaacc

SEQ ID NO: 51632 - DNA, 800 bp, Homo Sapiens
  misc_feature (547)..(547): n is a, c, g, or t
  misc_feature (636)..(636): n is a, c, g, or t
  misc_feature (669)..(669): n is a, c, g, or t
  misc_feature (762)..(763): n is a, c, g, or t
tgatggagtgtgaatgtgtaacgggcactgtgttacactctcaggtgttggcggggcggtcgcagacttcagggtcccctaacggaaaggccaggctccgcgtggacggccaactccctgcccgctccttcagcaggtgactgtctctgccacttcttacctgctgaaggatcttgctcagtagctggaacaatgctgctgtcacacagtctcttctctgaaacttcaggatgctccttggtcaccaggcaatgggagctgtagaccagccgcatgcacttgccccacattcactgctgactggcttcactggaataggttcaggtcaccgggacttctctcagagtcagcagcccacccaactccctcataccgtcgcatctgaaaattttcagagaggaattctctttgtagtcggcttgtcagggttttcaagtttttctatggttatttttaaatctctttttttaaatgctaaaattaatgtcctcattaatgcaagtaattttagagcacagtgtagccatgtacagtttccattatttanaataaataaatgtgttggttcatttggtgtatggggggacatcatggtaactggaaatgaaagtttaatctttcacaaatgtgcttgantaagctggttagattgtctttcctaagtatgtntactgttgtatctaactcaactgtgagctaagtttaaaactgcatcatgaatgtttgtgatattttaatatctactacagcacatttcagcanntaagatctgcctttatgtaaaaaaaaaaaaaaatctt

SEQ ID NO: 51633 - DNA, 968 bp, Homo Sapiens
  misc_feature (52)..(52): n is a, c, g, or t
cggtccggaattcccgggatcgcggggcggggcggasactcggcggagcatnctgcctgcgtccgctcttcccgcagccaagggtgggcgccggtcctaggaggcgcacggttgtaagccagacaaaaagaactggggtgcccggagtgccaggtggcgggcaagcggtgggcttttcggcggggtctttaggatttgcagctccaggaagcgagatgtcgaagccgccacccaaaccagtcaaaccagggcaagttaaagtcttcagagccctgtatacgtttgaacccagaactccagatgaattatactttgaggaaggtgatattatctacattactgacatgagcgataccaattggtggaaaggcacctccaaaggcaggactggactaattccaagcaactatgtggctgagcaggcagaatccattgacaatccattgcatgaagcagcaaaaagaggcaacttgagctggttgagagagtgtttggacaacagagtgggtgttaatggcttagacaaagctggaagcactgccttatactgggcttgccacgggggccacaaagatatagtggaaatgctatttactcaaccaaatattgaactgaaccagcagaacaagttgggagatacagctttgcatgctgctgcctggaagggttatgcagatatcgtccagttgcttctggcaaaaggtgctagaacagacttaagaaacattgagaagaagctggccttcgacatggctaccaatgctgcctgtgcatctctcctgaaaaagaaacagggaacagatgcagttcgaacattaagcaatgccgaggactatctcgatgatgaagactcagattaattcctttctggagctttgagatctaaaacttctgttgcttttgccattccaaaactttgtctttgccagaaaagtgtttggtaaytataaagaaaattatatatgaac

SEQ ID NO: 51634 - DNA, 631 bp, Homo Sapiens
cttttttttgtttgtttttgctttagcttggtgaaaaaaagttcactgaacaccaagaccagaatggatttttttaaaaaaatagatgttccttttgtgaagcaccttgattccttgattttgattttttgcaaagttagacaatggcacaaagtcaaaatgaaatcaatgtttagttcacaagtagatgtaatttactaaagaatgatacacccatatgctatatacagcttaactcacagaactgtaaaagaaaattataaaataattcaacatgtccatctttttagtgataataaaagaaagcatggtattaaactatcatagaagtagacagaaaaagaaaaaaggactcatggcattattaatataattagtgctttacatgtgttagttatacatattagaagcatatttgcctagtaaggctagtagaaccacatttcccaaagtgtgctccttaaacactcatgccttatgattttctaccaaaagtaaaaagggttgtattaagtcagaggaagatgcctctccattttccctctctttatcagaggttcacatgcctgtctgcacattaaaagctctgggaagacctgttgtaaagggacaagttgaggttgcctcgtgc

SEQ ID NO: 51635 - DNA, 665 bp, Homo Sapiens
gggacatctaccccagcaaccctactgatgatgacgtgagcagcggctcctccagtgaaaggagcagcacttcaggaggttacatcttttacaccttttctactgtacaccccatcccagacgaagacagtccctggatcaccgacagcacagacagaatccctgctaccagagaccaagacacattccaccccagtggggggtcccataccactcatggatctgaatcagatggacactcacatgggagtcaagaaggtggagcaaacacaacctctggtcctataaggacaccccaaattccagaatggctgatcatcttggcatccctcttggccttggctttgattcttgcagtttgcattgcagtcaacagtcgaagaaggtgtgggcagaagaaaaagctagtgatcaacagtggcaatggagctgtggaggacagaaagccaagtggactcaacggagaggccagcaagtctcaggaaatggtgcatttggtgaacaaggagtcgtcagaaactccagaccagtttatgacagctgatgagacaaggaacctgcagaatgtggacatgaagattggggtgtaacacctacaccattatcttggaaagaaacaaccgttggaaacataaccattacagggagctgggacacttaacaga

SEQ ID NO: 51636 - DNA, 518 bp, Homo Sapiens
ccgcctggctcaatggcctggctctgcccacctggggccacaagtcctcaagaccagaccagccctcaccctgcccacagctgctggacagccagagccatcacctgtagcactggttgccagtgctgtgtgtatagcagtcactctccacccttcccttctgcctgcccagctgccccggggccacgagtggatgctggggctgtggctgctcccctggaggggttccatctctgaccctgtggcccattcagggtgggctgaagagcccctgagcttttaacgtgagggtctttattggataggactactccctatttcttgcctagagaacacacatgggctttggagcccgacagacctgggcttgaatcccggctcgtgttcttgctgcaggacctgggcaagaaacttcacctctgctgagccctcattccccatgtgtaaaatgggacaacgcaacctacctcacagggttgttgtggggatgctgcctgatacataccctgtcaccaaaa

SEQ ID NO: 51637 - DNA, 612 bp, Homo Sapiens
gaaaaaggaaatagcagaaaaaaagtttcaagaatggttggaaaatgcgaaacataaacctcgtccagctgcaaagagctatggttatgccaatggaaaacttacaggtttttacagtggaaattcctatccagaaccagccttttataatccaattccgtggaaaccaattcatatgccacctcccaaagaagctaaggatctatcaggaaggaagagtaaaagacctgtgataagtcagccacacaagtcatcatctctggtaattcataaagccaggagcaatctttgccttggaactctgtgcagaatacaaagatagcgtatgtggaaaataacatgcttttatctggagctatttaatttaaaaatcagaaattgttttttactgctcagtcaataactcaacacttaatgtgattattgacaaatagcaatttttgcatttgtatatggagtccttagagttgaggaagatattttctggattttggtttttataaacttttcaaggttgatcttggcatgttgttttgcagaataagtggctgaatatgtaagaattgtgtttgtatttagcttgtattaaaagtacactgtaataccaataaa

SEQ ID NO: 51638 - DNA, 469 bp, Homo Sapiens
  misc_feature (465)..(465): n is a, c, g, or t
taaggtcacaggggcacttgggttgagccagggttttagcccaggtcttctgacaactgcctcatgtccttaccacaaaggagctgctatcctttgcctttccccaaagagtgaagactgcttaaagctcaaggatctttcttgaatttgtgaaatttgttcaggcaaggtgaaaagcaaaaacctatggttcacattgactttttgtattgatcattgtcttttgaagacaggaagtatgatcagtctctgccacttgtgctagtttttgtgtggtgtttagaaacatgggcatttgtctggatcctaattacaaataagtaacctagaattctcttcagatagtgcactaacagcaatgaatctattctaaatttcaaatatccaaattaaaatgactgtattagcctaagtactgaaatgggttattacattaaatgtattaatgggattgtttttgtggcnggta

SEQ ID NO: 51639 - DNA, 658 bp, Homo Sapiens
  misc_feature (8)..(8): n is a, c, g, or t
  misc_feature (26)..(26): n is a, c, g, or t
  misc_feature (36)..(36): n is a, c, g, or t
gtgaccgngaactatagacctcgcantcttttcggngaaagaaggagacaagttgaccctctgcccatttccttatggacctcacccatcatgccagcagggtcataggaccctggccttgttccaaatcatctgggacgtgacccactccccactgtcactgtgttgaaaacagagacttgtttgtgtggccccaacacccataaggaaaccaggctttaggcccaggggagcagtggaggtaagggctccaccccatcttaagctctgtcttctgtggcacaattccaagttcttgacgttagtaattgttaaaggaatggcaaactgttttgttttgaaggatctttctacagtctggtcttacccatgttcctagcaaccctgagatgattttcttccatttaccaaagcagccgggtcagtgctttctcacgttgccgtattcttcaggtattagtcagcttcagaagccctgctcccatttttccacccacccattcccccataaaacagcttattgtctccaagacaatagacatttaaaatgtgatgcgggtttatgatccagaccacaatcagaattatatcttgggtcatttatgtgccgtctgttcttgattctctatgctctaaatcggtgtttttcaaactgtgg

SEQ ID NO: 51640 - DNA, 580 bp, Homo Sapiens
cgaggaccccgtcaccaagaagaggctctcggtgggcgaggccgtccagaagggctggatgccccgggagagcgtgctcccacacctgcaggtgcagcacctgaccggggggctcatcgaccccaagaggacaggccgcatccccatccagcaggccctcctctccgggatgatcagtgaagagctggcccagctcctgcaggacgagtccagctacgagaaggatttgacagaccccatctccaaggaacggctgagctacaaggaggccatgggccgctgccgcaaagaccccctgagcggcctgctgctcctgccagcggcactggaggggtaccgctgctaccgctccgcctcccccaccgtcccgcgctcccttcgctgacacgggccaaggagccagtggggaagtgcgtgtgttgggccaggtaggatacgtacacctcttgcctcagagcagcctcatcccaggcagtgggtcttccctctgtccaaccactgttttattattttactaacatggtgatgggctccctcccctaaccttggtgcctgatccatccccagaccaggacagcag

SEQ ID NO: 51641 - DNA, 624 bp, Homo Sapiens
tgcacatcatgggctctgtctgtgagagaaaaatcccggtgcttggtgtccttgcatgacatggagttttgcatgtagatcaatttaaaatgtacctcttgtttacataatttgcataattttaaaagataatgttgccaaactttggaaatgttaatgttcagactgaaaatctccactacatgtaactttcttcctctggatcagtggcatggcttataatcccagccagtggtttgaactgttccagtgtcaactgccatgtgctctgcttcaagggggaactagccttttgtgaattttttgtacataagtatttgttacaaatattttagcaaatgctttctatttctcttgcttgtgcatatcttggctggcgttacagaaaaatagtgtaaacattatttccttaccggggaatgagggttttttctttttcttttttttttttttttttttttttagtttgtgtgtgggggtgggtaagggaggggatggtttatgttgaatgtttagtttttcttctgcatgatacgtcatgttgtgggatctttagaaaacttcatactgtatgaataagaaaataaaatatttgaaacttgaaaaaaaaaaaaaaaaaaaaaa

SEQ ID NO: 51642 - DNA, 715 bp, Homo Sapiens
acgagatgctggtgggtgagtgcccgttcccagggacacagaggaagaggtgttttgactgcatcgtcaacatggacgccccctaccccggctttctgtcggtgcaagggcttgagttcattcagaagctcctccagaagtgcccggagaagcgcctcggggcaggtgagcaggatgccgaggagatcaaggtccagccattcttcaggaccaccaactggcaagccctgctcgcccgcaccatccagccccccttcgtgcctaccctgtgtggccctgcggacctgcgctactttgagggcgagttcacagggctgccgcctgccctgaccccacctgcaccccacagctcctcactgcccgccaacaggccgccttccgggacttcgactttgtgtcagagcgattcctggaaccctgagggcatctcctggcacctctgtccccttcccccacagactgttagagcctctgctcgttcacccgtgcgccctgcctggaggtccaggccttgctgggtacttctgagcccttgggattcaaagtggcagccatggggccactgttgtgggctttgctcagtgtcactgggcaaagtgtgtcccttccccctccagctcgcctcttctactccagcgagacctggcccagaaagggtgccgcagcaaggagtgatatggttgtcttataagaactggctgctttatttaatttg

SEQ ID NO: 51643 - DNA, 778 bp, Homo Sapiens
ctcctcggaaattacatggtgctgaccacaaagtttctggatgttttattaaatattgtacgtgtttacagttgggaatttaaaataatacatacactggttgataaagggaagctgcaggaccaaggtgaagattgatagtccaaatgcttttcttttttgagttgtatattttttcacaccatcttagatataattaggtagctgctgaaaggaaaagtgaatacagaattgacggtattattggagatttttcctctgcgtagagccatccagatctctgtatcctgttttgactaagtcttaggtgggttgggaagacagataatgaagtaggcaaagagaaaaggacccaagatagaggtttatattcagaaatggtatatatcaatgacagcatatcaaacttcctatgggaaaaagtctggtgggtggtcagctgacagatttcccatttagtagtcatagaatacagaaatagtttagggacatgtattcatttcgttattttgagcattgataggtcagtatatctacctaatctgtttggtaagtataggatatataaaccattaccatttgatctgtcttatgccataatcttaaaaaaaattgaatgctcttgaatttgtatattcaataaagttatccttttatattttcaaaaaaaaaaaaaaaaaaaaaaaaactttggggggggtgttggccgaaaaagtttttaagaaaatgtgggggggggggcccaatgggggaaaggggatgggggtcaagagaaagt

SEQ ID NO: 51644 - DNA, 903 bp, Homo Sapiens
atcaataggtgttttcctctcttattttgtaaatagtattattttagctattaagctggataccttctttcaaattcagccattcagttgtaaagttgggaagaagtttcttgacaagactctgcaattaaatgcttaaaatttggaggggatccttccttgattacatcaagtatgttggtacatgggtttatacaagttcctcttgagaaggcaaaaagaccaccatgtgtgagagctctttgacttggccaataggggcctatcttaatgcacttgtttggacacatttctgatcttatttgtaaaggctgcaaaaggagaggatgaaatgctgtaaaagtaggaaatgaagtggaagctggaagaaaatgtaattggtggtacagctatgggccagatggtggaggggagggtggggacccctgccggcaagcagagtgtcacagctggctttcctcacttgggaaaagggtactgccggtctagcagcctcctctgtactcagccaggacacccagcgcgtgggacctgtttgtgtctgttttgcttccttgggaacggcacagtcactcaccctgccatttgcggaaatgacctggtgcactttgactgttaagcaatgcgttatttgctgtagtcaaggcttagtgcaagcaaggaaacatccccagtaaggtatttgtttccatttctgtctgtgcttctgtcagaaacttgctaggacattttagtggcccataaaaaagaaattctaattcaacttaaaaaaaaaaaaaagggggcgcgctaaaatttccccagggccactttccgtcccctttgtcaagggcctaagagggataaaagagaggcggtttaacctgcggaacgtcctgtttgagaccctgggtttgacaccgt

SEQ ID NO: 51645 - DNA, 869 bp, Homo Sapiens
  misc_feature (775)..(776): n is a, c, g, or t
  misc_feature (778)..(778): n is a, c, g, or t
  misc_feature (869)..(869): n is a, c, g, or t
tccctgcaccaacctcccatccccctgccaagatccttgaaggaccctggaaggagggagagcaggcagcccttcacaggataggatccgtctctgtcctgtcctggcactggcacaagctcagcacatgcccagtaatgcgtgttgtttggctgatggaataaagggcttagggacttccctgaggcctctggacccatctgtcttcctgagggcagcccaggacctttggccaatcccagttcccaggctgcagttgagggtctgtccttgtcaaaaggcaggtgctagacagtctagaccagggtttctcaaactcgtacttgacatttggggccagataattctttgttgtggggctgtctggtgtatggtagggtgctcagcagcatccctggcctctgcccactagacatcagaagcactcccccagttgtgacaaccaaaaatatctccagaccttggcaaatgttatctgtgggggaaaattgccctcaattgagaaccactggtctagctagacctgcactgtccagtacagtagccactaaatacatgtggctaaacttaaatttaagttaattaagattaaaagctcagtttctcagtcacattagtcattcaagtgttcagacagccacatgaggggacagtgcagctacaggatatgccatcatggcagaaagttctattgggttggacagtgtgtggtctatactgactcttatttctccgggagatcccagcaacctaaataaaccagataccttttccnngnggaaaacattcccgcagcccccaataccctcatggtccgaagaatcaccaaagggggccgcccccttctaaagaatcccctccagggggcn

SEQ ID NO: 51646 - DNA, 541 bp, Homo Sapiens
gggagaaatcagtctggtttccatcccagtcggggaagagagaggtgagagggaatcagaacgtacctagttgattccttggtgacaagtgcaatggggtatgggtagaatttattttcagagccaagaggacttgatggttataaataaagttgcctttagcaatggaatttacagatcgatcatgttgttccgaaagatgtgaataggatccacaataacaagttgattcagactaatgtagatatttagattagcaagtattgaacatttgatttcttagactgaggttttaaatgaatttcattatttctcccggtaatacacagagcatcgggattaggaaattagccattttggattctgtctgccacaaacagacctattctaaacagtgctattaaattttagactgttgttcaaatattttattttctcctaaactactttttatggtgatgaataattaagaccatttaaaacacgggagtacaagtatttttttgaattaaattaacttgcaaaaaccaaatttgcagtg

SEQ ID NO: 51647 - DNA, 557 bp, Homo Sapiens
gcacgaggaacatttggtgagttgtaaagagaagtattattgcattgtaggtttttgcattgatgtgtcgatttttttgttttgtcccaagatttccttccagcaccttaatgaatgttcatatgatagaatgttttaagtatcagcaaagcattcatggatgcctgcttttcattctcagaaggctaaacctgttttgggtatgatgctacttcagaacatattgtctggcacaagatttcttctaataagtggtttatttaaactcaatttcggtggactgttgaattgaaaaacaccaaaggagtcttcttgtctggagactggattgttccagttttaaatacctgtgcccataagtatcccatttcatgaatgtgtgttggcatggggaaaaaatttccctgctctttgagtggagcgaaagcaattggttaagctgtagcagcttttttgtttatttttttaaagtaataataaaacttgaactgaaaaaagataaaacttgaactagaatactactcttgtatgcttagaatgtttatagtgttaaatgt

SEQ ID NO: 51648 - DNA, 590 bp, Homo Sapiens
cgaactcctttgaactggacttacagttttccgaagatgagaagaggttgttgttggagaagcaggctggcggaaacccttggcaccagtttgtagaaaataatttaatactaaagatgggcccagtggataagcggaagggtttatttgcaagacgacgacggctgttgctcacagaaggaccacatttatatgatgtggatcctgtcaacaaagttctgaaaggtgaaattccttggtcacaagaacttcgaccagaggccaagaattttaaaactttctttgtccacacgcctaacaggacgtattatctgatggaccccagcgggaacgcacacaagtggtgcaggaagatccaggaggtttggaggcagcgataccagagccacccggacgccgctgtgcagtgacgtggcctgcggccgggctgcccttcgctgccaggacacctgccccagcgcggcttggccgccatccgggacgcttccagaccacctgccagccatcacaaggggaacgcagaggcggaaaccttgcagcatttttatttaaaagaaaagaagaaaaaaaacacccaaccacacaaagaa

SEQ ID NO: 51649 - DNA, 851 bp, Homo Sapiens
caacctgtgtgaaaacctggtgaagtccagtgaggcaaactctccagcccatgaggagttcaagacgatgctgctgatcgctcattactatgccacgcgctctgcagcccagagtgtcaaacagctggaaaccgtggctgccaggctttctgtttcactcttgcgtcacacccagctactacctgtagacaaagccttctatgaagcaggcattgctgccaaggcagttggctgggataacatggcattcatcttcctcaatcgctttttggacctgaccgatgcaatcgaggaagggactctagatggccttgaccactctgattttcaggatacagacattccctttgaggtgccactcccagctaagcagcatgtaccggaggctgagagagaagaggttcgagactgggtgcttacagtctccatggaccagcggctggagcaggttctgcctcgggatgagcgtggcgcctacgaggcctccctagtggcagcgagcactggtgttcgagccctgccctgccttattacaggataccccattctgaggaacaaaattgaatttaagcggcaggaaggctgctaacaaggacaactggaataaattccttatggccatcaagacctcccacagcccagtgtgccaggacgtgctgaaattcatcagtcagtggtgtggagggctccccagcaccagctttcctttcagtagttggtagagctgaggaagagtagggcctctcctcattaagtttataaataaaaaacaccaagaaaaaaaaaaaccgggtttttttggggggcaaaaaagaaggggggtattttccgcccctttaaagggaatccgg

SEQ ID NO: 51650 - DNA, 571 bp, Homo Sapiens
  misc_feature (540)..(540): n is a, c, g, or t
gcacgaggaggacccccagcctggaatgagaagggtccccggttccatgtcagacccagaaaggtggatccccccactgttggctgcaggaggtttttggtacccccttttgttccagaaccgtcctgcctctcgcttggggacaggggggctttggatggcactggtgtgcacctggacccagccccggcctggcaggatccagggatgggtgcctgggatcctggggggagggaggcaggggacgcccttctggagctgggctcggagggtcctgccccatccagccctcggctctctgtgttctctgtccctagcctcaaaccctcttctggcagcgctagtgagatgccttagtctgtgggggtgggtgggggactggggccccgttttcctttgtgagtcttggttggccccagccctggcaggggcctgtctggagcaggggtaggtagggctgtgggttccagaactctataactgggcccctctccagtgtccaggggcttggagagacctgcgcccacccctccactctcncaggagtcgctgatcactgggaactggttcc

SEQ ID NO: 51651 - DNA, 866 bp, Homo Sapiens
gggagaagattcagcaggatgtcatgacattttgagaaaaactaaatcatgctcctgaaccttctgaacgcatttgttattgaaggaaagacaccacccccaaatcctgccatcttattggggctacttttgtcagtgtctgtacccttggcatcggcatctgtgactctttatccatgacctcagtgtttcttaaccaaagttgtactcagcatttcttaaccaaagttgaattttgaaaagagtcagtccttgtttgctggaattagaatgttaatgtcctagtattattccgaatcacagtattaactgcttgttgctagtggattagacagattcttttcttactgtggcttccatgttgggagcagaagcttttcatcctggtcacatgaagacagatggtattattgactggagttgaattatttttatatcttgtctggcacaatatggaaattactgaaataagatggtgtataatggaattaacacccaaaataagtagaacactgaagatttgaatttgatatttaagtaaaatgggactgggtgcagtggctcaggcctgtaatcccaaccctttggaaggtaaagacgggaggatcacttgaggccaggagttcaagaccagcctgggcaacatagtgagaatgcatctctacaaaaaataaaaaaaattagctaggcatagtacctgaggccaggaggtccaggccgcaaatgagatgtgcttgtgccattgcacaccagtctgggtgacagagaaagaccctgtctcaaaaacaaattaataaaatatcttcatatataattagctattaaaatattttccctgtatttatctaatatttctatctgaacca

SEQ ID NO: 51652 - DNA, 1102 bp, Homo Sapiens
  misc_feature (748)..(748): n is a, c, g, or t
ggaattcttcagatatcgggaccacgcgtccgctaacagtccggctcggcgttacccccggcagctggtggatgcatctcagatcccgtttcctcttggcgaatgctgcttgcgaatgtgtgcgacgccttccgtgtgatggaaacacactaccccgtcggacttcgaatttctacgtggatgtgcatgaagctcttgttttcgatgtgtgtttgtaaagggaaaattagtactctgctcgactcttggtaacatgaaattctgaatgttactttatcatgattgcactgcaactttttccttaaaataactgcttttgtaagaacggtgattggagtgattagtataaattcaatggaatttgagaagcaatggcagcgggataatttagagtcactgatattacgagaggggtctttttgtaaacctccttttcaatgtcaaagcaccaatttataaaacgctgcagatgtagaggttatgtgcaactgatctgtccagtttgtgtatgaaatggatttgataaagtttttgctagttatttactacattttgggattaataagtgatttatatgcatatttttctgtaaatctacagttttttgtacaagatattctacaagttatgaagctaagggaagaaaatgccaaagatacctctagttatgttgaacacagccagcacagtttcgacaggtcaaggaagagctgtttcagtaaagaatgaagtgaaaacacttatttangaaaatgtttctcaacaataaaatgaatagttgtttctctcttggtagaagtggcggccggttctttcaaatttgaatttatttatttatttaattttggagacagagtttcgcctcttgtttgcccacaggtggaagtacatggtgcaccgattctgggttttacaccaaaccccgctcctattcggtttcaacgcgatcctttcccatccgccatataccatatcctccccacccttctacacgccatcccgccggcccgcgcatacctcctctagccagcacccctcccctccctactccaatcctacccgtgccgtacgtcttttctcctcccctcctcatcatatgtgc

SEQ ID NO: 51653 - DNA, 642 bp, Homo Sapiens
agtcaccggtcgcatgtgactgaactcttcaccccagtctgtggctttcccgttgcagtgagagccacgagccaaggtgggcacttgatgtcggatctcttcaacaagctggtcatgaggcgcaagggtaggaggcagggccgctgcccgccctgggccagcaccttgtaattctgtcctgcctttttcttcctgtatttaagtctccgggggctgggggaaccagggtttcccaccaaccaccctcactcagccttttccctccaggcatctctgggaaaggacctggggctggtgaggggcccggaggagcctttgcccgcgtgtcagactccatccctcctctgccgccaccgcagcagccacaggcagaggaggacgaggacgactgggaatcgtagggggctccatgacaccttcccccccagacccagacttgggccgttgctctgacatggacacagccaggacaagctgctcagacctacttccttgggagggggtgacggaaccagcactgtgtggagaccagcttcaaggagcggaaggctggcttgaggccacacagctggggcggggacttctgtctgcctgtgctccatggggggacggctccacccagcctgcgccacagtgttctta

SEQ ID NO: 51654 - DNA, 649 bp, Homo Sapiens
atttgatatagtaggcactgacaaaagaggtcaaatgcaggactgatttctaagcttgcaatctatctaaatgcagatgctaatttagagtgcataattattacacaagtacagacctaggttagggcttaaatttcattatgtgcaataaaaaggttaagtgatggttaagcaaggtgtagattatccttacctctcctaatgacatgggctcacattggcattcctttcatacttttacgtataaagtgggcagttgtttctgaatgactgttgctggagcctcaggcctgctttgtgcttggtgctttccagactttctcctttattcctatcaccatatacgtactcacaaaagagcagtgtaaaccaggtattacatttccacaagggaaagtagaaccaggaatagccacatgatacttaccgaaagcttcactttccctatagagaaagcaagcaacatgaatcttctgatttggggcccagcctgctgctgtatacagaggttggcattattggtgatagaaatgtctgataggagtcttttaattatactctggagtgtggaggtggagtgcaaggctgcttcctttattactgcaagtgttattttctattatctcaggtttcgttttgtgtaataaaa

SEQ ID NO: 51655 - DNA, 532 bp, Homo Sapiens
  misc_feature (512)..(512): n is a, c, g, or t
gggtaaatgaaaattttaatggaaaactcattcaccatttactagctttgtgcaatattataaaaggtagaagcaaaacactagcacattgtgctttgcttggcttgtaaggatggctttagtaccattacattaaatggacagtgtgcacagtgtattgtaaatgccaactcttgcaaatttacaatacttaaatatgttcaattaacatcctaaagtattaaaagtacagaggaaaaactaagcaagcatttatagcaataccatgaaatctccagtaatcgttttgactgttgccttttgctctttagtgcagcttttctgcattgtaattgtattgctttgtatttcatgttttttacactcatgacttcagagttaagtacttgtacaccaagtattgcaatcacctttctcttgttgtacatgcaatgtaacaacctacagttttggtgcttttaacaatattcctctttttctttaataaaggatatttatttgaattaattaanaaaaaaaaaaaaaaaaggac

SEQ ID NO: 51656 - DNA, 500 bp, Homo Sapiens
ccgtgggtcctggatggggaactgcaagcagcctctcagctgatggctgcacagtcagatgtctggtggcagagagtccgagcatggagcgattccattttatgactgttgtttttcacattttcatctttctaaggtgtgtctcttttccaatgagaagtcatttttgcaagccaaaagtcgatcaatcgcattcattttaagaaattatacctttttagtacttgctgaagaatgattcagggtaaatcacatactttgtttagagaggcgaggggtttaaccgagtcacccagctggtctcatacatagacagcacttgtgaaggattgaatgcaggttccaggtggagggaagacgtggacaccatctccactgagccatgcagacatttttaaaagctatacaaaaaattgtgagaagacattggccaactctttcaaagtctttctttttccacgtgcttcttattttaagcgaaatatattgtttgtttcttc

SEQ ID NO: 51657 - DNA, 565 bp, Homo Sapiens
gcacgagcagccatcggcgcagcaaaccagccagctgtttgctgccaaattccttcctctcccaggtccagaccaaatacaagatcagcaccacaccgtggtgttgtcaggagccaaagcaacaggaaacaattcaatgctgttgggttcgattctgagagtagatttttccagacatgtctttcaggtgaccctcaactacctcaggtttgaaggccctaaatgaaactgattaccactcatagggacaaaccgagggggttcggttacatcttggtgataatgcagttgtctcaaacttataacagactctttcacatttcagtttgcagggatagggttgggtttgtttttcttctgtttttaacctttcccctgggtttccattagggtagttccttgaaatgaatttcatttttcactgagtgcctaccttcccagggcaggtggccactggcttctgtttccctccaacaatacttttattatggtattaagacctttctttgtataatacattgcatctgtgttttcaatttttcaaataaatatttccgcctggcaa

SEQ ID NO: 51658 - DNA, 680 bp, Homo Sapiens
  misc_feature (595)..(595): n is a, c, g, or t
gcgccctcccagaggcctaccttcaagcagctggtggaggcgctggacaaggtcctgctggccgtctctgaggagtacctcgacctccgcctgaccttcggaccctattccccctctggtggggacgccagcagcacctgctcctccagcgattctgtcttcagccacgaccccctgccattgggatccagctccttccccttcgggtctggggtgcagacatgagcaaggctcaaggctgtgcaggcacataggctggtggccttgggccttggggctcagccacagcctgacacagtgctcgaccttgatagcatggggcccctggcccagagttgctgtgccgtgtccaagggccgtgcccttgcccttggagctgccgtgcctgtgtcctgatggcccaaatgtcagggttctgctcggcttcttggaccttggcgcttagtccccatcccgggtttggctgagcctggctggagagctgctatgctaaacctcctgcctcccaataccagcaggaggttctgggcctctgaaccccctttccccacacctccccctgctgctgctgccccagcgtcttgacgggagcatnggcccctgagcccagagaagctggaagcctgccgaaaacaggagcaaatggcgttttataaattattttttggaaataaaaaaaa

SEQ ID NO: 51659 - DNA, 651 bp, Homo Sapiens
  misc_feature (615)..(615): n is a, c, g, or t
  misc_feature (618)..(618): n is a, c, g, or t
  misc_feature (629)..(630): n is a, c, g, or t
aagagcgaggcctgggtggcgattccgacaggaaaacagaggcactctgcttgctttcctagccagtcctcccctacacacacacacacacacacacacacacacacaatctcagctgcgccattctgtgcaatcccagtgaccaaatcccttccttgcccacctctatgtcagcaggactgaccacatcactcccccgagttcccaccaccagcatttcctccaacctttttccatcacaaccagttagaaccctacaggcaacaaggccttctagaatccgcttaacccttggctgataacaggcaaatttcagtctgctacactttgttaggtccagaaggagctgcccatactactttcttatgagcatgctcagtatggcatatggacatgtaatgtcacatctttgtggagtgtgattttctttttttacatatttgtatgcagtagagagcctgttgtagaaaacgctccctgtatcttgctgtactgttaaagaaagctgaattccacattgccaacaaaagcgtgaaaatgttcatgaaccttcctccaggaaaagccattcaagcctgattatttttctaagtaacttcaattaaattgaagaanacnggaacaaacannaaaaaaaaaaaaaaaaaaacc

SEQ ID NO: 51660 - DNA, 558 bp, Homo Sapiens
agagcctgccgagctcacggatgctgtgaaggtcatggacctgcccacccaggagccagcactggggaccacctgctacgcctcaggctggggcagcattgaaccagaggagttcttgaccccaaagaaacttcagtgtgtggacctccatgttacttccaatgacgtgtgtgcgcaagttcaccctcagaaggtgaccaagttcatgctgtgtgctggacgctggacagggggcaaaagcacctgctcgggtgattctgggggcccacttgtctgtaatggtgtgcttcaaggtatcacgtcatggggcagtgaaccatgtgccctgcccgaaaggccttccctgtacaccaaggtggtgcattaccggaagtggatcaaggacaccatcgtggccaacccctgagcacccctatcaaccccctattgtagtaaacttggaaccttggaaatgaccaggccaagactcaagcctccccagttctactgacctttgtccttaggtgtgaggtccagggttgctaggaaaagaaatcagcagacacaggtgtagaccag

SEQ ID NO: 51661 - DNA, 914 bp, Homo Sapiens
  misc_feature (749)..(749): n is a, c, g, or t
aggcactaaggggaagggagaagccctcagggcaggccctgctccccctacctccttgccagggcaagggtggagtgtggaagacgtgggtcccccagagcaggcctggcccccagctgtgagggcctcagggaggcccgagggggagtgctgggggtctcagctggcttagctcctaagtttaccaaatgttaatttagtcttggggagaacagcaagggctggaggccagtgctgcagggccagccccactcctgacacctgggcccttgaagctccttgaggggcaaggcccaggagttccagccctcaggttcctgagggtccaccctcagtccttccccccgccgcccctccccggactccccacaagagcctccctggccccagggccgcctaccaggctggtactcattctatgaccaccgcccccaaccagctgcccccagctctccctgccccctcccctctctggcagctagcagggcaattggcggggaggagtgcggactgaggactgaggaccaagggggcccaggccctgccctcctacccggaggggctccgtttgcattccttggtgctctctgagtgcagctggtgtcccgccctgttctgggcggacgcctgtgtgcgtgtgtgtgtgcctgtccagtgtatattgtgtcttaccttccatttttaaaattgttctgtacagagagagatgcagcaggggcgggaaggcaaaatggggcggaggggaacanccgcacccccagcaccgggtgtctgcggtaagaaccaaaaggctgaaaaggggctggtcctggcccaggctcccccctggggctcagcaccaaaggggctttcaatgaattaagtgaaaacttttttccttttttacaaaaatgcagaaaatcaccaaagctcca

SEQ ID NO: 51662 - DNA, 618 bp, Homo Sapiens
accgtcttagtttacacatctgccaaaggggtagaattacacttctttttacaggtaaatgtcaaggcacaatcagttttcaggaagtgcttcaagaccccaggtgaaatgaaaatgctaagtaccctctgaatggccatgcctgttaccaggtgctgcttcttcagatgatggggagcacttttcagggtgaaattcaggcgagttttgcccaggcctgctgtcttgagtacaaatgtgaatgatcgactgactgcttgttgccaaactggaaatgttctgtagggatttactggcatggtatcattcctagaagaaaaaagagagaaacttgactgcacattaaaaaaaaaaaaatccacatggtgacttttatttaatttctatttttttgggtaataaaaagttgacttttttattggaattggtctttttatttatgggtctgaaaggcatttcaaaggtattataataatatatggggtaatttaatgtggtgcaacatgctttatggctcctgtcaaaatgggttttcactcatttgatctggtttgagcccagaacagcctacaggggaaaaacaagctggataaccacccaaagtgttgtatcacgtag

SEQ ID NO: 51663 - DNA, 1098 bp, Homo Sapiens
  misc_feature (783)..(785): n is a, c, g, or t
  misc_feature (788)..(788): n is a, c, g, or t
  misc_feature (795)..(796): n is a, c, g, or t
  misc_feature (798)..(798): n is a, c, g, or t
  misc_feature (802)..(802): n is a, c, g, or t
  misc_feature (805)..(805): n is a, c, g, or t
  misc_feature (807)..(811): n is a, c, g, or t
  misc_feature (814)..(824): n is a, c, g, or t
  misc_feature (827)..(828): n is a, c, g, or t
  misc_feature (847)..(849): n is a, c, g, or t
  misc_feature (854)..(854): n is a, c, g, or t
  misc_feature (856)..(858): n is a, c, g, or t
gtccggaattccctgggaattctcggaggaaaatcttaatctagacagattcagattcccaggctctcctggaagccctgcacttcggggcacaggggccctgggacgtggttggcagccaggctgcgagagagctaaaaaggaacaagaacatcagctcggatgtttgtctctcagccctgacacctgccactctccttcccggggcacttggccctatcagagggacatgaaatgctgtccaaatggtggcagaaatgcagcgacattgcatgcagcagagtctttgcttcgaaagatggggcgccatgtttcagagaacatttatcttagtcccacgttcaggtgagaagacctcaaaggtaccctctgtccagaataaacattggaacaatctctcaattggcttttgtcactacacataatgtaatctcccttctttcagctcccccaacagtgagcatgcttcccaaaaaattacaacatcaaaaccaggaatgtccccgcatctactattaccaggcttgcaattggttcaattttcccataaaaacatgtttgtccaaaagaagggaaactgtgaatttattccatgcatgtaataaactctgcaagaagtttaacccacataggtttgcggcactgcaaaaatgttcatgggtctatgtagcaaatgattctctgccttgacaatcatgtatacatatcaagatttctatcataatgataatgagaatgatgacttcttggtttcctcccataaagacatttaattcacttccnnnaanaaaaaannanaaanaanannnnnaannnnnnnnnnnaannaaaaaaaaccccaaaaggnnnccccnannngacccccccccttaaacttgcccccgccttgagggcccaccaagagggcccgcgttaaaaatttttttccgaaaaacgggggatcctctttttccagcctttgattctttgcccaagggctctctcttctcggggattccccctggaagttcgcctgtataaaaaaacctcttctcgttaatgaaaccctttaaaatatgcggcccagaatcgtgtggggggaaaaatacaaaccgcgga

SEQ ID NO: 51664 - DNA, 582 bp, Homo Sapiens
tttagatgcacccgtgtttgtaaaaagtagagcacaatggaattatgctggaagtctcaaataatatttttttcctattttatactcatggaagagataagctaaagaggggacaataatgagaaatgttggtgtgcttttctaagcatttaaaacataattgccaattgaaaccctaaatatgtttacataccattaagatatgattcatgtaacaatgttaaattaattataatgggattgggtttgttatctgtggtagtatatatcctagtgttcctatagtgaaataagtagggttcagccaaagctttctttgttttgtaccttaaattgttcgattacgtcatcaaaagagatgaaaggtatgtagaacaggttcacgtgattacctttttcttttggcttggattaatattcatagtagaactttataaaacgtgtttgtattgtaggtggtgtttgtattatgcttatgactatgtatggtttgaaaatattttcattatacatgaaattcaactttccaaataaaagttctacttcatgtaatccaaaaaaaaaaaaaaaaaaaaaaagggc

SEQ ID NO: 51665 - DNA, 572 bp, Homo Sapiens
caaggcaacacagttcagcacattcaaatcaagataaaaaagacgatgacattttgtgctaaatttgcatataccatctaaaatccttttttaaaaaaatttaatgtaataaagattcatgaattctgaaagcaagccaaggacttgctcctatgtctgttacaaaacatagtttatgtagctttgtaacattcctcagtgcctgtccataactgtgaagtattaagcacttagggccagatgcactgtaaacattgcaggtttaaacataaaggagtctttaaaaaaaaatcatttacgttggaattttaggttttagaatagagctgacattaacatatatatatatatataaatatatatatatattttgtaatatgagccagaattctttttcaacaatttaaagcttttccatagagcttatttatatccttttttttcattttaaatgtgtcagcacctgtagtgtaaatagcttttaaatatctttttagtgtgatttatactgaaatgtgagcccacttaataaaggttcatatgttcatattaataaatatgttcttctgctg

SEQ ID NO: 51666 - DNA, 663 bp, Homo Sapiens
  misc_feature (536)..(536): n is a, c, g, or t
ggtttagaccaagaaaaaggaaatccccccttttcatgtattccttggtttgaggacatgactcctgtaagggagaggaaagggagatgcttcctgtttgaactgcagtgaattcacggttcctgtttcaccactccaaaccttatggcgactcacacacacattcctcttttctgttactgccaaaggttcgggtttagtacacttcagttccactcaagctttgaaaaggttctcgtggagtctggggcgtgcccagtgaaaagatggggactttttaattgtccacagacctctctatacctgctttgcaaaaattacaatggagtaactatttttaaagcttatttttcaattcataaaaaagacatttattttcagtcaaatggatgatgtctccctcttttcccctattctcaatgtttgcttgaatcttttattattttttttaattctcccccatacccacttcctgatactttggttctctttcctgctcaggtcccttcatttgtactttggagtttttctcatgntaatttgtataacagaaaatattgttcagtttggatataaagcatggagaataaaaaaagatagctgaaattcagattgaagaaatttatttctgtgtaaagttatttaaaaactgtattatataaa

SEQ ID NO: 51667 - DNA, 653 bp, Homo Sapiens
gaagtttgggaaaggcccaagctgggacttctccaggcctgtgttccctccccaggaagtgcgccccaaacctcttcatattgaagatggattaggagagggggtgatgacccctccccaagcccctcagggcccagaccttcctgctctccagcaggggatccccacaacctcacacttgtctgttcttcagtgctggaggtcctggcagggtcaggctggggtaagccggggttccacagggcccagccctggcaggggtctggccccccaggtaggcggagagcagtccctccctcaggaactggaggaggggactccaggaatggggaaatgtgacaccaccatcctgaagccagcttgcacctccagtttgcacagggatttgttctgggggctgagggccctgtccccacccccgcccttggtgctgtcataaaagggcaggcaggggcaggctgaggagttgccctttgccccccagagactgactctcagagccagagatgggatgtgtgagtgtgtgtgtgtgtgtgtgcgcgcgcgcgcgcgtgtgtgtgtgcacgcactggcctgcacagagagcatgggtgagcgtgtaaaagcttggccctgtgccctacaatggggccagctgggccgacagcgaataa

SEQ ID NO: 51668 - DNA, 780 bp, Homo Sapiens
aatattatggtttgtaatcttgttatataagaggatgtttaggctgtatatactggggtagattattgcctgccccttatacataggaatatgctgcataattgcgcataacttccatctcccttactggcttgtaggcagaggaaactgtatatgttactgccttgtacttttctcatacaccaaaaacacaccaaaaaaatcaataaaataagcaatcttctattctcattccttttcccacagcagcatattttagaggcacatacaaaacctacattctctagttgggagtggatttttaaagttttccttttatcttttattttttttttggtatgatgcactgagatgtgtactttctaacaggggatgggtacctaagaaatgtggtagcattattcagaaaactattatactttcaaatgacacatagtaaggagaatggaataatacatgttgcatatttgttaccagttgtaattggtctgtattatgaaagatgtaatgggtttgtcagctgtcactgtggtttcttgtaacatgatatggaataaagtatagcagaatctccgtaaaaaaacaacaggatccaaaagggcgtcagtctggtgagtgtccggccccagtaccagtgacggaccaagaaacttcgggaggtcaaaactgggggagctgccaaggtgggatccttgatgcgggacttcagcctagtggccattacggagcgtcaacagaggttactacggtatacaacaagtaccatcatgtgaacacagg

SEQ ID NO: 51669 - DNA, 906 bp, Homo Sapiens
  misc_feature (762)..(762): n is a, c, g, or t
gggtggcgaatcggcacgaggcactgatctacaatgtgctcaagaccttcatggagatgaatgggaagctgtttgatgagctcacagcctcctacaagctggaaaagcagcaggagcagcagaaggcccaggagcgtcaggagttatggcaaggtctggaggagctgcggctacgccggctacaggggacccagggggccaaggaggcccccctccagcggcttacaccccaggtggccgccagtgggggtcagagctagacagcacctcagaaggggaaaagctaaacccagagctgtcagaccctctatcccttctcctgtccaggggcccagagagaaacacacctacccctggccttgccagagtggcttctgaggactccctgcccagcccagctttcactggggggagacgaggagaggcaatggtggtcttggcaacagaatgctcagcccctcgtggcaggacttgacaagggcaagcttgaccaggaagctgccatcagggatcttcccctgccccgcaaagctaggctccagctgcaggcgggctcccaccctctgctcctggccttgggcaagggcactcagcgcctcgcctgcccctgccttggccaatgcgaggtccttccttatccccaccatggggtccatggtctatttattctcgcccagctcaccctctacacagacactgtcctgggtgcacactcctcccttccctcgctgtgtacttccttgtcccctttttatttattgngcagggggagggggagggcacaggcaagaagagatcacagtgtcctggggtaaggggggggtcacagtaatcatggtctactccctcttccgtggctggggggtagacttaataaagagagaaattcaaaaaaaaaaaaaaaaa

SEQ ID NO: 51670 - DNA, 577 bp, Homo Sapiens
ggggggcttaggcagaaatagagccatggtactgaccaaagggaccatagcacatggaataaaactcaaaacaggacttcatgttttatggaaattatatttaaccacttcaacattgtaaatctggataacttttaatatctaaactatataagaaagtaaaatttaacatgttaatatggaaaatttttttatttttgtatcttgatgacttaaatgtaagcaacaaagtggttaaacacatacccatctaaatttttttatagccttccatgttaaactataagtaaataattagttttaaaattgttttgtattttcttattcctgttccctttaccctttgacaacttgaaatgttaccacttcgtcctcatgatgttcttctatcaaccctgcttaggatgagaacaagttgagcagtgccaacggccatgaagaacgtagcaaaaagaggaaaaaaaagcaagagccgaagtcgtagtcatgaacgaaagagaagcaaaagtaaggaacggaagcgaagtagagacagagaaaggaaaaagagcaaaagccgtgaaagaaagcgaagtat

SEQ ID NO: 51671 - DNA, 762 bp, Homo Sapiens
ttgaacaatgagtgaaactctgtttttagtaggctgtgataaacatttccggagcacttgcagaggacttgctatttgccaggtgctttatgtatcattaaatttttctcatagttcagaaaaatgtgcaaaggaaactattgtctcgctccttcaaaacagtcttaattaactttcatattagcagattaaactagcagagcaggttcaagggaaattaaatgatatggaccctaatttgtatcattctgagttgattgtgtggtttattcattctggaaacatgttgatacttacagtcagccactgcttttgataagtgatattgattaggttgaatcttcttgtaaatagtatttaccagttagcaaagtctgtgttttcagaattacagtgagcacagaggtgttcataaaatgggaattgagtcccactcggtaagagttgcttaaacttgacactgttgacatttgggctggataaaacccctgtggtggggtctgtgctgtgcattgcaggatggtgagcagcgtccctctcatgtgacacccacagttatgccggatgttgccagatgcccctaggggacagagtcaacccccaactgaggaccactgtcctacagagtcaggaaatattgtagggagaaaaaaataacaacaacaaaggcctgtgttaatgttaaatagatgagattatggaatgtgtatattaatgttaaaaattgtaccttgatcaatgtactttttataaacttgccat

SEQ ID NO: 51672 - DNA, 561 bp, Homo Sapiens
gtccgcaaaacttggttggagagctgaacaggctgggactgaggaaaggataaaccccgatattgggacctcacagtgggtgtctgaaaggacagatcactccggagtatcagggattgtggggacaggagtgagacaaccccccaggtacagcactggcttttcttttcagcccctgacaggccacccccactcctctgcatgtcttggagagcgctagttacacattggcttgtcccctttactttttcccagccacccctccccctgaaatttctgcccctctctaccaccctcactccatgacctgtgagatcacaaagtgaagatgaaccctttctgtgcaggagcagagccaggtgggccctggacattttttttttaatataacgagatatttataagtgggtgctagggtcttgactttatctccgctgcacaagcagtgtgttgaactttctaatctcatccctctcctaagtgagccctgagctagacggtttccttcctcccctctcaaagtttgtttgtttgtgttctgacagaggataaagctatttt

SEQ ID NO: 51673 - DNA, 488 bp, Homo Sapiens
tgacaggggctgggaacactctggaaacctctcttggcatctagggaagagagcattctttgtctctctattgcaacctctggccttttcagaagcagcactggcagagtaaaacatgtctagcctctaattaaagaaaaattgtgtcactgtgtgacaaattagtctgtcaaatatactctgcccctaccatccgcctacctttttcttccctttttttttttcagatagtgaagatctttcataagtttttgtgtgttttacttttttgtttgttttatttcacagtatgatgtagatttcttgatgctaattcagtcttccatggcttgtgttattcctttttaatagtcacttgaaactatggaggaatcagcctctcatttgggtatgctgatggtgaagtcataacctcctttccctattaatactttttgtttctccttataagaatggagacctcagtcgagaccagcctgggcaacata

SEQ ID NO: 51674 - DNA, 570 bp, Homo Sapiens
ctatttcagaagaaaatgaaccttttatttgctctacccagtaactgcgctggtacatagacgcactgagcaaacaaactttgtaaccacctctgactactttgtatatcaaagttgattacttttgaaatatttggatctagtttctaagttattttagtgttttatatgttccccaaaattactttgaatctgtcaccagcataatgagttcttggtgatacaatggtgagacttgtaatgagcaaaaagctacctggagtagctcctcttttccttctttcttagtaacctgtttttgattaccgtaagacatcacagattacctgaaaccccttccagtataactaggccctccttccttccacatttaattgcttaatagtttgaagaaactatggaaatgggcattttatatgacatgtatggctttacaatattaaatatgagcaaaaagaaaaaatatgagaaggtttatgtgggtctgtaaggtatggctgtggaaagatattgtagtagttttgacactatgttattacctttaaaatcatttacccaataaaatgttta

SEQ ID NO: 51675 - DNA, 522 bp, Homo Sapiens
  misc_feature (492)..(496): n is a, c, g, or t
  misc_feature (498)..(498): n is a, c, g, or t
  misc_feature (500)..(500): n is a, c, g, or t
  misc_feature (502)..(505): n is a, c, g, or t
  misc_feature (507)..(507): n is a, c, g, or t
gggttgttaaaaaaaaaaaaaaaaaagttttaaaaataccttttaattttctggtaattccagttctttgaagcatcctctgctgggtcttggggtgtgtggatggattggctgtctgatgggattggtaacccctcgctactcaagatggggggatacaaacaccttcagggaaggggagcctggttcttctcgttttccttttttttttttttttaaaaaaaaaactatttaattttttaatttatttttggttgttttttgcacaatgaagtttcagcttctcaaccttctcccctacccagggctgtggacccagactggccttgagccacagtccctctttccctcctcaccctcttccccctgcgggctcccgggtctgtccatttgttactgtgctgtgctggggattggcgccgaggtggcgtgagattccacttgtgtagaactttgttgagtaaaagatcagtttcttgtgaactccataannnnncncnannnnanaaaaaaaaaacatgt

SEQ ID NO: 51676 - DNA, 805 bp, Homo Sapiens
attgcattaatttaattttgttataattttgtcccaatgaaaggaaaaaagtattttggtagctcctcttccgttatgtaaattcttaacatatatttttgagaaatttgcattttttaaagtaaaattgttatctttggatacttacttttctttgttattcctcatttaagagagaatagggatatttcgtgtattatatatttactgtttcatccctcacctttggagtgaccatgaccttggcatgaaggagagaaacctctgctttccgcctattgcttccaggagttactaccttactggccttggagataatgctcttttgtgccaacctgaggataattttaacaaatatgtaaggccagtttcagaggttgttattgccccacagagagactaatcccaatacaagaatattgacaacaaaaggacaaagtagttattgcacaggacggacaggtgtctttatttcatcccctccccacttccaagagatgcaaaaggcctaagttgaactcaagtctcctttccatctggcaggagacattttaataaggactttttaatttcctacatttcttggccaagtgtcataggaatgtggcctcttttgaaatttaacaatgaagaagaaaaacagagcaacactaagttaatataatggagcagatacttttaactgttcttaccattgaatatgccatttaagttggtatacttgaaacttatctgatttttgtccagctctctaaattgtcatctccaatagattagatgctcaaatagtaaccacattactgta

SEQ ID NO: 51677 - DNA, 534 bp, Homo Sapiens
cggatttcctaattacactggctgtgccctcggcagtggcactggtcctttttctaatacttgcttatatcatgtgctgccgacgggaaggcgtggaaaagagaaacatgcaaacaccagacatccaactggtccatcacagtgctattcagaaatctaccaaggagcttcgagacatgtccaagaatagagagatagcatggcccctgtcaacgcttcctgtgttccaccctgtgactggggaaatcatacctcctttacacacagacaactatgatagcacaaacatgccattgatgcaaacgcagcagaacttgccacatcagactcagattccccaacagcagactacaggtaaatggtatccctgaagaaagaaaactgactgaagcaatgaatttataatcagacaatatagcagttacatcacatttcttttctcttccaataatgcatgagcttttctggcatatgttatgcatgttggcagtattaagtgtataccaaataatacaacataactttcattttact

SEQ ID NO: 51678 - DNA, 1063 bp, Homo Sapiens
cggacgcgtgggtcggttctttacttaaagaacaagaaatagttttttataaaactttaaagaaggaaaaaaaaacaggcatttataactgagggtatgaacttatatccaccaggtctctgtgtcccgtgcacttcattttcttgggaagaaaatgatgtctaaagaacaatatagaggcatttttacatacgtatttaaatgaaaaggaaaatcgtggtttcttaaattggataaggattaagaatattttattataaatataatatatgattttttaacctgttttgttgcctcatatgctgtcaggttaatttgttttccttcgtgccagaggtggggaggaaggcactctgtctgctgggtaaatgcctaaattcactcaccttcatggtttgggggcagcatggtcattgtggatatgggtttcgtggagttgagggaacttaggatataagttcactccctctatttttctttgtgattcagtttttcaaaaatctttttatcttccctttctccccatggtggaaattacaaatcaaaggcctttttctttaatgtaaagtgtatttatttaaaaaaaatacaaaataaactacaagtctgtcttagttatcggctttccctaattttcttttaccgaagtgggggtgtgtcccttttcttggcagctctagccaggccatagagaagcaaccttcaggagcaggcaaggaaagcatgttctgggcaacatagaagcactccagggaggaaagtaagtataactcacaggggtcggcccattgcagggtagcacatcatggggagggccggtatggcacggcacggggaacaaacaaggcagggcattggaccccggcgacgcacacactgtggtaccaacatcgagaaccccaggaaggtcccaacgaacgacctgtgaaaagggacagagggaccaccgcaactcgcgaaggatggcaacaaaggcaaaacatgaacacatagaggagacaaactcgtacgaggtacgcagacacaccagtaagagacagactaccctaaaaacaagcactag

SEQ ID NO: 51679 - DNA, 551 bp, Homo Sapiens
caattttagacatgggacacacgtgtgtgaagtctttattttaatgtaataatctcattacccccacccttactcccttaacttccatgtacttagactcctttatttgttaaataaactagagtattgtcttcttcattagaaggacctaggatgacaatgcggagagtcttggtctgaatctagtgcgactaccacctgccagcttttggggggtatggaaatactatctaaaagttggactgcatgggtcaaatcattatgagacttataaactaaaactttagatacccatatagaaatgtctttgaggcaaaaacaaacctaaagaatgaaggctctttcccttctctgaaaaaaacaaaacactgctcttcacacaaccggaagtcaagaccagagatttggagcaattgtctactaatttggcacaaagatcgtttctttagaaaagtggcattggcttttgaatatgaaatcttctcatagctgcctaaaaaagactagaatgtatatggatatcagaaacctttaataatacataatttatg

SEQ ID NO: 51680 - DNA, 673 bp, Homo Sapiens
  misc_feature (668)..(668): n is a, c, g, or t
atgttttaggcgcaaaaagccatgaactgacagtcccagtactgaaagaacattttcatttgtgtggatgatttctcgaaagccatgccagaagcagtcttccaggtcatcttgtagaactccagctttgttgaaaatcacggacctcagctacatcatacactgacccagagcaaagctttccctatggttccaaagacaactagtattcaacaaaccttgtatagtgtatgttttgccatatttaatattaatagcagaggaagactccttttttcatcactgtatgaattttttataatgtttttttaaaatatatttcatgtatacttataaactaattcacacaagtgtttgtcttagatgattaaggaagactatatctagatcatgtctgattttttattgtgacttctccagccctggtctgaatttcttaaggttttataaacaaatgctgctatttattagctgcaagaatgcactttagaactatttgacaattcagactttcaaaataaagatgtaaatgactggccaataataaccattttaggaaggtgttttgaattctgtatgtatatattcactttctgacatttagatatgccaaaagaattaaaatcaaaagcactaagaaataaaaaaaaaaaaaaaaaaaaaaaaanaaaaa

SEQ ID NO: 51681 - DNA, 555 bp, Homo Sapiens
aatcaccaccggtcattctaaccctcacccaggaatgggggtgactcgcacaagacctcatggaaagggtgatgactagggaaaagagggtgcagggcacggctgctccccaccaccaggtctgcatttgttcatcatcatcaggagcagaggtgaccagagggttcagagtgggaggcagggccagcccaggccaggagcgcctcatcttcccaggcctcagccacccagggtaaaaggtgccagggaagttgtgggcacctgagaggaggaacagatgtggaggacctgagggtgctcaaagggccaggctcagcctcaagcagtgttttcattgccaacacttactgtacccactccgcagagccccgctgggcctgggccccagggccacagctagcctgcatgtgtgtactgcactttacagtttgcaaagctcttccatacccactctctcaccgaagcctaattgaggctcttggaaggagtcaggcaaggattgtgcttcccccattatacaggtgacaaaactgagtcctggggaaagtgactggt

SEQ ID NO: 51682 - DNA, 790 bp, Homo Sapiens
  misc_feature (27)..(27): n is a, c, g, or t
attaaactttctctgatttctccaagnaagataaaatgattggagagctatttaggaaacctggtctaggattatccagtatacaatagtacaaattacttacagccttacagtgcaacataagatttggtgtctatatcatggttttccaccatcttttggtttagtttatattgggttcagaaattgagtcttactcattttaaatagaataagccatttccactatttttcaaatggatttttctgtttacctctgttcttaccaattttgttcattttcatttgtggcaaacatttgtatcaatgagttttaacctaggttcatatctacattgtatttagatcaactatgggtttatataaatgccaaatttagtacaacaaatttaggtcatcaggtgaatacaagtattttttttaacaggaaacattttattatagaaaaaagattaatgataaagtcatattggttgaaaaatattttttaactgtgttcatgattgttgattctccttctacttcagtgttatactgtgtgaatcaagcactgtgtcaaaacagagcatttccctcttaaaaattacaaaccgaagtgatagaagcatgtcagaattgagaagacattttgaagcaagaacaatgtgatgtacctattttattatgtttgtatataaatactattgtaaattgttcagagtgaaaacatttgacaaactctaacactacaatcattttttctaaattacataaataaaggctaattttcattatcaaaaaaaaaaaaaaa

SEQ ID NO: 51683 - DNA, 558 bp, Homo Sapiens
gttgtggaggggctggctgatcacacatgccccctccttactgagcctcagaaagcaagcccctcggtgtctgacgtatctggggacacttcaaggttcactgtagctgagccatggccgctggtaacagacatcagggttccagactagccctcttgagtaactgtcctagagctgggacaggtcacgcctgcctccacatctctgtttcttcagcgggaaagtggagctggtggaggggagggaggagacatctccctctttgtcagatacatcctggagtccagatgcagcttgtcaccatctgcattttctccgtgggttgggagcgtgagggccttcctatccctccacccaccgtttccctgcagtgcacgctggcagccaccaagctaggaagtggcaggagtttgccggttgtttgtgaggggaaaaatttttttttcagagttagcaaataacagtaactactgctttgaatgccaaagtttcttagagtggtctgttacgttttttaaaaataaaacttttaattaaaaaaaaaaaaaaaaaacgcgg

SEQ ID NO: 51684 - DNA, 575 bp, Homo Sapiens
tatgttaccgttatgcgggataatccattaacttcaggtttggaaccatcacctccacagtgtgattacattaggccttcactcactggaaagtttgctggcaatccttggtattatggcaaagtcaccaggcatcaagcagaaatggcattaaatgaaagaggacatgaaggggatttcctcattcgtgatagtgaatcttcgccaaatgatttctcagtatcactaaaagcacaagggaaaaacaagcattttaaagtccaactaaaagagactgtctactgcattgggcagcgtaaattcagcaccatggaagaacttgtagaacattacaaaaaggcaccaatttttacaagtgaacaaggagaaaaattatatcttgtcaagcatttatcatgatactgctgaccagaagtgactgctgtgtagctgtaatttgtcatgtaattgaagactgagaaaatgttgggtccagtcgtgcttgattggaaattgttgtttctaaatctatatgagaattgacaataagtatttttattataactcagcccatacatatatactatgtatgcagt

SEQ ID NO: 51685 - DNA, 571 bp, Homo Sapiens
  misc_feature (524)..(524): n is a, c, g, or t
tttgtctctctggaatatgaacaggtttataaaacattccatggtgaacaattctgtcggctgcattatagccatgagtgaatagacagcattggctggtccaagctctgttattgagtatacaaggaactgatttttcttatgttagcactaagggcaaaaaccaatatttataatgtaagcactatccaggtaaaacactggcccaagatttggtaaagagatttcattgcaatgtaataactacagttttttacaaattggaacagctttggtgtgtcgtaatcaagggttttttttgtttgtttgtttcaaataagccatctgattgtggtgactggggcccatgtccaagacaattcctggcatattctgtcaccctcccgtggggcgatcactgtgtggggaccccattccccagttaaagtgtgtctctgtaccttacaacagcgattcaggacccaagtgtgaacaacactcagcccgccctctggagcgtgtgctgtctttagggccctacccanagtcactgtaacagttaagtgtgtcattaacctttctgtctctttgc

SEQ ID NO: 51686 - DNA, 552 bp, Homo Sapiens
ccccaggtgtccctctggaaggggctggctggtgccctatttccagccaccccagcagctagggaggcaaagcaggctgcagtcagtccctcaagccagcgttgcatgtttgggatggtggctcctgttgtcttgcgctctgggaagtcagatgtcatttcaggcctgcagtctcatcctgcccttgccatcctcccatcgatgtgccacgtgggtgtcacgtgtcccagatgcagtattcggcagccagccggggagggctacctcctcctcctcaccaccttggggcttctcatgggaaatgtgcccccgccccaggaccctctcccttgtggacaggcagggagatgcatgcgagtgcatgcagcaggggatggggccgtgtccgtgtgccccaccctccctcggctttactcctgcccagtgactgtgaccactgtccgtgttgccttcttgaacagcgattccccccaaccccttcaccaaaggtcttggtacaaccagctgcccattttgtgaaatttttatgtagaataaacatttgtatctgta

SEQ ID NO: 51687 - DNA, 590 bp, Homo Sapiens
agggtctgcccctgccctggcacacacaggcacccattccctccccctgctgacatgtgtatgcgtatgcatacacaccacacacacacacatgcacaagtcatgtgcgaacagccctccaaagcctatgccacagacagctcttgccccagccagaatcagccatagcagctcgccgtctgccctgtccatctgtccgtccgttccctggagaagacacaagggtatccatgctctgtggccaggtgcctgccaccctctggaactcacaaaagctggcttttattcctttcccatcctatggggacaggagccttcaggactgctggcctggcctggcccaccctgctcctccaggtgctgggcagtcactctgctaagagtccctccctgccacgccctggcaggacacaggcacttttccaatgggcaagcccagtggaggcaggatgggagagccccctgggtgctgctggggccttggggcaggagtgaagcagaggtgatggggctgggctgagccagggaggaaggacccagctgcacctaggagacacctttgttcttcaggcctgtgggggaagttctgg

SEQ ID NO: 51688 - DNA, 761 bp, Homo Sapiens
tgggggactgtttggwaggaaagcbccctctctccctcctcccctcgccctcggcctggttctgcagctggaccgacctcattcatcgcctgccctcctacccaattctgagcacacggtactgtagcccccagttcctccctakccttccatccctctgtccaccccagggggaggtaaccccgcactcacactcccttgatgctgtctgtacagggttcatattttgtagcgaaagtcgtttttgtcccagccggcgatcggagtgggccttttctttctttttgctcattctttacctttttttcttttctttctttcttttttgtacatactgtaaggttggtttgtaaattattctacggaggcaaaaagggaaaataaaaacttgcccttccctggctgacccagtcgggaaggtagggaaggagagtctcccgttgggagagtctctgttcctgctgtattatacaaactgtaccatagtcctgggaaaagggtggactcaccgctgttgttttatgggaagtcgtgtcatcctaggggttggggctgggcagagcctgtyccctccccccttctccaggagccagggggtgactggagagacagacccacccccaagcagggctcctctccccagggtgagcacaggacctctgtaagctgcttgtgtattgtccactttgacgatcagtcattcggtccgttgatcaataatccttcgatcttgtctccaattaaaccgaggctttcaccga

SEQ ID NO: 51689 - DNA, 570 bp, Homo Sapiens
ctttatcgtcttcgccgtccacttctaccgctcactggttagccataagactgaccgacagttccaggagctcaacgagctggcggagtttgcccgcttacaggaccagctggaccacagaggggaccaccccctgacgcccggcagccactatgcctaggcccatgtggtctgggcccttccagtgctttggccttacgcccttccccttgaccttgtcctgccccagcctcacggacagcctgcgcagggggctgggcttcagcaaggggcagagcatggagggaagaggatttttataagagaaatttctgcactttgaaactgtcctctaagagaataagcatttcctgttcttccagctccaggtccacctcctgttgggaggcggtggggggccaaagtggggccacacactcgctgtgtcccctctcctcccctgtgccagtgccacctgggtgcctcctcctgtcctgtccgtctcaacctccctcccgtccagcattgagtgtgtacatgtgtgtgtgacacataaatatactcataaggacaaaaaaaaaaaaaaaaaag

SEQ ID NO: 51690 - DNA, 618 bp, Homo Sapiens
gcaaatctcccagttcctaaaagctgcggagacctatcgtgtcagaaccaccgacatctttcagacggtggatctatgggaagggaaggacatggcagctgtgcagaggaccctgatggctttaggcagcgttgcagtcaccaaggatgatggctgctatcggggagagccatcctggtttcacaggaaagcccagcagaatcggagaggcttttccgaggagcagcttcgccagggacagaacgtaataggcctgcagatgggcagcaacaagggagcctcccaggcgggcatgacagggtacgggatgcccaggcagatcatgtaggacgcggcatcctgcccctggtagagaggacgaatgttccacaccatggtctctacgaaaaagaaatagttagtcaccttctgaccttctcctctttctcaaagccttctgtccctggtttttgcaagtgctgcatttccgccgagaatccgcgttgcctactgctgccacctcctgttcatttagaactatgcaaagactccgcttccgttttcctgagctcctcgggccccagagtctctgtttgattatttatttatttatttatttatttgccaaaaattctcctc

SEQ ID NO: 51691 - DNA, 576 bp, Homo Sapiens
gcgtgggcagggatacacgaggggctgctgggcccttggacaagggtggaagctggtgtgactcctgagtgccccgcggctgtggtgccgggggcagggtgcgtgggaggacggagcctgggagcggggcggggccgccgcgcaagggggcgacgcataaaggcctgctggcttggggcgcctgcctccctgctcctctgtcctcgcacagcgaacctgggctcctgcccaggacaggcaccagggtcatggcctgggacctggacactggcccctccaccctccctcccctcccggctccccggccagagggagagcttggtctctggacctgccttaggaaggagagggagggcaggaaggaaaagaaaggacttggaggtggcaggagtccgagccctgctccttgtgggcgctcacactgcccccggagcctgctgggagtggggccagccgtggacagctgaggttggggtcaatgcctcctgggcacccttgcctcgccccagaccggcccgtccagtccccatcacacctcggcggcctttatttattctgttcccccagctcggccac

SEQ ID NO: 51692 - DNA, 1079 bp, Homo Sapiens
  misc_feature (1033)..(1033): n is a, c, g, or t
gtccggaattcccgggatcgggtgggcggaactggtcgggatgactggcggagggacagagacccctgtgggttgtgaggccgccccgggcggtggcagcaagaagagggactccctggggactgcgggctcagcgcacctcattatcaaggatcttggagaaattcattcaaggcttttggatcacagaccagttattcaaggtgaaactcgttattttgtaaaagaatttgaagaaaaacgtggtcttcgagaaatgcgagttcttgaaaatttgaagaacatgatccatgaaacaaatgaacatactcttcccaaatgtagagacacaatgcgggacagcctcagccaggttctccagagattgcaagcagctaatgactcagtctgtagactccaacagagggaacaggaacgaaaaaagattcatagtgaccacttagtagctagtgagaaacagcatatgctccagtgggacaacttcatgaaggagcaacccaacaaaagggctgaagtggatgaagagcacagaaaagccatggaaaggcttaaagaacaatatgctgagatggagaaggacctagcgaaattttcaaccttttaagaacttgaaccacaacaatcacaaactaatgagaagatgttcacctctctcctgaaaactattcccaccagaccgtttagcctctgcttcaagcttagcaatatattcagtggcactcttatatcagaagaaagaagtttctactggcattctgattggatatttaaagaagggtgccacatttttccagctttaagtgcctatatatgattatttgaatgaagaggagtaggaagggaaaatggaatcaatatactctttgttagtcagaattgatcatcttttccatttgatagctcagagaactgtaggtatagacttcttagaaagaaatttcattcatttctatacagggttaaccatagtttaattattgtgggcttattgggaaggtatagaaactacctgtcatagccctccttggcctgntggaaaggatgtataaaagggttactgcttgagtaatggaaaacaa

SEQ ID NO: 51693 - DNA, 663 bp, Homo Sapiens
gtccggaaaatcacaagcatgcccaagactatgtcctgacatataactatgaaggaagaggatcggtggctgggtctgtaggttgttgcagtgaacgacaagaagaagatgggcttgaatttttggataatttggagcccaaatttaggacactagcagaagcatgcatgaagagatgagtgtgttctaataagtctctgaaagccagtggctttatgacttttaaaaaaaattacaaaccaagaattttttaaagcagaagatgctatttgtgggggtttttctctcattatttggatggaatctctttggtcaaatgcacatttacagagagacactataaacaagtacacaaatttttcaatttttacatatttttaaattacttatcttctatccaaggaggtctacagagaaattaaagtctgccttatttgttacatttgggtataatgacaacagccaatttatagtgcaataaaatgtaattaattcaagtccttattatagactatttgaagcacaacctaatggaaaattgtagagaccttgctttaacattatctccagttaattaagtgttcatgtggtgcttggaaactgttgttttcctgaacatctaaagtgtgtagactgcattcttgctattattttattcttgga

SEQ ID NO: 51694 - DNA, 701 bp, Homo Sapiens
ggggttgatatcggtgctatgtgtttggtttataatttgatagatgtttgactttaaagatgattgttcttttgtttcattaagttgtaaaatgtcaagaaattctgctgttacgacaaagaaacattttacgctagattaaaatatcctttcatcaatgggattttctagtttcctgccttcagagtatctaatcctttaatgatctggtggtctcctcgtcaatccatcagcaatgcttctctcatagtgtcatagacttgggaaacccaaccagtaggatatttctacaaggtgttcattttgtcacaagctgtagataacagcaagagatgggggtgtattggaattgcaatacattgttcaggtgaataataaaatcaaaaacttttgcaatcttaagcagagataaataaaagatagcaatatgagacacaggtgggacgtagagttggcctttttacaggcaaagaggcgaattgtagaattgttagatggcaatagtcattaaaaacatagaaaaatgatgtctttaagtggagaattgtggaaggattgtaacatggaccatccaaatttatggccgtatcaaatggtagctgaaaaaactatatttgagcactggtctctcttgggattagatgtttatatcaaatgagcatctcaaatgttttctgcagaaaaaaattaaaaagattctt

SEQ ID NO: 51695 - DNA, 729 bp, Homo Sapiens
  misc_feature (27)..(27): n is a, c, g, or t
gagtactgaagtgtaagttgaaaccanagttgcagtggggaaatcaaaggtgaggtagcttatttgaaaccagcaaatgagacaggttggacagttttaaaatctcttctaacaaagaaactgcacggtagcaaggactagcggttctcaaagcccttctttttcagtgttctcattcaccttggcacccaagtatgtttaacaggccatgcattaaaaataaatacaaaaatataaaagccgcttaaagggaacttacaaactgacaatctctcctctgtatttgtgttcatagtggctgggagtttaattatatgcacaaaagttaggagccacttgtttctgcacagactgtaggagcaagatgaggagatgggcaggttttggtaagagcccccagttctggtggacaggcatacttgtggcattgggtgcggcattgctgggaggaccacgtcttgggaggcgattgacttttggtttgtaatttccctttaaacaagaagagatggctcacattttccatatatatctcaatgaatgtactgtattactgttttaaaaatttgatgaaataataatgaattggtctccttttgttatctggtccttgtttaatttgtttaagggtttttgtatacaaaagtttacatttttatgtatatttttcttgtgtaaaaactgatgtaatatgtgtatgaaacactgtatgtattatctgtatatagt

SEQ ID NO: 51696 - DNA, 462 bp, Homo Sapiens
gacgaggaggatgcgggcgggctgggggccgagccccccgggggcgccccgttcgccccctgcaagcgcgcccgcttcgaggacttctgcccggactcgtccccggacgcgtccaacatctcaaacttgatctccatctttggctccggcttctcggggctggtgagccgacagccggactcctcggagcagccgccgccgctcaacgggcagctgtgcgccaagcaggcgctcgccagcctcggcgcctggactcgagccattgtcgccttctagggacccccgagggcacagggacccggggccccgcggggctggggccagacaaagactcggcaaaggggcgagaggagggaacgagcgggcgccgggccactcggggctgagctgggggcgagcgggggcaggcggctgatgttttataaattgtaaaataaaaaaaaaagaaatctaaaaaaaaaa

SEQ ID NO: 51697 - DNA, 513 bp, Homo Sapiens
ggacactaagtccattgttacatgaaagtgatagatagcaacaagttttggagaagagagagggagataaaagggggagacaaaagatgtacagaaatgatttcctggctggccaactggtggccagtgggaggtgatggtggacctagactgtgcttttctgtcttgttcagccttgacccaccttgagagagagccaccaggaaggcgcatcttagcagatgggaggaactgctgagagaagatgggcagaaagctggagcccctggagttggctgtgtctgtgtttgtgactgattactggctgtgtcttgggtgggcagaaactcgaacttgctatgtaatttgtgtctagttattcagaggagtaagatggtgatgttcacctggcaatcagctgagttgagactttggaataagacactggttttcatgcgctgtttttgttttaaagttatgaagaaaaaagtcaataaaattctaaaagtaaaaaaaaaaaaaaaaaaaaaaaag

SEQ ID NO: 51698 - DNA, 582 bp, Homo Sapiens
caatggcaagtgaaggaattgggtgtcctgatgcagactgagcagtttctctcaattgtagcctcatactcataaggtgcttaccagctagaacattgagcacgtgaggtgagatttttttttctctgatggcattaactttgtaatgcaatatgatggatgcagaccctgttcttgtttccctctggaagtccttagtggctgcatccttggtgcactgtgatggagatattaaatgtgttcttgtgagctttcgttctatgattgtcaaaagtacgatgtggttccttttttatttttattaaacaatgagctgaggctttattacagctggttttcaagttaaaattgttgaatactgatgtctttctcccacctacaccaaatattttagtctatttaaagtacaaaaaaagttctgcttaagaaaacattgcttacatgtcctgtgatttctggtcaatttttatatatattgtgtgcatcatctgtatgtgctttcactttttaccttgtttgctcttacctgtgttaacagccctgtcaccgttgaaaggtggacagttttcctagcattaaaag

SEQ ID NO: 51699 - DNA, 1069 bp, Homo Sapiens
ttccgggttgggagaaaggtggcggtgctttcggagggaataaaatggaaggagaatcaagcagatttgaaatccacactccagtttctgacaagaaaaagaaaaagtgttctatacataaggaaagacctcagaaacattcccacgaaattttcagagactcctccctggtgaatgaacagtctcaaataactaggaggaaaaagaggaaaahagatttccagcatctcatttcttctcctttgawaaawtccagaatctgtgatgagactgcwaatgccacttccacactcaaaaagagaaaaaagagaagatatagtgctttggaggtggacgaggaagcaggtgttacagttgtccttgtggataaagawaatattaacaacacaccaaagcattttagaaaggatgttgatgttgtttgtgttgatatgagcatagaacagaagttaccaagawagcctaawacagacaaatttcaggtacttgctaagtcacatgcacatwaatcagaagccctgcacagtaaagttagggagaaaaagaataahaagcatcagaggaaagctgcatcctgggagagccagcgggcaagggacaccctgcctcagtcagaatcccaccaggaggagtcctggctttctgtgggtccagggggtgaaattacagaactaccagcatctgctcataaaaacaagtctaagaaaaaaaagaaaaagtccagtaaccgggaatatgagacactggccatgcctgaaggatcgcaagcaggcagagaggccgggactgatatgcaggaatcccagcctactgtgggcttggatgatgaaactccacaactactaggamcctactcacaaaaaaaagtctaagaaaaaaaagaagaaaaagtccaatcaccaggaatttgaggcattggcmtgcctragggtcacaagtgggcagtgaggttggggctgatatgcaggaatccggsctgctgtgggctgcatggtgaamtgcaggatacagcmctgcttttaaaaaagtttagaaaaaagaaaagtaaataaaaggatttggggagkgg

SEQ ID NO: 51700 - DNA, 991 bp, Homo Sapiens
tttgagaaaatgaacttggaattcctttgaaagagaagccagttttgaacatgagaactcctgatacagcaaagaaaaccaagagtcagacacatcgagggtcttcgccaggacccagaccggtagagggaacccctgccagcagaacccaagaccccagcagccccggcacgactccccctcaggccagacaggccccagccccaacagtcatcagggaccctccctccatcactcctgctgtcaaaagccccttgccggggccttcggaggagaagaccctgcagcccagtagtcaaaacacaaaagcccacccatcccggagggtcactctgaacacactgcaagcctggagcaagacaacaccccggagaataaacttaacacccttaaagacggacactccaccaagttctgtaccaaccagtgtgatttccaccccttctacagaagaaattcagtcagagacgcctggagacgctcagggcagtcccccagagctaaagcggcccagactcgatgaaaacaaaggaggcacggaaagtctggacccttgatgggacctcggcttctgctcgaagcctaccaggctcccggtgtgtgcagggagacggtaaagctggaggtgcctgagaccagggcttccatggagcgggacacactgtaaatggatttctataacagaagtgacatgtgtactgatttttctccagaaatatggatgctggtgtattcagtatccatttttaacttgggacatgaacgttttaacatagtaaatcctctttttgatgagtttctgaaacgggagcggttcaacgttatccagtggtgaaaatcagtgagtcctccctggcatcctcgtgaaagtgcacacactttcatgaaaggactcccttttcattaagaatttaggaagatgaaaaaagtaatttgagatttttactctgtcgaaattttaaagtattttgaagtggattggttaaatttc

SEQ ID NO: 51701 - DNA, 625 bp, Homo Sapiens
  misc_feature (29)..(29): n is a, c, g, or t
gaggctggtaaaccggtccggaattcccngggattgaatatacccatattaatcctatgttaagatgctctggaaataaaggccttattcccttacacatgcgatttttgtaagataatatatacacagtatattttaaatgtttgtgtgggtggtctgtgtagttactccccatacaacaaagctgacaaaatttttaatttacacaatgtattctgcattttcaaatgtttatgttgtgtatatagcaaagaaattatcttactgatatgcgttgaccaaatcccatggagaaaagacatctcatttgaggttccccttcctctcatgtgtttgattttttggaaggtgatacagtatgtgggtaaccatgcaaatgtttatgaataactttactgaagtgattccatccgtattctgttctaatacttggagaatgaccttcatatttatatattttatttctttgtttcaactatccagtgataattcaggaaatgtttccttttttttttttttttacaaaaactttttatttgtaaaatgtttgtaataatgtaaaggtgaacatgttcaataaaaatcatatattaaaagttaaaaaaaaaaaaaaaaaaaaaaaaag

SEQ ID NO: 51702 - DNA, 719 bp, Homo Sapiens
  misc_feature (554)..(554): n is a, c, g, or t
cagaatttaaataaggctctacctcaaagacctttgcacagtttattggtgtcatattatacaatatttcaattgtgaattcacatagaaaacattaaattataatgtttgactattatatatgtgtatgcattttactggctcaaaactacctacttctttctcaggcatcaaaagcattttgagcaggagagtattactagagcttgccacctctccatttttgccttggtgctcatcttaatggcctaatgcacccccaaacatggaaatatcaccaaaaaatacttaatagtccaccaaaaggcaagactgcccttagaaattctagcctggtttggagatactaactgctctcagagaaagtagctttgtgacatgtcatgaacccatgtttgcaatcaaagatgataaaatagattcttatttttcccccaaccccgaaaatgttcaataatgtcccatgtaaaacctgctacaaatggcagcttatacatagcaatggtaaaatcatcatctggatttaggaattgctcttgtcataccctcaagtntctaagatttaagattctccttactactatcctacgtttaaatatctttgaaagttggtattaatggtgaattttaagaaataatattatatttctgtaaatgtaaactgtgaagatagttataaatggaaagcagatacctggaaacacctaaagaacttccat

SEQ ID NO: 51703 - DNA, 606 bp, Homo Sapiens
ataatcataagtttgagcctagaagtgatccttgtgatcttctcacctctttaaattcccacaacacaagagattaaaaacagaggtttcagctcttcatagtgcgttgtgaaatggctggccagagtgtaccaacaaagctgtcatcgggctcacagctcagagacatctgcatgtgatcatctgcatagtcctctcctctaacgggaaacacctcagatttgcatataaaaaagcaccctggtgctgaaatgaacccctttcttgaacatcaaagctgtctcccacagccttgggcagcagggtgcctcttagtggatgtgctgggtccaccctgagccctgacatgtggtggcagcattgccagttggtctgtgtgtctgtgtagcagggacgatttcccagaaagcaattttccttttgaaatacgtaattgttgagactaggcagtttcaaagtcagctgcatatagtagcaagtacaggactgtcttgtttttggtgtccttggaggtgctggggtgagggtttcagtgggatcatttactctcacatgttgtctgccttctgcttctgtggacactgctttgtacttaattcagacaga

SEQ ID NO: 51704 - DNA, 642 bp, Homo Sapiens
tgtcttttgaaccaccgagtttgagattgttggttttaccaaccacattaatgtgatggtgaaatttccatctattgttgaggaagaattacagtttgatttatctctcgtcattgaagaacagtcagagggaattgttaagaagcataaacccgaaataaaaggaaacatgagtggaaatttcacctatatcattgacaagttaattccaaacacgaactactgtgtatctgtttatttagagcacagtgatgagcaagcagtaataaagtctcccttaaaatgcaccctccttccacctggccaggaatcagaatcagcagaatctgccaaaataggaggaataattactgtgtttttgatagcattggtcttgacaagcaccatagtgacactgaaatggattggttatatatgcttaagaaatagcctccccaaagtcttgaggcaaggtctcactaagggctggaatgcagtggctattcacaggtgcagtcataatgcactacagtctgaaactcctgagctcaaacagtcgtcctgcctaagcttccccagtagctgggattacaagcgtgcatccctgtgccccagtgattaagttttattatgtagaaaataaagagcaaacagttacagctg

SEQ ID NO: 51705 - DNA, 843 bp, Homo Sapiens
gtgaaagatgggaaaaatcgtgatgatgggtaaggggaaaacttcccggaaggcaatggggcaaggaaaaagaaagcctatgggaaatggctgtgctcccaacatagctttgcagatgatgtgggtttttttttttttttttggtttttttttttgagagagattyttgctctgtctccctggctagggtgtggtggtgtgatcttggctcacggcagccttgccctccctggctcaagcagtcttcatctcagcctccagagtagctgggactacaggcatktgatatgatgctcggctgatttttktttactttttagagagatggggtcttgccatatttgccaggctggtttgaactcctacaactcaagcattcctcccaccttggtctcccaaaatkttgggaccacgggtktgacccaccgcgcccagctagctcctktkttttttttttkttttktaactttggttgatgttaaggccctccattttggaaagcaggaaaacaggatttttttttttttatcttkttccctggaggatccagggatgaggataragtggcctgaaaacagtgcttggattcaccctcctgctgggtccttctgctggatacaggcaccaagaggcggtcgtggagcagggagctgcgccttcctggggtgcccggtggtgtgtagagaaaagctgcttgtttactccttaagtcaatgtattggtgactgttgatttkttgaacaattcaggaatcaagggctgtggagaaactccctcatgttgttggcaacaggtgaatgaacctagagcggtgacatgaaaataaagctcactgttactcgc

SEQ ID NO: 51706 - DNA, 862 bp, Homo Sapiens
aataagatatgatgattgattacttggaccagtgttagaccgacctgtgttagacgaacctgtgttgcctattatattggcagcaccttccattagcaatagctgaaaaattcagagaagaatttagaactttcactttatttttgccattcttcaagaagttgctgtatatttcagtctggttataccttcaattgatcaataacttcaattataggaaaggcatcttctataattttaaattactgtaaaaaaaagataccttttaaagccttggattatacttaaaaattgtaatggaagaaatgcatattaagttatatgcagatattaaacatatctgattctgaagataaaactgaagtatttttcagagcaaatggcattatttctccatttttcctagtatgcccctttaatttgtcagtttgctgttagcactgttatatgctgccttagaaagacttttggttgaaggctgaatatgaggggaggggatatttatgactgtgttaatcttttttgatcattagctgaatattcaatatttgatatgtaaccatatagggatgtgttcgatataactatataggcaagggatatattgatttggccacatctatttgatttatggagggcaaatacctgtttcttttagatacagccattgcccgggcattctaaaagttttctactaagataaagatgattgtgtatggctgggagcagttgctcatgcctgtgatcttagtactttggggagggctgagcaggaggatcactccaggcccaggagtttgagaacagcctgggcaacaatgagacactggtctctcaaaaaaaaaaaaaagatcgtggtgtc

SEQ ID NO: 51707 - DNA, 562 bp, Homo Sapiens
atgaatctgcatgtaaagactttgtccctcatgacttggaggtccagattcctggaagagtctttttggtcactggaggaaacagcggcattggcaaagcaactgcccttgaaatcgccaagcgagaacatttttctgcacattgtggacttgtctgatcccaagcaaatctggaaatttgttgaaaatttcaagcaggaacataaactccatgttctgatcaataatgcaggttgcatggtcaataaaagagagctcacagaagatggacttgaaaaaaactttgctgccaatactctgggtgtgtacattctcacgaccggcctgatccctgtgctggagaaagaacacgacccccgagtgataaccgtctcctcaggaggaatgttggttcagaaactgaacaccaatgatctccagtccgaaagaacaccatttgatggaactatggtctatgcacaaaacaagaggcagcaagtggttctgacggagcggtgggcccaagggcacccggccatccatttttcttccatgcatcctggctgggccgacaccccagaca

SEQ ID NO: 51708 - DNA, 665 bp, Homo Sapiens
gcgccaggctcccaggcctccacagagtcttcagcgcatcccccaacagcagcccctgccagtccctcgggtccaggcaaggccctgggggtctccttaaatgccacctcgggcaagtcccagtcccagtcctcggccacccccagctctggatcccagggccagctgccctctggctctggctgtggctcccgcctgtccggcagggcccagggccagcgtcgggcacagggcagctcccactggtctcggcaacacacccagccgcctggtacttcctccagcccctcccagtcagccctcccgtcctcggggcccctgcagccacccaacgtcacctccagcccggtctcacccatggtccagtctcccagcagcagcaacatccccacgcagccccccagcaagtcctctggcaagccggaggacgcagcccccaagaccagcggacagcgccagaaggaatcgtcgaaacagcctgccagcagcgcctcagtgcccgagctggtcccctgccattccgggacctctctggagtacacttcggagtccaccaccgagatcacctgcagctggccacaccacaggcccccgtgcctgcagcactactggtgcctgaaacacctggcctgctaggaggctccaataaagctaacccggaccag

SEQ ID NO: 51709 - DNA, 620 bp, Homo Sapiens
ttttttttttttttatgtatcacatactgtgctacagttagcctcaatgaagattctattttgaactagacatcctgtcaatagtttgtcaagtaacttcattgcttcctttgatagcaattcagtgaaattttttcccaagtgatattttcccccaacttttgtgagtttgataaataggatgagtcttttatattggaaatactgtgaatggaaaattgccaaatcccttcttagtatattttaagcaccctacaacactttacctccctgcctttagtggtatttaaacatatggccaagttagtatttgggtttgattcctttggtgaagattaaggcatcaaaacatttcttaaaatgtttgagtacaaggctaagttataatgtcaactttcaaagactatgttgtgattcggtttgaatatgctgaagtgagcaattatgatttgcccaagtgcaatacaacaaatctataatgtatatttcacattttctacttgaacacattcatgtatatattttgttaaacttcatatgtatttaaaaagaatcatgaactgtatcaaaattctttcaataaaatttctatttaaaaatctcaaaaaaaacctcgtgcc

SEQ ID NO: 51710 - DNA, 1056 bp, Homo Sapiens
  misc_feature (758)..(758): n is a, c, g, or t
  misc_feature (807)..(807): n is a, c, g, or t
  misc_feature (898)..(898): n is a, c, g, or t
  misc_feature (904)..(904): n is a, c, g, or t
  misc_feature (929)..(929): n is a, c, g, or t
  misc_feature (937)..(937): n is a, c, g, or t
  misc_feature (969)..(970): n is a, c, g, or t
  misc_feature (987)..(987): n is a, c, g, or t
  misc_feature (996)..(996): n is a, c, g, or t
  misc_feature (1046)..(1046): n is a, c, g, or t
  misc_feature (1049)..(1049): n is a, c, g, or t
cgaaatgctgttattcctcagtaccaggccttattcagcatggataagtgtgaactgaatgttactgaggatgctttgaaagctatagccagattggcactagaacgaaaaacaggtgcacgaggccttcggtccataatggaaaagctgttactagaaccaatgtttgaagtccctaattctgatatcgtatgtgtggaggttgacaaagaagtagtagaaggaaaaaaggaaccaggatacatccgggctccaacaaaagaatcctctgaagaggagtatgactctggagttgaagaagaaggatggccccgccaagcagatgctgcaaacagctaaactgtcatattgctgtcttgtatatacagcttttccttcttttgtttaggatcataattgtctctacagtctgatattaaaggcattggatctatcttggatatcatacatggtcagagaagcctttaggagaagaatcagatcatgtatataattgtaacatcacattgattttacggaagatgttatatggactttaatgacacaatgtttagagataaaatgtacattattttggttcagttttttaaaaaaaatatgctttaacaaaattcttaggaattcttttaagcaatgcaggtattgcgataactgtagattttacaataatgttactctacaaatgggaaaataaattctttaaaattgaatattgagataccattctttagtgttaccttttttacccacacccggcncttatttaccatctttaatccattttagtactatgggtgagtacatggnaattgaagtctggcttaaatcttcagaaagttatatatcaattttattttattttttttgagaacagagtctccgcttgtgtcaccccagncttggnagtacaggtgcccacaatcttgggnctcactgncaacccctctgaaggtccccaggtttccaagnncgatacctccatggccntcaagcccnttcctgaaagttagcctgggggaacttaaccagggccggtgggcacccanccnaacaccc

SEQ ID NO: 51711 - DNA, 720 bp, Homo Sapiens
cccacgctagcactttccacgctgcttgcccgctgttgatgtgcagttcccagtgcctgtgtgagccgacatctgctcagtcctatccctcgtcagcgtgtggagacccagctcctgcagccctcctgctcccacgcccccagacagcttggtggagggtcctgcatctgggccaggctggggtgcacccagccaaagacaaagctgcctccacgtgcccaaggattcagatggtgcactggccccgggaggagtctgaccaaaaatggagcccgctctgtgggaagccccgactcccccacgagaaacggtcccacggtgcggatctcccccttcccttgtggggcacagctggcctgggcctccaatcctgcggagctttcctgggtgtggctttgacctcagaagtggctctggtttggcctcaggagtgtggcctggcccagcctgctgcagcctcctggggggcccttgatgccactaatcccccgaccccccgcatctgccaaactgcacagacacacgcattgtaaggccgcttgtggcctccagcgtgcactcttgtttacgtcattgtcatcttcaagaccagtcctttgtgattagttttgcttcgcgagccctggtgtggactgtggtctgtatgaatcgtgtgtaactgtggggaggggcttgtcctgtatgtgagtctgtacccaggtggggtctgtgccctgcaca

SEQ ID NO: 51712 - DNA, 619 bp, Homo Sapiens
gtccgaggaattacagtgtgaatggctgtgtcagatgttttcgtacctcagattaaaaatattgctgaggtcagacgccacaattttcatgactttcttcagaagtagcacattttcgtgacttccgctgtcctctgaaaaacaaagttatttggaacatgttcatgcaaaagtgattctgaccaagtctaaatcgagcttttctactgacatgaaactgttggaaactgatctcattttataagaaatgattttcccctcaaggaggcgtctgtaattccagaacagtccagacatcagctgtacctcatgctcagtagtttttatttgagtttcttttgtgagttaactatgggagatttaacctcttttgccaaagagggaagtgtgtgtgtttttttaatagaaaatatggaccaaaaatttttttccctgaagaatgtattataaccctatttgtgtggttattacatcctgtgaaatgtatatatgttaaaataatgggggtgctggaaggtcatggcagactagctgctggttagtgtggaggggaagtggtttactttgtagagtttacatggttttatgcgcacactaattgtaataaactatgccaaac

SEQ ID NO: 51713 - DNA, 772 bp, Homo Sapiens
  misc_feature (707)..(707): n is a, c, g, or t
  misc_feature (725)..(772): n is a, c, g, or t
gcagggcaacatgaagtaacttacataactcatacagtaatttgtgcagttgggagatgttcagccttagtccctggctaattgcctgttcttttccagcctgattttttttcccacaggaagagcccacatgtagccctgaggtttccttcccaggacagctgcagggtagagatcattttaagtgcttgtggagttgacatccctattgactctttcccagctgatatcagagacttagacccagcactccttggattagctctgcagagtgtcttggttgagagaataacctcatagtaccaacatgacatgtgacttggaaagagactagaggccacacttgataaatcatggggcacagatatgttcccacccaacaaatgtgataagtgattgtgcagccagagccagccttccttcaatcaaggtttccaggcagagcaaataccctagagattctctgtgatataggaaatttggatcaaggaagctaaaagaattacagggatgtttttaatcccactatggactcagtctcctggaaataggtctgtccactcctggtcattggtggatgttaaacccatattcctttcaactgctgcctgctagggaaaactgctcctcattatcatcactattattgctcaccactgtatcccctctacttggcaagtggttgtcaagttctagttgttcaatanatgtgttaataatgcttnnnnnnnnnnnnnnnnnnnnnnnnnnnnnnnnnnnnnnnnnnnnnnnn

SEQ ID NO: 51714 - DNA, 628 bp, Homo Sapiens
gatttccgcgaggacgactcggtgcacgcgtaccaccgtgccaccaacgccgactaccgcggcagtggcttcgaccgcggtcacctggccgccgccgccaaccaccgctggagccagaaggccatggacgacacgttctacctgagcaacgtcgcgccccaggtgccccacctcaaccagaatgcctggaacaacctggagaaatatagccgcagcttgacccgcagctaccaaaacgtctatgtctgcacagggccactcttcctgcccaggacagaggctgatgggaaatcctacgtaaagtaccaggtcatcggcaagaaccacgtggcagtgcccacacacttcttcaaggtgctgatcctggaggcagcaggtgggcaaattgagctccgcacctacgtgatgcccaacgcacctgtggatgaggccatcccactggagcgcttcctggtgcccatcgagagcattgagcgggcttcggggctgctctttgtgccaaacatcctggcgcgggcaggcagcctcaaggccatcacggcgggcagtaagtgagggtggagcccagtgagactgtgggtgtgtgcaggccggggagtattaaaggtggtgatttttggagacaagt

SEQ ID NO: 51715 - DNA, 415 bp, Homo Sapiens
  misc_feature (337)..(338): n is a, c, g, or t
attacaggcatgagccacggcgcctggcccccaaatgctcttgaaccggaaacccagggatgggagatgctcactgagctgctgcttttatgtgtgctggtgctatgtgtgttcatgtccgcggcagctgtctttttgctactataagggaattctggccaccctgggtggggtgtggtcggggtgagaacccaagcgttggaactgtagacccgtcctgtcgactgtgtgcccctgggcatgtgtgagcctcagtttcctcatctgtaaggggggcaatgatacctacctcacaggggtgttgtgaggattaaatgtgaggaggatagtggcaaannaaaaaaaaaaaaaaaaaaaaaaaaaaaaaaaaaaacaacaagaaaaaaaaagaaaaaaaaaaaaaaaaaaaaaaagg

SEQ ID NO: 51716 - DNA, 996 bp, Homo Sapiens
cccacgcgtccgcggacggtggcgacgtggcctcagtgcttaccagagcgcgttgtctaccctgtaccgaagacagaggctgtggggacagcctaggggcctggatctattgcctacttagagagaggccaactcagacacagccgtgtatgctcccagcagcaacggaggttcagtgcagtccctggaagaagaatgcctgctgcacagccagcaccagccaggagctgcacaaggacacctcccgcctgtacaactttaactgggaccactgcggcaagatggagcccgcctgcaagcgccacttcatccaggacacctgtctctatgagtgctcacccaacctggggccctggatccagcaggtgaatcagagctggcgcaaagaacgcttcctggatgtgcccttatgcaaagaggactgtcagcgctggtgggaggattgtcacacctcccacacgtgcaagagcaactggcacagaggatgggactggacctcaggagttaacaagtgcccagctggggctctctgccgcacctttgagtcctacttccccactccagctgccctttgtgaaggcctctggagtcactcatacaaggtcagcaactacagccgagggagcggccgctgcatccagatgtggtttgattcagcccagggcaaccccaacgaggaagtggcgaggttctatgctgcagccatgcatgtgaatgctggtgagatgcttcatgggactgggggtctcctgctcagtctggccctgatgctgcaactctggctccttggctgagttcagtcctcccagactacctgccctcagcttggataaccaggctgggctcagctcagctcccacaaatgacagccccttaagcatgcttctattagtcacctaaccctctgtcacccagtctgttgctgctccatggtggggccaagagtcacttctaataaacagactgttttctaataattccaaaaaaaaaaaaaaa

SEQ ID NO: 51717 - DNA, 585 bp, Homo Sapiens
  misc_feature (457)..(457): n is a, c, g, or t
tgcctgcgactccaatgtttgtggttcagtatttcccacctacatttctgtttggtgacattgctcattttaacaaatatgaccgagtctagtttttctttaaaaggatagtttatgagtaatctttaaaaccatttccatactatctgtatataaccatttcggtagagaacacactacactgaaccctgctttagagctgtgtgttgagctaaaaatataattttttaaaaattgactagcaaaatctatggccacactgagaagcctttgaaaatggcaaatacttttcatcaccaattgcccaattcatctttcttctgcttcctcagccttgtagcaaaggctacacagcagcccacagtccacagtctttttgggaaaattggcctgccaccttctttaagctcagtttatttttgacttactttctttgctgtagttatgaaccctgggngcattaaaatcccatggcaaggagcataagagatgttctcgtagctctgcgttgtgtgaaatgtccatcttagttttgttaaaaaaaaaaaaaaaaagggaaccgcccccacttttttgggctccctt

SEQ ID NO: 51718 - DNA, 1007 bp, Homo Sapiens
gcatcaaagaatactgttgccaagtttccaggacagtgaagatgatgatgatattctgccaaatatggacaaaaatccaacaactccatcatcagttatctttccattggtaaaaactcctcaatgtcagcatgtcagtcctggcatgctaggttctataaataggaatgactgtgataaatatgtttttcgtatgcaaaaatatcataaaagtaatggtggtattgtctggggcaacatcaagaaaaaattagttgaaactgatttctcaactccaacaccaagaaggaaaaccccatttaacacagacttaggagaaaactctggtattggaaaacttttcactaatgctgtggaatctttagatgaagaagagaaagattattatttttcgaactctgattctgcatagtaaaatgagaaaatatgattcctgggatttttaccataaagcagacagtgtttgtattttcaactggagtacatgtattttctttgtaaagtagcttcctatgaaaatgtggacttttttgaaggtttcatatgtttgtgttcaaagtaaaatatcctcattgctgcagttactaaaaatgttacagaaaattgtttttgctcgtgtagatatctgtaaattggtttttggatattaaatatatattgataattttttaataagcatccagtccgtttactttaagaaaaacccatttccccaaacaggattttttcctatttccagaaaatgtgcctaccatttaggtagcagcagggggcaacgcctccaaggtgccttggtgcctttggatcctgaaacctttagttacattggtagcagtatatccagcaagacgtgaattgtcccggtgttccacccatgtgtattccaccgtgggtattccctgtggacaaaaaaggggggcgtaatcctggcacaaaccttgtagggcagagtaaaaacgcaacgaaatgcgtggccgctctaaacaacactagtagtgataggaaag

SEQ ID NO: 51719 - DNA, 651 bp, Homo Sapiens
tcttggactactatttggtttggacactggttgcaatactagaccaaataggaattagtatattttggaatgttatggatatcaagtaaaactcttctatttttgtgagacttgggcttatcatctttcattacttttttcccatttagcccctggaatagctttcatgccaagtttagaattagccaatgaaatgtaaataaactttggacagaaaatagcaatgtatttttttaatataatttcattattcacaaatgaagaatgcaattccatagcttacttctttctcctaaatttaatgtacaaaaatgtacatggatgatattatcacttgttgctgtttttgttgcacaatagcacattaattatattaaatattctctttgtgaagttatgcacagaactgtaacactttcctctgcctttttctcttatatgtgggttcatggttcagttgcattgttatgttatgaatttactacttgggtgttctaaatacagtttatcttaaaatatgtagtaatatgaattcaaaaatggtttttgttttaacaatattaattaaattttcttgggtggattttataaaaatctctgtaaaatcaatttgtttacttatagttatctgggggtgtattgcaaagaata

SEQ ID NO: 51720 - DNA, 703 bp, Homo Sapiens
agtctggcgaagtgagcatcttgattagaagcaggactaaatcaaacaaggatggtgggaaccaggaggtcgagattgcccgctgccataaggggcagtactttggagagcttgccctggtcaccaacaaacccagagctgcctcagcttatgcagttggagatgtcaaatgcttagttatggatgtacaagcattcgagaggcttctggggccctgcatggacatcatgaagaggaacatctcacactatgaggaacagctggtgaagatgtttggctccagcgtggatctgggcaacctcgggcagtaggtgtgccacaccccagagccttcttagtgtgacaccaaaaccttctggtcagccacagaacacatacagaaaacagacatgacagaactgttcctgccgttgccgccactgctgccattgctgtggttatgggcatttagaaaacttgaaagtcagcactaaaggatgggcagaggttcaacccacacctccactttgcttctgaaggcccattcattagaccacttgtaaagattactccaacccagtttttatatctttggttcaaaacggcatgtctctccaacaatttaagtgcctgatacaaagtccaaagtataaacatgctcctttactctcttgctgctactcttgcttttgggaagtccacagggtctgcgaaaccgttgtta

SEQ ID NO: 51721 - DNA, 580 bp, Homo Sapiens
  misc_feature (419)..(419): n is a, c, g, or t
  misc_feature (532)..(532): n is a, c, g, or t
  misc_feature (541)..(541): n is a, c, g, or t
cgggcaatatatacatatacccatatgtatatacagaaaattatttttaatactttcctactgataatgaaatttaaaattggaaattttgtgagtgtttttcttgtccaatagagcctaattgtttccttttttagtgatttaacaatctcttgagggctgcacctttaaattcccagattgtcaatagacatgtacagtatatgggataaggtggacacaagtgcacatataaataaaatcttcttaagacttttaactattcatttacagtaggagagtatgtagaaatcatcatccacaagtcataattaggttgtgtgcctactgtagttttttccatttctgtattatataaacatttgcatattaaaatttgatttttcccagagacaagtattatatactgtatctatatntaaatcaaactgtggtaatatatttctcagaaaataatgttggggactatagcctgaacatgtggacttgaagcgacatggaggaggaggttgatcccattgtgtataagttnatatgtgantactattgaatcttgtacaaaaacaaaattgaaaaaaaa

SEQ ID NO: 51722 - DNA, 863 bp, Homo Sapiens
agtaaatagcaccagcattttgcaattgctgatctgctgaaatgtacacattctggtctagtttggtctatcttttaaagcctgatctggtgtgaataatcaactaggaaatctaaacttggataacacgtggtgaacaactgcctttagctggtccagattaatcatttcaaagacatccattttagatcacaagcaggaagtcgatagtctcaaaggcactttgtttctcccaagtaggccaccaggcagcctctagagttgctttacccaaatccttctccagccatgacttggtgactctaagcttgctcccacctgccccctccacttccctcagatgatgaggagccagggctaagggggcagccttctctcttcccagtgatgcacatccttcacattggctgctttgttctggaatatggatatctcagcctggatgccgaggaagctgctggatgcttaatggtgctagaggctcaagtgtgtttgaaaccaagagccagttgtcccccatgcagaaagaaatcctgtgtgagcctctggtatgagaaataaaatctgccagttttataacattcactttctgcctctgaggaaagatacagggaacaaaaatcaatttgtacagtcttaatattaaaagcagcttgactaaatacctgatttaaaaatagaagacatccccagtcctcatgacataccgcaaatatctgtggggtcctgttgaaaagaacaaaataaaggagcccaaggggtcattctgtctcagcaccatccagccctggcaacttctctttcccatataatccatttgggatattttttttttttttttttttccctaaaaacaaaagtta

SEQ ID NO: 51723 - DNA, 557 bp, Homo Sapiens
gttttttagtgaacttaaaataaacagaattttaaaggagacctatttttatactcaataaaagcacaaaagtgcagaaagtataaaacggcttacaaagggagacacaagctcataatgttccatgtataaaagtaataactttattgggtagagatattcttacaagatctagcacctctgccagtgcacagataggactgttttaaatgatttgggaacttttggttgcctgcagttgtgaacagagaacttctctacagagaaacaaaccactaaaagcaatatgaccgagttgagatgtggtttccaatgagcaattggtgaatttaagcaacctggatgtgcatatgtggaggctcccgtctcactgtttgatcaaacttcttttatgtagtcacgtagacttgattttttctgctgtgaaaatgaaaaaataaagcaatatgacaaaaagtttaaaaatgcataaaaaataggatttcctctaggctcctcgaagagatttttttaatatgatgcttgtcttactttcttagacacgttacatttcccct

SEQ ID NO: 51724 - DNA, 603 bp, Homo Sapiens
attcttgtgtctgttttactgttacaatattaggtgaatatggaagtaaaggcattccacaggatcatcatttaaaaaaaaagaattctggtcctgttttctaaaaaaaaaaactgttgtagaaattcttaatttggatctatttattagtcagagtttcagctttcttcagctgccagtgtgttactcatctttatcctaaaaatctggaatcagagatttttgtttgttcacatatgattctcttagacacttttatatttgaaaaaattaaaatctttctttggggaaaaattcttggttattctgccataacagattatgtattaacttgtagattcagtggttcaatacctgtttagttgcttgctaatatttccagaaggatttcttgtattggtgaaagacggttggggatgggggggatttttttgttcttgttgtacccttgttttgaaactagaaatctgtcctgtggcatgcaaaagaaagcaaattatttttaaaagaaaaaaaccaaagtacttttggtgtcattattccatcttctccataagtggagaaatgaaaagtaagaacagctcatcttcaaagtttttacta

SEQ ID NO: 51725 - DNA, 608 bp, Homo Sapiens
ttttttttttttttttagtttgaaatgtgtaagctttgatttaaaccatcgtttacttcagtatgttaatgatgtagtaaaaatatttattgaaaggtgaattcgagtattttaatgttatacctgccattttttttcttaaagcatattctttgcatctaactgccagtgccattgtcaaaacttattttttaaatcgttgtacatttcttattaaactaagtgcttaattttaaagtattatgttgccatcatatagtgtataaaaatgtataattgccaattgattgtaactattatttatttttaaatgaaagtgtaagaatgctttctgattcaacaaatttgttatcaaactgtttccttatcctcttttctgatgtagcataaaaattgtcccggtttgagttataactgccagtagatgaccagtcacaagtgaaccacttctcagttgccaatctttgctcatattaaaaacaacttacaaatacttagtttttgtatctaatctctgattattaaaatgtttataaagtttatttttaccaaagagatgcaattcattatgagaaagtattgcataataaattttgttttataacttt

SEQ ID NO: 51726 - DNA, 597 bp, Homo Sapiens
  misc_feature (568)..(568): n is a, c, g, or t
actaggagcagcttccgaaagatgtgtctccagacccttcaagcagctgacacacaagagttcaggaccaaactgcacaaagtatttcgtgagatcacccaacaccaatttcttcaccactgctcatgtgaggtgaagcagctaaccctagaaaaaaaggactcagcccagggcactgaggacgcacctgataacagcagcctggagctcctagcagataccagcgggcaagcagaaaacaagaggctcaagaggggcagcccccgcatagaggagatgcgagctctgcgctctgccagggccccgagcccgtcagaggccgccccgcgccgcccggaagccaccgcggcccccctcactcctagaggaagggagcaccgcgaggctcacggcagggccctggcgccgggcagggcgagcctcggaagccgcctggaggacgtgctgtggctgcaggaggtctccaacctgtcagagtggctggagtcccagccctgggccctgagccgggtccccttccgcaagcgcccaccgatccggaggctgcgggcagccgttatcccgtggnttaataaagctgccgcgcgctcaccaagt

SEQ ID NO: 51727 - DNA, 532 bp, Homo Sapiens
ctgtctaaagtatttttcacaacatgtttgataatcagtgctttaaaaagcagcagtgtcctatgaagtggaaatgtcagttctagagcattggatgtgaagttctggtcatgtcaccttgcgtgtctcaccctggaggagtgaaggtgggcgcccggcgggggggtgtggctgcaccccagcaccgggagggggcacgcacgacaccagaggaagggacagccccacccatgtcaacagcaggcaacctgtgttttcatttcaagtgggatacagtatttttttaataaggagccatacttttttttaagagtttgagatctgaatgtgatttctaattgtatcagacgttaatgttttaaagctataacaaagtttaaaatttctactttttgtttttcatttattttaactgttcttttatctattaaattgttgtatgtggatggggaagttttgtttctcctcttagcatttgtttctataaccagaaataaaattctatattaaagaaatgaaaaaaaaaaaaaaa

SEQ ID NO: 51728 - DNA, 1025 bp, Homo Sapiens
  misc_feature (38)..(38): n is a, c, g, or t
  misc_feature (621)..(686): n is a, c, g, or t
  misc_feature (688)..(693): n is a, c, g, or t
  misc_feature (695)..(698): n is a, c, g, or t
  misc_feature (726)..(726): n is a, c, g, or t
aaatacagcctgtcactgtgtgacacagattgcatatnttgggattgcaataagggcttggtgagctgggggaatagtggatatttaatgactacttgttttttaaataatgaacacttagcctttctatgcgcataatggtgtaaaagttagatggttaggtgtttgacaaacagatggttgcaattcagttacagactggggaaatagcccagtgtttgggattaaaactgtcaagactggataggtgttagtcatcactgtctttcgtccagtggggatttaataaatactttcaagcttctggtttgggagtttagataggtttgattttggatttgtaaatagtgattgctaaatttggtcagatttctcctgactggctgttcctaaattcttaggatatgtcccagtaaaattatactttgtgaattaattgtcatatgtgtaattgttgcattttggatgtacctaatttgataattaaaacaaaataatttccgtttaaggtatctgtttgcaggtcagaaaatgagaaaatgtaattgtgtaatgctctgaaatgtaaaaaaaaaaaaaaaaaaccaaaaaaaagctgtaaataaaatcaactaaatcccnnnnnnnnnnnnnnnnnnnnnnnnnnnnnnnnnnnnnnnnnnnnnnnnnnnnnnnnnnnnnnnnnngnnnnnncnnnnttttaaaatccccccaaaagcccccaanttttcccccacaaaccccttttttcttttaaaaatgggccccctaaggggggccctctttataaaaagcttaggccctggcccggccttttttaccctttttaatacatggggaaaaaatggtaaaactgtggaaatttttgggggaaaggaacccaaaccctccgggggtgggacacaagttgggcaacaatttttcctccaagaattttaagagttcttagggggaatattaaaaaattttttagcggtctttagaggggttaaaaatattcggaaaagtgctcgctgttttttgag

SEQ ID NO: 51729 - DNA, 620 bp, Homo Sapiens
  misc_feature (517)..(517): n is a, c, g, or t
  misc_feature (565)..(587): n is a, c, g, or t
  misc_feature (589)..(614): n is a, c, g, or t
caagcccttcagctttgtgctcctcctgggcggcctcttcctggcctatcgcatgggggtcttcatcctggcaggcatccggctacccatcgtactggtgggtatcacggtgcccctggttggcctgttggtgggctactgcctagccacgtgtctgaagctgccagtggcccagcggcggacggtcagcattgaggtaggggtgcagaacagcctgctggccttggccatgctgcagctatccctccgccgccttcaagctgactatgcctcccaggcccccttcattgtggcgctgagcggcacctccgagatgctggccttggtcattggccacttcatctacagcagcctgttcccagttccctgaggcctctgggtcaagctttcatcagccccagcccccacactccaccaaagttctcatgcactatgcactcagaaaaatccaggcttattttttttactgattttttattctccagctttcagtgccaaagaggccatgctgagttangtaggtgggcgctgcccagaaaatatatttcaataaaagagagaagcnnnnnnnnnnnnnnnnnnnnnnnannnnnnnnnnnnnnnnnnnnnnnnnnaagggg

SEQ ID NO: 51730 - DNA, 654 bp, Homo Sapiens
atttccccagccccaccttcccctcctgatgccctgaaagcttccggaattgactgtgaccacttggatgtcaccactgtcagcccctgccttgatgtccccatttagccatctccatggagctcctgctggagggccctgaaccctgcactgcgtggctgcccagccagctgcctcctgtcctgggaggaggcctcctgggtgtcctcatctggtgtgtctactggagggtcccacaggagaggcagcagaggggtcaggggaggtctcctgccgggggttggcctctcaagcctcaggggttctagcctgttgaatataccccacctggtggtggcccctccgatgtccccactgatggctctgacaccgtgttggtggcgatgtcccagacaatcccaccaggacagcccagacatccctactggcttcgctggtggctcatctcgaacatccacgccagcctttctggggccggccacccaggccgcctgcccgtctgtcctccctccagcagcaccccctggcccctggagtggtggggccatggcaagagacaccgtggcgtctcatgtgaactttcctgggcactgtggttttatttcctaattgatttaagaaataaacctgaagaccgtcaaaaaaaaaaaaaaa

SEQ ID NO: 51731 - DNA, 678 bp, Homo Sapiens
acataggcagactttctcatagaatgttcttgaaaggtgattggcaaagtcatgcaggcccgccttaaagcgctgattagaacagtccaacacagtccgacctcactcaatacccacaaccatcgaaaatggattcttagtaccagacaatcccagtaatgaaggtttagtttccttgaaggaaactacagaaaaggaaagaagcagaatgagaaaggaatggtacttaggtgtttggtatgctgctcacgtgaagtcagcccacaccagccaaaccctcgtggaagatctgctgcaaccattatctttgttcttgagttcatcatgcatttaaaatgagatgcaagagcatttagcataccatgtaaatatggaccttttaaaattaaaatactattggaagtgctttcaactcagccacatcttagctattagttctttgtgttgtcttatcaaagtttaatggatacagttccacagttgttgatgtgtttgtgtgtatattcgatttttataaagatggtagtaagtcaatacatttatcctgatctgtgtattatttgttcacaaattcaagaagcttaaaggtcgtaaatatcagtatctcataaggtaaaccaatagctgattatgtggagccaagttacttcttttctttttgcattatcttgggtttgg

SEQ ID NO: 51732 - DNA, 535 bp, Homo Sapiens
gatctggcaaggttaggaagaggttaagaatatcagtgacagtactctgaggcatctgggcatgtcagatgaagatttattattcagaaaagttaagtcagctgttgcagggatcagttgttttattcctggaaaatgtttttcattttgctgcaaatctatatctgacctgctgaggaaatcgtttggtgaaatgaatccagaaagcagagaaaatgcttcattactttaaatagcagcattaagcccattatagcctctgaattgtcccttccttgagtttgctaatgcttccaacttagtcatttgaagcccaagagtctaattttatatgccctgccaatgtcctcatctattgcagaatgtataattatctatttgttttggactatatgttacaaaaatttaaaacataagatcctctctctatatttcattattggtgaacccacattgtgctgtgttttgtgatattttatcattttctagattcttatgtggatctaataaagaccacttgaacccaaaaaaaaaa

SEQ ID NO: 51733 - DNA, 870 bp, Homo Sapiens
ctgctcccagaatctggtgctctgaccaggccaggtggggaggctttggctggctgggcgtgtaggacggtgagagcacttctgtcttaaaggttttttctgattgaagctttaatggagcgttatttatttatcgaggcctctttggtgagcctggggaatcagcaaaggggaggaggggtgtggggttgataccccaactccctctacccttgagcaagggcaggggtccctgagctgttcttctgccccatactgaaggaactgaggcctgggtgatttatttattgggaaagtgagggagggagacagactgactgacagccatgggtgggtcagatggtggggtgggccctctccagggggccagttcagggccccagctgccccccaggatggatatgagatgggagaggtgagtgggggaccttcactgatgtgaggcagcgagggcgtggtgaaggcctcccccagcccagaccctgtggtccctcctgcagtgtctgaagcgcctgcctccccactgctctgccccaccctccaatctgcctttgatttgcttcctaacagctctgttccctcctgctttggtttctaactaaactattctcgatgacgttcaacacaaacacaacaacaacaacacctccacggccctccatgtcggggcgccccaccaaccggagggcactgaacctgcccattggcacacgcagctcccggaccccacatatttggcacaacgcggacaatcagcaggtccccaaaagcaaggggatacaatccaaaaccagggtaactgctgcaccacgacgccccacccccccacccccccccaccaccacccccccaccacccccaccccccctc

SEQ ID NO: 51734 - DNA, 702 bp, Homo Sapiens
  misc_feature (69)..(69): n is a, c, g, or t
  misc_feature (676)..(676): n is a, c, g, or t
atttagtaacccagtaatatctcacttagtttagggttagatctttagttaattcaaccttatagatcntacttatgaaggtgataactgacacgtgttccctgaattttaatttgataggcaatacatctacccactccattattttttaaaacttcatttaatagtttaaacaagattggttttgttttcaatttttattcactcttcatagaatcacaattacctttatatatcatatgttattggaagagattcctcagtaatctccaatctctcatagtgcctcacagggttggtcaatggcttttggaactggaaggaccttagaacttatctgttatgctcctgatagccaatagcagatagaagcttgcaatcaagagggtaggacatgtgttcttcaatggatatcaaaggaagaggttgcaaaccaaagccatttggcaagccctgtagcctgggccatttaagacaggggcggtctcagccaaattgcacccatttaactatcccaaagagccacagtgcctacaacccaggccctaagttgatgaagaaaaagtcaaggaaggaggtgatacaattggaaatattcccatcaaatggttaatcttatttagaaaatgggcatattagaaaaagtccttccaagatgattttggataataaaagntgtatttgtggaaaaaaaaaaaaaaa

SEQ ID NO: 51735 - DNA, 937 bp, Homo Sapiens
  misc_feature (786)..(786): n is a, c, g, or t
ggtggcaattcggacgaggatagtttgagacgagggcagagaacaggaagatacatagctagaagcgacgggtacaaaaagcaatgtgtacaagaagactttcagcaagtatacagagagttcacctctactctgccctcctcatagtcataatgtagcaagtaaagaatgagaatggattctgtacaatacactagaaaccaacataatgtatttctttaaaacctgtgtgaaaaaataaatgttccaccagtagggataggggaaaagtaaccaaaagagagaaagagaaaggaatgctggtttatctttgtagattgtaatcgaatggagaaatttgcagtattttagccactattaggaattttttttttttgtaaaatgaagactgaactctgttcaaatgctttcatgaacctggtttgagacggtaggaaagcaacaaaacgtgggaacctggtgactaagggcctggtgcaaggacttgggaaatgtcattgataatagatggtggggttttcccccctttagaaatgttggatattaagtgatataaacacttcttttaactccgaaaatcttctgagaaatcacaaaattcacggtatgcttggaacgattgagattttctaggtagatgctgaatagcctagacatcaaagttggtgtgaaccaaaatagagtcagctgacccagcatcagccacactctgggttggaaaatgtttgcctgttggaattaatttaagcttaagtatatatcaacattattttattggggcattanaacaatacaaattcatggtttttttaaagttaaaaattctaaccactgtaacaacaggtttttggggtattttctggattaaacatcttggtgcacgcatttggaggtcatcagggtggcaaattttgtatttctgaaaatgtcatatatt

SEQ ID NO: 51736 - DNA, 490 bp, Homo Sapiens
tttttttttttttttttccacctccactttttaaaagcaaaaaaaaaaaaaaaagtatgatggtggtgaataaagaccaaagggtcctctctacctttgaaaactctcctggggtggaggagaccagggcaggatagacagacctctgcagtaagagagtggttgggaaacccagggtgttccttggatctcaggatctgagccatcgagggaagagtggggctgctaggcaagtggattagggggtctggatagggccccacaggtgacagggagcctgcagggcggatctggtgatcatgggagccagagggagtggggacagtgcaggcagtattggcaggagggccagtgcagaagggctggtagctcaggcagtgtgggggaagcactgaagcctgtattccccacttgggggctaggggtttgctcactcagcaataaataactgtgtcacatcaaatcctaaatataccactacaaagtgaga

SEQ ID NO: 51737 - DNA, 563 bp, Homo Sapiens
gccaagggcagaaaatggggaggttagctcagagcagagtagtctctagagaaaggaagaatcctcaacggcaccctggggtgctagctcctttttagaatgtcagcagagctgagattaatatctgggcttttcctgaactattctggttattgagcccttcctgttagacctaccgcctcccacctcttctgtgtctgctgtgtatttggtgacacttcataaggactagtcccttctggggtatcagagccttagggtgcccccatccccttccccagtcaactgtggcacctgtaacctcccggaacatgaaggactatgctctgaggctatactctgtgcccatgagagcagagactggaagggcaagaccaggtgctaaggaggggagagggggcatcctgtctctctccagaccatcactgcactttaaccagggtcttaggtacaaaatcctacttttcagagccttccagctctggaacctcaaacatcctcatgctctctcccagctccttttgcataaaagaaagggtataataaaaaaaaaataaacgcgg

SEQ ID NO: 51738 - DNA, 664 bp, Homo Sapiens
gtagccgcagccgcagcagctggtccctcagcccgtcccgcagtcgcagcctgactcgcagccgcagccatagccccagccccagccagagccgcagccgcagccgcagccgcagccagagcccctcgccatcacccgcaagagagaagctgaccaggccggccgcgtcccctgctgtgggcgagaagctgaaaaagaccgaacatgccgctggtaaagagacaggagctgccaaagtcacccaagctgacgcctcaggagaagctgaaactgaggatgcagaaggcgctgaacaggcagttcaaggcggataagaaggcggcacaagaaaagatgatccagcaggagcatgagcggcaggagcgggaagacgagcttcgagccatggcccgcaagatccgcatgaaggagcgggaacgccgagagaaggagagagaagagtgggaacgccagtacagccggcagagccgctcaccctccccccgatacagtcgagaatacagctcttctcgaaggcgctcaaggtcccgatcccgaagcccccattaccgacattaggcagaagagtggggggtggggaggacaagggggtgggtaaggggctcaagctgtgatgctgctggttttatctctagtgaaataaagtcaaaagttatttaattcc

SEQ ID NO: 51739 - DNA, 795 bp, Homo Sapiens
tccacctgagaaaggagaagaaaagctggtggtgacccctgctcctgctgggccatgccatggctctgaagatgccccgtgttcttaggaggtgctcacccctggcacctaaagacatttccttctggttgttgctctttaaaaacaaaataagcccctgaacgtgcttgcaggccagtttgtgtgcctgcacttgacgaattaccttgaccaacgggccaaaggcacagagctccaaggcatcatctttccttaaaatcctgagtgtttattaaaaagggacatggtctctaggtatcttattacatttgtatttcttacatttgaaatatcctaaccgctcccttcggtttcttcttaagaacatttacatctaattatttttcgtgcaagtcttgtaggacccacatgttttcctagctttggaaatcgatttttttcattcctcttatgaggatttccctatgtcagtaaacattaactttctatttcttccatttttgctcatttgaaacccctgctgcttctagatctatttctttgcacttgtataactttgaaataaattcctcatcccttagactaagagagtgggtgtctgtgaaaattgttttctccttcataatacctaaattctagtttgtcagtaaaatatttgtgtttggttaacaagctcttatttaagccattgagttagtataatctttattacctttgaaaaaccagagagctgaattttttgtcattctaagttgtaagtaacactgcagtcaagtcttctgatgaaattttcat

SEQ ID NO: 51740 - DNA, 688 bp, Homo Sapiens
acgcgtccgggagggggcatggcggatactgtgttgtttgagtttcttcacacggagatggtggctgagctgtgggctcacgaccccgaccccggcccgggggctgccccgggagacgctggccttcagggaggagctggatgtcctcaagttcttgtgcaaagacctgtgggtggcggtgttccagaagcagatggacagcctgcgcaccaatcaccaggggacctacgtcctgcaagacaacagcttccccctcctcctcccgatggcctctggcctgcagtatctggaggaagcacccaagttcctggccttcacctgcggcctcctgcgcggcgccctctataccctgggcattgagagcgtggtcaccgcctccgtggcagccctgcccgtctgtaagttccaggtggtgattccgaaatcctaagcctgcctcgcacctgctgagccgcactgctgcccctggcctcaccggcctcaggagacggtggggccgctgcatttcggggtggtcttgggaatcccaggccctaggggtcacatttgctcaggaagtgggtatcaaattgaggtgggggtgtcagaggaggcaaaggggtcccagctgcggtcaggactgtggtgggattcccgcctcggcagcgtcactgcccagtagctgctcaataaaaggctgtgtgtgtgg

SEQ ID NO: 51741 - DNA, 541 bp, Homo Sapiens
caggaatgtaaacactgtgtttgaaactctggaaatcacgtgtgtggggagatggggacgcttcccatgttgtggggagctctgtggctgtgatggctgcagttgccgtgcctctgttggaacgctaagtgcctgcaactcacgtcaatcatagaattgtgacgcacagttggcaaaatagttctttatgctatttctcaaaatttgaggacaaacccagattgggattggaatatgcactgtaaatcaaatttttcttatctacaaagactaatgtaaaaatgattttttcttctgtgcctgattaaattaactgtggtttttaatataaatatttattggtgtgctttgggagaaaaattatcttttcttgaaagaagttatcaaagcaaatttattatcttcacaagttaatgggagaatgtggttttgattctgggtgtttgaattgtgtaaacacacagcttccttgtgtgaagagagttgtcctgtgctccttctactgtactttttttattttttaataggaaagtgatgtgct

SEQ ID NO: 51742 - DNA, 915 bp, Homo Sapiens
gtgacccagctgagctgggctgagccggctgagacaacggtgagatcacagcctacgaggtctgctatggcctggtcaacgatgacaaccgacctattgggcccatgaagaaagtgctggttgacaaccctaagaaccggatgctgcttattgagaaccttcgggagtcccagccctaccgctacacggtgaaggcgcgcaacggggccggctgggggcctgagcgggaggccatcatcaacctggccacccagcccaagaggcccatgtccatccccatcatccctgacatccctatcgtggacgcccagagcggggaggactacgacagcttccttatgtacagcgatgacgttctacgctctccatcgggcagccagaggcccagcgtctccgatgacactgagcacctggtgaatggccggatggactttgccttcccgggcagcaccaactccctgcacaggatgaccacgaccagtgctgctgcctatggcacccacctgagcccacacgtgccccaccgcgtgctaagcacatcctccaccctcacacgggactacaactcactgacccgctcagaacactcacactcgaccacactgcccagggactactccaccctcacctccgtctcctcccacgactctcgcctgactgctggtgtgcccgacacgcccacccgcctggtgttctctgccctggggcccacatctctcaaagtgagctggcaggagccccggtgcgagcggccgctgcaaggctacggtgtggagtaccacctgctgaacggcggtgagctgcattgggctcaaatccccaccctgaccaaacctcgggggggggggaaaactcctggccaaccactcctagtggttccgcgtgcgggccccaaaaccaggaaggctggggccc

SEQ ID NO: 51743 - DNA, 731 bp, Homo Sapiens
agactttctatagagaggctttcacttttgagttctttgagtttaaagatgcttttcttgaaacgctctttttttaatgtagaaaaattttactttttcaaatatgcatacaatttttaaaacagtagaagcaaattcattttaatgaccatgtaaagagcgaatgtcagacagtattattaccagtttattcaaattacatacatgttcctaccaaggtggaaagaaattcaaacctcatggtaaaacttaagcacgatttaagataaaagcatagtatttcttcagtgtagacttattaagtgccttattgaacaggatcttaacctgctttttctgtttttttgaaagagttaatgcaattgttgaagcttctaaccaagaaacaacttaaggaattgggagacttggtcccctcgttgtcagggttctggctataagtacctccccacctttgggttttcttaaatatgccaaaaggaattctagtttttataaccaatgggtttttttgtttgtgtgcttatggatttgtgtaatcattgatgcttaatgttgtggattcataatataaaaagtggtcctgtcctttatatttattcatgtgctagaaatagtatgcattatataaagagtatgaagttttcataagcctttatatctcaagctctttatttaaacattgttggaatatgtggcataagccttgtttcattaatttaataaactgg

SEQ ID NO: 51744 - DNA, 528 bp, Homo Sapiens
  misc_feature (359)..(359): n is a, c, g, or t
tttttatttaagaaaataaacacgacatatttaaagaaggttctttcacctgggagcmaatgaacaatagctaagtgtcttggtatttaaagagtaaattatttgtggctttgctgagtgaaggaaggggagcaaggggtggtgcccctggtcccagcatgccccgcgcctgagactggctggaaatgctctgactcctgtgaaggcacagccagcgttgtggcctgagggaggccctgctgggaccctgatctgggccttcctgtcccagggcctatgggcaactgcgttgaaaggacgttcgccaagggccgtgtgtaaatacgaactgcgccatggagaggagaggcactgccggnagcccttgccagatctccctccctctctctgtgcagtagctgtgtgtccgaggtcagtgtgcggaatcacagccaaggacgtgaagagatgtacgggggaaagagaagctggggattggatgaaagtcaaaggttgtctactttaagaaaataaaataccctgaatgga

SEQ ID NO: 51745 - DNA, 924 bp, Homo Sapiens
  misc_feature (7)..(7): n is a, c, g, or t
  misc_feature (26)..(26): n is a, c, g, or t
  misc_feature (31)..(31): n is a, c, g, or t
cgattgnattcacagctctcctcccnctggngacctcccttaccccccggcaccctcccccaaccttccccaaccccacctgacctggaagctatggcctccctcctcaagaaggagctggaacagatggaagacttcttcctagatgccccgctcctcccaccaccctccccgccgccactaccaccaccaccactaccaccagccccctccctccccctgtccctcccctcctttgacctcccccagccccctgtcttggatactctggacttgctggccatctactgccgcaacgaggccgggcaggaggaagtggggatgccgcctctgcccccgccacagcagccccctcctccttctccacctcaaccttctcgcctggccccctacccacatcctgccaccacccgaggggaccgcaagcaaaagaagagagaccagaacaagtcggcggctctgaggtaccgccagcggaagcgggcagagggtgaggccctggagggcgagtgccaggggctggaggcacggaatcgcgagctgaaggaacgggcagagtccgtggagcgcgagatccagtacgtcaaggacctgctcatcgaggtttacaaggcccggagccagaggacccgtagctgctagaagggcaggggtgtggctactgggggctggacttcagctctggcgccttcatacccctgcctataccttcatgccaacccctcttgagcgggtgcagaggcttatgcttgtattgccagcactttgtgaggcccaaggcagaggatcgtttgaggccaggagtcaataccacctggccacataaggagacctgtctctattaaaaaaaaaataaccctttttcccaccaaacccccaactccgtgtactcttatccttgatccacggaccgtgcttaaacct

SEQ ID NO: 51746 - DNA, 817 bp, Homo Sapiens
  misc_feature (8)..(8): n is a, c, g, or t
  misc_feature (17)..(17): n is a, c, g, or t
  misc_feature (20)..(20): n is a, c, g, or t
  misc_feature (753)..(753): n is a, c, g, or t
  misc_feature (793)..(793): n is a, c, g, or t
  misc_feature (797)..(797): n is a, c, g, or t
  misc_feature (800)..(800): n is a, c, g, or t
ttgaagcngttcgcccncangtaccggtccggaattcccgggtcgacccacgcgtccgattaatatatgttaaatatttatgtttagtgaaagtgttcataattgagaaaataaacgcaaacagttgttgatgcagtatgattgttataattatgccaaatactttacgtatggaaaaagaatatttgtacatatgtgcttttaacaattctgccatattgactttacaattttgaatgtcggaaaaattaatatatgttaaatatttatgtttagtgaaagtgttcataattgagaaaaggaacatatgcattttagctttgtatcttgcaagttttgcagtcagaaattttttgaactagcttttgcttttgataacacttcgtgtttgtaaccacattcatatatatatacatatatatgtgaagctccatatttctgttgctttaaagaagtaaaaccttccatttaaataagatgacatgcataagataacaaagcttccttggatttccttttcctgtgtaatttaatagatttgttgactagtgcttgggcacattataaatcagtgttatttgctcttggagccattttttaaaaaaaattttggcagtgagccagttgaatttatcttgaatttatcatgggtggggatttctgaagcagctccatagcagaacattttaaggagattctggtagcccacatgtcatggttggttgctgctgaatggtaaaatattaaataaanttaccagattaatcttaaaaaaaaaaaaaaaaaaagcggncgtntanaggatccagcttacgac

SEQ ID NO: 51747 - DNA, 1044 bp, Homo Sapiens
  misc_feature (670)..(670): n is a, c, g, or t
  misc_feature (822)..(822): n is a, c, g, or t
  misc_feature (860)..(860): n is a, c, g, or t
  misc_feature (975)..(975): n is a, c, g, or t
actgcaccttcttcaataagaaggacatcctcaagctgcattcgcgattctatgagctggcccccaacctcgtcccaatggactacaggaagagccccatcgtccacgtgcccatgagcctcatcatccagatgccagagctccgggagaatcccttcaaagaaaggatcgtggcggcgttttccgaggatggtgaggggaacctcactttcaacgactttgtggacatgttttccgtgctctgcgagtcggctccccgagagctcaaggcaaactatgccttcaagatctatgacttcaacactgacaacttcatctgcaaggaggacctggagctgacgctggcccggctcactaagtcagagctggatgaggaggaggtggtgcttgtgtgcgacaaggtcattgaggaggctgacttggacggtgacggcaagctgggctttgctgacttcgaggacatgattgccaaggcccctgacttcctcagcactttccacatccggatctgaggacactgccgaggctgtaggggcctagaagtccaccatcctgccctgcagtcacatgggtgtggcctccaagctccccaggaaagcagtggcagcctctggggtttacaccacaaatatatcctgtggccctttcagcaaaaaaaaaaccttaaccnagaagggggcctgtgaaggttaggacgcttcccacagccccgctgtggtccagccccgggacccatggcctctctcagggccctccgcaccccgccccatgccccagtcctttcctactccagaaatgcctcccacccccccaagagggaanagcagataacccaacaggaggtggtgggggtctgaccntgtccagtgcctggcagacaacctgggtcacccagggacgaaacgggaaaaaaaaaaaaggggtcccgggggtttttaccaggctatggcatcctttttcccaaaacccaaagtnttggggttggttttcccacccccgtgccgttttccccttttctccgggccttccctttcaagaggggac

SEQ ID NO: 51748 - DNA, 465 bp, Homo Sapiens
ggctgcaggaattcggcacgagagactgcaggggtccactgtgagaggtgacactgttggggaccttcctgattcattcttcttgggctttgctagcctgtacaacctacatgtcttttcttccactgcctgaaagacttgggttgaactataactgttggagagagatgttcctctttaatcatgaaacaccttaagaagtctataatgcaatccttagtcctaccctgaacctatgtgtcctctaagtcaggccctgatctagtgcagtaaagggaagggtgggcttaatgggagctttgcctgggacctgaacctggagcacttaccgcattaggaagaaaggagctccccgtaatcgttcctgacccttgtgtctcatataccctatcctggtggaaatgaccctatttgatatgctggtcccttaaaataacttgtatcaatattaaaatgactatttct

SEQ ID NO: 51749 - DNA, 879 bp, Homo Sapiens
gcaggccatcaccgccttggtggtggtctccatcgtggccctggctgtccttatcatcacatgtgtgctgatacactgctgccaggtccgaaaacactgtgagtggtgccgggccctcatctgccggcacgagaagcccagcgccctcctgaagggaagaaccgcttgctgccactcagaaacagtggtttgaagagcccagaggaggagtttggccaggtggactgtggcagatcaataaagaaaggcttcttcaggacagcactgccagagatgcctgggtgtgccacagaccttcctacttggcctgtaatcacctgtgcagccttttgtgggccttcaaaactctgtcaagaactccgtctgcttggggttattcagtgtgacctagagaagaaatcagcggaccacgatttcaagacttgttaaaaaagaactgcaaagagacggactcctgttcacctaggtgaggtgtgtgcagcagttggtgtctgagtccacatgtgtgcagttgtcttctgccagccatggattccaggctatatatttctttttaatgggccacctccccacaacagaattctgcccaacacaggagatttctatagttattgttttctgtcatttgcctactgggggaagaaagtgaaggaggggaaactggtttaatatcacatggaggaccctaggctttaagagaagctgtatcctctaacccacgagacttctcaaccagccccaacatctttcatgggacacatgacaattgaaagaccatccccaggctatcgccacccctgggaagatgatggcctttatttatttagatgggaataatggggttttaatttttaaatcctccttaagtccaaaggtaat

SEQ ID NO: 51750 - DNA, 500 bp, Homo Sapiens
tgtgtgttcaagtgcctaaatcttgtttacctatcactttaaaaaaataattgaagtgtaagctaaataaaatgcttggagttttgcctgggctagtgagagttggtgcaaattcttgtgtgtgtttgcataggaaggtgagatgaccatctactaaagaggaagtagctaaatacagatctgtgggtgtttttaaaaaaactcaacctatctggtgttttattttaatggataaaaatgtaatttttctaaggtagcaacttatttccaaattaatatagatgaaaaatagataccaattagactaaattgaaagctttttgttctatatttgcatagcctttgaaatatttcttagtgcctaggaggtctggggattcctctttcgtggtggtcactaaccttacttgatgcagataaaatcacttgtcaatgcaaaatgtgttagaacttgataaagctttgagtttgagaaataaaggtatatttaaaatttaaat

SEQ ID NO: 51751 - DNA, 691 bp, Homo Sapiens
  misc_feature (413)..(413): n is a, c, g, or t
  misc_feature (652)..(652): n is a, c, g, or t
  misc_feature (676)..(676): n is a, c, g, or t
gcacacctatcttagtggttccccaccgaagtggactggcccctgggtcagtctggtgggaggacggtgcaacccaaggactgagggactctgaagcctctgggaaatgagaaggcagccaccagcgaatgctaggtctcggactaagcctacctgctctccaagtctcagtggcttcatctgtcaagtgggatctgtcacaccagccatacttatctctctgtgctgtggaagcaacaggaatcaagagctgccctccttgtccacccacctatgtgccaactgttgtaactaggctcagagatgtgcacccatgggctctgacagaaagcagatacctcaccctgctacacatacaggatttgaactcagatctgtctgataggaatgtgaaagcacggactcttactgcntaactttgtgtatcgtaaccagccagatcctcttggttatttgtttaccacttgtattattaatgccattatccctgaattccccttgccaccccaccctcccttgagtgtggctgaggaggcctccatctcatgtatcatctggataggagcctgctggtcacagcctcctctgtctgcccttcaccccagtggccactcagcttcctacccacacctctgccagaagatcccctcangactgcaacaggctttgtgcacantaaatgttggcttgg

SEQ ID NO: 51752 - DNA, 564 bp, Homo Sapiens
  misc_feature (543)..(543): n is a, c, g, or t
cgatagaaatctgaagagtgctgtgaccgctgctttcctcatgctccccgaaagcttttctgaagaagacctcttcatagagattgccggtctctcctattcaggtgactttcggatggtggttggagaagataaaacaaaagtgttgaatattgtgaagcccaatatagcccactttcgagagctctatggcagcatactacaggaaaatcctcaagtggtgtataaaagccagcaaggctggctggagatagataaaagcccagaaggacagttcactcagctgatgacattgcccaaaaccttacagcaacagataaatcatattatggaccctcctggaaaaaacagagatgtggaagaaactttattccaagtggctcatgatcccgactgtggagatgtggtgcgactagggctttcagcaatcgtgagaccgtctagtataagacagagcacgaaaggcatttttactgctggcctgaagaagtcagtgatttatagttcactaaaactgcacaaaatgtggaaagggtggctgangaaaacatcctgattttgctt

SEQ ID NO: 51753 - DNA, 937 bp, Homo Sapiens
gatggaagtgttaaaaaaacatctcaagcctcattggaatgatggggccattttggggtttgtaaacaagcaacaggcccatgacctactcattaacaagccagatgggaccttcctcctgagattcagtgactcagaaattggcggcatcaccattgcttggaagtttgattctcaggaaagaatgttttggaatctgatgccttttaccaccagagacttctccattcggtccctagccgaccgcttgggagacttgaattaccttatctacgtgtttcctgatcggccaaaaratgaagtatactccaaatactacacaccagttccctgcgagtctgctactgctaaagctgttgatggatacgtgaagccacagatcaagcaagtggtccctgagtttgtgaacgcatctgcagatgccgggggcggcagcgccacgtacatggaccaggccccctccccagctgtgtgtccccaggctcactataacatgtacccacagaaccctgactcagtccttgacaccgatggggacttcgatctggaggacacaatggacgtagcgcggcgtgtggaggagctcctgggccggccaatggacagtcagtggatcccgcacgcacaatcgtgaccccgcgacctctccatcttcagcttcttcatcttcaccagaggaatcactcttgtggatgttttaattccatgaatcgcttctcttttgaaacaatactcataatgtgaagtgttaatactagttgtgaccttagtgtttctgtgcatggtggcaccagcgaagggagtgcgagtatgtgtttgtgtgtgtgtgtgtgtgtgtgtgtgtgtgcgtgtttgcacgttatggtgtttctccctctcactgtctgagagtttagttgtagcagaggggccacagacagaagctgtggtggttttt

SEQ ID NO: 51754 - DNA, 646 bp, Homo Sapiens
  misc_feature (467)..(467): n is a, c, g, or t
caagctgctacaaataaattctgtgttcttttgacaatagcgtcattgccaagtgcacatcagtgagcctcttgaatctgtttagtctcctttttcaacaaaggagtgtgttcagaaaaggagagagaggctgagatcattcaggagtttgttgggcagcaagcatggagcttcttgcacaaattctgggtccataaacaacccccaaagtccctgctgatccagtagccctggaggttccccaggtagggagagccagaggtgccagccttcctgaagggccagaaaatttagcctggatctcctcttttacctgctaggactggaaagagccagaagtggggtggcctgaagccctctctctgcttgaggtattgcccctgtgtggaattgagtgctcatgggttggcctcatatcagcctgggagttatttttgatatgtagaatgccagatcttccagattangctaaatgtaatgaaaacctcttaggattatctgtggagcatcagtttgggaagaattattgaattatcttgcaagaaaaaagtatgtctcactttttgttaatgttgctgcctcattgacctgggaaaaatgaaaaaaaaaaataaagcaaatggtaagaccaaaaaaaaaaaaaaaa

SEQ ID NO: 51755 - DNA, 583 bp, Homo Sapiens
tttagtgctaaacaagtaagaaaataagctcgagtgaatttctaaatgttggaatgttatgggatgtaaacaatgtaaagtaagacatctcaggatttcaccagaagttacagatgaggcactggaagccaccaaattagcaggtgcaccttctgtggctgtcttgtttctgaagtacttaaacttccacaagagtgaatttgacctaggcaagtttgttcaaaaggtagatcctgagatgatttggtcagattgggataaggcccagcaatctgcattttaacaagcaccccagtcactaggatgcagatggaccacactttgagaaacaccacccatttctactttttgcaccttattttctctgttcctgagcccacacattctctaggagaaacttagaggaaaagggcacagacactacatatctaaagctttggacaagtccttgacctctataaacttcagagtcctcattataaaatgggaagactgagctggagttcagcagtgatgcttttagttttaaaagtctatgatctggacttcctataatacaaatacacaatcctccaagaatttg

SEQ ID NO: 51756 - DNA, 555 bp, Homo Sapiens
aacacattattttgcagaaataggtgtttttaagaagttttactacaggaatgtctacttttgtaagtgacaggtgttaaaggcccaggtgtgctgtgccaaagagctcagcagaggctcacgtggcccaggctggtgcgcccgctgtctcggtaaggggcgggttggtgtgttttccccttgtgtaccagagcacattccttaggggacggctttgggggtcccacgagacatggactaggagtttaagcaggacagtgtgcgtgcacgagctccgagcccagcacagacatgcctggaacccccgccgcctgctgctccctcctagggaacccatttccggggaacgccgtgactgtcgggcagcctggagcttcctgcagcctcctacgcagggtccacgccacgtggcctgggctgccatcctgccgtcctcccactggcatcctggcaagggggcgttgcttttcctgggcggccttttatgtcttggagacacctgatgtaaagtttctgtaaatctatttcatatctgacccaccaaacagatttctc

SEQ ID NO: 51757 - DNA, 679 bp, Homo Sapiens
  misc_feature (547)..(547): n is a, c, g, or t
cacgagggctcttttgaaaagaagactcctcaaggagagataaagaggaaagcacctctttcattttttagtgtgagctaattccatcagactgctgtcctcctggacccatctgagatgtgcagtagcaaggagaggggggatcattttagagagtgggtcattggcagggagtgctccggagggaggcagaggggagactgtggtagaaggaagacagaactcacacatgctcccaggattggggacagggacagaggaggtaacagaaggcaaaggccagtttccccgttatcatgaaggggcccactcaggacaggaacaaggacaactcctcctcctcctcctcctctcctgctgctcctgggataccaggtcagtgatgtagtcttgcagtttggcaacttcctagcctgagaatcctagtggggctgtgggaaacacatttccacgttgcaagcatgcaactccaaagaatctgtgatgccactgaaatgagatgggaatgatccagctctttcagcatcttggttgaacttgctttcantcgtcctgggatattgtggaaggaaaggtgactgtgtgatctgattccgtggtcaaggacttgcatcttgtgtttctatccccaagccttcctggtgtctccaactcctaccccattgcatgggttgttgcg

SEQ ID NO: 51758 - DNA, 727 bp, Homo Sapiens
gaaacaagctttcaacatgttgaagctctttactgtaaaggcaagccagcatgtgtgtccacacatacataggatggctggctctgcacctgtaggatattggaatgcacagggcaattgagggactgagccagaccttcggagagtaatgccaccagatcccctaggaaagaggaggcaaatggcactgcaggtgagaaccccgcccatccgtgctatgacatggaggcactgaagcccgaggaaggtgtgtggagattctaatcccaacaagcaagggtctccttcaagattaatgctatcaatcattaaggtcattactctcaaccacctaggcaatgaagaatataccatttcaaatatttacagtacttgtcttcaccaacactgtcccaaggtgaaatgaagcaacagagaggaaattgtacataagtacctcagcatttaatccaaacaggggttcttagtctcagcactatgacattttgggctgactacttatttgttaggcgggagctctcctgtgcattgtaggataattagcagtatccctggtggctacccaatagacgccagtagcaccccgaattgacaacccaaactctccagacatcaccaactgtcccctgcgaggagaaatcactcctgggggagaaccactgacccaaatgaattctaaaccaatcaaatgtctgggaagcccctccaagaaaaaaaaaaaaaaaag

SEQ ID NO: 51759 - DNA, 705 bp, Homo Sapiens
  misc_feature (325)..(325): n is a, c, g, or t
  misc_feature (585)..(585): n is a, c, g, or t
  misc_feature (610)..(610): n is a, c, g, or t
  misc_feature (632)..(632): n is a, c, g, or t
  misc_feature (654)..(654): n is a, c, g, or t
gtatttttcaggctagatgtatgtacttcatgctgtctacactaagagagaatgagagacacactgaagaagcaccaatcatgaattagttttatatgcttctgttttataattttgtgaagcaaaattttttctctaggaaatatttattttaataatgtttcaaacatatataacaatgctgtattttaaaagaatgattatgaattacatttgtataaaataatttttatatttgaaatattgactttttatggcactagtatttctatgaaatattatgttaaaactgggacaggggagaacctagggtgatattaaccangggccatgaatcaccttttggtctggagggaagccttggggctgatgcagttgttgcccacagctgcatgattcccagccagcacagcctcttagatgcagttctgaagaagatggtaccaccagtctgactgtttccatcaagggtacactgccttctcaactccaaactgactcttaagaagactgcattatatttattactgtaagaaaatattcacttgtcataaaatccatacatttgtgtgaaactttgttgtnttcagatgcgttcacttgtcatgtntcatcagtctctcactccaatntctaagcttcatggaacatganacacgaatctgtcttttagatatagcctcttttgagaattcacatgaatta

SEQ ID NO: 51760 - DNA, 518 bp, Homo Sapiens
  misc_feature (28)..(28): n is a, c, g, or t
ttctttagaactgaaaacagtatatgantgaatgccaccttcttgaattatttggctagaggatggtattaaacagaagggcaatatctccaagtgagttcttatggaggaaaactgccccagagccatggtgtctccctgttcaagatggcagatggttcagggcagactgagaggtgcccctcaagtgtcctgcctctatggctttatctttgcatatgtggcactgtcagctcaatggcacgacagggctgctctgctgctcttcgatgtagaggcttgccaggggaaataggcacacagatgcagcctccttcctaaccctcaactgcaatctattttgtatcccttgagctctcagcttctgctgtttttgtcagatagcagacttccttactgggagatacactcattccatgggcccaggcctgacccacacgaactgggtgcaacagtgggctgaaaacatgaggactggactcaagagtgtccagcttgaacttgttttccaactgcct

SEQ ID NO: 51761 - DNA, 602 bp, Homo Sapiens
  misc_feature (586)..(586): n is a, c, g, or t
  misc_feature (602)..(602): n is a, c, g, or t
gggacggaaaactggcggcttggtttgttcagcgcgtcgcggtcatggctctcgtttcaggcctccacggtgtgcacctggagtcaggagcgcgcttgtgcgtacagttcggttcagttactaaaagatgtaactgaactgcagatccttggtgaaatatctttcaacaaatctctatatgagggactgaatgcagagaaccacagaactaagatcactgtcgtcttcctgaaagatgagaagtaccattctttgcctatcatcattaaaggcagcgttggtggacttctggtgttgatcgtgattctggtcatcctgttcaagtgtggcttttttaaaagaaaatatcaacaactgaacttggagagcatcaggaaggcccagctgaaatcagagaatctgctcgaagaagagaattaggacctgctatccactgggagaggctatcagccagtcctgggacttggagacccagcatcctttgcattactttttccttcaggatgatctagagcagcatggagctgttggtagaatattagtttttaaccatacattgtcccaaaagtgtctgtgcattgtgcanaaaagtaacttaggan

SEQ ID NO: 51762 - DNA, 842 bp, Homo Sapiens
gccctttgagaatttctaaatacaaattgagttaaaagattgttccaaaatctgctgcttcatcaaaaggcattaaaacatttcttatgtcaggaaaggatcctactagtcttttaattgctatcgtctgggattaacagataaggagaaaccagacaggaaatggctaacatatggaaatatttgcacataccaaaataccactacttttctttgtatgtgaacggtcctggaaggattctgttgctccttggcaggtgtgtggtttgcgctatagactggctccggtgatctggccattatactctgctgtctccatcttgaggatgtaggggattatgctgtctatcgaaacattgccaatgagaccagtaaaaaaaagttcttctgttatgttggagctcatcagcctgagtgccggcaggcgaacgaggatccgggccaatctataaaagggagtgtcattagaaaaggagactgtttgatgcccttcaaccacagctcagcaaaggctcctggggtcccgtctgtattgcacagaatcaaaccaaacggatccaccatccacccacctctcttttctgatttcaacagttcctcttatagaaatttatcatgagaaaaaagcaaatgagtacaaaatgtatgtacagatgtgttcccttcacctcttgtttattccaactctcctcacccccagcagcaagagaaaacctggaaattcatcaacagaggacagactaaagtaggagtcttcatatgatgaactgttagagactcatttaacaaacgataatacaaacctgtatttactgaccaggaaagacatccatgacatattg

SEQ ID NO: 51763 - DNA, 562 bp, Homo Sapiens
ctggccaacaccacctccgccttcccctacgcgctcctgagcaacgacaatgccttcctgagctaccacccgcaccccttcgcgcagcgcacgctcaccgcgcgcttccaggtcaacaacacccgcccgccgcacgtgcagctgttgcgcaagccggtgctcacggccatggggctgctggcgctgctggatgaggagcagctctgggccgaagtgtcgcaggccgggaccgtcctggacagcaaccacacggtgggcgtcctggccagcgcccaccgcccccagggcccggccgacgcctggcgcgccgcggtgctgatctacgcgagcgacgacacccgcgcccaccccaaccgcagcgtcgcggtgaccctgcggctgcgcggggtgccccccggcccgggcctggtctacgtcacgcgctacctggacaacgggctctgcagccccgacggcgagtggcggcgcctgggccggcccgtcttccccacggcagagcagttccggcgcatgcgcgcggctgaggacccggtggccgcggcgccccgccccttacccgccg

SEQ ID NO: 51764 - DNA, 655 bp, Homo Sapiens
taaaagatcaagttctgagatgcagtaaaatcgctggtgtgaaagtagcagaaattacagagctaatattgaaagctttggagaatgaccaaaaagtaaggraagaaggtggaaagtttggttttgcagagtctatagcaaatcaaaggatcacagcatttaaaatggaaaaggcccctattgatacctcggatgtagaagaaaaagcagaagaaatcattgctgaagcagaacctccttcagaagttgtttctacacctgtgctatggactcctggaactgcccaaattggagagggagtagaaaactcctggggtgatcttgaagactctgagaaggaagatgatgaaggcggtggtgatcaagctatcattcttgatggtataaaaatggacactggagtagaagtctctgatattggaagccaagatgctcccataatactctcagatagtgaagaagaagaaatgatcattttggaaccagacaagaatccaaagaaaataagaacacagaccaccagtgcaaaacaagaaaaagcaccaagtaaaaagccagtgaaaagaagaaaaaagaagagagctgccaattaaagctaacagttgtatatctgtatatataactattaaaagggatatttattccattctkaaaa

SEQ ID NO: 51765 - DNA, 749 bp, Homo Sapiens
ctggaatttgagtctgcccagttccccaactggtacatcagcacctctcaagcagaaaacatgcccgtcttcctgggagggaccaaaggcggccaggatataactgacttcaccatgcaatttgtgtcttcctaaagagagctgtacccagagagtcctgtgctgaatgtggactcaatccctagggctggcagaaagggaacagaaaggtttttgagtacggctatagcctggactttcctgttgtctacaccaatgcccaactgcctgccttagggtagtgctaagaggatctcctgtccatcagccaggacagtcagctctctcctttcagggccaatccccagcccttttgttgagccaggcctctctcacctctcctactcacttaaagcccgcctgacagaaaccacggccacatttggttctaagaaaccctctgtcattcgctcccacattctgatgagcaaccgcttccctatttatttatttatttgtatgttgttttattcattggtctaatttattcaaagggggcaagaagtagcagtgtctgtaaaagagcctagtttttaatagctatggaatcaattcaatttggactggtgtgctctctttaaatcaagtcctttaattaacacttgaaaatatatagctcagatcatttaaatggggcaatattattaaatgagcaaatatcatactgttcaatggttctgaataaacttcacttgaggaaaaaaaaacaa

SEQ ID NO: 51766 - DNA, 599 bp, Homo Sapiens
cttatggtgagatggtgggatgtgataaccaagattgccctatagaatggttccattatggctgcgttggattgacagaggcaccaaaaggcaaatggtactgtccacagtgcactgctgcaatgaagagaagaggcagcagacacaaataaaggtggtccttttgtttgatgaagaaataaacttcagctgaagattttatataggactttaaaaagaagagaagagaaagaagaaacaatgcatttccaggcaaccacttaaaggatttacatagacaatcctataagatcttgaacttgaattttatgggttgtattttaataatgtaagtaaattatttatgcactcctggtgtgctatgaatattattccagttagccttggattatttcagtggccaacatatgcagacatttgtactcctcaaccattttctcaaagtaatgggcattctatgatttagacttcaaggaattccaatgatgaagattttaaggaaagtattttatattcaacaggtatattctgctgcatgtactgtactccagagctgttatgtaacactgtatataaatggttgcaaaaaaaaaaaaaaa

SEQ ID NO: 51767 - DNA, 522 bp, Homo Sapiens
ttcaaggttgcagtgaaccatgattgcaccactgcactccagcctgagtgacagagcaagaccctgtctctaaaaatatatataavmvgtaaaactaaagaacttcttgcctaaacctgaattaccgcaatttgctgagtgactttgagaaaaatcagactgtttagttcagtcgggatgaaaagcttgcgattgcttcccacaagaatgggcaatagtgacggctgcaaggtacttttatttgttcatgaaagaacgacaatttttcaaaatgtaattaaacataatagartgttttamactactgggcactgaaactggagaraaaggaggctttattgaacattcccctttttcagttggttcaaagttcagcactgtggttatcattggtgatgcagavaacattagtagacttagacaattgctatggcagtttctaaacagagctttttctatacactatttgcactggggtgcaatatgtatatctgtgttaagaataagtatttcaycattatt

SEQ ID NO: 51768 - DNA, 496 bp, Homo Sapiens
cggccgccccctcgcccgtcacacacacacacactctctctctctctctctctctctctctctctctctctctctcagcagagctgaggataaagaggaatatcctgcacacttcttccttctgtgtcagggaacatttgcttgtctacagctcgagtatttgtaaacactcagtagcacccaaaccctgagccctagcagtttccttttgcttgtttactagcaagagtagcatgtcggaggacgatgagacattgaatcaaactcttagacaagctggtgaaagttttaacgactgctggaggcaacatgcttccacactgacagaaatcatctttcaaaaatcctgcacatatctcaggcttatgaaacaaactaattcctaatagttggaaatgaattaaaagcttgcggtgagataaaagatagatattggctggatgtgatgactcatgcctgtgatccctacactctaggagggcacagcaggaggatc

SEQ ID NO: 51769 - DNA, 848 bp, Homo Sapiens
tctagcgaggtgacagcgtagaaccaaggttgtatatgcagttatgtgtaaatatttgacaaagaaaaaaaaaggaaaagaatcttcctgccaacaggtaggtcctgctggacaggacctgaaaattaagagatttttttttttaagcagtgaaatttaaaaatctattacctcaagaattttcagtcgatatgtcaatgtactgttccttctcagtaagtacagtgtcacatgctgctggcggtaaaagcaacccaagtgtcagatcacacaaattttagggacaagtctttcaaaagacggacaccttgtgatattttggagtctaatttccgacttttcgtaatgtcccaatgaccttttgttgtggttgggcttttataaaaaattattttcggttggttgttgtagaatggaagagtaatcttaattatgaaatcagattgcatggaagaatataaagacactcactcggatgaaaactataacggttttcaaactattttgatggtcattgtacgagctattgtatggattactgtggagtgctgtttaccacatgatgtgtgcaatacatcatgcaatgttatttagcaatgcgtaataaaaggttttaaaaagaaaaaaaaaaaaaaactctccagcggctggatccgggccattaaggggcctgaatcctttcaaaggggggggcccgggtacccaagctttttgtttcccctttaagtgaaggggttaattttccgaggctttgggcggtaaatcattgggtcaataggcttggttctcctgtgtgtgggaaaatttggtttatggccgccctccacaaatttcccagccaacaaaac

SEQ ID NO: 51770 - DNA, 576 bp, Homo Sapiens
  misc_feature (573)..(573): n is a, c, g, or t
gtcgtctcaaaaacattcatcctcttactgcaagtttatctgggtacttttacctgtgtgttcaaaggcatttcttttcagcagtgatcattataacttcacaaaaaaagatgctgacggatttacttacagggccttaatgttattttgtcccagccaacaccctctaggtcctaaaagtcaaggtacttcagtttatttggcaaacatgacaacatttttttggccctgggcccaacagtttgtacttcatgaaacatattgtacattttacatagtttaatttaaaaaataccttttaagctagttgatctttgactgtcttatttattataacctttcagcacattccaaggttttagttactcaggaaggagttaattaaaatgattttattttggtctgatggatgttttttaaaaggaaaattattattatgaaccttcagcctactttcttgagtgccgtaaaagtgcttgtaaatctttttttttttttaagaagaaagaaaaaaatggtgtttgacgttgatggaaattcaaaaatatatatggaactgaaacattaacttancta

SEQ ID NO: 51771 - DNA, 875 bp, Homo Sapiens
gggttcatattcttgtcattaatattattttgtatttttatgtggaaatatataattttatgacactaattgctaaagtttattttatgttgaattatttttggagctgaaatctttgtaatattaaagcaactagtttctaattcccagtttctgtatagaatcgcacaagtggtttatggagtgtttggattgtaattataaatggttctttgatatgcaaattaatattttcagttgattttattttatattcctaatggggtgttaaagccgttttttatttttttctaaataaaaagagaacccatgcttttatggacactaggtaaacaccttcagcttaaatttttcgttaaatattttagtttattttattgttatcttccaggtgtctaaatctccagtctgtctgttgtactggtaatttaactctgtaatggaatagtttgctgccaactatttatattaagtaatttttaaatatttgtaatattgttgactgactaataaactattaagttattggcaaaaaaaaaaaaaaaaaaaaaaaaacaaaaaaacaaaaaaaaaaggggggggccaaaaaaacccagggggggacaccattaatcagctcaccgattttttgttaaaccaggaccccattaggaggaaaagttaataaaaaagaacaggcgacgttcacaacgcgtgcacgaaaaacttcttctggcttcgacaagacacccttcttggtggtactttgtcgaccacccaagaattaagctggcaataaaattagattatgttaacaggacatgccggcatctccgttttaatcgcacataatacaagagaaagtctctaatgagatcactgtactacggccaaga

SEQ ID NO: 51772 - DNA, 752 bp, Homo Sapiens
  misc_feature (678)..(678): n is a, c, g, or t
  misc_feature (685)..(685): n is a, c, g, or t
  misc_feature (724)..(724): n is a, c, g, or t
cgtgtccccacagggtcaacagcgttgaccgcatggcagctccgagagcagaggctctatttgacttcactggaaacagcaaactggagctgaatttcaaagctggagatgtgatcttcctcctcagtcggatcaacaaagactggctggagggcactgtccggggagccacgggcatcttccctctctccttcgtgaagatcctcaaagacttccctgaggaggacgaccccaccaactggctgcgttgctactactacgaagacaccatcagcaccatcaaggacatcgcggtggaggaagatctcagcagcactcccctattgaaagacctgctggagctcacaaggcgggagttccagagagaggacatagctctgaattaccgggacgctgagggggatctggttcggctgctgtcggatgaggacgtagcgctcatggtgcggcaggctcgtggcctcccctcccagaagcgcctcttcccctggaagctgcacatcacgcagaaggacaactacagggtctacaacacgatgccatgagctgacggtgtccctggagcagtgaggggacaccagcaaaaaccttcagctctcagaggagattgggaccaggaaaacctgggaggatgggcagacttcctgtctttgaggctaatggacccgtggggcttgnaatctgnctctttctactatttacatctgatttaaataaaccattncatctgaaaggggaaaaaaaaaaaaaaa

SEQ ID NO: 51773 - DNA, 685 bp, Homo Sapiens
  misc_feature (483)..(483): n is a, c, g, or t
  misc_feature (518)..(518): n is a, c, g, or t
  misc_feature (559)..(559): n is a, c, g, or t
ggctggagcgcctcagccctggcgcggtgtagtcgtgagctggaacttctgacactgccccttccttccccgtccagcctgccgaccatgcccgcgggcgtgcccatgtccacctacctgaaaatgttcgcagccagtctcctggccatgtgcgcaggggcagaagtggtgcacaggtactaccgaccggacctgacaatacctgaaattccaccaaagcgtggagaactcaaaacggagcttttgggactgaaagaaagaaaacacaaacctcaagtttctcaacaggaggaacttaaataactatgccaagaattctgtgaataatataagtcttaaatatgtatttcctaatttattgcatcaaactacttgtccttaagcacttagtctaatgctaactgcaagaggaggtgctcagtggatgtttagccgatacgttgaaatttaattacggtttgattgatatttcttgaaaaccgncaaagcacatatcatcaaacctcgtgccgaattcngcacgagggaaaaggctcgccttgccgcacaggagcagcanaaggaaatggaaagccaaaaccaggcttgagaaggcgcatctggcaaagctgagaaaagacgtctggagaaacctagaatcaagtcaatgaacacgggcaaacaaaagtgacaaccctcgtgggaa

SEQ ID NO: 51774 - DNA, 529 bp, Homo Sapiens
cgccctgattcccagatgtgggtcagaggcagagatggaagttggaatggacaagcctgccctctcctcagctctccatggctctgtcctcaggctgtttctgcaatttgacatgaggcctggccccagggaaaccagtggggcctcatctcctccctgtgctgctctgaggtggagccttctcagggtcagtccagctctggagcccctctccagctcggtcaccaaagctgtctggtcccagggcagtgtggagtgacaggcacgccagccaatccaatcggccatttcatacccaatgcatgtgactgataaagagataacaccctgtctccaagacacaggctttacataaacagctttaatgacttcttcacttagggacaagactccttagtggtggaacctcaggcatccatgcaggatgtaagaaagctcccgtatatacatgaactgagaagtgtgtagaagagtaaatactgtaataggtaataaaatgtatgtatttttatttaaaaaaaaaaaaaaa

SEQ ID NO: 51775 - DNA, 565 bp, Homo Sapiens
ctccctccctccgttaggaaactgccagggacagtcgacagggaccgccctcttgtcaggacaactgcctgctgctagggtctgttgccaaggtcaacccatcaccaggaactgtcactggggacgagtccatgttcccaagggcagcccttctcttctgctgtttaattccagacctggtggtgggacccaggtaaccccctctcccacccccgccgacttctcccctttccccagcctcgtgcctctgtccctcaccacggtgtggacagtgccgcaccctcaacataggccatgtggggagtggctgcccctgcctcagggtcattctcctgccatgcgagggcactcgccttctgccttctggttcctcacccctcagaccagccaggaacctctcagagctgaagcaggccctgggggcagaagtgccagatgacagtcagaggcgcaggagccctccctccccacccccaccctgtaactccagctgccactccatctccagctgctctcaatggcttccaggtgtgttgttcggggacagccaccgccttgagtctgg

SEQ ID NO: 51776 - DNA, 746 bp, Homo Sapiens
  misc_feature (697)..(697): n is a, c, g, or t
ttttttttttttttttttaattttattctgtttatttaaataaggataagactacttaaaagactttttacatacaaaaatgtacaaggttaaacttttctgtactgaattacaaaacctgcacaagcatgtaataaaagagcacacttaaaaacattctgaccattatttagcctctaaaaattactgaagttcaacagtagtaaatagaggaagctcttacatatatatatatatatatatatatatatatgatttaatctactggcagttttacttaatgtaagtatttaaaaggtcacattgctattgaatgagtctctagatcaattttagaattgtctctcaaaacttaagtcaaccaaaatattatttcaaatagtaattccaattctgaagaattttaataccagcaaatatattatggcctcatagtagtaactgaaccaactttccaaagtgcctggtagctgtccagatgaattaggctgctttggaaaactgtactgtctctacagccattgagaagccattcagtgccctggtagggacctgagactttccagaattcacacagcagtctatgatccctcaaatgtaagaggacagggggtcagcctatcttcacctctcagtgaatgtggagggccaagcaatatgacttgcaaacctaagctagaagcttgggatctacagntaggaggaaggagaattaagtagagaaagaaatgtataaggagaaaggg

SEQ ID NO: 51777 - DNA, 648 bp, Homo Sapiens
  misc_feature (613)..(613): n is a, c, g, or t
cagatccctagtaaactccttcttcacttttactgtcagatttacaaaggtcctcccattgcaaagcagtgtttgttctaatttatatattgtttttctagttcattttgtgtttccaacttttcatgtaaaattttaattatttttgaatgtgtggatgtgagactgaggtgccttttggtactgaaattctttttccatgtacctgaagtgttacttttgtgatataggaaatccttgtatatatactttattggtccctaggcttcctattttgttaccttgctttctctatggcatccaccattttgattgttctacttttatgatatgttttcataagtggttaagcaagtattctcgttacttttgctcttaaatccctattcattacagcaatgttggtggtcaaagaaaatgataaacaacttgaatgttcaatggtcctgaaatacataacaacattttagtacattgtaaagtagaatcctctgttcataatgaacaagatgaaccaatgtggattagaaagaagtccgagatattaattccaaaatatccagacattgttaaagggaaaaaattgcaataaaatatttgtaacataaaacanagtgaaacccaaaaaaataaatttatatataaata

SEQ ID NO: 51778 - DNA, 731 bp, Homo Sapiens
  misc_feature (44)..(44): n is a, c, g, or t
tggcctcaaggactccccaacaggggctaactcttatgtgatcntcaagtgtgagggagacaaagtccgctcggctgtgcagaagggcacctccacaccagagtacaatgtgaaaggcatcttctaccgcaagaagctgagccagcccatcactgtacaggtctggaaccaccgagtgctgaaggatgaatttctgggccaggtgcacctaaaggctgacccggacaacctccaggccctgcataccctccacctccgggaccgaaatagccggcagcccagcaacctgccaggcactgtggccgtgcacattctcagcagcacctccctcatggctgtctgacacctgcccacctacctggctctgaccgttcccaccaccatctgcatgtccccactgggcctgagtctagcctgggagccaggatactggggtccttttcccactcttccactgacttgctgtgtgaccttaggaagtctctgcccctctctcagcctcagtgtcccgagggccccgaagcattccattctcgtggaggagtttccttgctgagatttcaaatagtcctccccacctcaactgtcaccactgctaagggactctatccattgagcacattttcctaaggccctgctgtctgccgaggagcgccaagaagatgtcacttgtttacacacgaactgccacatccccaagctccgttcttgcccctcgtgtcctaggccca

SEQ ID NO: 51779 - DNA, 582 bp, Homo Sapiens
atattaagtcagcttggtgctgacagtttaacaagccttaggaagttagctgaacagttcccacggcaagtcttggacagtaaagcaccaaaaccagaagacattgatgaggaagatgatgatgttccagatcttgtagaaaattttgatgaggcatcaaagaatgaagctaactaaaagtttggtttttggaagctggcatggactagatttaacaaatcagctatgtggttccaaagttttacagacatggagaacatcacctgttactagttcagtaatataaatattttgtatattaataatgctgtttgttcagcatttttcggtcatttgattttgcattttgcacttcctcccaggatatttttttggtcaaaatatgaagtattggtgcagtttgagggtgttttggtttttgattcctggtttttttgttttttgtttggggtatttttggtgtatgtatgtttatgtatgtgtgtgggtatgtgtgtatacagtggagagcaaattggaaaacagttctatttatcctcctccctccccagtagaaataaaaaaaatctttacatttgttac

SEQ ID NO: 51780 - DNA, 562 bp, Homo Sapiens
agtggaaccagcgccagagtgaacaagtagagaagaacaagatcaacaaccggatcgctgacaaagcattctaccagcagccagatgctgatatcatcggctacgtggcatccgaggaggctttcgtgaaggaatccaaggaggagaccccaggcacagagtgggagaaggtggcccagctatgtgacttcaaccccaagagcagcaagcagtgcaaagatgtgtcccgcctgcgctcggtgctcatgtccctgaagcagacgccactgtcccgctaggtgcctgctaggtgcatggccacagagcatgggctgggcctgggcacaggaggagcagctgctttggtcggggtggagactcgcagcagctgctacccacagcctattccactcctccccatctccaggcgctgggaggggggccctcaccccgtcacgcctcgctccctcctggccctctggtccagcccctcacgcctcctctcagtctactcaattgtgactgtccctcctgatgtattttttttcttggcttaaagggtgtgttgttgaaaaaaaaaaaa

SEQ ID NO: 51781 - DNA, 455 bp, Homo Sapiens
ggctggaattccaatctcctgtgccatttggtttgaatgtacttgataggctgcttcaaatcagtcacttcaatgcattttgtgtaaacccagttgtccttttttattcctctttagacataaatgtgctaactattcctttctagacacaatttattttctaagattaaaaataataattgctaggtttggtggcacatgcgtacagccccagctacttaggaggctgaagcaggaggatccctagagcccaggagttctgggctgtggtacactatgccagttgggtgtaagtttggcatcaatatggtgatgtccctgaagcaggaaaccacaaacttgcatcaggaggggtgaacccagcccaggttggaaatggagcaggccaaaactcccaggctgatcagtaatgggatcttgcctatgaatagccagtgcactgcagccaggacaac

SEQ ID NO: 51782 - DNA, 603 bp, Homo Sapiens
attcatgatgttgctatcaaaagttgagaaattgtcagaagaaatcatggagataatgcaaaatttaagtagtatacaggctttggagggcagtagagagcttgaaaatctcattggaatctcctgtgcatcacatttcttaaaaagagaaatgcagaaaaccaaagaactaatgacaaaagtgaataaacaaaaactgtttgaaaagagtacaggacttcctcacaaagcatcacgtcatcttgacagctatgaattccttaaagccattttaaactgaggcattaagaagaaatgcactcaccatgagcaccaacttctgcatctgcctgatcatatttaaaggaacagagaaatatttgtaattaatctgcccagtaaataccagctcgtagcagttggcaggtgcatgtctagataaaatttcttgcagctaatttaaactttctacacgcaccagtagataatctcaatgtaaataatacatttcttcttggctctttaatgtaagccaacatggagaggaagatcttgacttatattctgtaccacatacacttctgtggacttttagcatttgtgggtagacttaataaagcacga

SEQ ID NO: 51783 - DNA, 498 bp, Homo Sapiens
  misc_feature (469)..(470): n is a, c, g, or t
  misc_feature (472)..(472): n is a, c, g, or t
ggtttcagacctcccacagtgtcacccagtcatcccctacccccaatccccccatcttctccttgcctcttgtaggcctggtggtcatctcggctttgctctggtgctggtgggctgagacgtcgtcctaatgcagaacatgtttgggttgtggaagcctatggtattcttggctattgcagctgtggctctgtatgtgttacccaacatgcgacagcaggagtcagagttctgcctcatggagtgatggcagaccttggccagcgcgagggcagatccccagtggccaccaccctcagctttgggcaggacacactgtgccagaaccctccccatatgttccatgtgtccccatctcctcagcctcagtcacccaggctgaaaaggcttgtggggagcggctgacttccatctcctgccttgtgtaagaacctgagttccttgtaattaaatatcaactgaattacannanaaaaaaaaaaaaaaaaaaaaacgcgg

SEQ ID NO: 51784 - DNA, 569 bp, Homo Sapiens
gcacgagcggcacgagctccccgccttggccacgtgtagccccagctgtctgcaggcaccaggctgggatgagctgtgtgcttgcgggtgcgtgtgtgtgtacgtgtctccaggtggccgctggtctcccgctgtgttcaggaggccacatatacagcccctcccagccacacctgcccctgctctggggcctgctgagccggctgccctgggcacccggttccaggcagcacagacgtggggcatccccagaaagactccatcccaggaccaggttcccctgcgtgctcttcgagagggtgtcagtgagcagactgcaccccaagctcccgactccaggtcccctgatcttggggcctgtttcccatgggattcaagagggacagccccagctttgtgtgtgtttaagcttaggaatcgcctttatggaaagggctatgtgggagagtcagctatcttgtctggttttcttgagacctcagatgtgtgttcagcagggctgaaagcttttattctttaataatgagaaatgtatattttactaataaattattgaccgagaaaaaaaa

SEQ ID NO: 51785 - DNA, 744 bp, Homo Sapiens
  misc_feature (20)..(20): n is a, c, g, or t
cccagcctatggatacaagncaataatatgattcctcagattatgcccagtatatccagcagggatgttcagcctgttgcctatgaagagcctaaacattggtgttcaatagtctactatgaattaaacaatcgtgttggagaagcttttcatgcatcttctactagtgtgttagtagatggattcacagatccttcaaataacaaaagtagattctgcttgggtttgttgtcaaatgttaatcgtaattcgacaattgaaaacactaggcgacatattggaaaaggtgttcatctgtactatgttggtggagaggtgtatgcggaatgcctcagtgacagcagcatatttgtacagagtaggaactgcaactttcatcatggctttcatcccaccactgtctgtaagattcccagcagctgcagcctcaaaatttttaacaatcaggagtttgctcagcttctggctcaatctgtcaaccatgggtttgaggcagtatatgagctcaccaaaatgtgtaccattcggatgagttttgtcaagggttggggagcagaatatcaccggcaggatgtaaccagcaccccatgttggattgagattcatcttcatgggcctcttcagtggctggataaagtccttactcagatgggctcccctctgaaccccatatcttctgtttcataatgcagaagtattcttttcaattatattggtagtggacttggtttaattttagagaaa

SEQ ID NO: 51786 - DNA, 742 bp, Homo Sapiens
ggtacggtccggattcccgggatgctgggaatacaggcatgcgccactacacctggctaatttttgtatttttagttgagatggggtttttccacgttggtcaggctggtctcgaactcctgacctcaggtgatccgtccacctcagcctcccaaagagctgggattacaggtgtgagctaccgcgcctggccatgatgatattattaaacaccattattcacatttcaaataataacaatactttttgtttttcaaaaataaaatgcaatgttatataaagctataaactaagttctttatgatatttgagcaacaactcaggaatataacatataagggagatgttaatttaaaaatttccactacacttattatctattaaccaaagcttaaaattttgtattcttctgttagataagaccttttacccatttaatttgtctttaaggacagtcatttggcttctgaatgtttgaaacgattttaaaaaataagtagtgctatggttgtttctataattctaacctttgatagtaatcagaatgtattacatttcatttctgaatagcttttgaatttatgaaaaattattaacaatgaaaaattggtaattttattaagttatatgtgtttaaatattatattagcttatttctcttgcattaatagtactgctgtttttgttttgcttctttatatttatgtctagcttttatatgtaatttatctagtgtttataa

SEQ ID NO: 51787 - DNA, 717 bp, Homo Sapiens
  misc_feature (714)..(714): n is a, c, g, or t
agaagaaagtcccttcagccctgacagagctggctgcctctggagagggctctgccatcagtggctatctcagccggtgtaagaggggcaagcggcactggaagaagctctggtttgtcatcaaaggcaaagttctctacacctacatggccagtgaggacaaagtggccttggagagtatgcctctgctaggcttcaccattgctccagaaaaggaagagggcagcagtgaagtaggacctatttttcacctttaccacaagaaaaccctattttatagcttcaaagcagaagataccaattcagctcagaggtggatcgaggccatggaagatgcgagtgtgttatagcagttatcaagcatgtggacttgtaacaaattcttaggtcaatatgtgaatgcttttagaagctaagctgtggctcaactcatccggacacacacctggattcagcaatgaggcctgaccttttttgctataaccgccccaccactcccctgcccttgccaacatcttcatgaatggaatccttaagggatatttatggacctctccttttctgtgttttccacccctacccccacccgccacccagtaataaactatttccttaccccgcagtgagttaaaatttagtaagatgaagatgtggaaaccaatgaaaagtacatttagaaatgcaggctttttagtagaaagaagctcttacagnttt

SEQ ID NO: 51788 - DNA, 934 bp, Homo Sapiens
ctaccagccatgtgccagctttgggggcagcaggcgccaggctatgccgagggacagccttgctctgcagtcaggacagctcagtgacacaagtcagacctgcagggtgaatggtatcaagatggagatgaaagggcagccccatccgctgtgctctaatctgcagaattactctggtcagttctatgaccaaaccgtgggcttcagtcagcaagacacgaaagctggttcattctctatttcagacgccagctgcctgctacaggggaccagcgccaaaaactctgagttactttccccaggtgctaatcaggtgacaagcacagtggacagcctcgacagccatgacctggaaggggtacagattgacttcgatgccatcatagacgatggggaccactccagcctgatgtcgggggccctgagcccaagtatcattcagaacctttcccatagctcctcccgcctcaccacgcctcgggcgtccctcccattcccagcgctgtccatgagcaccaccaacatggctatcggggacatgagttctttgctgacctccctagcggaagaaagcaaattccttgcagttatgcaataggcttaggaaaaaaaagactgcaacaagcggaaatcaataggagttgaagagattaaaactgacttgttgtggtgtttttagttctgtatgtatttagcaatctcatctcacctactgagatgtgtttcattatattctttatggaaggactctggaaacctaaagatcaggagaaacgccttcctttcagttcgcacacgttggtactaacaccccttttaaacaacaaaggggggtagaatcccagggccatcgcccctttgaaagccacgaagtaaaagaggcgacacggagaaacgcgcggacctgggatgccacgccgtaattgacggagaa

SEQ ID NO: 51789 - DNA, 501 bp, Homo Sapiens
aaaaaaaaggctggtttgagaaaaatcaggtaaaattgatgaaacggatgttgtgtttctctttccatcatctggtttttaccatttcactcagtaggtatttttagaacacacttatttgaggaaagagacatcagatgcacaattttacatttataaaggaacaaatggggaaaactgaaaactaaaaattttaaatgtattaaatgccatccctgagcctaaatctagtatttgtagtttatttctaggtctgctagaacctgaaaacctgaatgaaaaaaggtgtgctgacactaatcaagtcctgtgaggtttaaattattgacctatccactctacctccattgtacaaaaaatattttacaacaagcctgggtaagattcaacagcatagtagttttgtatccaaggttacttccccacaaccactttaaacataagaaatgtggtggcaatataaagtttgtagcctttccaataaaggtttataaaacagtt

SEQ ID NO: 51790 - DNA, 769 bp, Homo Sapiens
tgcctacgaccctacggcccccacactcttcaccatgctggacctgctgcccccggcaccgccacacgctagcgctgttgtgtgcagcggaggtgccggggccgtggttggggagacccccggccctgaaccactgacactggactcgtaccaggccccgggccccggggatggaggcaccgccagccttgtgggcagcaacatgttccccaatcattaccgcgaggcggcctttgggggcggcctcctatccccggggcctgaagccacgtagccccgcgatgccagaggaggggcactgggtggggagggaggtggaggagccgtgcaatcccaaccaggatgtctagcacccccatccccttggcccttcctcatgcttctgaagtggacatattcagccttggcgagaagctccgttgcacgggtttccccttgagcccattttacagatgaggaaactgagtccggagaggaaaagggacatggctcccgtgcactagcttgttacagctgcctctgtccccacatgtgggggcaccttctccagtaggattcggaaaagattgtacatatgggaggagggggcagattcctggcctcctccccagacttgaagtgggggtacgttggttgtcagagtcttccataagatgagttttggccaaaaaaaaaaaagaaaaaaaaactcgcctgtggttaaaggttcccttagaaagttctttgagagccataatttttggtccggtgctctacccaattatattcg

SEQ ID NO: 51791 - DNA, 735 bp, Homo Sapiens
atgttttattaactggccctgtctcaggaacatcttaacagatggcaaaaaaacaaaaactttttttcaactcctatgagtggcaactgaagttcttattgttgggaaagaacactagtcctacctctgccactaatgaggtgtttggaggaggtaccagccatataatagggggtgtatgtgtgaattttgtttaaactctactgtatattgaaatgaaattcatttatttgtcttgacaatgttcaaatgatgtagattgtcttagaatgaatattcataagtactcagaactcttaagatgcagatgccacccgtgaggagctaaattcctaatgtgtattgtattccaacccaattttactggaactattgaataaatcttttattttctttcaggtttacttgatagtggatacattggtgtcagaggaccttgactgggttcattttatgtccagacatcacccctgaaacactgtactgtactatcttgctctgagtagtatcaactggatcgtctcatatttgcctcattcatcctattaatttcaaatgatactgtgggggaaaaacagggttagaaaaacaagtggaaaaaatggagtgatgttgtaatctaaacaagtgccttatgtttattgctaagaactggtgttaccaacccttttgagaagaaagggtctcttgacctgtattaacataggaaagtaaagttctttttgtttttcttta

SEQ ID NO: 51792 - DNA, 608 bp, Homo Sapiens
  misc_feature (576)..(603): n is a, c, g, or t
  misc_feature (605)..(605): n is a, c, g, or t
gggaatgatgttgtttctttgtatgtccttgcttcttttttcattgatgtaaatttttttaacttaatatgaaaactctccaagtcttgatcatcagccaggattttgccacagcaatttcattctcttatcggaacttgtatgtgtcaaagtatacttcagagtgcaaacattaagcaagtaatatattttacctacagatacttatgaagacattctttcgctatcgtgagtaaaagtatataaagctgtttctaactgaaaatgcttgaaataagcctgtaatagaaatattttttcattttttaaaaaagggcctaaattgtttatattgtagtttgtaactcacaaagtaatatttgatattgtatttttattactgtatcgttgtcgttatgtattgtgtaatactcaggtttgaaggctttctgaattctgataaatgttcagctgatgctccacgtggaatttctcttgcaaactgcataagagtactcccgagaatgagttatgacattgtggatcagactgtacctgatgttcagatgtttttctttcacaaataaacttatttannnnnnnnnnnnnnnnnnnnnnnnnnnncntgt

SEQ ID NO: 51793 - DNA, 1025 bp, Homo Sapiens
  misc_feature (646)..(646): n is a, c, g, or t
tcaggatcccagcagtggctgcacctccaagaccctggccgtgcccccagaggcctcgattgccaccctgaaccagctctgtgccaccaagttccgagtgacccagcccaacacttttggcctcttcctgtacaaggagcagggctaccaccgcctgccccctggggccctggcccacaggctgcccaccactggctacctcgtctaccgccgggcggagtggcctgagacccagggggctgtgacagaggaggagggcagtgggcagtcagaggcaagaagcagaggggaggagcaagggtgccagggagatggggatgctggggtcaaagccagccccagggacattcgggaacagtctgagacaactgctgaagggggccagggtcaagcccaggaaggccctgctcagccaggggaaccagaggcagagggaagccgggcagcagaggagtagcttgaagtggccagaagggtcattcggggcgggagaccctgagcctgctgagaaatccttttagcgccagcaagccccacccagggccctgtcctgtgtctgccaccacctttgtctgatacttgtttcccagggaagctgggggaactgccacatctgaggaactggaataaagatgagggggcttcnggggcccccaaactgggtggaacaagacacaacacgcgcaaccacacgccacccccaggcctccatctcccgcccaaacaaacacggaaccaccggcgccaggcgccccgcccagatccccgacgaccttttgacgaagaccacggcccgaaccccccccgacccctcccaccacgagcggcccacacctcacgcaccccaccaccgcaccgccttaatacaaaagaaaccacactccaccagcgcacggagaccaccgccacacgataagacacggtactacgtattgcgtccgcaccgaagccactgactacactagctctatactctcctgccacaaccaccacaactcggtcgccgcatcacgtaacccacaccc

SEQ ID NO: 51794 - DNA, 760 bp, Homo Sapiens
  misc_feature (735)..(735): n is a, c, g, or t
ctatgaactttattgacattttgcaaatgaagttacttagggagcagataatttaattcatgatggaacacgaaatctccttgaaagcaaacttcacaataatggacgtagacttgctgctatgaaaacatattttttttatttatgaagactaaatttatattggtaaaatagccagtagaatatgaaagaaataaggttagtagtgaaattcattcttcaataaataaaacactttgaaactccggaggaccacatctttcaagacttctgatgggtcaaggaaaaagatgccaacatacccgtatttaccaagtactatgataatggctagagtataaaaatgttctttttaaagttatttattaagttcttcattggaagtttttttttatatctggttcactaccaccattttctgtttcctactttctcagtggtttcattgaaaagaaattagaagtggttaaaggcaggaatagcaaagagtgcaaacttggggtatgactgggggagagtggaacatgccttttccgcacaatattaattcctttttgtatcagaaatgttcttttaggagattatgctaccatacttacttcaaacccaatgactactgtcaaggacatattttcagtacataaatactatcattttcattctaaagaatattttcactgttccttctttcttaaagtcttatgtttcactctttaactcaaatgtattctttgntagaatttaccctagattcttattt

SEQ ID NO: 51795 - DNA, 528 bp, Homo Sapiens
gggtcccgcatggcggcgcacaggaagcacgtgtttgtggagaaggtgctgcagagactttttcctcctgttccaagtggccaaggaaagagggaaccccagacgctggccgtccaaaatccaccaaagaaagtgacctctgagaaagtgagccagaaacatgctgagcctttgacagacactggctctgagaccccgactgcccgacggctctacactgccagcgggcctcctgagggctacgtcccctgttggccggagcccagcagctgtgggagccccgagaacgcctccagcggggatgacacagaagatcaggatcctcatgaccagccaaagagaagaagaattaggaagcataaatcaaagaaaaaatttaaaaatcccaataatgttcttatagaacaagcagaattagagaaacagcagagtctgttacaggagaaatctcagcgacagcacacagatggcaccacaataagcaaaaataaaaaaaggaaactgaaaaagaaacagcaaattaaaagg

SEQ ID NO: 51796 - DNA, 763 bp, Homo Sapiens
  misc_feature (653)..(653): n is a, c, g, or t
ttttttttttagccttattaatatttttccctattagaaaccacaattactccctctattaacccttcacttactagaccagaaaagaacttattccagataagctttgaatatcaattcttacataaactttaggcaaacagggaatagtctagtcaccaaaggaccattctcttgccaatgctgcattccttttgcacttttggattccatatttatcccaaatgctgttgggcacccctagaaataccttgatgttttttctatttatatgcctgcctttggtacttaattttacaaatgctgtaatataaagcatatcaagtttatgtgatacgtatcattgcaagagaatttgtttcaagatttttttttaatgttccagaagatggccaatagagaacattcaagggaaatggggaaacataatttagagaacaagaacaaaccatgtctcaaatttttttaaaaaaaattaatggttttaaatatatgctatagggacgttccatgcccaggttaacaaagaactgtgatatatagagtgtctaattacaaaatcatatacgatttaattaattctcttctgtattgtaacttagatgattcccaaggactctaataaaaaatcacttcattgtatttggaaacanaaacatcattcattaattacttattttctttccataggttttaatattttgagagtgtcttttttatttcattcatgaacttttgtatttttcatttttcatttgatttg

SEQ ID NO: 51797 - DNA, 614 bp, Homo Sapiens
  misc_feature (597)..(597): n is a, c, g, or t
  misc_feature (599)..(599): n is a, c, g, or t
ggggtaaacagctttttttttttaaggtcagattgcctcaggtttagaaagaggctgagaaatcaaatcttgaacacaatcaacttacatattttaaaggaatctgcctcaaatgagaaaatatgctagttatctagatagaggaaagagatatttacttttttaaaaattaaaatagttatgaaatctggcagaaaaggtaaagcctagaagaaactatgaaagctattctcatgttaccaaattctatctgcgcatatgtttttgtataacatttcggtgacagtgggagtcggttccctttcccaacctgcagagactatcttccaatacagaatctgtctatttatgcttgtgtttacaaactgtatttgttgggtttgggtttttgttttctttggtggcatttttcaggtcactttgcttctataacaaaggtaattgttttcaaataatttgtcttcaccttttcctgtatttgtacatagtgattcagtattagagaaaagtgcattgtttctgtcatatttccaatctgtgttggtgctcatttgagaaaataaaagttttcaaatattaaaccccccccccccccananaacaaaaacatgtcg

SEQ ID NO: 51798 - DNA, 588 bp, Homo Sapiens
ttttttttttttttttatctgttatacaactgattttacatatctgtttggattatagctaggatttggagaataagtgtgtacagatcacaaaacatgtatatacattatttagaaaagatctcaagtctttaattagaatgtctcacttattttgtaaacattttgtgggtacatagtacatgtatatatttacggggtatgtgagatgttttgacacaggcatgcaatgtgaaatacgtgtatcatggagaatgaggtatccatcccctcaagcatttttcctttgaattacagataatccaattacattctttagatcatttaaaaatatacaagtaagttattattgattatagtcactctattgtgctatcagatattaaatcattctttttatcttatttgtttttgtacccattaaccatccccacctccccctgcaaccgtcagtacccttaccagccactggtaaccattcttctactctgtatgcccatgaggtcaattgattttatttttagatcccataaataaatgagaacatgcaaaaaaaaaaaaaaaaaagcctacagccgcgcctcgtgc

SEQ ID NO: 51799 - DNA, 944 bp, Homo Sapiens
aggaggctcagtgggtgagaaaatgcaaagtggcttcacagacacagggctgtgggagcagatcgacggggaacttgggagatgaacttcagggccttccgacgccttgtctcaggaacatgctttgagaaaaatggtagcatcctttccataactcagtctctcttccctagtttccctgaagtgtgacgttttagtatctggagctcagtgatccccatgaatgagggataaagtttcactcttggtattttctaactagtgctagggaaagtcctgagacacgatcacagccactgcttggcatacagggcctccacccaataagcaaactggagattcctcagcctctcgtggacacccacatctcattcttctcacagcagagaagctctcccttcagcctgagctgtcttctttctgctgcagtgcagcctgctccctcctaccctggcctcaaggaaggtgggaaacatcttctgcatttcaaagtcctcactttgacttatttggccttcatcttggcatggaaggtggcaggcagaatggaaatactccccccaaacagaacagatattcttgcgtgtgtaagggcagaagggacaagctctctatcccatgagactaggggccggagcccacctgcctttccccacaacttttcctgctcaaacccactcctcttgacacactggaatctgtattatatatatttttaagaaaatacaatgatggttgtctggttttgttgtttttacaggtgttgtggaataaaaactgtaagaaaattaagtatttaaaatgttccaataaagtggggttttttgttattctaatatattattgtgtacctattgtaaatatgaaacactcctattttgcaagctgaggacacaatttgtactgttgttatatataaataaagtwtactgaaattaaaaaaa

SEQ ID NO: 51800 - DNA, 505 bp, Homo Sapiens
  misc_feature (435)..(435): n is a, c, g, or t
ttatgtgatttccaaattttcgagggaaacatttcaattcccagttcaacaaaaggttaaatactaattgactcaatgaccaccttcaggaaagttaaatagtaaattaggttaaattttgactggtgcttagacatttcctagttatattaacttaagcagacagcagcacattaacctgagttacacctgtgaggaaatgaccttctaaatttgattttgtttttcatctccagggccttaataagagtgtgttaacacacgactattttacaatgatagctctaaataatttattttttatttcaagaaagagaaatacaccttagaaaaacaaaacccaagattttattttatttttaaagccatatttttgtgctagtagcatttagattattccgtatgtgagatccgtatcagcatttcattacctgngtttgttctaaagaagatttatttttgttctgtgaataatttttgacagttcttgtacatgtacagatat

SEQ ID NO: 51801 - DNA, 583 bp, Homo Sapiens
ccaaaatgattacccattaaaaggcaggctggaaggccttcctggttttaagatggatcccccaaaatgaagggttgtgagtttagtttctctcctaaaatgaatgtatgcccaccagagcagacatcttccacgtggagaagctgcagctctggaaagagggtttaagatgctaggatgaggcaggcccagtcctcctccagaaaataagacaggccacaggagggcagagtggagtggaaatacccctaagttggaaccaagaattgcaggcatatgggatgtaagatgttctttcctatatatggtttccaaagggtgcccctatgatccattgtccccactgcccacaaatggctgacaaatatttattgggcacctactatgtgccaggcactgtgtaggtgctgaaaagtggccaagggccacccccgctgatgactccttgcattccctcccctcacaacaaagaactccactgtggggatgaagcgcttcttctagccactgctatcgctatttaagaaccctaaatctgtcacccataataaagctgatttgaagtgttaaaaaaaaaaaaaaa

SEQ ID NO: 51802 - DNA, 567 bp, Homo Sapiens
acgcgtccgcctacacgtgcggagagtgtggaaactgctttgggcggcagtcaaccctgaagctgcaccagaggatccacactggagagaagccataccagtgtggccagtgtgggaaaagctttcgccagagctcaaaccttcaccagcatcaccgacttcaccatggggactaaaaggagcactccatgctttagattcacacggaaggtgtttgtgtttctcctcccccttacttgcatgtaaatcacaaaaactgtgtgacttacaaggaaagcacgaggcccttgaggaatgatgatgcacattctgctgtgaggaggcccagaaaaggccaaccagggcccaaccgtgcatgatgacagggtgaagagaaggcaggtctgggcactggggcaaagagaacttaagtctctgcagagagcaaggagtaactactgagagagaatcaggacaatcctgtaggtggcccgcttactgttaaatcgtccctctgttgctttatcctctaaaatatgttaagggataaattctatatatatagttatgcatttgctgtcataccag

SEQ ID NO: 51803 - DNA, 926 bp, Homo Sapiens
  misc_feature (666)..(666): n is a, c, g, or t
  misc_feature (668)..(669): n is a, c, g, or t
  misc_feature (676)..(676): n is a, c, g, or t
  misc_feature (684)..(684): n is a, c, g, or t
  misc_feature (686)..(686): n is a, c, g, or t
  misc_feature (688)..(688): n is a, c, g, or t
  misc_feature (691)..(695): n is a, c, g, or t
  misc_feature (697)..(697): n is a, c, g, or t
  misc_feature (699)..(703): n is a, c, g, or t
  misc_feature (705)..(714): n is a, c, g, or t
  misc_feature (717)..(718): n is a, c, g, or t
  misc_feature (721)..(721): n is a, c, g, or t
  misc_feature (731)..(731): n is a, c, g, or t
  misc_feature (741)..(742): n is a, c, g, or t
  misc_feature (749)..(755): n is a, c, g, or t
  misc_feature (759)..(768): n is a, c, g, or t
ccagaaaacctccagtagtggacaacaggttttcaccatagcctacgttaacccatttttgagccaagcttcaaccctcagccttgaaaaacaagtctttaatttaatttttgttttttgcctaaatccaaagaaaaagggctgtcgggccaggcgcggtggctcacgcctgtaatcccagcactttggcaggccgaggcaggtggatcacctgacgtcagtagtttgagaccagcctggccaacatggtgaaaccctgtatctactaaaaatacaaaaattagccggacgtggtggtgcgcgcatgtaatcccagctactcgggaggctgaggcggaagaatcccttgaacccgggaggcggaggttccagtgagccgaggtggcgctattgcactccagtctgggtaacagggagactgcatctcaaaaaaaaaaaaaaaaaaaaaaaagggctgtccatgtattcacacacccctcaaaaaaagcctttagttcctactttagccactggtttctcagaatccaaagatcacatattctagtgtaacactgcaagaagtcttgagaaaaagattattgtagtgttcaaaatatttttgtattgttaatgcatcatcatagaaaaacttttaaacatgagaataaagatactttttactggganannaaaaaanaaaaaaanananaannnnnanannnnnannnnnnnnnnaannaanaaaaaaaaanaaaaaaaaannaaaaaannnnnnnaaannnnnnnnnnaagggggggccgcctccaaaaaattccccctagagggggccccaaagtttaaccgccacccacgttttttttgttgtaaaaaaagggcccccctaatagggggcgcgcttattaaaaattataggccactgggccccgcccttttattcaaacggtcg

SEQ ID NO: 51804 - DNA, 695 bp, Homo Sapiens
  misc_feature (651)..(651): n is a, c, g, or t
tagatcaacacttttctccagggttcaccatgcaggcaacattaccttgtctttcaaaagacacctgccttatgcaaggggaaacctgtgaaagctgcactcagagggaggagtttttcttacataatttgcaatttcaggaatttaatttataggcagatctttaaatacagtcaacttacggtgcacagtaatatgaaagccacactttgaaggtaataaatacacagcatgcagactgggagttgctagcaaacaaatggcttacttacaaaagcagcttttagttcagacttagtttttataaaatgggaattctgacttacttaaccaggtttgggatggagatggtctgcatcagctttttgtattaacaaagttactggctctttgtgtgtctccaggtaactttgcttgattaaacagcaaagccatattctaaattcactgttgaatgcctgtcccagtccaaattgtctgtctgctcttatttttgtaccatattgctcttaaaaatcttggtttggtacagttcataattcaccaaaagttcatataatttaaaaaaacactaaattagtttaaaatgaagcaatttatatctttatgcaaaaacatatgtctgtctttgcaaaggactggtagcagatnacaataaatcctttactttaatcaaaaaaaaaaaaaaaaaaaag

SEQ ID NO: 51805 - DNA, 703 bp, Homo Sapiens
ttttttttttttttttttgaaactccgtctcaaaaaaaaaaaaaaaaaagatgtttttcatttttttcatgttatctatccaagcactgttccatggtcagcaagtcatatttcataatgtggattttccaaaataattattgaatacagctattctatggctacttttagtgtttttgtggtatgtggtgtgggagtgtttatggaattaccagtatcttaaattttcaaaggaaccttggaagtctatcactctaaatgaaagtctgtcactctacatgaattatgtgctcaaatttgaccaactcagtttaagacacaaaacagtaatttgaagaaggaaaaatgaagagagtttctagtttaatgggttaaatttttgttgttgcaatagtaagtttagtcttcttataatatttctaaatgaaaaatcataggtatttgttaccatgtgtgaagattactttgttaaaagcaaaagtggtcgtgtgatatgctaaatgttaattactgattttatatgtttaaatcacgccaaacaaattatgtctgtgccatccagggtctgttgttaatctttttctgagtacttggattgggataaagggcttgtactatgcactttttattaatgaataaatagaaaacgttaaaaaaaaaaaaaaaaaagcctacagccgcggcccctcgtgccgaattcttg

SEQ ID NO: 51806 - DNA, 617 bp, Homo Sapiens
  misc_feature (610)..(617): n is a, c, g, or t
tccccaagtggacacatggctgtgcaggccaggaggccacagatggactgagtgctgggaaggggcggctgcgaggggtatcaaccccccgagtctctccctgaaggggagcaccgggcgagtgcatgtgctactgctgctacaggcctgtctatctgtttgtctgtctgtgtgtctgtgacagtcagggaaggatgcctcggagctgaggtggggtgagacagagtgggagagattacggcatggcatggaggggcccaaggagcaggggctgttgacaaaggccttaccaggaagggttaggacactgaccattctagaaatgggtttcgaatggcacaacactttctatttcacaaaagaccaaaagccagaggccccaggctctgtgctgatgaacagcctggctgagccctggccctggcaggtttagggcccatttggggcccctccttctctgtcagggctggggtgctctgtctgggaatgagggattaaccaagtttggtgcaggagcaggggcagggggccactgtatgagcgtggagaaatttggaaacacctatttcttaactcaaataaaagtccagtttgtacctaaaaaaaaaannnnnnnn

SEQ ID NO: 51807 - DNA, 597 bp, Homo Sapiens
tggtggggaaggagcggcggcctctttccttggagggtccctgattcctgaggatcctccccgagccaggcacgggggaccacagggctgccgtgagcacccaccctggttctccaggcccctctgtcccgaggcagggcctgaacctcgggctcctgcctggaccagtgacagcattggggagagaagcactgggggtcttcagaccagccagcaaggggccgtgccagtgcccagagagcaggtcagacaacaggcaaccctgaggcagctggctccctctctctgccctgcagggcttgccgcagggcgtgaggctccccagccacagccccctcttacttgccttaaaactggagagaggaatctagtatttgcacttagcaaaatatttaaaaactgaaaaaattgtgcatgatctgtcactttgtataaaaacaagaaacgattagttcattaaactttttctttaccttctggtagtaaaaatagataaaataattccgtttcaactactgtgtgtaaaaagcctgtatcatatgtaactgggacttttgtaaataaatgtttgtgcgctctgaaaaaaaaaaaaaaaag

SEQ ID NO: 51808 - DNA, 1063 bp, Homo Sapiens
cccacgcgtccgggaaaacccattgaagttaacaacggacttgggaaatctcaggctaagaacaacaagaagcctccccctgcgaaacctgttattccaacagcagcaaagcgaattgatctttatgcaagagcattgtttcctttctgcttcttgttcttcaatgttatatattggtctatatatttatgataaatcttttccatttgtacaaaataaaattccatttcattgtgacctactcctttcataaatgccaatctgtgagaacttttgaattttcatagcaacattgcattttggatgccatttgattgtaataaaactgtggcaccttaattttgaatggcaacatgatcatgtaatatctgtgctctaataacgatgtatatatgtatagtgaacatattgcttagtaacaaatgaaggacaagcatactacataatataatccatacaattctcttcagttagtgtaaactgcaaatactacagataattctgataataaaatgatatgcacgctgaatcctgctatggtcaccattctaatgtatgtagtatttcaaatttccttccttgtaactttcaaagaaagccatcttattcttgtaaaattttagatggtattatcacagatttacacaggttgtattacatattggtttaaactgtgtcagttagaaatatatccggtataacttataccggccctggcggaaataacagttcaagcaatatttattctgttacacaccacaaacacaaacacaaacacacacaaacacaaaagagaacggggccacaaactacccccccagagggaccaaaaaaaaagaaaaaaacacactgtaaccaaagaagcacaaaaaagaaacgagataaagaaagacagagaagcgaaacaaaacaacaaggcagacaacaacgcagcacagcaccgacacacacaaggacgggagacgaaaaacaccacagacaacaaagcagaagaaacaaagaacgatgaaaaaaacacacacaaaggataaaacaaagcaaaactagagtgaaacaccaaaaa

SEQ ID NO: 51809 - DNA, 594 bp, Homo Sapiens
catcatcatcatcatcatcatcatgctaatacgactaactatagggctttcttggctttggcgaaggtcagtgtacagacattccatggtaccagagtgctcagaaactcaagataggatatgcctcaccctcagctactccttgttttaaagttcagctctttgagtaacttcttcaatttctttcaggacacttgggttgaattcagtaagtttcctctgaagcaccctgaagggtgccatccttacagagctaagtggagacgtttccagatcagcccaagtttactatagagactggcccaggcactgaatgtctaggacatgctgtggatgaagataaagatggtggaataggttttatcacatctcttatttctcttttccccttactctctaccatttcctttatgtggggaaacattttaaggtaataaataggttacttaccatcatatgttcatatagatgaaactaatttttggcttaagtcagaacaactggccaaaattgaagtcatatttgaggggggaaatggcatacgcaatattatattatattggatatttatgttcacacaggaatttggtttac

SEQ ID NO: 51810 - DNA, 659 bp, Homo Sapiens
ttttttttttttttttttaactttgaaagttaactcttcaaatgggagactctttgaaatgacatgttcctttaaggtactgaagctttatttgcatatttatttcagatgtttcgagtaaacttgaaaagggtaggcacgaagcaatttgttgctgcttgtcacccccaagtccccgtggaggttctgtattttaagaaacagtgcgttgagtgtacagattttatttatgcgtaatttaatggggtctgtaaatactggtgcacttcttacgacttttttgagacatgggatccaattttaatattaacttttaatggtgatggggtaatctataacacatcataaggttttattcatatatatacagggtattaagaattaagaggatgctgggctctgttcttggcttggaagattctatttaattgaaactctctgttcagaaagcaataactttgtctcgttcctgttgggctgaaccctaaggtgagtgtgcagtacagtgtgtgtgggtgaaatggagatttggaattgaactctctgcctgtaaatgttccccaaataattgttgtgtgtatgatacgtgtataataaaagtattcttgttagaaaaaaaaaaaaaaaaaaaaaaaaagcctacagccgcgcctcgtgcc

SEQ ID NO: 51811 - DNA, 590 bp, Homo Sapiens
ggcacgaggtttactattataaccactttttaggaaaaaaatagctaatttgtatttatatgtaatcaaaagaagtatcgggtttgtacataattttccaaaaattgtagttgttttcagttgtgtgtatttaagatgaaaagtctacatggaaggttactccggcaaagtgcttagcacgtttgcttttttgcagtgctactgttgagttcacaagttcaagtccagaaaaaaaaagtggataatccactctgctgactttcaagattattatattattcaattctcaggaatgttgcagagtggttgtccaatccatgagaatttacatccttattaggtggaatatttggataagaaccagacattgctgatctattatagaaactctcctcctgccccttaatttacagaaagaataaagcaggatccatagaaataattaggaaaacgatgaacctgcaggaaagtgaatgatggtttgttgttcttctttcctaaattagtgatcccttcaaaggggctgatctggccaaagtattcaataaaacgtaagatttcttcattaaaaaaaaaaaaaaaaaagatat

SEQ ID NO: 51812 - DNA, 1065 bp, Homo Sapiens
  misc_feature (652)..(652): n is a, c, g, or t
  misc_feature (846)..(846): n is a, c, g, or t
  misc_feature (850)..(850): n is a, c, g, or t
  misc_feature (870)..(873): n is a, c, g, or t
gtaaactgaagggtagccctgacctgtgtggacacacaggtgggtcataatgaggtagctaaacggttgtgccactgtgaatgtctttcctagtccttgggaaactgcctgccacgtcccaggtttggtgagcattgtgagtgctcacactctgctccactcgctcagttccactgcacatgcaggcaggtgtgccgagcaggtagggcttgctggcccctctgcaccagcaggcttcacttcttaggctcccaggtcggcccctggagactctggtttttaagaaatgcacacagctacagaacacacaaccttgcataaagagggtttgtggactcagctgaagaaatccaagtccaagacatatggaattaagcactccttccctcaaaatttcccctggtggttaatatatcaaaagccatttcatctgatttcaaatagaagctgaaaattaagttcacacttgttagattttgtgtgtaacagtgttgtacctggacagtattagaaatttgtatgcttattctcttgttaagtgttttaaaatgtatgaaccaccaaaaacactatttcttgaagaggtctgtttattactaatagaatggtttctcatcctatggtggccctgttgtgtgatgctgagggctangctgggtctgtgcccagcaccctccctgctctcttcctggacacaggcagcaagttgaatatcttttaatttgttctttggggcaaaataatctatcacgttagaagggtgtcccattaaagaacagtatttccctgcttgagtgtgttttctcctgtgctccttagagcccctgtgtctgtgaacatgggggntttngggtttgggggttttttttnnnntttttttgttttgtggggggttgttttggttggtttgtgggcggtggctgttttttgtgggggtttgttgtgtgtgggcccggggggcccggtgctcttcgtgcgcgggctctccgctctccccctcggggtgcctctcctcccccggttctttgtgtgtttctctcgcccctcccctcgcccctctcctgc

SEQ ID NO: 51813 - DNA, 623 bp, Homo Sapiens
tggtaccggtccggaattcccgggatcacacctacgagggcctggacattgaccagacagccacctatgaggacatagtgacgctgcggacaggggaagtgaagtggtctgtaggtgagcacccaggccaggagtgagagccaggtcgccccatgacctgggtgcaggctccctggcctcagtgactgcttcggagctgcctggctcatggcccaacccctttcccggaccccccagctggcctctgaagctggcccaccagagctgccatttgtctccagcccctggtgtccagctcttgccaaagggcctggagtagaaggacaacagggcagcaacttggagggagttctctggggatggacgggacccagccttctgggggtgctatgaggtgatccgtccccacacatgggatgggggaggcagagactggtccagagcccgcaaatggactcggagccgagggcctcccagcagagcttgggaagggccatggacccaactgggccccagaagagccacaggaacatcattcctctcccgcaaccactcccaccccagggaggccctggcctccagtgccttcccccgtggaataaacggtgtgtcctgagaaacca

SEQ ID NO: 51814 - DNA, 399 bp, Homo Sapiens
ggtcgactttccggagcctgtggggaccttatgctggctgggccaagcggtgctgttcagtgccgacctgcgccaatgccgccatgctcaggagccaccagcaaagcgcagaaagggttccaaagggccggaactaggatggggcaccctggacaaagaaattccccaagcaccttcccctccattccccacttctctctccccatccccacccagtctcatgttggggaggggcctccctgtgactacctcaaaggccaggcacccccaaatcaagcagtcagttttgcacaacaagatggggtgggggatattgagggagacagcgctaaggatggttttatcttcccttttatttacaagaagggaacaataaaatagaaacattttggtatggaa

SEQ ID NO: 51815 - DNA, 670 bp, Homo Sapiens
  misc_feature (411)..(411): n is a, c, g, or t
ggcgccatggacgtggccctaaacgctgtgggagagggaagaggaggctgggcctcgctgccctcttgtctctgctgacttcagcctggtcatgcttgctctgccacttgcgatttcatccctaatttcttcctccaccatgcctgcagacttttccctgggcttgttttttctcgcacatctctgaagagtttttaatcttcagctcatcatgtcccaggaagtggcatcataaaaggaaatattttttttttcctaggagcagtgttaaaatctgggtcacattcctgaccaaggacagcatcctgccttctgcccatccccttcagttcacaaaagctgacattttaaacaaatcatgactcacacgtattaattggttataaatatgttgtgtacactggttagatnaaacttaaggccacaaggagggcccaggtaggcgatgtcagtgtgtgaaggggctggattgggcgtggtgaggatgttggcaaaccagtgcatgcacctggttggaagatgctcagcctcacaaaagctccaagccctttgggagccaaagtgtctgagagtgtgaccctctcctgtaaagtatttatcccacccattaatataatttctgtataataaacttgacctgaaattaaaaaaaaaaaaaaaaaaggacgcg

SEQ ID NO: 51816 - DNA, 601 bp, Homo Sapiens
gattgatttaattatgggccctaatgggaagccttcttgggacgacaaatgcaaaatgccttatactgaggcagttttgcatgaagttttaagattctgtaatatagttccattagggattttccatgcaacctctgaagatgcagttgtacgtggttattccattcctaaaggcacaacagtaattacaaatctttattctgtacactttgatgaaaagtactggagagacccagaagtgttccatcctgagcgatttctggacagcagtggatattttgccaagaaggaagctttggttcctttttccctaggaagaagacattgtcttggagaacacttggctcggatggaaatgttcttgttttttacagcattgcttcagaggtttcatttgcattttccacatgaactagttccagatctgaagcccaggttaggcatgacattgcagccccaaccctacctcatctgtgctgaaagacgctgaaactgcctgggatgttttcgggaacaagaatgtatatttgccttatccctgaacttggtttaatcaaatcaatgtgtgtattagaataaaagtcacagcatcaaaaagcca

SEQ ID NO: 51817 - DNA, 730 bp, Homo Sapiens
  misc_feature (696)..(723): n is a, c, g, or t
gggacttaaggatcagcaggagagagaaatcattcacgttctcatggattgctgccttcaagagaaaacttacaatcccttctatgctttcctggctagcaaattctgtgaatatgaaaggagatttcagatgactttccagttcagcatatgggacaaatttcgggacttggaaaacttgccagctacgaatttctctaatttggttcatctggtggcccacttgttgaagacaaaatcgctttccctttccatcttaaaggtagttgaattcagtgaattggacaaacccagagtccgttttttacgaaaagtattaagtatcctattaatggaaacagaagttgaagacctcagtttaattttcacaagagtatctgacaacccaaagctgggggtgttacgtgagggtttgaagcttttcatcagccacttcttgctaaagaacgcacaggcccacagaagcgccgacgaagccaacgtgctgagagagaaagctgaccttgcaacgaagtgtctgcaaggaaaagcttccctgagaatgtagtcagggaaggaaggagggcaggtggccctttgactgtaaaatgtccttggtaaacccaaaggcttattctgttgcctgcgtgtgaatgtttggtagagctatatcattgtctgttaatgtattatattttgagatttttttttgcaaannnnnnnnnnnnnnnnnnnnnnnnnnnncttgtcg

SEQ ID NO: 51818 - DNA, 882 bp, Homo Sapiens
  misc_feature (619)..(619): n is a, c, g, or t
  misc_feature (694)..(694): n is a, c, g, or t
  misc_feature (873)..(873): n is a, c, g, or t
atgaatgtgagctggtcagctgatcacagagttattgatggtgctacaatgtcacgcttctccaatttgtggaaatcctatttagaaaacccagcttttatgctactagatctgaaatgaagactgataagacattcttgaactttttgagcttccaaagagtatgtaaaccctagctgtgccagcacatgttcatctttacaatttatattgtaaatgatttgtatcgtatgattaaggatctaaggcacaatatttgtcactgttctattagactttttactgaaaatgaataatggtgtaatggttctcctggggctgtcacattttataggtcagagtgtgacttcttaatatggtgctgatgtttttgtgtcaatggcttgaaactggcaagattaacaaaattaggccgggcatggtggctcacgcctgtaatcccagcactttgggaggcccaggtgggcggatcacctgaggttagaagtttgagaccagcctggccaacatggtgaaacctggcctctactaaaaatacaaaaattagccgggtgtggtggtgggtacctataatcccagctacttgggaggctgaggcaggagaatcgcttgaacctgngaggtggaggttgcagtgagctgagatcgtgctattgcactccagcctgggcgacagagcaagacgccatctcanaaacaaaaaaacaaaattcatgttactaaaagacaggtagccatatacagacagtatatgcccctattttttttaactggactcttaatgaaactttaattttactttaataaagaaatgggaatttatatacaaaaaatatttttccattttccgtttattatgggctaattggtggnatggaaata

SEQ ID NO: 51819 - DNA, 560 bp, Homo Sapiens
  misc_feature (19)..(19): n is a, c, g, or t
tgtctctttgcaagaaagntattaatccggaaaacttcgaacttctacaagaatattataagatatttatggaaaagatgcctcctgattatatttcacattttcaggaacaaaatgatttaaaagcattgctagaaaatctccttcaaaatatccaatccaaaaaaagaaagaatgtagaaattatgtggctggctgcaacgatttgccgcatactgaatggtattcgtttcacctgttgtaaaagtgccaaagacaggacatcgatgtcagtgacacttgaacaatgctcaatcttgagagatgagcaccagttacacaaggacttctttatccgagcgctggattgcatgagaagagaaggatgccgcatagagaatgtactgaagaatatcaaatgcagaaagtatgctttcaacatgctacagctgatggctttccccaagtactacagacctccagaggggacttatggaaaagctgacacctaagtttaccaacatgttaataaacaggaacacaaatacatttcagttggataatcttcaaaaaaaaaaaaa

SEQ ID NO: 51820 - DNA, 588 bp, Homo Sapiens
aagtttcttcatcccaatgcatggccatgatttacacagacgtgcctagcatggctcatcaacatctgaacggttgttccctaccatgcctctgcaggcattccacagagtcaggagatgggttcacaggtaaagattgggggctttagtggcttgtaggggacaactgctcagttgcagggagagggagcatttctagaaatagccagattttgctgcccaactagatctgtcctcctggttttagggggcccttcttgatcccctctgagtgactgagggaggttacattgtaaaatatgtccatgagccaaacaggcttatggaaagttcttctacacacaaaaaaattaaagctctcctctccccatccccaaccactgctagaaaattggccataatgaaactgacttgacaggttaaaagaccctgtcctagatgcccaggaatcaggtagtcacacattttatggacttcatggcagcgatgagtaatctgtgatgatactaaatagaagcaataataactaactccattaaatgtcacgcttgattgtctgtttttataaaaaaaaaaaaaaaaaaggac

SEQ ID NO: 51821 - DNA, 581 bp, Homo Sapiens
ggaatagtggtggagtcaaaccatgactcgcacatggcaaaagaacgggcccacagtacagcctcacattcttcttccaattctgaagatacagagatgtgatgaaaacaagtaatagctttggctgtttatttgatagctgtttctgggtatttaataggaatcctttctcaaggaatgagttgtgacctgtttactgtctctttagaagaaaaactccactggaaaccattcaccatgtgtgattgtcttctgttatcatttgtcttacaggcggctattgcagacggctaatttatgcttaacttaggaagagataaggcaagagctagatttttttcatgtgatcttttccaagcttcaacttaacttaactacatttctctgtatgatgatgtctcttacttctacaggttccttgagcaccaaagatgattcataactctgtataggtgacagctgcttataaaagcatcttagcagataagcctattaaaattgtgcttttgtacaatgttgtggttgctagaataaataccattaacaaatgccaaaaaaaaaaaaaaaaaaaaaaaaaaaaa

SEQ ID NO: 51822 - DNA, 781 bp, Homo Sapiens
cacgcgtccgtctgctaaggggtataatttgctagtgagctaaaacaatataacctttgtagatctttatatgtacaaaatatatagtctgttgtacttgagtaatttggtctatggaattttaaatgccttcatttagcagtaatattcacatttttattttagacagttaagttcatgtgtttgattttgtcatgtcagcataaatgagaaaaagaagtggatcatgcagctaatgagtaaccaacattttgtaaagttttaaagttttagcaaacaacattattccatctcatttaaaggttaaaaaagaagagacaactctagccaaagtagaaatttatattctacacgtccaaactgtctcctagcagcttttggactatatatcacttgatgttaaagtatcttttatttgtaataaatattcaaatttctatttagaagctctaatgtatacctagattaaatcaaatcacagttttatgcttttaaaatatatgtatttcaaactgtatattttaatttctgagtgcatgttatatagtatttaatacttcagatgtcttggcaaattcaatataagtatttattcccacaagcgatatatgggatatctcttaaaaattatgaatatgtaccatttccttcaaagtcatcctagcctatgctgtatcaaaagtattgtatattttatggagatttagtgatatacatgtaaatgttttttaagttattttattgaagttcaatctttacataaaattaaaatcttttttta

SEQ ID NO: 51823 - DNA, 954 bp, Homo Sapiens
  misc_feature (762)..(762): n is a, c, g, or t
aaagttctgggaaacaggggtgagccactgtgcccggccataattttatatttttagaaaataaagaatgaaggacaaaagagcacagctaaatgaaactgctgctctaatttattccactggaaaggtctcaggactccttaactgttttccaggtttggctcttcatatctaacctgtgctaaaatgagaaggtatgctaggtgctgttagaaatcacaccatttccaaagaacccaagtagtatagagaccaaaatgaggcaaaaataaaagagatgaaacaggagagtttatttcttgcatactttccgaccttcatcatacaacctctcctaacctccctgtagtctttaaaatgtttaacttgcctataagctaacatgtaataaaacacatactcaattatatgaatagaagtggagagccagaatgctacaaaagaaatcacagctgctagaagtatcctccatagaaacatcaacatgattgtggatcaaaatgattttcactggatatggaatttgtatgggccatatttattaaaagagttctgtgtggtcacatagagttcctttgggatttcatcccacttttcaggacttaatttgtttgggtttgcttacctaacaagcaacaacaacaacaaaataaatagtccccaaaatctagtttattacataaatctctatgaatccttgagggcctatatctatattataaataaataccaatatagaatttttaaatatctatgggactntggccgtttacagcccttaagtataaaattacgaggattatatttcttttccattaacccttttattttctggctaaacttttttaaagaactgggaacatttctgggggaatggttgtccaaaaagtttgaagttttggtttttttcccctgggggaattataaaaaaaaattttgggggggaaattggcc

SEQ ID NO: 51824 - DNA, 1128 bp, Homo Sapiens
  misc_feature (601)..(601): n is a, c, g, or t
  misc_feature (640)..(742): n is a, c, g, or t
  misc_feature (744)..(749): n is a, c, g, or t
  misc_feature (751)..(755): n is a, c, g, or t
  misc_feature (757)..(759): n is a, c, g, or t
  misc_feature (761)..(777): n is a, c, g, or t
  misc_feature (780)..(783): n is a, c, g, or t
  misc_feature (786)..(789): n is a, c, g, or t
  misc_feature (791)..(794): n is a, c, g, or t
  misc_feature (816)..(818): n is a, c, g, or t
  misc_feature (841)..(841): n is a, c, g, or t
  misc_feature (857)..(857): n is a, c, g, or t
aatgactctgatgatagcatctcagcagcaaccaacaaaggaagaggccgaggaagaggtcgaagaggtggaagagggcagaattcagcatcgagaggagggtctcaaagaggaagagcctttaaatctacaagacagcagccttcccgaaatgtcactactaagaattattcagaggtgattgaggtagatgaatcagatgtggaagaagacatttttcctaccacttcaaagacagatcaaaggtggtccagcacatcatccagcaaaatcatgtcccagagtcaagtatcgaaaggggttgattttgaatcaagtgaggatgatgatgatgatccttttatgaacactagttctttaagaagaaatagaagataatatatttaatggcactgagaaacatgcaagatacaggaaaaatgaaaatgttacaagctaagagtttacagtttaagattttaagtattgtttcctgagcataactccataagtaagaaatttctagttcacagacatacaatagcattgattcaccttgtttttttaacctggttgttgtaataagagctttgtttcaatatcactcttgagtaaagattanaataaagctaccattttacatttctatttcataatgaannnnnnnnnnnnnnnnnnnnnnnnnnnnnnnnnnnnnnnnnnnnnnnnnnnnnnnnnnnnnnnnnnnnnnnnnnnnnnnnnnnnnnnnnnnnnnnnnnnnnnnannnnnncnnnnngnnncnnnnnnnnnnnnnnnnnccnnnnccnnnncnnnnccgcccccctcccccccccccnnnctcccccccccccccccccctcnctcctcccaaaccctnccggggggggcacacctcccacccttggcacccggggcggagagccaccccccccccggggcggggccccttatgtggcaaccccccctcaaagaggattacaatcacccccgcggggtttgtaccgttcttcgccggccctccgcgggggccacaacagagtggccatattgccctccactttgcgagaagtacctccctcttcttggcgggggcggcttcacagacaaccccctatacacccctacgggttaccgcgaaccattcccct

SEQ ID NO: 51825 - DNA, 739 bp, Homo Sapiens
gaagcccctgtttgccaggcgtgaaaaaatacctcactgtgacctacgcatgtggtataaacttcgacccaagcggatcgaaggttctgaggaaagatggaattcttgttagcaactctctggcagcctttgcttacattagagcccacccggagagagctgccctgctgttcgtgtccagtgtctgcatcggcctggccctcacactgtgcgccctggtcatcagagagtcctgtgccaaggacttccgcgacttgcagctggggagggagcagctggtgccaggaagtgacaaggtcgaggaggacagcgaggatgaagaagaggaggaggacccctctgagtctgatttcccagggaactgtcggggttctgtaggacttcatatcctatatacagttccatagaagctgcagagctcgcagaaaggattgagcgcagggagcaaatcattcaggaaatatggatgaacagtggtttggacacctcgctcccaagaaacatgggccagttctactgaaaaccacatgcatcttgatgcgatcgcactttctgaagaaggaaggatcccaaatgcccctccagttctggttcacctgtaccttctatgaaggagaattcgtcatgtcattcaacactcgtgaggccaggaagctattaagggatgtttcaagctgtttctagcacattccaaataaatgaggacggaagagttcaaacacacaacacaaaaaaaaag

SEQ ID NO: 51826 - DNA, 795 bp, Homo Sapiens
ctcctcccaactttcattgtcttggcatctctcaaccctcagtcctctcttccttcccttctttatcatctcccctttcctctccacgtcccgcccccttcctcttcctgcctcctcatctcccttaagcatcctcttctccaacctcccgtcaccgtttactctgcaaaactgacagcacttagacgaggcttgggggcagggagcagtgttgggagagggctccccaaccccaggctcggactgttctctgctgggaccacccagggtcggacacccaagggtgcctggcaggtcgcagagttggcaagccgggcctcgtatggggactcgggtgagggtggcgagtactggttccgaacgcacgcaggggagaagggagggacgcggcgctgacccttccaggtcagctggagttgacccgcccacctgggcttttcaaccccagtccgcgagtttytttcttgaaggtgtgggggctagattcattcacgtgcttcgtaatgaaataatccaaaaaataggaccaaagcgcccactggcaggagcgagggcggggcgccgcgctctataattattttctaagatgatgggggaggttcgttgcacgcgacasccgctgaggaggcggggaccgagctacaacgcggttcggatttggcgggggtttttttccttaaaaaaaaaaaaaaaaaaaaaaaaaaaabtctgggggaagaaaaamctaaaattcttaaaaaaaaaaaaaaaaaamggstttttttdaawbtgwtttytcyttttttttwtccsgga

SEQ ID NO: 51827 - DNA, 868 bp, Homo Sapiens
  misc_feature (769)..(769): n is a, c, g, or t
  misc_feature (868)..(868): n is a, c, g, or t
cacattactgtttgagggggatcgtgagaaggttcttcaacatgaaaaacaagtgtatgatattgctgcaaaatttggtgggttggcagctggagaagataatggacagagaggttatttgctgacctatgttattgcatacattcgagacttggctttggaatactatgtattaggagaatcttttgagacttctgctccttgggacagggtggtagatctctgtagaaatgtaaaagaaagaataacaagggaatgcaaagagaagggtgttcagtttgctcctttttctacatgcagggtgacgcagacttacgatgcaggtgcttgtatctacttctattttgcctttaactacaggggaattagtgacccactgaccgtatttgaacaaactgaggcagctgctagagaagaaatccttgctaatggagggagcctgtcacatcaccatggagtgggcaagttacggaagcaatggctaaaggaaagtatctctgatgtcggctttgggatgctgaagtctgtcaaggaatatgtggaccccaataacatctttggaaacagaaaccttttataaatccattagtaccattacaaaaaaatgtcaatttttttttttaagttttcaactgtggttatactagtaatcaaatatatcatggactatattttggatacatttgtttctttggtttaaaataagtttgttttcattctgtagtttgttttgtttctacatctatggattgacagatagtattcctanatctctctcattgtaggtacatcattttacattcagcggttgtcatttcaaattttagtcaggcagcacaaagctgtcaattatttccgaggaagctgn

SEQ ID NO: 51828 - DNA, 550 bp, Homo Sapiens
acgcgtccggatgaaccaggggtctggccccatcgggtcacaggtgatggcaaatagaaaagaagcaaatggaggaaatagtcggataagtaggtgacgtgaaaggcaggacctggtcaccccagcaagtgctatggacagttcccggaaacggttgcccacttcacaggtccatgggtctgacccttggactctgccaggatcaactgcccagagtgccagagttttagccaaaggtgtacttacttccttatttatctgcaaaaggatggaaactgtgggagtcaaagcctattttgctgagtgttcccactggagtctctggtagaattagcaggtcatgctgtcaaaatcatggacaaaggctgggtgcagtggctcatgcctataatcccagcactttgggaggccaaggtgggcggatcacctgagctcaggagtttgagaccagcctgggcaacatggggaaactccatctctacaaaatatacaaaatattagccagccatcgtggtgcgcgcctgtggtcccagtttcttgggaggctgag

SEQ ID NO: 51829 - DNA, 608 bp, Homo Sapiens
atttctcaccatccatggagataatgcaagtcagaaagtagcaagacttagtgataaaactgggcctgtagctcaagagaaaagttgacacctgagaaacatctagaaattgcctatcctgctgttctagcacttcatctggctgcctttgcagtccttttactacagctatgaagaaacgcaacaagaaactcaatgcacaacaaaggattaattgctgcaaggacattcttgtaaggctttgattagttttcttgttgctttgttgcactgaaatggaattcccatgcccctaccccttaccccagttttttgaacatggaaagaaaatttaataactttttaaagtgacataatttacatgcaatatgtttatcaactcaagaatttaatatagttggtacacaactagttttgtttataaattggagatgcaaatagcaaaactaaatacttgctccatttacaaactacttgattttattgtacaagttgaaatatgctcttttgtttgggttacagtatgcttgctctaagtcaaattccaaggaactaatttcttctcctggagttgcattgattcagtattacaaatatatagcacatca

SEQ ID NO: 51830 - DNA, 901 bp, Homo Sapiens
  misc_feature (655)..(655): n is a, c, g, or t
  misc_feature (764)..(764): n is a, c, g, or t
  misc_feature (841)..(841): n is a, c, g, or t
tgaccatgctgagatggagctgcgccgaggccagatcctctggttccggggcctgaaccgtatccagactcagatcaaagtggtcaaagcgttccatagttccctccacgaaagcattcagaaaccctacaaccaaaagtccatccacagcttcatgacccaccctgaattcgccatagaggaggagttgccacgaacaccactcctggatgaggaagaggaggaaaatcctgacaaggcttctaagtttgggactagggtgctcctgttggatggtgaggtcactccatatgccaatacaaacaacaatgcggtggattgcaaccaagtgcagctcccccagtcggacagctctctacagagcctagagacatcagtttgaattttctttctctgactctcatccctattttacctatttccattttcgtctatcccatctatgaggtgatgatgggacttttcattgtcacgtcagctgctgtgttaacagcagtgtgtgtgaagtgaacctctacctgaccatgaagaggcaagagcacagacttacaaggatttcaacttaagcttgacttggggtttgtagcgggacccagtcaaaccccattcaggtcatggtagaatctactccttggtagtcacttgtcatttttanagaaatgatgacaatcctcttggcatcaccccaccccacattctccccgatggtcctctcctgaattctggattttgtcctacaagtctgtgccatttataagctaagntgagggttcagagggagacaaatatcccccaagtgaatatgttgcgggtagagatggaatgtataaaatcccgccantagtgggattgttttttcattttttcccactttgaaaacttacaccttaaaggcctgtag

SEQ ID NO: 51831 - DNA, 678 bp, Homo Sapiens
agttcactagtctgtggggtcctggagcctgtctcttctttctggaggttcaaactgaatagcaataattacgttacccaaagcatgtggaggaaaagtgaaaccagccacggagacgctggcccacgggctcggcctgcggtgtggcctgctttgctcaccagcgtcagccgctcatttccttctcatgaagtcccatctggtcatggggacgagggccgggagggcaccgggtagccttttcacacttggggattaggggagtgagaaaagatttgggccatgcatgcaaagtcaaagtttaaaattttatccttttcaaatagatgatataatatacctatacatgatataatatttgtatatatgaaatctctctatattgtttaatttgagccattcaatctaaaccaatgtacaggtgtacaatgaaaaatttaaatgcttagttatttttcccaacacagtgtaaagtcaccctcctctgagagtgggatgtgcagagtttgatgttgcagctttgctcacttcctggcaagggcaggtcatgcctcaatttgtaatgggagtctggggtacgggtgggggttgaaagttgttatctttaaatacatgtacaaatcgttgtcaaagtaccgttattaaatagatttattatccctgaaaaaaaaaaaaaaa

SEQ ID NO: 51832 - DNA, 707 bp, Homo Sapiens
  misc_feature (699)..(699): n is a, c, g, or t
  misc_feature (707)..(707): n is a, c, g, or t
ttctgttcagaattttctggaaattactccctttcacatggttgaactcttaagttgaccagttctcatagctctatcactagaatggtttgcagataccccaaacatactatgataaaatcaaattgtgctacttttgacccatgtaatttacctaaaagttgtaattgctgacagagtactgccttgaattttggtttaaaacctctctagtttcaatgacaagtaacaactcaaataattccatattgtttgaggaagaggccataatccttctgaattgttggcactaagtaatgggatttggcccagtaagtatgacggtcgtgtcgcctaaccaacgcagagcagtgctttttgtgtggctgaagcgatgtgctgacgaaaaaaggaaaattctaggacaatcgttggctaaaaatcaccttaggatgaaaaatttgaggcaaatttttttaaatgacagaaaaagataatcatctcacttgcttgaaacaggagccagcatgatctctggaagcatcaactatccctcgtcgtgattgttgaaagctctttcactgttttgcattctagtttgaatagtttgtattgaaattggattcctatcttgtgtatgtttttggtgcgtaaaagggaaaaattggtgtcattacttttgaaatttgcaggacgaagggcatgcttttggtttgctgnaagattgn

SEQ ID NO: 51833 - DNA, 825 bp, Homo Sapiens
aaagcctctgtccgcctttacagggagaagacaacagaaagagggacaagagggttcacacagcccagttcccgtgacgaggctcaaaaacttgatcacatgcttgaatggagctggtgagatcaacaacactacttccctgccggaatgaactgtccgtgaatggtctctgtcaagcgggccgtctcccttggcccagagacggagtgtgggagtgattcccaactcctttctgcagacgtctgccttggcatcctcttgaataggaagatcgttccaccttctacgcaattgacaaacccggaagatcagatgcaattgctcccatcagggaagaaccctatacttggtttgctacccttagtatttattactaacctcccttaagcagcaacagcctacaaagagatgcttggagcaatcagaacttcaggtgtgactctagcaaggctcatctttctgcccggctacatcagccttcaagaatcagaagaaaggccaaggtgctggactgttactgacttggatcccaaagcaaggagatcatttggagctcttgggtcagagaaaatgagaaaggacagagccagcggctccaactcctttcagccacatgccccaggctctcgctgccctgtggacaggatgaggacagagggcacatgaacagcttgccagggatgggcagcccaacagcacttttcctcttctagatggaccccagcatttaagtgaccttctgatcttggaaaaacagcgtcttccttctttatctatagcaactcattggtggtagccatcaagcacttcccaggatctgctcca

SEQ ID NO: 51834 - DNA, 582 bp, Homo Sapiens
agtctccgcccggcgctcccgggatcagctggcgggcgggcgggagccgagcgcggccccggctctcgctgcagcgccgcctcttctctgcgtcgcaggccggcccggcggccgtgacaatgtcgcggggctggtagcagggcgccggccgccgagccgtctcaagtttaaacttacacgaatcgctttctggaggaggaggggacccgctgcgcgattgacacgcatattcctataggcatcctccctcagcccccacccccacggccggattcgggtggctcctctccgaggtgaaatctgagaagaaatccttggatctcttttcttaaaaaaaaaaaaaaaaaaaaaacttctgaaacccagggggttttggcttggcggccccctatccccaaaaaaaaaaagtttttcaactcccgggaaaaccaggggggttttggcctgggctccggctccagggggggagggggcaacacctcggccctgggcaggggctacattggaaaaatcttcggcatggggcgaaagaaggtcacagtgaacaaggggttggcgaaagggggattggctattgaattt

SEQ ID NO: 51835 - DNA, 478 bp, Homo Sapiens
gtccgtaaggacttcctgcagaaagtcttttctttactataattgagtaattcatatttagagtcacatgtccagtagcatttctaattttgagcattcaccttgctacctttaaaaaacatctgagttttaagtggcctttttatcatcatacacatgtgcatacaaagaagggacttggcagtttaaaagccacatatattcacttttattgccctaaatttacatgaaacagacatactggcaaactcacatattgctggtgctaaccttatatttcatagtgttggcatattccccttttcttagattcttactccgaaatataggtacacatcctttgctctgtgcagagggaattacatcctttttcctctcctacaaaaacatgctttattaagtatccatcattactttcctttatgctcgctcaatatgcaatgtgctgttattctaccatgtaccttaaataaaggat

SEQ ID NO: 51836 - DNA, 576 bp, Homo Sapiens
  misc_feature (574)..(574): n is a, c, g, or t
ggctaacgaagtatcctgatgaaaaaaggagaaagtttttagagcgaaatagagcagcagcttcaagatgccgacaaaaaaggaaagtctgggttcagtctttagagaagaaagctgaagacttgagttcattaaatggtcagctgcagagtgaagtcaccctgctgagaaatgaagtggcacagctgaaacagcttcttctggctcataaagattgccctgtaaccgccatgcagaagaaatctggctatcatactgctgataaagatgatagttcagaagacatttcagtgccgagtagtccacatacagaagctatacagcatagttcggtcagcacatccaatggagtcagttcaacctccaaggcagaagctgtagccacttcagtcctcacccagatggcggaccagagtacagagcctgctctttcacagatcgttatggctccttcctcccagtcacagccctcaggaagttgattaaaaacctgcagtacaacagttttagatactcattagtgacttcaaagggaaatcaaggaaagaccagtttccatttatgcgaaatctgngg

SEQ ID NO: 51837 - DNA, 576 bp, Homo Sapiens
ctacctcctggccggtctcagcttagcttccctggtgtggggtgtttttcaagccttccagccacagctgtctcccctcaggctggacggctccggggtgacagggcttcaccctctgcctgcagacccctggtgggcacatctcacaggcttccgtcttgctgagttgggtacggaggcagaagtggggtgtggaggaaagtcagagggaaatctgcttcagaaaggaagggtctttagacacaaagactggaggcccttccccgcccgcacgggagctgccatcgtgggtctcatgcacgtcaagaccttcccacatccaaactcagcttccagcagggattttgactttggatgacaaggctttatttgtaaatatgctcttaatatgcaactttgagaataaaatagaaacatcatgtattttaaaatataagatgaagtgtgacgcactgtatacaatttaatatatatttttagggttttgttatttaagaaaatggaatgtaatggtacttttacaaaagagaaaaaatgttatttttactttctggaaaaaataaatattctcattgt

SEQ ID NO: 51838 - DNA, 637 bp, Homo Sapiens
  misc_feature (449)..(449): n is a, c, g, or t
  misc_feature (612)..(612): n is a, c, g, or t
  misc_feature (616)..(617): n is a, c, g, or t
  misc_feature (620)..(620): n is a, c, g, or t
  misc_feature (623)..(623): n is a, c, g, or t
  misc_feature (627)..(627): n is a, c, g, or t
  misc_feature (629)..(630): n is a, c, g, or t
ggagttcttctttgtggaaacttaagatgtggtgtaaatgattctttccaaaattgtccagcagcttgaatgaggcagtgacaattctgaggtggtttattgggagtccttctacatttctcttagataactctgcactctgggtggctattgtgtagccttactgccccagagtgcctgttagccaaatatttcccctctgataggaatattttctaagaatcagctgataacttgcgtgctggaccttgttatctgtgcccctgggagacacacgttttcttggttttgaaaacctgaaacacaggcaactttacattttggggaattagctgatgcctcctgaagcctgaggaggtggcggggaatatgagcggtgctgtctctctcaaaagtgccctttagatgattccccctcctagggctgcctgcaggggctgtaggcttgngaaagattgtgtaggtgacagtgaatcagaatgaagtggtagattttgtgtagatgcatttgtctgctgtaattttttatatatatattaaacttactgtaactgtacagttcatttctgttgtaaaacatcattaaaccatcttccaagtgtcaaaaaaaanaaannaanaanaaananncccatgt

SEQ ID NO: 51839 - DNA, 584 bp, Homo Sapiens
  misc_feature (571)..(571): n is a, c, g, or t
tttacaccgataacacacaggctgctgtaactgtcaggacagtgcgacggtatttttcctagcaagatgcaaactaatgagatgtattaaaataaacatggtatacctacctatgcatcatttcctaaatgtttctggctttgtgtttctcccttaccctgctttatttgttaatttaagccattttgaaagaactatgcgtcaaccaatcgtacgccgtccctgcggcacctgccccagagcccgtttgtggctgagtgacaacttgttccccgcagtgcacacctagaatgctgtgttcccacgcggcacgtgagatgcattgccgcttctgtctgtgttgttggtgtgccctggtgccgtggtggcggtcactccctctgctgccagtgtttggacagaacccaaattctttatttttggtaagatattgtgctttacctgtattaacagaaatgtgtgtgtgtggtttgtttttttgtaaaggtgaagtttgtatgtttacctaatattacctgttttgtatacctgagagcctgctatgttctttttttgttgatccaaaattaanaaaaaaaatacca

SEQ ID NO: 51840 - DNA, 711 bp, Homo Sapiens
ctcgtactccccttcccctatgattgaaaagtaaacaaaacccacatttcctatcctggttagaagaaaattaatgttctgacagttgtgatcgcctggagtacttttagacttttagcattcgttttttacctgtttgtggatgtgtgtttgtatgtgcatacgtatgagataggcacatgcatcttctgtatggacaaaggtggggtacctacaggagagcaaaggttaattttgtgcttttagtaaaaacatttaaatacaaagttctttattgggtggaattatatttgatgcaaatatttgatcacttaaaacttttaaaacttctaggtaatttgccacgctttttgactgctcaccaataccctgtaaaaatacgtaattcttcctgtttgtgtaataagatattcatatttgtagttgcattaataatagttatttcttagtccatcagatgttcccgtgtgcctcttttatgccaaattgattgtcatatttcatgttgggaccaagtagtttgcccatggcaaacctaaatttatgacctgctgaggcctctcataaaactgagcatactatcaagacagctcttcttgaaaaaacacatgtatattctttccttgattgtgtacttgtcccaaataataccttttttagagggagctgaatcccttatacaaatctgatggctccttgcacactttttct

SEQ ID NO: 51841 - DNA, 802 bp, Homo Sapiens
caacgagcaaaaaacctttctgtaggctgagacctctcggtgcacctggtgaccctgggtggaggggacttgctgtgaagtcttcctcgccctctgccctcttgctgcttctccacattgccaggaaaagctgctgacgcctgccctcctctcttgagtcgagggctgaatctttctcctctaagcagtctggtcaggaaccttggtttcttgagaggcccccaagatgccgcagctccagggctcttcctcctcaccagaaatccctgggcttccacaatgtgaactcactcattgtcaggtgtccgtggagtgtttttggcatggtgacctgtctgggcccagcatgttgcagatgtgtatttatgcgcaatggtatgcatatctctgtgtgactgtcagtgttgcaagctggctggatccaaccatctcttctgaaataatgcatccaaagggttgatattctgggggaggtcactgcagaaggatggaactgacctttattccccagtgggcagttactgagctttcctcctcagagccatgctggcagccctgggacagagaacggtgtggctttggctgcctctgcatggaatcttgccccggactcctgaagactgcacaaggaatgaggaagatcagggacaacctgggaactgaataactttcaaagccagtgctcagcttctctgctccgtactagcgtttacaggtcttaattcaaaccagatgcctgtactagtttttagacccccaagtcaacctttctgagccacagctttccgctgggaataatgat

SEQ ID NO: 51842 - DNA, 547 bp, Homo Sapiens
cttttctgtttcctgatggactgtcttccatcgagactcttctgactaacatacaggggctgttgaaagttgccatagataatgccagagctcaagagaaacaggtccaactggaaaaaactgagctgaagatggattttttaagggaaagagaactaagggaaacacttgagaagcagttggctatggaacaaaagaatagagccatagttcaaaagaggctaaagaaggagaagaaggcaaagagaaaattgcaggaagcacttgagtttgagacgaaacggcgtgaacaagcagaacagacgctaaaacaggcagcttcaacagatagtctcagggtcttaaatgactctctgaccccagagatagaggctgaccgcagtggcggcagaacagatgctgaaaggacaatacaagatggaagactgtatttgaaaactactgtcatgtactgaatctttcctgttgaagaaatccatgttatagaaaagaactttgcagtcagacattcgtcatgggaaagttcagaaaaaaataaagtcctttt

SEQ ID NO: 51843 - DNA, 585 bp, Homo Sapiens
tttttgtaaagagctccttccagcacctcctctcttctccttttgcccaaactcacccagtgagtgtgagcatttaagaagcatcctctgccaagaccaaaaggaaagaagaaaaagggccaaaagccaaaatgaaactgatggtacttgttttcaccattgggctaactttgctgctaggagttcaagccatgcctgcaaatcgcctctcttgctacagaaagatactaaaagatcacaactgtcacaaccttccggaaggagtagctgacctgacacagattgatgtcaatgtccaggatcatttctgggatgggaagggatgtgagatgatctgttactgcaacttcagcgaattgctctgctgcccaaaagacgttttctttggaccaaagatctctttcgtgattccttgcaacaatcaatgagaatcttcatgtattctggagaacaccattcctgatttcccacaaactgcactacatcagtataactgcatttctagtttctatatagtgcaatagagcatagattctataaattcttacttgtctaagacaagtaaatctgtgttaaacaagtagt

SEQ ID NO: 51844 - DNA, 530 bp, Homo Sapiens
cctgtgcatgggtgaagggagagccagctcccccgacggtgggcatttgtgaggcccatggttgagaaatgaataatttcccaattaggaagtgtaacagctgaggtctcttgagggagcttagccaatgtgggagcagcggtttggggagcagagacactaacgacttcagggcagggctctgatattccatgaatgtatcaggaaatatatatgtgtgtgtatgtttgcacacttgtgtgtgggctgtgagtgtaagtgtgagtaagagctggtgtctgattgttaagtctaaatatttccttaaactgtgtggactgtgatgccacacagagtggtctttctggagaggttataggtcactcctggggcctcttgggtcccccacgtgacagtgcctgggaatgtattattctgcagcatgacctgtgaccagcactgtctcagtttcactttcacatagatgtccctttcttggccagttatcccttccttttagcctagttcatccaatcctcactgggtggggt

SEQ ID NO: 51845 - DNA, 504 bp, Homo Sapiens
atttctgtaggtaactggaccaagaatgagaaaaataatgaattcttagctccctgattacacctgccaccttggaatccaggactcacacttctgaccctgcctgtctttttggggtttttttgagttggagtctcgctgtgtcgcccagactggagtgcagtggtgggatcacggctcactgcaacctccacctcccaggttcaagcagttctcctgtctcagcctccccagtagctgagattgcaggcacatgccaccacgcccagctaatattttgtattttcagtagggacggggttacaccatgttggccaggctggtctcgaactcctgacctcaagtgatccacccgcctcagtctcccaaagtgctgagattacaggcatgagtcactacgcccggcccatgtctgtctgtcttgatgtgtgagcagcagctgtggtcattaaaccattagtttacccctctagaactggggtctgcaaactcccacctgcagcc

SEQ ID NO: 51846 - DNA, 546 bp, Homo Sapiens
aatttaggtgacactatagaagagctatgacgtcgcatgcacgcgtacgtaagcttggatcctctagagcggccgcctactactactactaaattcgcggccgcgtcgactggggcatataagctactgagtggaacatggagctgatcaagaggccgtaatggtcatggctgtttcccagacctgaatattggggtgcttcttgccagtattctaagacatttgagtaattgctgtttgcacttactgcatggtcagaccacgtcactacatttctatgcaaggggacagcaaggcagcgtggtggtcatggctcttagctaacctattcaaagaccttttcctgttgattaatctattttcatatttataaaggagtcttaatgttctgccccataagactttcaaccttgtggttgggagtggggctggttttgtaggccctaaggcctgcttctatgtatttatcaacatgtgatacattcaattggttaaatgggttatacaggggactgatttgcttccctttctgccatggctggagct

SEQ ID NO: 51847 - DNA, 581 bp, Homo Sapiens
gtgagggcaagccacaaggcgagggcaagccagcctcccaggcaaagccagagagccagccgcgggccgccgaaaagcgcccggctgaagattatgtgccccggaaagcaaaaagaaaaacggacagggggacggacgattcccccaaggactctcaggaggacttacaggaaaggcatctgagcagtgaggagatgatgagagaatgtggagatgtgtcaagggctcaagaggagctaaggaaaaaacagaaaatgggtggttttcattggatgcaaagagatgtacaggatccattcgccccaaggggacaacggggtgtcaggggagtgaggggtggaggtaggggccagaggggcttacacgatatcccatacctttaatgcctttggccttccattctgatttctctgatgagaatattgctggccctgctttccctggtaggtatttgccaggcccaatgctttaaccttaagctgatactttgctttagatgtcagtctcgttaccagcagccttttgacccaactacggcgctctatattttagtagaggattttcacccatgtgcatggaaa

SEQ ID NO: 51848 - DNA, 612 bp, Homo Sapiens
  misc_feature (556)..(556): n is a, c, g, or t
  misc_feature (559)..(559): n is a, c, g, or t
  misc_feature (561)..(561): n is a, c, g, or t
  misc_feature (566)..(566): n is a, c, g, or t
  misc_feature (590)..(590): n is a, c, g, or t
ataaaatacaatttcagtttcaggtacatctaccctttagattccttgacctggattgaatactggcctagagacacaacatgttcatcgtgtcaagcatttttagctaatttagatgaatttgccgaagatatctttttaaatggatgctaaaattcctgaagttcagctgcatacagtttgcacttatggactcctgttgttgaagttcgtttttttgttttcttctttttttaaacattcatagctggtcttatttgtaaagctcactttacttagaattagtggcacttgcttttattagagaatgatttcaaatgctgtaactttctgaaataacatggccttggagggcatgaagacagatactcctccaaggttattggacaccggaaacaataaattggaacacctcctcaaacctaccactcaggaatgtttgctggggccgaaagaacagtccattgaaagggagtattacaaaaacatggcctttgcttgaaagaaaataccaaggaacaggaaactgatcattaaagcctgagtttgctttcanaananaaaancgtattacaaattcactggccgtncgtttacaacgtcgtgactggg

SEQ ID NO: 51849 - DNA, 936 bp, Homo Sapiens
gatgatgaggatgaagaagagatcgaggttgaggaggaactctgcaagcaggtgaggtccagagatatatccagagaggagtggaagggctcggagacctacagccccaatactgcatatggtgtggacttcctggtgcccgtgatgggctatatctgccgcatctgccacaagttctatcacagcaactcaggggcacagctctcccactgcaagtccctgggccactttgagaacctgcagaaatacaaggcggccaagaaccccagccccaccacccgacctgtgagccgccggtgcgcaatcaacgcccggaacgctttgacagccctgttcacctccagcggccgcccaccctcccagcccaacacccaggacaaaacacccagcaaggtgacggctcgaccctcccagcccccactacctcggcgctcaacccgcctcaaaacctgatagagggacctccctgtccctggcctgcctgggtccagatctgctaatgctttttaagagtctgcctggaaactctgacatgcttcatgtttttactcaaaatccaataaaacaaggtactttggccaaaaaaaaaaaaaaaaaactccgaggcatccatgccgggtgcggatacaaacggaatgaaagggcacatggtcttagcttgtctcctgaccccagcttgctttgcacaaaggtgccataatttgggcgggtctccccctatagtgaagtcctaataaatttcccgacaaaccccggcttaaccccgggcctccaatggaatcccgtctgccccgttacctccggggaaatcttaaaccccctcccccctaaattggacgcgcgggcttttctcttcttttgggggccatcccatccagggtgaacctcttctccgtgcagatacacctttatttccccctctcccccgtacaggag

SEQ ID NO: 51850 - DNA, 691 bp, Homo Sapiens
cttatcattaaagtatgaaaccatgaattataagcattttgccatgatgcccttttatacatatgtttttaaaagtactaaccaacatataggagtttaggaatggtgaagatataatttgattaagttgtaggtaaacagaaaggatcatcttaggctcagaatttctaatatgattacatgagtctactttataaactggtataggctatgtaattagcccgtaagttacttaaaggaccaggggacctaatttttgtcagttttccagtcacattggtgccattcaggactccagctgtttacaggaaatatgtacttagcagaatagtatttttccttgaaaaaaatttgaattcagcctaaatacagaatgaatatgaatagtttgtgaaaagggttagagaacaacaatattcctatagtttctgtattaatgcagtagagacagaggttcctaacgcaaaaagaaaaccacaagtaaagaccgtcaaattagagctttagaatatgacttgaaaaagtagggatgggcaaaacagcataagaaaatattttttcttaatgcagatggacagtgttttcttgttttaaaaatgttttgcctatttgccagcattttttgaagtaatacactgctgctacctggaagatgtctaacttcattttctacaactcttatgtgattttg

SEQ ID NO: 51851 - DNA, 732 bp, Homo Sapiens
ggagatcacagatggggaagaggaagggggagacaagatgaccaagacaggaagccaccccaaacttgaccgagaagatctttgacccttgcctttgagcccccaggaggggaagggatcatggagagccctctaaagcctgcactctccctgctccacagctttcagggtgtgtttatgagtgactccacccaagcttgtagctgttctctcccatctaacctcaggcaagatcctggtgaaacagcatgacatggcttctggggtggagggtgggggtggaggtcctgctcctagagatgaactctatccagccccttaattggcaggtgtatgtgctgacagtactgaaagctttcctctttaactgatcccacccccacccaaaagtcagcagtggcactggagctgtgggctttggggaagtcacttagctccttaaggtctgtttttagacccttccaaggaagaggccagaacggacattctctgcgatctatatacattgcctgtatccaggaggctacacaccagcaaaccgtgaaggagaatgggacactgggtcatggcctggagttgctgataatttaggtgggatagatacttggtctacttaagctcaatgtaacccagagcccaccatatagttttataggtgctcaattttctatatcgctattaaacttttttctttttttctaaaaaaaaaaaaaatacagaaacgaaagaggg

SEQ ID NO: 51852 - DNA, 635 bp, Homo Sapiens
aaacaacttctttgtttataagtctcagctctccttctcagcttggagggattcttttgaaatgttaatggagcctggatggcccagagtgcagcccccaaccctgaggtcccagtcggaccccagcatccatttgggcccacaggagtgggccagggaaggggtagggccccgtaaccacttagggcagggaaggaaatgggtttccatctgagaacgtgctttggagaaagctaggtgtggaaaagctccaatgcccatttgctattatttgtttccagtttgttcctttaaatatgagccagaagtgtttgtgttggtgttttaaaaacaaaaacaaaaaccgtgttggggtcctgactgggggagggggagagtgaagtgtttgctgaggacattgctcctctgactcccatctcactttgtccatcgcagccttttgttgggagatgacactgtcagtcagcccatgatgtctgttcacacgagatgcttttttaatagaattgaccaatgttttgctgccactgattaaagtattatttatactaattgttgcttgtagttttgatgtaattcattgatctatatttaaaataataaaaggtgtagcaaaatctaaaaaaaaaaaaaaa

SEQ ID NO: 51853 - DNA, 948 bp, Homo Sapiens
cttaaattttacttaaaataatttaatacttaaaagtcaaatgctataaaggagataccctgggaagggcagtggccacaggcagactgggtctcctaggaggtggtggtgttggtgacaagttctacttggactgggactcaacccaccattgcctacctctcttccctgcctggagaccttccttaggattgaagaaacctcttttgtttgtgaaaaagataggtatcgagatcttaatggagagaacagaataaaatgcaaggagccaacccctgggtattctcaaagcatttcaacggtcagtataacaaggtttgattgatttaaaatataacattctgagccctgtgttactgagcaaaaatgagctgatttggtgagtatgttttatatatggtcattagacagggaccataactgacaaaactctcaaacgcctggagtgtttatggcccaccagattattgctcagtcaatataaatttatttacctttattttaatttgcatagtgctttctgattggtcagacaaggagtggtgtgtactgcaggattctaacaatgcctctgcccttggaggcagcaattcctgtggttattggtgctaaaataagataaatattatgttaatttgttctgatatgatgtgaataaatgtgttgtttaatcttaacaagaatgctacatcttatcagatctattgtactgtctgttccttctcataattaattaattacaggaaaggcgattcaaaccagatcttgaaactattgtgatgttctgagaggtaaatttaacagggaagtgggaggggggatgaaaagggaaattgccaggttcctgtgactttgaaaggactgaggaagcagagagcatttggggacttcactgaaactgactgcatcttgcaattttcttttcgaattggcagaaatattggtatt

SEQ ID NO: 51854 - DNA, 733 bp, Homo Sapiens
ctcgattttattctccagccaccatatttattgatgagatagactccatctgtagtcgccgagggacttctgaagaacatgaagcaagcagaagggtgaaagcggagctgctggttcagatggatggtgttggaggtacttctgaaaatgatgacccttccaaaatggttatggttctggcagctactaattttccctgggatatagatgaggctttaagacgacgccttgagaaacgaatctatattcctttgccgtcagcaaaaggcagggaggagctattacgaataagtctacgtgagttggaattggctgatgatgttgaccttgcaagtatagcagaaaacatggaaggttattcaggtgcggacattaccaacgtgtgcagggatgcgtccttgatggcaatgagaaggcgcattgaaggtttgactccagaggaaatccgaaatctttccaaagaagaaatgcacatgcctacaactatggaggatttcgagatggctttaaaaaaggtttctaagtcagtgtctgctgcagacattgaaagatacgagaaatggatatttgagtttggatcgtgctaaattctcacatgtaaactgtgagaaatgtgccttaagtgtttgaatataaatgcagtaattcatttgactgagtgctatattttttttaactttcataatgggaagatttttttaaaaaaacccttatgattctgaataaaagcgga

SEQ ID NO: 51855 - DNA, 679 bp, Homo Sapiens
agctgccgtgctgctcgccgtgtactacggtctcatctgggtacccacgcggtctcccgcggcacccgccggcccacagcccagcgcgccgtcccctccgtgtgctgcccgcccgggcgtgccgcctgtcccggcgcccgccgctgcctccctctcctgcctcctgggagtccccggcgggccgcgaccccagctccagctgccgctgagccgccgccgccgctacagcgaccctgaccgccgtccgagccgccagacacccagagagacgccagaggccgcggaggggcgaagacccgggtaactctcccttccaccccaacccggatcgccagccctcgagagctctgtgctccacgccgaggatgcaccgtctctggattggtccggccttcttcctaatgacatcgctcagcgtctctggagccgtcatcccgcggaatgggggcccagggggtgtcagctcggggccttgcctcttgcagctactctgtggtcaggccgggtcctccaccatcaggaagatcccatcctgagctctgtctcctgcccctcctgctgtgggatgctgagcacagagcccacagcccatctgcctcttcacctccctgaatccgtgtccatctgcaataaacgacagcctcggctgccaaaaaaaaaaaaaaaaaaactccaagcg

SEQ ID NO: 51856 - DNA, 850 bp, Homo Sapiens
acttggattaggaactggagaagatgatgactatgttgatgattttaatagtaccagccatcgctcagagaaaagtgagataagtattggtgaagagatagaagaagacctttctgtggaaatagatgacatcaataccagtgataagcttgatgacctcacacaagatctgactgtatcccagctcagtgatgttgcggattatctggaagatgttgcatagacacgaagaaggaagtattctaattaacaaggacagaggactgaccggttccatttttttttttttccagacaatcactcagctggaatgtctgctctctattggtgccttgcatttcaaaaacactgcagatattttttaaaagtaattttcattttactaaacaaaatacttcctatttgagcccatgtgtggaagatttaatattcttaatttaactgtacatttctttatggaaattgattatctacactcagtttcattacagggaaggaacccatgaaaacatcagtgttaagagcatgatgaaaggtgtcaataaagccgtaggatcgcgcaaccctttgtgtgtgtggctgctggtacgtgtgatctttgaaaccttggctttagccctctggatcagagcttaccaccatagtatatttgatttaggtggtctaacatagttgcaaatgacttgtaattgtatgctgagtatatagatagtaaattgatggcacttatttgattcctcatcgaggttgtaaccatagtaataagacctggggcattagtgctgttagaatcgaggtatattattagatgcaaaaattgacgctccggtcgacgctacagctctattag

SEQ ID NO: 51857 - DNA, 726 bp, Homo Sapiens
gcagccggtgagaggcggagcctcgagcgggcccctcctcctccgttcccagctacccccgacctcgcgcacgccctggcccgcgccctgcccgcggataccttggactacggtgccttcccgcccccaccagtggacacttccgggtggcgcttggccatccgcttggtggaggtcgagtgggtgcaagggccctcaggacctcccacatgtacagttcccctgcctcttgccccggctagtttccctggagagaggcctagccaacaacgaagggacggattttaaaacagcgagaactgggtgccaagaaacacttcatattccctgaacttttctggatgttgtgcgaacctgttgtatttttttttttcctgtattttggttctgagggatgagtaatgtgtttttagttggttgagtttatccattcttcaatcccctaaagccttcagctattctttcatatgtggccaacattttaagtacagtgtttgcttttataagtcggtgttacttggatgtcctataaaatacccactttttataaagatgatatttataacctaggaactcatgcctgtcttggctgcagtccctgtacatctaatatatactgatttgtttgcccccagagaatttttaaggtatctgcctatatcgggatcttttgaaatggtaaataaatctggggcattaaaaatttaaaaaaaaaaaaaaagggcg

SEQ ID NO: 51858 - DNA, 594 bp, Homo Sapiens
tacatgtgctgtttcaagtgctgcctctggtgtctggaaaaatttatcaagttcctaaaccgcaatgcatacatcatgatcgccatctacgggaagaatttctgtgtctcagccaaaaatgcgttcatgctactcatgcgaaacattgtcagggtggtcgtcctggacaaagtcacagacctgctgctgttctttgggaagctgctggtggtcggaggcgtgggggtcctgtccttcttttttttctccggtcgcatcccggggctgggtaaagactttaagagcccccacctcaactattactggctgcccatcatgacctccatcctgggggcctatgtcatcgccagcggcttcttcagcgttttcggcatgtgtgtggacacgctcttcctctgcttcctggaagacctggagcggaacaacggctccctggaccggccctactacatgtccaagagccttctaaagattctgggcaagaagaacgaggcgcccccggacaacaagaagaggaagaagtgacagctccggccctgatccaggactgcaccccacccccaccgtccagccatccaacctcacttcgcctta

SEQ ID NO: 51859 - DNA, 703 bp, Homo Sapiens
ctgggggaaagactgcaaccacagacacaaacattcagaaacactggcggatttgggacaagcagaagggagttgggagcatggaaggaaaataataataattattattattaacaataataacaagataaccagtccaggagagagggagccacaggaagacctaagatcaaacgaaatatcgtaacacaaggcgaggcaggcttgtgggaaccggtccccagcgggcggcggcagagcggggaggattggaggggccagggctgggggtggcacgggctcttgggccgctgggctcctctgggcgggctcagggctggaaggcgctgccagctgtagccaggctcatacttttcaatttgttgtccttcttccacttcatgcgccggttctggaaccagatcttgatctggcgctcggacaggcagagtgcgtgggcgatctcgatgcgccgtcgccgggtcaggtagcggttgaagtggaactccttttccagctccagggtctggtagcgggtatacgcggtccgggcccttttcccgtccggcccggtcatatcatggctgatgtgaagcttcctcatccaggggaatatctgcggagtctgcccctcgggcgcggctgtggaggtggccatgggctctggctgcgcccgaactaagctggggctgcttagctggcttgccgcttcctaaggttcgag

SEQ ID NO: 51860 - DNA, 633 bp, Homo Sapiens
caagctcatcgccgcctggttcgtgcccgacatccctcagtcggtgaagaacaaggttctggaggtgaagtaccagaggctgcgtgagaagatgtggcatggaaggcagaggctgggtggggtgggggcaggctctcggcccccaatgcctgcccatcccaccccagcatccatcttcagtgccaggagcacagacgtgtagggccagagcccgtccagaggccaccaggagctgagacagtgccaccaccagcacctcccacaagcccaccgctgtgcgtgttgaggggtgctgtgagaaggctgtgcccatgtggggccgcaggaatcccctgtatgttcagggctgtgagctgccaccctattccgcctgctccgtctttgtgggggctctcaggcttggcacagccctgacttgaactctgggtgaccctgggcaccacagaactgggagtgagggctcctcaggcagccacaaggcaggaaaactggcgcaaatttcctgggcctccctctgacttctgggcgccagatcctgccgtgcccccatcctggctgttgggggtgtcctgagcccacctcgctggcctgttcccttcagccaacccgtttctgcagtgaaatkaagcctgt

SEQ ID NO: 51861 - DNA, 885 bp, Homo Sapiens
gtgtgtcctgttgagaatctgagcttcaacccctcccaggaacaatgagctcaaattggaagagtccagtggaatcggggggatggtgtgagcgcccctgttcagtctttgacaattgcatacagaaaagcagctggtatgggtttgggtgtcaatgaaagggccaaagactggtggccagctggtttgggggatttgggccattgatagcatctcccaggaacaacgactttttgcctccaaagttggatctagtgatgatcagcaccagcaggaaatgacatttggtgtctgcccactgcagccatactgtgacctccagccagacttccgcctaattgactccactggatttgtgctctgttgagtcagaggctcccgggggttggggatcgaggggcgggggtcagctatgcagcccatcacgtgtgtttttcatctgggatgaaaaagcctggttctcttttgaaatgcttgattgtacttattgagctaaacaagtcttggtgactgttgttgatttgcctcaaaagttttaagtcctgggttttcagactactgtgtagcagctgtgtgtttaacatactgtagctttttctcccttgggggcacatacaaataggatgtgttgatgtggactctaaactgtaattttcctgtaactattttggaatgatgcatatttctaatgtttgttatacttgtacagagtattgctgttggttgctttttttttttttttaggaaaaatggcctgaaaacatttttttaaagacttaccaatacccaatataaaaaaatgtcaatgcaaaaaaaaaaaaaaaaaaaactcgagggcatctatgttcgggtgccgggaaaaagaggtaatggaaaatggcccat

SEQ ID NO: 51862 - DNA, 699 bp, Homo Sapiens
  misc_feature (8)..(8): n is a, c, g, or t
  misc_feature (567)..(567): n is a, c, g, or t
  misc_feature (597)..(597): n is a, c, g, or t
  misc_feature (604)..(604): n is a, c, g, or t
  misc_feature (640)..(640): n is a, c, g, or t
  misc_feature (650)..(650): n is a, c, g, or t
  misc_feature (668)..(668): n is a, c, g, or t
ctactggnatgaaaaggatgagcaaggagaaatgccccaaaggagactgacccggcgcggtgctggcgggagcgctcaagggcagcggatttgttgttgttgctgttttcctttgtgggtgtttggtgcttgatttccagaaactctccagcgacttggacttcttctttttttttttttctttttagatagaagtgactgtgtggttggtctctgaggtatttgggggactctgtatttgctcgtttacgtgttggaaaaaccaagtggctttggggtttcgccctatcccactccctctctttcctgctccattggttccttaagaaatgctatattttgtgagtgcaagctggcttggggagccctctcttgtgtaaatgtcccccatgtttctgaaaagtgctgtaagtttaagtcccctcacccccagcactgcccaaacaggggccaagtgcgccccaattccaagaatgaaggcagagcgacaacagtgcggacaccccggctgctagcccacggtgaacccggcggggttgcccaccagttgcgaaagccccctttctnaaggagcacgcggacctcggtggagatctncaatgangcttaaaggaacccaaggcctcggccgggttggggnttggcctcantgcattggacccctggtnttttccctgaaggctggctcgcgtggccggc

SEQ ID NO: 51863 - DNA, 624 bp, Homo Sapiens
agcctgggccagccccgcttcggcccctcccgggagatccgtgcgcccgaccagcaccagcatcgcggaccgcaaaggccgcccgtcccgtcaaacaagtttcttcttaggctaagaaacgcagtatatacgagtatctctatatatagtactaatggatttggtgtgcttcccccttagcgtccccctccctctgctcctcctccttcagcctggtctccccctcttctctgccctccacccccgtctctgcactgagatacataagaaacaagggtagcttactgtctgttttgttttctgggttttcagtgtcctagcggaatgcaagtaggcagccagcccgtctgttccctctccgccccgccccgccccgcccccgtcactgcgcttctgttataccatctttgcctgactctctacggcttctccattgaatggctaatgtgtatgtgaaattaagaaattaagaatacgataaataaaaaactcgagggggggcccggtacccaattcgccctatagtgagtcgtattacaatttactgggccgtcgttttacaacgtcgtgactggaaaaaaccctggcgtttccccaaacttaaatcgccttgcagcacattcc

SEQ ID NO: 51864 - DNA, 776 bp, Homo Sapiens
  misc_feature (717)..(717): n is a, c, g, or t
  misc_feature (754)..(754): n is a, c, g, or t
tcaggtgcactttgatgaggggaaggctgtctacctgaagctggacttgctggtggatggtgtgctggccctgcgctgcctggaggaattctcagccactgcggccagttccctcgggccccagctccgcctctgccaggtgtctgggctgttggccctgcggccagggtcctccctgcggatccgcaccctcccctgggcccatctcaaggctgcccccttcctcacctacttcggactcttccaggttcactgaggggccctggtctccccacagtcgtcccaggctgccggctcccctcgacagctctctgggcacccggtcccctctgccccaccctcagccgctctttgctccagacctgcccctccctctagaggctgcctgggcctgttcacgtgttttccatcccacataaatacagtattcccactcttatcttacaactcccccaccgcccactctccacctcactagctccccaatccctgaccctttgaggcccccagtgatctcgactcccccctggccacagacccccagggcattgtgttcactgtactctgtgggcaaggatgggtccagaagaccccacttcaggcactaagaggggctggacctggcggcaggaagccaaagagactgggcctaggccaggagttcccaaatgtgaggggcgagaaacaagacaagctcctcccttgagaattccctgnggatttttaaaacagatattatttttattattattgngacaaaatgttgataaatggat

SEQ ID NO: 51865 - DNA, 647 bp, Homo Sapiens
gttgaaaacctgtccagatgctgagttgttgggctgaacaactaggagctgaaaacaacgtagaggctggaaagtgtcccctgcattctggaggggaggggagataataaggagggctgctgggtgagggcctggagatgtggaaccctggagtggaaggttctccagtgacagtgtcctgtgactgcaaaaggggacaagaaaatccctcttcctccatgggatggatttaagctcttgctgtgtgttctacaaatgctgttattgtgggaggaaatgctaggttttgtgtgtggactgcccagacctcagccaggtcttctggagatgacatttgaggactgatggccaaagagcatggggaactgaagccctggctgcctcagcgctctgtctcccaacaccagctggtgttgcagagggaggtcaacgtgagtttggatctcttgtacgcagatgtaatcattcacatgtaaaaataaccccacctccccaccccaaaaagggcaagagctgtggaaaatgattgccaaatgagatggctggttagagcatgattttttctaaagcatacttcatatattttcttaagattacatcaagctaattgtgcgagctcaattcacttgtaagaaaactctcggaga

SEQ ID NO: 51866 - DNA, 653 bp, Homo Sapiens
gaaaaggtattttaaatttagccttgccgtattatttatagttaggaatttactacattttggtagtctgttttgaaactaagcacttgtgtctgaaagatgcagataatatctatctatttattacacagtgggctctgtttgctgcagaaaagagtgaaacttttaactgcttagcacacttgccagtgaaatatacctgacagagcagaggttataactttggctctaattacttttagtaatggtaagacaacgtgagttttgtttgtttacatgctgtttacaatggcataattttaaaaatatatacaattgagatatttattgcctactattttaaagatgttttatgtgttttcacctttggaatatattgttacatttccttgtacagataattttggtggctttgttaatgtagctagtaatttttatgactactaagtgaccagttttcggtgccttttattgtgggatgcatgattatgtatttattgtacggaagtcactgacgtgtgtatttttgtactttgctgaaagtaatggttgatcctgatgtacatgatgatgaaagacatctttcccaaagggcactgccttgagatcatccttctcaaataaaaagaatgcatttgaaaaaaaaaaaaaaa

SEQ ID NO: 51867 - DNA, 529 bp, Homo Sapiens
tatatttcatattgagatcagcattcaaaatagttctatttctatctgcaaatagtttcaaatgagtttaaaaaaataacatctgaaaagaaatgctaatgtaatcatttatcttatctagcaagaagattctaaaacattctttaacatacatctaagtcagtttcacatatttgtagctagaatatcctatactggttatagttgatatgtaacagttggtgattttagatttctttgattgtgaaacagggagctatgagagatgtgtccatgtgaaatttacagttactgcctaggagttaatgatcgttctgggtcagcttgaatgtccccattctataaattcaacacttattttctgaattcataaaaataaccaaaaaatgtgagctataatgtttccctcaagaacaaacagaaacgagatttgccaaaaactaaaattcaacaaatgatgttgagtgggagattggctttgcctttagcgtgtaaatggaagcactgccattagactgaatttaactac

SEQ ID NO: 51868 - DNA, 1172 bp, Homo Sapiens
  misc_feature (729)..(732): n is a, c, g, or t
  misc_feature (734)..(748): n is a, c, g, or t
  misc_feature (751)..(751): n is a, c, g, or t
  misc_feature (754)..(755): n is a, c, g, or t
  misc_feature (757)..(766): n is a, c, g, or t
  misc_feature (769)..(769): n is a, c, g, or t
  misc_feature (773)..(773): n is a, c, g, or t
  misc_feature (802)..(802): n is a, c, g, or t
  misc_feature (820)..(820): n is a, c, g, or t
  misc_feature (823)..(824): n is a, c, g, or t
  misc_feature (826)..(826): n is a, c, g, or t
ctagaagattactttagtgaagattcttaggcagttttataaccctttttcctcaatagcctgtttcctgtttttaagattttgcctttgttgttgaaaaagggtttcactctgtcaccaaggcttagtgcagtgacacaattacagctgattgcagccttgaccttcccagctcaagtgatcctcctacctcagcctcccaagtagttgggaccacaggtgtgcacctcatatccagataatttttttcaatttttttttgtagaggtggggggtctccctatgttgcccaggcagatctcagactcctgggctcaagcgatcctcacacctcagcgtcccagagtgctgggattacagttgtgagccactgtgcctggccttttttttttttttaacctttttgtttaacttctctcttcactgcatcccaatccatctacaggcatgcacacttattaggaaaggaggtttgaggtaacaacagagactttcactatattttgctttgacagaaggaaagaggaggagtttctattaaaatctgtcacttgagtgatgtcatttaagtcctattttaggagataaaaacagctttggggactggttaaagtcccccagaaactacaataaagaacaactttttgttttaactcttaatcactttgtaaattttgactcaaatccttttcctggaccattttttggtaataaatatcaaagttgtannnncnnnnnnnnnnnnnnnccnccnncnnnnnnnnnnccncacncccacccccccccccccaccccccccccncccccccccaaccccacnaannanacccaggggggggccgcctccaaaaattcccccccggaggggccccaaatttttacccgtcaccccattttttttgttggaaaaaagggggccccctaaaaggggaggcgtatttaaaaaaactaagggcctcgggcccgcctttttttacacacttctgggggtgtgggaaaaaacgctcttactttggggaaatatttgtgggaaagaaacccccctctctttgggggggggggggacaaaatgtgggcaacaaacccctccccacagaatatttaagccctcctcggggggaaaaaataaacatttttttaaaggggaaaataaggggggtaaaaaacaccgg

SEQ ID NO: 51869 - DNA, 654 bp, Homo Sapiens
cgcgtccgttctaagctggttcttcccacaacacttctgacagcacaagaaaatgatgttaatttaccagtagccgctgaagatttttcccagtaccaactaaagcaaaatcaggatgttaagcaagttgaacacaaaccatcacaaagttacctacgtgttagaaataaatctgatattgcaccttcacagcaacaagtttcaccaggtgatatggatcggacacaaattgagcttaatccgtacctcacatgtgtattttcaggtgggaaagcagtgccactctccgcttcacagatgccccctgccaagatgtcagtgatgctgccgtcagtgaacctcgaggactgctctcagtctctgagtctcagcacaatgcaggaggacatggagtcttcgggggcagataccttctgaacgggaagagacagccagcacagtgtttatgccactggttttaaagtcattttaccttggcttaaaaccctctctcagactgtttggtttttgagcatattctgaaaaaaaaattccaatattttaaaataaaacaaaaagcataatttgggtatttaaagtttttaaataaaataagtataagtcattataagtctgattgtgagttgtttcttagaatcctgagatagcatagag

SEQ ID NO: 51870 - DNA, 552 bp, Homo Sapiens
caaacccaacgagacgtggtcgccgtctccaggaacatgcagaaagagaaagtcagcctgctacggcaactggagctgctcagggagctgaatacacggctgcgggatgacagggacgcctgcgaggccaggcgggcgggcagcagctgcaggaaggctctgacaacagcccgcctgcctgggcccacctgctgctgctgctgttgctgggctcggccccccagacgcggctctggccaccttcccagtgcccggtgaccagccccgagtgactcacggaccatgagctagaagctgcccttgcaggaggcttgtcatgggtcgggggtgcccactcaggatgcaggctctccccagggggccccaggctcgcctgactgaagacatgaaggacctagcctaggagtggtcagggtcccgggagtggccagggtcccgtgtgtgccctctgccagtcttcgctctgtccccgttcaatcaaccccatctcagttcagcagaaaaccccctcgtcaaataaaacccactgactgcaaaaaaaaaaaaaaaaaa

SEQ ID NO: 51871 - DNA, 658 bp, Homo Sapiens
ttttttttttttttttttccattttgttttttctttctttttcttttttttttttttaatgtcctagcttggtttggtcttgaaaagattcataatcactccaaatgaaatgctcctcccttggccaccaatgtgaagggagggtagaaacctgaggctagacttctgacacaagaagaatctgtcgagagcacagtctcccagtcaataagaaggaaggagagagggggatgagctcgcacccttgagaagaaccttcatgagccaattcccaaagcatcaactccgcatggatactttgcacacacatcagccgtgtctaatggacacacacacgtgcatacacacgtgagcacacgccgggaccacagacccttatccaaaatatgaaagcagcagctattggtcaatttgaggaactcattttgtaaagaaaaaaaaaatccttcagcctggatgagagaaaaaaaaaaaaaccaaaaaaaccatcttgaagctcaacctgtaaaacttgaaattctcctggaacagggctgggtgtttttgttttgttttttctttcgaacttttgttccacaaacaggaagttttgtcttttatactgaagctcagacaccagcaaaaaaaaaaaaaaaaaaaaaaaaaagcctacagccgc

SEQ ID NO: 51872 - DNA, 578 bp, Homo Sapiens
cctcctgggactgttgcaaggatgaaatgaaggattgagggattgagggattgctgagctggagctccaggtgtcctatctttctcagtggggtggcacggagcggggccgcctccctcttctctccaggcaggtggggctgtggttatgcgatagggtctcccttccctccagcccatgccagaggagcttgtaactctttatcctcatggtgcccactacgagtcatactcttccccatgctgctcatcctcctgggccccatccactcagccaaagcagaatgcagggtttcctgcctgacaacccttctcacctcccaagtcccacttttgaacaagctgatgattctgaaactggcccaatttcctaaccagccggatgcttgagaaacctacatttggacaatgagaggctgctcctgcggcctgcgggccacctcctcttccttggctcctgctttctttttagactatatcaacctacaactttagtcgggaagagggacaggggtggacctgagtttcgtctcctgtctctctggctgatgtcacctgaataaagccttcttccctggc

SEQ ID NO: 51873 - DNA, 638 bp, Homo Sapiens
tttgaaaatagatttgtgttaaggaagcagtgagattccaaaggaagggatgtgtatatgtctaggcaggtctggaacctggtatgagatgagcactcccctaagttgcaagatttaagggttactataaaactcattaatcaagatactataaaaaatgcagtatttaaaaaaattaatgcaaaaaatttatgttggataaaatagcgaaatcttacaggatctgacaggactgagattaggaggagggaagtgaggctgaattgaataagtatggggatgaatccttcttatttaaatttttgatacattgtccatcatagactttttacattaattgtgattttttaaaaatgttgcattaaaatagtatttatcttggttactgggttttttggcactccttaaattttgtgcccaaggtgagtgctttgctcacctcaccctagttacgtccctgtttctgtgatttgaacactagcgagaacaccactgtgtgcgcctccacccccatcacacaccaaacaacaggtggctcagacaccctgaatttgcacagctcacctagctttcctaatttaggccttcatatcatagaatggtggcctggaccaataggaatgaaaacagaccagggg

SEQ ID NO: 51874 - DNA, 529 bp, Homo Sapiens
tgcaaaaggacaaaaacaactcccgtgatatgattgccaggagattctgtttccccatttctatatttgtggattttatatgtaatcacctatgtcagagaaagaaaacctttcaaccaaatgattggttcaaaaggaaagaatgattcaaagcagaggaatttattatgcacagcaaaatgtgtcttgtattaaatatttttattaaaagaatgtttcattaatgcattgataagaaaactaggttagttgcgagggatgtttctggtttcatttcaaataattaaatttctactgctactaccaagaggactggctcagtggtggcaaaatactggtgatgctccctagagcaggaggcccggaagtgctgacgcagccatcagcctgccaagattgttttttaatcttcacagtgttttaaagaacatgttaaaaaaaaaaaaaaatctagtgctcctgctgtcaagatttctgtcatggaaaccttgtttgagaaaggtgttaataaaattctattgcaaaaatt

SEQ ID NO: 51875 - DNA, 481 bp, Homo Sapiens
cttattaacaaaatagaatatatatatattgcttatctgaaatgcttgaaaccagaattgttttgcattttttgaatatttgtatacacataatgagaccttggggatgggacccaagtctgaacgtggaattcacctgtgtttcgtgtatatgtctcatacacataattttgtgcatgaaacagagtttttgtataagaagatacactgcagctgaagagggctgggtttttttttctcttagggtcgctgcataaactgttgtatgcctggtgctttgcgacttgtcacacgaggtcacgtgtggaattttccacttctggcatcacgtcagtgctcagaaattttctgatctcagagcatttcaattagggatgctcaaacgcaactgtttctacttccccatttcaggtgtgagatgtaacccaccttgaccataaattggcttttcatagtgaaaaaaaaaaaaaaaaaaaatggc

SEQ ID NO: 51876 - DNA, 779 bp, Homo Sapiens
  misc_feature (676)..(676): n is a, c, g, or t
ctaacaggttaacctcagagccacagacgtcaggctcatgcgccagttgcttgtaatcaatgagagcatcgagtccatcaagtggatgatcgaagaaaaagccaccattaccagcagaggcagcagcctcagtggcagcctgtgcagtttgttggagagtcagagcacctccttacgtggcagctacaacagcctacacgatggcagtgatgggctggatggcatttccgtgggaagttatctggacacgttggcggatgatgtcccaggccatcagaccccttcagacttggaccaattcagtgacagctccctcatagaggactcacaggcactacacaagcgtcctaaattggattctgaatactactgctttggctagtgacagttttttgcatgggactggtgtgcaatgaacttgtatttatccttcttctccgctgctatatttttggtgtgatttttattttaataagatgacctttttaaaagaagctgattttgaaactgcttaatggtattgctgttgctcctaatacttctcatctgagctgatttatttttctctgttacatctctattttttatttattacaatgattttctcccttcttttacagtagcacaaacaaagtagggggaaaagaataagcaataattatgtttttgcttttgntttcagagcaatgggtcagggattacaagaaaaactttgctaaattttacaataaaccaaagtctgataacagttaatggtgctgcttgcgtccttaaatgac

SEQ ID NO: 51877 - DNA, 564 bp, Homo Sapiens
cattggtacaataccaaatatactatgcctttttctctaaggcatgatgttgcagtagcatccttgtacatgtagctaggagaacttgtactaagcccagataaatagttgaagtacaagggcaaggagtgtgtctttgatattttaatagaaatcacctattgccctctagaaaagctgtacccttttccagtggcagagaaccttcctgaaaggcagtcctgtgtaatggtgtccatttcatcacacccttaaaacactcagctttaacaaacatgcagatttttgctgatgtgggagaaaatattaattattaatgatattaaggtgattatcttttcgtatgtttatagatatttgtatttctttttaaatgaactgctcatgacctttgtctacttttatttgggtttacttctttctcatttattcctataaactctttataaaaggaaattaaccatttgattgtcatatgttgtgaatatttttaccattttgacttttgaatttatgtctttttaatgaattgtagaagtttaaaatctttatggaataaattta

SEQ ID NO: 51878 - DNA, 732 bp, Homo Sapiens
  misc_feature (628)..(628): n is a, c, g, or t
  misc_feature (696)..(697): n is a, c, g, or t
  misc_feature (702)..(702): n is a, c, g, or t
  misc_feature (709)..(711): n is a, c, g, or t
  misc_feature (714)..(714): n is a, c, g, or t
  misc_feature (722)..(722): n is a, c, g, or t
aaaagtctccattcaaattaaattaacataactagaagttagaaagtttaaaagttttccacataatgaaagtccttctgataatttgacaaatagctataataggaacactccctatcaccaacatattttggttagtatattccttcatattaaaatgactttttgtcagttgttttgcattaaaaatatggcatgcctaagataaaattgtatattttttccatctcataaatattcattttcttcaaagtcttttttcaatctcataaaaaagggatagtgcatcttttaaaatacattttatttggggaggaacatgtggctgagcagacttttgtataatattacttcaaagatatgtaatcacaaacaaaaaaaactattttttataatgtcatttgagagagtttcatcagtacagttggtggacgttaattgtttgaatttgatagtctttgaatttaatcaagaaactacctggaaccagtgaaaaggaaagctggacttaaataatcttagaattaattgataaatgtctcttttaaaatctactgtatgtattataatttacacccttgaaggtgatctcttgttttgtgttgtaaatatattgtttggatgtttnccttcttgccttctgttataagtctcttcctttctcaaattaagtttttttttaaagaaaaaaaaatnntacanaaacaannnaancttaattnatcttacaat

SEQ ID NO: 51879 - DNA, 594 bp, Homo Sapiens
  misc_feature (21)..(21): n is a, c, g, or t
  misc_feature (590)..(591): n is a, c, g, or t
tggaacttccccattgatgtncacctttaaaagcaccaacccctacggctggccacagatcgtgctcagcgtgtatggaccagatgtgttcgggaacgatgtggttcgaggctatggggccgtgcacgtgcccttctcacctggccggcacaaaaggaccatccccatgtttgtcccagaatctacgtctaaactgcagaagtttacaagctggttcatggggcggcggcccgagtacacagaccccaaggtggtggctcagggtgaaggccgggaagtgacccgtgtccgttctcagggctttgtcaccctcctcttcaacgtggtgaccaaggacatgaggaaactgggctatgacactgggccttctgatacacagggtgtgttggggcccagcccaccccagagcttcccccagtgaaggctccacaggctgcacagtctctgataatgaagggctgccttcccgaagtcagccgctgcccatcggcctgaggggcagcctggtggccagagctgggggcacacagaatagttttgtataataaagtctcattttcagagaaaaaaaaaaaaaaaaaaaaaaaaannggg

SEQ ID NO: 51880 - DNA, 671 bp, Homo Sapiens
  misc_feature (571)..(571): n is a, c, g, or t
tagtcctaaaaagcaatcttattattaactctgtatgacagaatcatgtctggaactttgttttctgctttctgtcaagtataaacttcactttgatgctgtacttgcaaaatcacattttctttctggaaattccggcagtgtaccttgactgctagctaccctgtgccagaaaagcctcattcgttgtgcttgaacccttgaatgccaccagctgtcatcactacacagccctcctaagaggcttcctggaggtttcgagattcagatgccctgggagatcccagagtttcctttccctcttggccatattctggtgtcaatgacaaggagtaccttggctttgccacatgtcaaggctgaagaaacagtgtctccaacagagctccttgtgttatctgtttgtacatgtgcatttgtacagtaattggtgtgacagtgttctttgtgtgaattacaggcaagaattgtggctgagcaaggcacatagtctactcagtctattcctaagtcctaactcctccttgtggtgttggatttgtaaggcactttatcccttttgtctcatgtntcatcgtaaatggcataggcagagatgatacccttaattctgcatttgaattgtcacctttttgttacctgcattaaattaattaaaatattcttaattt

SEQ ID NO: 51881 - DNA, 639 bp, Homo Sapiens
tttctgggtcttctgggagcctacgtgagtacatcacctaacagaatattaaattagacttcctgtaagattgctttaagaaactgttactgtcctgttttctaatctctttattaaaacagtgtatttggaaaatgttatgtgctctgatttgatatagataacagattagtagttacatggtaattatgtgatataaaatattcatatattatcaaaattctgttttgtaaatgtaagaaagcatagttattttacaaattgtttttactgtcttttgaagaagttcttaaatacgttgttaaatggtattagttgaccagggcagtgaaaatgaaaccgcattttgggtgccattaaatagggaaaaaacatgtaaaaaatgtaaaatggagaccaattgcactaggcaagtgtatattttgtattttatatacaatttctattatttttcagtaataaaacaatgtttttcatactgaatattatatatatattttttagctttcatttacttaattattttaaggacccttatttttccaggatgtcagaatttgattctaatctctcttatgtagcacatgtgacttaatttaaaacctatactgtgacacagaagttgggtaaaccgagatt

SEQ ID NO: 51882 - DNA, 638 bp, Homo Sapiens
  misc_feature (467)..(467): n is a, c, g, or t
  misc_feature (561)..(561): n is a, c, g, or t
attgcggcgagcagtaagaagcagcgtgtggaaaagggagacgattgttcatcaacatgagtatggaccaaaagaaaacctagaagatgacatgtaccgtaagacttgtactatgtgtggccatgaactgacatatgaaaaaatgtgattttttagttcagtgacctgttttatataattttatatttaaataaaggaaatttagattggtccttttggaaattcaaaaaaaaaagcaacatcttcatagatgaatgaaacccttgtataagtaatacttcagtaataataatgtatgttatggcttaaaagcaagtttcagtgaaggtcacctggcctggttgtgtgcacaatgtcatgtctgtgattgccttcttacaacagagatgggagctgagtgctagagtaggtgcagaagtggtaggtcagctacaaatttgaggacaagataccaaggcaaaccctanattggggtagagggaaaagggttcaacaaaggctgaactggattcttaaccaagaaacaaataatagcaatggtggtgcaccactgtaccccangttctagtcatgtgttttttaggacgatttctgtctccacgatggtggaaacagtggggaactactgctggaaaaag

SEQ ID NO: 51883 - DNA, 519 bp, Homo Sapiens
agtgaggttgttccaaagacattcaggtctctacctccagccctgcaaaaatattggacctagcacagaggaatcaggaaaattaatttcagaaactccatttgatttttcttttgctgtgtctttttgagactgtaatatggtacactgtcctctaagggacatcctcattttatctcacctttttgggggtgagagctctagttcatttaactgtactctgcacaatagctaggatgactaagagaacattgcttcaagaaactggtggatttggatttccaaaatatgaaataaggaaaaaaatgtttttatttgtatgaattaaaagatccatgttgaacatttgcaaatatttattaataaacagatgtggtgataaacccaaaacaaatgacaggtgcttattttccactaaacacagacacatgaaatgaaagtttagctagccactatttgttgtaaattgaaaacgaagtgtgataaaataaatatgtagaaatcaaaaaaaaaaaaaaa

SEQ ID NO: 51884 - DNA, 561 bp, Homo Sapiens
tggttaatcagttttattttgaaaagacgtacttgaatagttacagcatatgtttgaacaggaagtaggaacatgcatacatgaagaaatgctaacggaaggatttgttatgtttaggatcttcccttggaaactaaaaatagaatattaatgacattactgtttgtagaatgacatatgcagattttctcataagcagtcattgtgtttgccagtaatgtttgagagacatgtaagttgaaagttttgctaaattataaagctcctttaattcgttggttttgattctcttattctcttgtcttttctaaatgttaacaaaatatatcttaacagattacatgaaatttaggaattatttaaaagttaccattagctctaaaattaagattcggatgctttatttatagtaactgaagctaataatgttttatgttttgattttttgaaatttaattgtagaagtcactgccttctgagttttcaaatagataaccacctttaatattacactgcttataatactaatgtttacagatatgtttctgtttttaaccatat

SEQ ID NO: 51885 - DNA, 501 bp, Homo Sapiens
ggagatttgatgaaaatagccagtccatggagcaaggcttccctagactaatagctgatgactttccaggagttgagcctaaggttgatgctgtattacaggcatttggatttttctacttcttcagtggatcatcacagtttgagtttgaccccaatgccaggatggtgacacacatattaaagagtaacagctggttacattgctaggcgagatagggggaagacagatatgggtgtttttaataaatctaataattattcatctaatgtattatgaggcaaaatggttaatttttcctgcatgttctgtgactgaagaagatgagccttgcagatatctgcatgtgttatgaagaatgtttctggaattcttcacttgcttttgaattgcactgaacagaattaagaaatactcatgtgcaataggtgagagaatgtattttcatagatgtgttattacttcctcaataaaaagttttattttgggcctgttccttaa

SEQ ID NO: 51886 - DNA, 897 bp, Homo Sapiens
  misc_feature (668)..(668): n is a, c, g, or t
  misc_feature (860)..(867): n is a, c, g, or t
  misc_feature (869)..(894): n is a, c, g, or t
ccaatgcttaacaactgcaggcaaaattctaaaatgtgaccactgggtcttgggaatcagtaggggctgtatccagcacaccactgccccatcctttttttcttaactattagtgttgaataaacttctcatagttaatctacttgctgaactcaggaaattcctatcactgaccctggccagggctttaaagggtaggaaaagcattaatgtcagtcctacacagcgaacttttgatttagaagaatgtgacagaaagaaaacatttactgaaatacatgggaagcttgcatatttctaaagttgtctttatacttttcatttctcaaagctaagtaaactgtggtataggcatctctaagatgttagcatttaaaacatcaattgttttattgatgtttaaacaattgtttaaatcccactgaaaaatttaaatattaaaatatcttgcacagtctaccaaatgagttaaatcgttacagtcgtgtctacctcttatttttctatctgtatttaggctgctgttttggtgagattctaatttctttttcccctggaactactttctgtggaagacaaggaacagactggggacagaggcctgaaaacaaattggaagcactcagagatctattgctgaccagccctattcctcatgagttggcggngggaaagccattgtttttaatttccacttaatatgaaaatgcttgtttttaaaatgttttttcctgctgaacaaatgtatttttaaaaggaaaaaaaattctcttttggctctaagaagtcagctgtatgagcaggcgtgaccatatcataacatgctgatatgatagaaaatcataaatttttacctctcnnnnnnnnannnnnnnnnnnnnnnnnnnnnnnnnnaaa

SEQ ID NO: 51887 - DNA, 616 bp, Homo Sapiens
cctctctgcaggcagaaacaacacaggaaagtgttggataaaggaaaacctgaagatgtgatgccatctgttaagggggcccaggagcgcctgccaacggtaccgctgtccggcatgtacaataaatctggaggaaaagtgagactcacctttaaactagaacaagaccagctgtggattggcactaaagagcggactgagaaattgcccatgggctccataaaaaatgtggtcagtgaacctatcgaaggacatgaagactaccacatgatggcgtttcagttgggccccacggaagcctcttactactgggtgtactgggttccaactcaatatgtggatgcaatcaaagacactgtgctggggaaatggcagtatttttgaaagcactttcacctctggcccaggagactgacccaaagtgaaggacattgccgggagaggcctgcagcatccctggatttcagagttctggaactttgttcataaaaaatctatattcaatctgaggtgatgtggtgactgaagccagaggtgatgtactttcaccattagcttaattttaacttaaaattaccagttccctttcttgcagtcagcttcataccatttttaa

SEQ ID NO: 51888 - DNA, 857 bp, Homo Sapiens
  misc_feature (387)..(387): n is a, c, g, or t
accagagagggaaggtgacctgaaagtcacagaataattttttagagctgaacaagaatccaagcctgcaactgcagagacgagagatctttctgctgtctatactcttggaaagcacatcctaagatctttgcagattatcctgtggaaggaaaatgcctaaagtcaaaagaagccggaaagcacccccagatggctgggagttgattgagccaacactggatgaattagatcaaaagatgagagaagctgaaacagaaccgcatgagggaaagaggaaagtggaatctctgtggcccatcttcaggatccaccaccagaaaacccgctacatcttcgacctcttttacaagcggaaagccatcagcagagaactctatgaatatngtattaaagaaggctatgcagacaaaaacctgattgcaaaatggaaaaagcaaggatatgagaacttgtgctgcctgcggtgcattcagacacgggacaccaacttcgggacgaactgcatctgccgcgtgcccaaaagcaagctggaagtgggccgcatcatcgagtgcacacactgtggctgtcgtggctgctctggctgaggctgggcgctccaccctggactctggacttcgcaggttcctgcctgtcacgccaccccttcctgggagcagcgagcagtgcccaggccgagttggagcacggtctctatggggaaagcttcgtgtctatcagtgtgattgtaaataaatctttaatctctcgaaaaaaaaaaaaaatcgggcttctatttcgggggggggaaaaggttgaatggcatgggaaggggtttccgaccgtttggaacagggatagcggcccaagggcgt

SEQ ID NO: 51889 - DNA, 734 bp, Homo Sapiens
ccattctgatgttggagccaagatggctgaataggaacagctccagtctgcagctcccagtgagaccaacgcagaagattcttctttggagcagaataaaagatctggcccatcagttcacacaggtccagcgggacatgttcaccctggaggacacgctgctaggctaccttgctgatgacctcacatggtgtggtgaattcaacacttccaaaataaactatcaatcttgcccagactggagaaaggactgcagcaacaaccctgtttcagtattctggaaaacggtttcccgcaggtttgcagaagctgcctgtgatgtggtccatgtgatgctcaatggatcccgcagtaaaatctttgacaaaaacagcacttttgggagtgtggaagtccataatttgcaaccagagaaggttcagacactagaggcctgggtgatacatggtggaagagaagattccagagacttatgccaggatcccaccataaaagagctggaatcgattataagcaaaaggaatattcaattttcctgcaagaatatctacagacctgacaagtttcttcagtgtgtgaaaaatcctgaggattcatcttgcacatctgagatctgagccagtcgctgtggttgttttagctccttgactccttgtggtttatgtcatcatacatgactcagcatacctgctggtgcagagctgaagattttgggagggtcctccacaataagg

SEQ ID NO: 51890 - DNA, 614 bp, Homo Sapiens
acccctgaatggttggacagtgattcctgccaaaagtgtgatcagcctttcttctggaacttcaagcaaatgtgggacagtaagaaaattggtctaagacagcaccactgccgcaagtgtgggaaggccgtctgtggcaagtgcagctccaagcgctcctccatccccctgatgggcttcgagtttgaagtgagggtctgtgacagctgccacgaggccatcacagatgaagaacgtgcacccacagccaccttccatgacagtaaacataacattgtgcatgtgcatttcgatgcaaccagaggatggttactgacttctggaactgacaaggttattaagttgtgggatatgaccccagtcgtgtcttgatgactctcccaggaatcagaaagatagtatttactaaagaaacggttgttttaacccaaatcattaccagagtggtaaagcagacatgtgagaagtaagaaagaaactaaagaccctgaatgaatttgcagattacccatgtgcacagtggggacctggccagtgagcactcgcaaggggactcttccaacttgttcatacaatataaaagaagctatttttttaacaaaaaaaaaaaaaaa

SEQ ID NO: 51891 - DNA, 1183 bp, Homo Sapiens
  misc_feature (925)..(925): n is a, c, g, or t
  misc_feature (1183)..(1183): n is a, c, g, or t
tctgtttggtaaggaggacaattgtcagttttgagggggacatgtgttaaatcacagaaaaaaatggtgccttcttctgcgtttgtccctcctgccatgtgtaagttgtaaggattgcctttgtagttaatgtactctttggctttgtttgtttgttttcttcttcagtgaagcagccttactattcatagaagggctagaataggagaaaatgaaattttttgagtaattctttgataagatgaggaaataatgggaaaggttgaattaattcctgggcatggactaccacatgaccacaagttgcgttgaggccgcatctttcttcagcagcgtgcaatagctggctcctctataggagatgagcttcattgggagttcctagcaagttgactaaacagcaaaagttctttctcgtgggtaaatatacccacaggttctatgatttgtagctctaagttttttgatgatcaaggagtgaactaattgacaggcaacatatcccacctatgcataaataacccggcacgcatcggcttttcgggaccaggaaaggcaccgaaggcttcttgatccttcaacgacaaaccacccaccacgaaggccgaccccattactcgtccacctagaaaccttccaaactctccactccaccgttatccacgtcaatttgcccctcacaccctcgacaacgcctatttacctccttctcacgcattgctgaccccgccttgtattatcacacatgtcctcacaaggcacagcgtccgcttttacttcttcccctccccttttctatccactgccgcagtgtatccacatcggtgtggtgaccatgagtcgtgctcccttctacccaccgccatctttcgctcacacaccgtgcggcgcgaaacatgtgggtctcccgcactggccctccacngtactacttgtccacgctgtaccccatatgtcccccgtcttgttgcccctccccctgtgttgtcacctttctcccgtgttttctgtcctaccccactatgcccacccacagcggtgtgatgtccgcactacccccctatatgtcccattatgcagcgtgtgctgacatcgatcgcacccttctcggtgccccgaggtcacctagcaccccacccgtcatccgccctatgcgccttgtccctatggtcttccacccttn

SEQ ID NO: 51892 - DNA, 663 bp, Homo Sapiens
ggagaacagattaatttatatcttaagatggaaaaaaagccaaataagaaagaacagcttactctagtaaacaatgtattaaagctgtccaccaagttgttgaaagagctggacacaccatttagactctatggactgacaatgaatcccttaatctacaatatcacaagagtagttatcctttctgctgtctcaggtgttataagtgatcttctaggatttaatataagactgtggaaaattaaatcataagctgagttaaatgcctggactctcccctggctggtatcaaaacttacctatcaaggaaagtgatgactgcagaaaccagtgagatacccacctgcttgttcacatgcacaggtgctctcagctctgccaaagcgaatgaatggtgtttccggaggagcaagtccttttccaactgggtgtgcatgctaaaaacctgtattttcatgcttttcaaacaacatgaatagtcagctgactaaagactgtgtgtgttgtggtaacacaaagacaattttgtaagtttgcgcttcagtactgtgacagttatgtttactggacatagtcttttgggcactatgatagatgccaaagcatgaagcaatatctttttatggaaatatgcattcatacttttcatatagtcttagactg

SEQ ID NO: 51893 - DNA, 605 bp, Homo Sapiens
agagaaatggcgtgtgaagagtttaattttggagaaatattaatgacccaagtaatccattccatcgagtactgtctgggatgcatctccaacaccgcctcctacctgaggctctgggcgcttagcctggctcacgcacagttgtctgatgtcctgtgggccatgctgatgcgcgtgggcctccgcgttgacaccacctatggcgtcttgctactgctcccggttatcgcgctctttgcagttttgaccattttcatccttctgatcatggaagggctttctgcgtttcttcacgccatacgcctccactgggtagaatttcagaacaaattctacgttggtgcaggcaccaaatttgttcctttctcattcagtctactttcatcaaagttcaataacgacgacagtgtggcatgatcatattgctgtaaccaacaagctttcagatttatggagaatgaccatgttatagactttcacttatgtcagatttatgataggaaaaattccatcttcattactgccttatgacatagccaaataattctgtaagatatacctcttcctcatatgttaaatattttgtaaagtttaccattctgaga

SEQ ID NO: 51894 - DNA, 613 bp, Homo Sapiens
ttttttttttttttttttggggagggggaccatgcagctcactacactattcattgcacacaaatgaatttttcactttttaagatgcattcttggtgctcaaaccagatcgaagtttgtctctaaaagctattgtctgcacaggctgctgcatgctctgttgttaaatggatggacaggctattctaaattttggttgatacttttgctactatgggcaattaacttgaaaaaaataatcgatcccaactctgtgctctgatgtacctcttctgccccttttatgacacctttgaccaaatgccttctatggttcacagtgcaggcacaaaactacctctgatacagaagggttctttacaagcttattttacataccgtgaatccctcacctaaagggagaggtgaaagcaaagactgctttgaatgggtattgagggagattgtgtccataccaagccaccctgaagaagtatttcacttgcagtagaactgtggatttgtgctgtcatttcaccttggaataaacacctatctctaagcaggaccaagaatgacttgcaatctatatgtaatggctacttacttattcaataaagttaagcctcgtgcc

SEQ ID NO: 51895 - DNA, 891 bp, Homo Sapiens
agcggattaagattttatctgggggaaagaaaagaattttttaaaaaattaaactaaagatgttttaagctaaagcctgaatttgggatggaagcaggacagacaccgtggacagcgctgtatttacagacacacccagtgcgtgaagaccaacaaagtcacagtcgtatctctagaaagctctaaagaccatgtcggaaagagtctccagttactgaacagatgaaaaggagcctgtgagagggctgttaacattagcaaatattttttccttgttttttctttgttaaaaccaaactggttcacctgaatcatgaatgagaagaaataattttcatttctaaattaagtcccttttagtttgatcagacagcttgaatcagcatctcttcttccctgtcagcctgactcttcccttcccctctctcattccccatactccctattttcattccttttttaaaaaataatataagctacagaaaccaggtaagccctttatttccttaaatgttttgccagccacttaccaattgctaagtatcgaatttcagaaaaaaaaaatgcatttactggcaaggagaagagcaaagttaaggctgtgataccaatcgagctaaggatacctgcttgggaagcatgtttattctgttccccagcaactctggcctccaaaatgggagaaaacgccagtgtgttcaacatggatagcagatatcacgacagattaacctctgcatgtggttttcaatttgttttttagcaaggtgggtgactaagccgaagttttgtaggggacatagaattccaatttattttgtcaacacagcaataaatttaaggttgaggaacttattgttggttccaatgggtaaaatgggagggatataa

SEQ ID NO: 51896 - DNA, 540 bp, Homo Sapiens
tttttttttttaatttttatataaactataactcagacccaagctacaaggttggaattttggttggttttttttttaagtaccctgcctgtataattgcatcagaatcccccaccccaccccccgcccccgtgtttgtattttgggttggtttacactcgcacatactcagttttcagttttcccctttacagtcttctcccctcacctccaggaccctccccctttttaaaaaataaatcgctgacaagtgtgaatcccgtgaagactttattttgtgttgtgtgtatcctgtacagcaaggttggtccttcgtaacaacggatgaaatggttcccttttttaaagcgccctctctccctccaccctcagcgcccctgtccttggcatgttttgtatcagcgatcattctgaactgtacatatttatgttgcgagaggcaaagggcaagttttggattttgcttcttccaagtttgtttttaaacgacaaataaaaaaagaacattttaaataaaaaaaaaaaaaaaaacctcgtgcc

SEQ ID NO: 51897 - DNA, 378 bp, Homo Sapiens
atgaagtgggagccgcattttttgtttaaattccacccgcgtttgtcttttcctaccacctgtggccaggtgctcgctggccatcacagttgcgattccatgagtagctgctttatgactgctttttgtactatctggatgtgcccagagttacttctgtacaagctctgtatctatgtccgttgagaacattattttaacaagaagaacaccaacagtagcatgaaatataatactgttttataattctaaagctgctgttaatttatgaagtacataataatctaatgtaaactgcagaagtcagagcaagtgcctacattttgttatttttggcattactacagagccatgtacaatagaaaaaaaatggcggcc

SEQ ID NO: 51898 - DNA, 941 bp, Homo Sapiens
  misc_feature (544)..(544): n is a, c, g, or t
  misc_feature (546)..(546): n is a, c, g, or t
  misc_feature (548)..(548): n is a, c, g, or t
  misc_feature (550)..(605): n is a, c, g, or t
  misc_feature (607)..(618): n is a, c, g, or t
  misc_feature (620)..(646): n is a, c, g, or t
  misc_feature (651)..(651): n is a, c, g, or t
taatgtttacagaatgcaatatactgtgatgccttcctactcaagcctcctagcattcaaacttccatcctattagtcattaacatggttaaacttcaattcacaatcaccttggaatcaatgtcagtttgatttattttgttacagagcaataaaatcattagaacaatggtttttaaaagacttaagtggatgcatcctatgcatgtaagcattatttcccaaaccaaagcatcattcatctccatttatttcttttgttcccgctcagtgtgaagttgggaactgagaggggatggctgctggtttcacagaagtttggatgccttactcttatcttaaagccagcatccagaatttcctccctctctgatgccacatgcaaaaccaggtgtacgatgtcaagatggattctttgagagccagggtagatcatatgactgcctttctgtaaaattggatgcctagtacaaatgctctttgcctctaattcagtattccatttaataaaaacaatacagtggctggaaaggagcatcagaanananannnnnnnnnnnnnnnnnnnnnnnnnnnnnnnnnnnnnnnnnnnnnnnnnnnnnnnnannnnnnnnnnnnannnnnnnnnnnnnnnnnnnnnnnnnnnaaaangggggcggggccccccaaaaaaatcccctggggggggcccaattttacccccccccccctttttttggaaaaaaggggcccccatatgggggggcgtttataaaacttgggccgcggggccggggttttaaaaaacccccggggcggggggaaaaactggtaactggggggatttttgggggagagggccctttccttttgggggggggggaaaaaatggggcaacaccccccccacaagaatttttaaaggccctggggggaaacataaaaattttttaaggcgcgaag

SEQ ID NO: 51899 - DNA, 580 bp, Homo Sapiens
actagttctagatcgcgagcggccgccctttttttttttatacactgtaatgaaccgctgaatatgaggcatttggcatttatttgtgatgacaactggaatagtttttttttttttttttttgccttcaactaaaaacaaaggagataaatctagtatacattgtctctaaattgtgggtctatttctagttattacccagagtttttatgtagcagggaaaatatatatctaaatttagaaatcatttgggttaatatggctcttcataattctaagactaatgctctctagaaacctaaccacctaccttacagtgagggctatacatggtagccagttgaatttatggaatctaccaactgtttagggccctgatttgctgggcagtttttctgtattttataagtatcttcatgtatccctgttactgatagggatacatgctcttagaaaattcactattggctgggagtggtggctcatgcctgtaatcccagcacttggagaggctgaggttgcgccactacactccagcctgggtgacagagtgagactctgcctcaaaaaaaaaaaaaaa

SEQ ID NO: 51900 - DNA, 944 bp, Homo Sapiens
gatgcaccacgagaaagatcacaagcgaaatcatagcatgggacacatttctagcaagagcagtgacaaactgaatctagttaccaaaaccaaaacggaccctgctaaaactctgggaacgcccctgtgtcctcgaatggaagatgttcccttgttagagccgctgatatgtaaaaagatagcacatgagagactgactgtactaatatttcttgaagactgtatagtcactgcttgtcaggagggatttatttgcacatggggaaggcctggtaaagtggtaagttttaatccttaatgctgcaccagatctagaacttgaataggtagtgacttttttcttttcgtgggaggggtggggtgtacaatgaatgtgaatgacacttcttattcttaatgtaaatctcaatgcatcagagccataattttggatactgcatgccatgtaattctgaatcatttgataatttaccttagagcatttaaaaaaatataatcaaactaattgccagccaagtcagtcatcctcctgggagtatatagagtcccaaggttagcgctcctgtattagactatttcaattttaggaaaatcatgaccatgtggggaaacaatgactttaaaatgctgaaattaaaatttatgctttaactggaatattttttgcttaactactcaattagaatattgtacacctgatcaatgtgtgttcagcacagatggccatgaattgtcatttatagtccaattttttatcttaatcataaaatgtttaggaatctatgaaatttaactttaggaacaaaacgtttagcagggttgattgatattatttttacattgttctggcaatccacagaaagagaagagccttaatttttaaaaccatttttagtcattttatgacaattaaagttgtttaataaacatcttttttcaaaaaa

SEQ ID NO: 51901 - DNA, 664 bp, Homo Sapiens
aggagcgaggcctgggtggcgtatttctttaaatcttaattgcttttcattatatgcgaagtcttaatttcaaaatgaaatcacactaccagcaataggcagttttcttgaaaactctaataaggaacaatagccagttccgtaaataactttaaaattctaaaagtgttggtacactagcaatcacaaatatggtttcttttaatacttttttaatcctgtaaagaagggtttttataaacattctttttattaatcagtcataacatggcgaagtgtgtagttgctgtttctgaaaagtgatccaaactctacatccagagattatgaaaaattcttatagaattttgtaacaagtatttacatgttgggtgaaagaaatttcatagtcgttggagtgccatgaaattaatacttgcaattcagattgcggtagtttacactttttctgtatgtttcaaatcaggtgtgtaccatttgtactgagaacaccacagaatgaattatccaaagtccattgattttaatacgtgttttggtttgtaaacaaattatagtaatttcttgcacatttttggaaattaattgtataagaatttatgtatctgcttctagatacagtgtgtaaataaaaaatttcgttcacaaaaaaaaaaaaaaaaaa

SEQ ID NO: 51902 - DNA, 630 bp, Homo Sapiens
atggtaatttaaaggtgtctgcttatttggttgaacaatttaattgggaaagtttgtcatcatttgaaaaaggaaatataaaaggaacaaccatatagccaacctgtggtctggcagaaacaacgtctctagcaatagtaccaaagtaagtaatggagtcttttttttggcaggtctgcagtaaaagataacattttcttttcttagtcctcctgctctcaacccccatattttgcctttgaatacgtgggttttagtatatatagcccaaaatggtaactgtctccagaacagcaaccacattgaattcttgtgacttaggaaagcttcttatagttgctgacattaattgcaagaaataactatatactactttgagaagtaaacatgtcaaaaaaaacaaagttcagatatgggacaaaatttaaaaattcagtaacatttataaacagaattgaatgaaaagagttacagaccaacttaaacatcaattcgtgtcagtaaactgacttttgggggtaatgatcattgttttgtatctcaaaagtattgagtttagaaatcagttgtatgatactacctttgtatgtctgtcttttcccgtgtatttttaaataactggtgatctat

SEQ ID NO: 51903 - DNA, 604 bp, Homo Sapiens
gggcgactccctccccattggtcgagttatggagcgctccgaccagacagcgtctcattggccaaagatgggagggttccgcttaaagaccgcctcttactggccaggagtggacttggttagggctaccttctcattggttgcagccagaggcacttctgcccgggctgcctctcccccgctagggcctggtgcctctggctggaggctccctcccttggccgtcccaatagagcccggggctacttccactggccaggctcccgggcatctggttgaccccagcctggggaggagggctggtctccgctcctcaggggcttagtccgtcccaccccttcccttccctggcgccccgggcccaggcccctcagctgtcagctggttttgatggcctcccactgccccacacgccgcgggacctccaggggcgactctagtggcctgaggagatgtatttataggcccccagcagggctgctcccccctcggccggtgccccaggatgggctcctcccggcgggggcttggccaaagctttcttaataaaatgcctttcccctcaaaaaaaaaaaaaaaaaaaaaaaaaaaaaaaaaaaaaggg

SEQ ID NO: 51904 - DNA, 1352 bp, Homo Sapiens
  misc_feature (737)..(737): n is a, c, g, or t
  misc_feature (749)..(749): n is a, c, g, or t
  misc_feature (1322)..(1322): n is a, c, g, or t
acgagatgaggagcaactgaccatcctttccgctgtgttgctggtcaccttcagcatggcagcgcctggaatttccagccaggccgactttgctgagaaactcaagatgattgtgaagattttgctaacagatatgcacctgccctccttccatctgaaggacgtcctcactaccatcggggagaaggtgtgcctggaggtgagcagctgcctctccctgtgtgggtcctctcccttcaccacggacaaggagaccgtgctcaagggccagatccaggccgtggccagtcccgatgaccccattcgcaggatcatggaatctcgaatcctgaccttcttagaaacctaccttgccttgggtcatcagaagccattgcccacagtccctgggggactcagtccagtccagagagagctggaggaagttgctattaaatttgctcgcctggtcaaccataacaagatggtctttctgtccctactacaatgcaatcctgaataaaatccctcgtccgaatccctaactggtattgcacccctacagtcagccaggtattacctcccctaagcccacaggaaataccccggtttcagggaacctcctaaaatggccttgccaatttggggcaaaaaattggggcctcacttattgagcctaaccactgggcgtccttcatatttaaaaccgaagcggccaaccgctggaagtcttctccccataatatgtggtgggtcancgtagaaaaatnaaaatttctggtggatggggttcgacaattccccaactccattgggagttcatttggaccaacacaaaaaggagaagcgaaccctctttttggggttttatgtggcataaacaccaaaattgattgccctccccctaccacttggggatgaaatatttttccctcctacgacttttttttttcgtgcaccccctcgcaaacaaattgggggcgaccacactttttttctaactctgggaagagcggctggggccccacagagttttttttctctcacccgaaaaaaattcctctttcgatcaggcaatgactctgcctattttttttttgggggatacccataccgcgggagaggtttgtatatcccctccgggagggggtgtacatcaacttttttttacatacgcttgggtcctttgggataccttcccacttgactcccctgtgctccccacgccactattactagaggcgctccccattataccccacaagaggcaagggcgcctttggtggagcaaccttccgcctacacctttttatgtggatcacagttatattgggggttatganactttctctttatctgagaagagaaccgcc

SEQ ID NO: 51905 - DNA, 590 bp, Homo Sapiens
gagaaaaggaaagctccatcaaagaggacccccagccagcccggttctcggacaaccagctcatgtttggaaaaggaatcttccactgaaacatttggatacccgacgttctccctggacacttggcccggcaatagttggggtctcctgggaagctgagtgctggcttctagcctctccagttccctcagactctgtcttcagctcgggcccctccgttctgtctccctcgactccaagtcaggaataccgtgggcttcctgccctcaccccacacctcaagaccatcccactgcttgcctgcttgccccctgccatctcgcactcagccctgggtgcctgtgaagcctggccccactgcctgccgggggttcctgcagcacccccctactccaggctccccatctccctgaagcttccaggtagcagctggtgggacactgatctgtgagctctggaatgtctgcttagaattctgagaggcaggaactgctctgtctttgtaactactcaaggccaactgtcacatgaaggaatgaataaagagtttttactgaaaaaaaaaaaaaaaaaaaaaaaacaaacacaaa

SEQ ID NO: 51906 - DNA, 477 bp, Homo Sapiens
aattttttggtgtgttcacataaagggatgtagctaaaatgtttttcataggctattatatattctcgcagcatttccagttaagaggatattaggtatataattctcttcttaaccgaatgtcagatggtcttacgccacagggtgcaggtaacccttggtctgtaagcaccaccgatccagggatcattgtctaaataggttactattgtttgtttcatcttgcttttgcatttttattttttaatttccaaattttaagtgttccctctttggggcaaattcttataaaaatgtttattgtaaagttatatattttgtctacgatgggattatgcacttcccaattgggattttacatctggatttttagtcattctaaaaaacacctaattattaaaacatttatagagtgcctactgtatgcatgagttgagttgcttctgaggtacattttgaatgacagcatattgtaag

SEQ ID NO: 51907 - DNA, 559 bp, Homo Sapiens
agcgcacacaagagaatgattatgacatgttcccttcattttctgaattctcaaattcatcaggcttaaatatgacagacatcacaaggattatttttgagcacctggaaggactttctcaagtgttcagtgactgttttccaccagaacaagacttgcgttcaggaaatttgtggataattcacccttttatgaatcaccaaaataataatctcaccgacttcgaagaagaaaagctaacagagctatcttcagatttaggattacaagcactatttaaatcagtgtctgtaactcagttttggataaatgcaaagacaagttacccagaactccatgaaagggcaatgaaatttttattacccttttcaactgtttatttatgtgatgctgccttttcagctttgactgagtcaaaacaaaaaaatctgttgggttctggccctgccctaagacttgcagtcacatctttaattccaaggatagaaaaattagtgaaggagaaagagtagcaatatgcacattgcttaacagtgaagtcaataatcctgtgttaagt

SEQ ID NO: 51908 - DNA, 447 bp, Homo Sapiens
gtgtatttctagtagagatggggtttcccatactggctaggctggtctcgaattcctgacctcaggtgatccacccacctcggcttcccaaagtgctaggattataggcttgagctactgtgcccggcccatggtgtttttctttagggctcttcctacagccttgagaagtagataggcatcagagtatggtactataggaatcagaaaaattcaaaacaaatgtggattaagtgtttaggctctatgtggctcacgcagccagaatccttaagtctgtgtgtttctgtgtctcaagactgggctcacattctggctttgtccataacaatgctctgggatttcagggagttccctcatttgtaaaatgagggggtcagagcaggtgatatccatgtttcttccctttctgatattgttgtctgtggcatattctttgtatggcga

SEQ ID NO: 51909 - DNA, 1039 bp, Homo Sapiens
actagtgagaaaaattgctatggagaatattgagaatagatacaaggagacctacaggtttacaacattaatattggccaatacttgattggacagtttaaatttttcaacctgaaaggcctttgtgccccaaagtttggtaaggagattttgtaaaaacaaacaacaatagcaataaaaaatcagggaagattaagagatttcataaggagcaagaatttataggtaatacttaaaaggtataggtatgattactattttggtgaataataggcacatggtagactgaaattcggcaacagctactgtgcaaataagcatatctgtgattatggcttatatctggttggggacccctgttgtaagccattctttttagtacaggttaagctccatttctcaatcacagttctgttattttcatctgtgggaaataatgaattctgtttcagatttcgattgtcttttgtgctctttgtcatccaacagaattgcacatttcactttgtaaaatttttataactagtgttgacacttgaaactggcttttgagtcttctataatagtttgtgcagaagtctgaggtttaatgttatgatgggcttattcatactgtagaactatatactgcagcaatatgcagccaaatggtcagtaagctttttaaatgaactagctagatgttaagtattgatttaattctgggtcgaacatgcttacaaagctatactggaaccttaggacacatgacagcttccctgaaggttacgcgcgatttaaaaacacaaggcatatacaatcgagagtcacccagatgccatgtgtaaacaccgtgagtttgatgtttccgaaccattatgtggttcagcgcagccgtttaatacacaagaaccttagtagaaccttcagaacattctgtcacaggttatatgaacagatgaccacatcacaacacgcacacccggccgaagtcatagagaacataaataatgagaaaacgatataacatcagcgatgatcaaccagcatgcatactaaa

SEQ ID NO: 51910 - DNA, 508 bp, Homo Sapiens
tcctggaatccctgatccctgttgctcccttgcggagttttctagtccctcttatttgaagcatgtctttcagagcctcgcaccacccagcttgggtatctggtgaattctgtggtctgcatgtccatgtttttgacattctgggaagggtggcccaggctgtgatttgccatctactgctgcaggctatggatggtattcagaagggaggggagatgctgtgtgcgtgttctgaagggtttcccactaaatggagagactgactctctccataagtatttgatttttactttatctcctcgttgacttcacagtgtaagtgcagtttgtctctactgggtgatgcatgcagataaatgtttatgtgaacataagaagtctgcatgtgtgggtgaactctccacatcatgtcatttattgtccatcattacgtatctgtggtgtctagcacattcctctaccttattttctgtcattgtacctacttctacctgaacacgtattaaat

SEQ ID NO: 51911 - DNA, 885 bp, Homo Sapiens
  misc_feature (829)..(831): n is a, c, g, or t
  misc_feature (834)..(835): n is a, c, g, or t
  misc_feature (839)..(842): n is a, c, g, or t
  misc_feature (844)..(844): n is a, c, g, or t
  misc_feature (846)..(852): n is a, c, g, or t
aatggtgttaaaagtattggtgagaagactgaagcttcgttagtatggtttactcctccgagaacttcaaaccagtggcttgatttctggttacgtcatcgactccagtggtggagaaagtttgccatgagtccatctaacttcagcagcagtgactgtcaggatgaagaaggccggaaaggaaacaaactttactacaattttccctggggaaaggagttaatagaaaccctgtggaacctaggagatcacgaacttttacacatgtatcctggcaatgtgtctaaattacatggccgagatggacgaaaaaatgtggttccttgtgttctctctgtaaatggggacctagaccgaggcatgctggcctacctctatgattctttccagctgacagagaactcctttacaagaaagaaaaatcttcatagaaaggtacttaaacttcacccttgtttagcccctattaaggttgctttggatgtaggaagaggccccacattggaactaagacaggtttgtcaagggctatttaatgagttactagaaaatgggatttctgtgtggcctggttatttggaaactatgcagtcctcattggaacaactttattcgaagtatgatgaaatgagtattctcttcacagttttggttactgaaactactttggagaatggattaatacatctgagaagcagagacaccacaatgaaggaaatgatgcatatatcccaaataaaagacttttttgataaagtatatatcatcaggctaagaatggatagatttttatatttggataataaatattcgtctcctcctaaaaaannnggnngggnnnnanannnnnnnggggggggccggctcctaaaagtatcccctcca

SEQ ID NO: 51912 - DNA, 599 bp, Homo Sapiens
tccagcgttgatcttcacactcactgttcctatcaactcatgttgccagaggccattgccattgtttgctcaccaaagcataaagacactggcatcttcaggctcaccaatgctggcatgcttgaggtttctgcttgtaaaaaaaagggctttcatccacacaccaaggagcccaggctgttcagtatatgcaaacatgtgttggtaaaagacataaaaataattgtgttggatctgaggtgatatgttctgaatgtaagcaccgtcaacatcagacacctactcatggacatgtggttgccggattttcttaagatgtttccagaaatgactgatattttatatttatacattttagatgacaaagcttgatatttattgctgttgcacattttaaagttttctttttgggttgctctgtgtcaagagaggttacatggtgttaaatcggtacctgataatgtacccaaatactatggccagataataaattgtgctgcaaacaaaaaaaaaaaaaaaaaaaactcaagggggggccccgtacccaaattggcctatagtgagtcgtattacaaattcacttggccgtcgttttacaa

SEQ ID NO: 51913 - DNA, 677 bp, Homo Sapiens
  misc_feature (11)..(11): n is a, c, g, or t
  misc_feature (676)..(676): n is a, c, g, or t
tgtaccccatnagcaggtgaggatctgttgcttgtgcaaagtgtgacctaaggtttaggctgcctacaggaaccagaaaactctgattctgtgtcatttacatgtgtaaaatctgaaacttggggccaggacatccaaaatgggaatcctcacttaccaacgttggaggacaccgcccggttcatgatatcaagtgcctcattaaatttgtccttgacagatggatgtgccagcacttggtctgagaacatcgacttccaacccaggtaccacttggtgatctcctcataatttgggctgttactgagccaagagcacagcacctgccaaaaagaaaaattacttgcatccatcgtggcaacaaatgaaggcaagatttctgaagtggccatttgttttgttttgatcctggtcctacaggctagtgacactactttacagggatttatagtagctaaacagtctagcacttatgaatatggattttggagtcagcctggtagctaaagtgcccttgcatgtaaactctctgagcctcagcttccatgtctacacaacagggataccatatcccctaccccatagggttgctgagaggagctgagataaagcaaataaagtgcttggaacagcttctgatacatggcaaatgtccaataaatggtgcccactttgna

SEQ ID NO: 51914 - DNA, 647 bp, Homo Sapiens
cctgccagaagagatcctgacccccacactctaccatggctactatgtccggcctcgggccgccccagctggggagggcagcagggcaggggcctccgagcttaggctcagtgagggcaagttccaggcatttctggatgtgagccactttaccccagacgaggtgactgtgaggactgtggataacctgctggaggtgtctgcccggcacccccagcgcctggaccgccacggcttcgtgtcccgagagttctgccgcacctatgtcctgcctgctgatgtcgacccctggcgagtccgagctgctctctcccatgatggcatcttaaacctggaagcacctcggggtggccgacatttggacacagaggtcaatgaggtctacatctccctgctccctgcgcctcctgatccagaggaagaggaggaggcagccatagttgagccctgattgccacagacccagcacccagcaaatccctctctacctcccaaggtgatatgggcagctgcccaccactccagaggtagcagcatccttgggggaagggaaaggtgcatggtccacaatgtatggtttggtcccatgggacatgtcatagccttggtttagttttgggtggagctgaataaacccaaatctcagg

SEQ ID NO: 51915 - DNA, 534 bp, Homo Sapiens
aaatcactatttcacttgcccaaaattttaaatattttttcatctaaacttgtattgtttcccatagcagaatgtcaatattcacagtacatttctgtaaagagcaaaccaatataatgttttgagtgttgaaaaaaattccagatttttgaagaattagacaactcttcatctaccttatttctagttcacacagttatctcaaattccactgaaactaatgggatactgtcttgtgtagatgccagttgagtttataatgtgacctagtaaagctgtcttttttgttgtgttgtatgagtgtcggatcatgcttttaggaatacttttattaaaatggtgtgcattcatgcaaaaggccaactggcttttgtgaacaatagatcttttctcccctttattttgttctcttgacacttttgtgaaaattacctagcctgataaaaacattttgtaaaaatttgtataatactgttataaaatatttataatcccagaaaatgttgtgttaaatcttgtgcaaaaacagtatat

SEQ ID NO: 51916 - DNA, 749 bp, Homo Sapiens
agtactgatgaaatctccatctccagcattacacccacctcagaagtacaaagatagaggaattttacatcctaaacgaggtactgaggaccgatcagatcagtcttctctgaaatctacagacagcagtagttacccaagtccttgtgctagtccttctcctccatcctcaggaaagggctcaaatttttcttcgccaagaccaaacatgcctgttcgatacttcataatgaagagtagcaatttgagaaaccttgaaatttctcaacagaagggtatctggtctacaactcctagtaatgaacggaagctaaatcgagccttttgggaaagcagcatagtttacttggtattttctgttcaaggatctggacatttccagggattttctaggatgtcttctgagattggaagggaaaagagtcaggactggggctctgctggactaggaggagtatttaaggtggagtggatacgaaaagaaagccttccctttcaatttgcacaccatttactcaatccatggaatgacaacaagaaagtgcagataagcagggatgggcaggaactagaacctcaggttggtgaacagttgctccagttatgggaacgtcttcccttgggagaaaaaaacacaactgattgacactcagaactcttaacttgggaagaacatcatgcctatttataaccactgaatgcactgactctcaaaaactgaggtggggtgggtgttaccaatgggcttt

SEQ ID NO: 51917 - DNA, 675 bp, Homo Sapiens
  misc_feature (12)..(12): n is a, c, g, or t
  misc_feature (659)..(659): n is a, c, g, or t
cttgtcaacccntgagggtcaagttgtgaagttctggaggccagaggagcccattgaagtcatcaggcctgacatagcagctctggttagacaagtgatcataaaaaagaaagaggatctatgagaatgccattgcgtttctaatagaacagagaaatgtctccatgagggtttggtctcattttaaacattttttttttggagacagtgtctcactctgtcacccaggctggagtgcagtagtgcgttctcagctcattgcaacctctgcctttttaaacatgctattaaatgtggcaatgaaggatttttttttaatgttatcttgctattaagtggtaatgaatgttcccaggatgaggatgttacccaaagcaaaaatcaagagtagccaaagaatcaacatgaaatatattaactacttcctctgaccatactaaagaattcagaatacacagtgaccaatgtgcctcaatatcttattgttcaacttgacattttctaggactgtacttgatgtaaatgccaacacactagaccactctttggattcaagagcactgtgtatgactgaaatttctggaataactgtaaatggttatgttaatggaataaaacacacatgttgaaaaatgtaaaatatatatacatagattcanaaaaaaaaaaaaaaaa

SEQ ID NO: 51918 - DNA, 717 bp, Homo Sapiens
  misc_feature (12)..(12): n is a, c, g, or t
  misc_feature (20)..(20): n is a, c, g, or t
  misc_feature (621)..(621): n is a, c, g, or t
aacaaattaagnagttcagnataattgaataagtacctttgtgtccttgttcatttatatcgctggccagcattataagcaggtgtatacttttagcttgtagttccatgtaccgtaaatatttttcacataaagggaacaaatgtctagttttatttgtataggaaatttccctgaccctaaataatacattttgaaatgaaacaagcttacaaagatataatctattttattatggtttcccttgtatctatttgtggtgaatgtgttttttaaatggaactatctccaaatttttctaagactactatgaacagttttcttttaaaattttgagattaagaatgccaggaatattgtcatcctttgagctgctgactgccaataacattcttcgatctctgggatttatgctcatgaactaaatttaagcttaagccataaaatagattagattgttttttaaaaatggatagctcattaagaagtgcagcaggttaagaattttttcctaaagactgtatatttgaggggtttcagaattttgcattgcagtcatagaagagatttatttcctttttagaggggaaatgaggtaaataagtaaaaaagtatgcttgntaattttattcaagaatgccagtagaaaattcataacgtgtatctttaagaaaaatgagcatacatcatcttaaatcttttcaattaagtataagg

SEQ ID NO: 51919 - DNA, 919 bp, Homo Sapiens
  misc_feature (600)..(600): n is a, c, g, or t
  misc_feature (627)..(627): n is a, c, g, or t
  misc_feature (645)..(645): n is a, c, g, or t
  misc_feature (675)..(675): n is a, c, g, or t
  misc_feature (692)..(692): n is a, c, g, or t
  misc_feature (745)..(745): n is a, c, g, or t
  misc_feature (796)..(796): n is a, c, g, or t
  misc_feature (821)..(821): n is a, c, g, or t
  misc_feature (825)..(825): n is a, c, g, or t
  misc_feature (835)..(835): n is a, c, g, or t
  misc_feature (854)..(854): n is a, c, g, or t
  misc_feature (875)..(876): n is a, c, g, or t
  misc_feature (878)..(878): n is a, c, g, or t
  misc_feature (913)..(913): n is a, c, g, or t
  misc_feature (916)..(916): n is a, c, g, or t
gcaacaacttcagaagagaatacattgtcactcagggaccgcttcctggcaccaaggatgacttctggaaaatggtgtgggaacaaaacgttcacaacatcgtcatggtgacccagtgtgttgagaagggccgagtaaagtgtgatcattactggccagcggaccaggattccctctactatggggacctcatcctgcagatgctctcagagtccgtcctgcctgagtggaccatccgggagtttaagatatgcggtgaggaacagcttgatgcacacagactcatccgccactttcactatacggtgtggccagaccatggagtcccagaaaccacccagtctctgatccagtttgtgagaactgtcagggactacatcaacagaagcccgggtgctgggcccactgtggtgcactgcagtgctggtgtgggtaggactggaacctttattgcattggaccgaatcctccagcagttagactccaaagactctgtggacatttatggagcagtgcacgacctaagacttcacagggttcacatggtccagactgagtgtcagtatgtctacctacatcagtgtgtaagagatgtcctcnaaagaagagagctaccgagtgaacaanaaaaccccttgtttccgntctatgaaaatgtgaatcgcaagtatcccnaagatcgagtctattcnaggcattgagaatgtacctgaaaacgctcctggataagaattattccccggtntgagtttgctttttaaaaacttgctgcggtggccctaaagagggggccagnctatgttctggttgaagcgcatgcngctnatctctcttnaatcctgggaagaagtggntccaacacctctggctgatanntnttcacaagggggacaacacaacggactagattggntancat

SEQ ID NO: 51920 - DNA, 580 bp, Homo Sapiens
atgacttacccagaaggcaacgcttctctttctggtcaaaatggctggtaagcaggccgtttcagcatcaggcaagtggctggatggtattcgaaaatggtattacaatgctgcaggattcaataaactggggttaatgcgagatgatacaatatacgaggatgaagatgtaaaagaagccataagaagacttcctgagaacctttataatgacaggatgtttcgcattaagagggcactggacctgaacttgaagcatcagatcttgcctaaagagcagtggaccaaatatgaagaggaaaatttctaccttgaaccgtatctgaaagaggttattcgggaaagaaaagaaagagaagaatgggcaaagaagtaatcatgtagttgaagtctgtggatgcagctgttatgaagatggttaaacttgaaacaaacaattttaagaattatttggtctgaagatgttttactttaaataaatgtctattgtaatggctggaaaaaaaaaaaaaaaaaaaaaaaaaaaaaaaaaaaaaaaaaaaaaaaaaaaaaaaaaaaaaaaaaaaaaaaaaaaaagggg

SEQ ID NO: 51921 - DNA, 915 bp, Homo Sapiens
aggagtgagatggcctcaatcttgcgacgcctcaggctctccagctcactctagccctgatcaagcctgacgcagcgcccatccactgattctggaggctgttcatcagcagattctaagcaacaagttcctgattgtacgaatgagagaactactgtggagaaaggaagattgccagaggttttaccgagagcatgaaggtaaggaggtagaagtacagaaagttgccttgggcaccaggatgaaggtatcttgatgaaggtcctctctctttgcagggcgttttttctatcagaggctggtggagttcatggccagcgggccaatccgagcctacatccttgcccacaaggatgccatccagctctggaggacgctcatgggacccaccagagtgttccgagcacgccatgtggccccagattctatccgtgggagtttcggcctcactgacacccgcaacaccacccatggttcggactctgtggtttcagccagcagagagattgcagccttcttccctgacttcagtgaacagcgctggtatgaggaggaagagccccagttgcgctgtggccctgtgtgctatagcccagagggaggtgtccactatgtagctggaacaggaggcctaggaccagcctgatgcaggtctatgaagaccagtggtagtgcccagacttctcctagacatctagtctaaaacattctcctaggaccagggaagcctggcttacagtgccatttctgctgggcaccaccacctgcctgagggcctagctcaccacagcacatcctccaggatctagccttctatctacctcttctctggaatgtttatggtggttcagaagaatgatgactcctctttgctgagaactgttcatccttcttcaagaagaagcttgccaggcc

SEQ ID NO: 51922 - DNA, 440 bp, Homo Sapiens
ggatttaaagcacatttcacgattcttgtcacattggggtctccaaagctagaatgggatttcatgtgcttggaaacttgcagtagaatcagggactgacatcgcagttcctctcctctcttcattccctcacagcagattggccggcaccaatcttagtcaagagtggctgtgatcacatttgtgatcaattatgtgagaattttatataattgtcttcatttcaattaaggctgaaagcataaactctagaggtgactcagtcaggactgacagtaatgtgataattgccttcattttcaacccaggagtgcctctcacagctatatgactacggatccattagtgaggagcgacacacacacctgtaggcatcctgtgcaaacactttgtcattatcaagagagatggcagtattgaccatttagtttagttaaaag

SEQ ID NO: 51923 - DNA, 635 bp, Homo Sapiens
cattctctcatgggacaatgttggggtttttcagactgacaggactgcaagagggagaaaggaattttgtcaatcaaaattattctgtattgcaacttttctcagagattgcaaaggattttttaggtagagattatttttccttatgaaaaatgatctgttttaaatgagataaaataggagaagttcctggcttaacctgttcttacatattaaagaaaagttacttactgtatttatgaaatactcagcttaggcatttttactttaacccctaaattgattttgtaaatgccacaaatgcatagaattgttaccaacctccaaagggctctttaaaatcatattttttattcatttgaggatgtcttataaagactgaaggcaaaggtcagaatgcttacgggtgttatttttataagttgttgaattccttaatttaaaaaagctcattattttttgcacactcacaatattctctctcagaaatcaatggcatttgaaccaccaaaaagaaataaagggctgagtgtggtggctcacgcctgtaatcccagcactttggggagcccaggcgggcagattgcttgaacccaggagttcaagaccagcctgggcagcatggtgaaaccctg

SEQ ID NO: 51924 - DNA, 804 bp, Homo Sapiens
tggaggcggcggtgggaaagcctggcccacacacgtggtctgtagcgacagcggcttggaagtgctctaccagagttgcgatccattacaagattttggcttttctgttgaaaagtgttccaagcaattaaaatcaaatatcaacattagatttggaattattctgagagaggacatcaaagagctttttcttgacctagctctcatgtctcaaggctcatctgttttgaatttctcctatcccatctgtgaggcggctctgcccaagttttctttctgtggaagaaggaaaggagagcagatttactatgctgggcctgtcaataatcctgaatttactattcctcagggagaataccaggttttgctggaactgtacactgaaaaacggtccaccgtggcctgtgccaatgctactatcgtgtgctcctgactgtggcctgtagcaaaaatcacagccagctgcatctcgtgggacctccaagctcctctgactgaacctactgtgggaggagaagcagctgatgacagagagaggctctacaaagaagcgcccccaaagagtgcagctgctaattttagtcccagtaccagacatccccagactccacagatgtaatgaagtccccgaatgtatctgtttctaaggagcctcttggcagtccttaagcagtcttgagggtccatcctttttctctaattggtcgcctcccaccagactcacctgcttttcaacttttttaggagtgcttcctcacagtttaccagaataaagaaagctggccaccaaaaaaaaaaaaaaaa

SEQ ID NO: 51925 - DNA, 741 bp, Homo Sapiens
tcaagcgcaagctcacctaccagttcgacagcgcgctgctgcctgcagtccgccgggcctgagcacacccgaggctcccacctgcggagccgctgggggacctcacgtcccagccaggatccccctggaagaaaaagggcgtccccacactctaggtgataggacttacgcatccccaccttttggggtaaggggagtgctgccctgccataatccccaagcccagcccgggcctgtctgggattccccacttgtgcctggggtccctctgggatttctttgtcatgtacagactccctgggatcctcatgttttgggtgacaggacctatggaccactatactcggggaggcagggtagcagttcttccagaatcccaagagcttctctgggattttcttgtgatatctgattccccagtgaggcctgggacgtttttaagatcgctgtgtgtctgtaaaccctgaatctcatctggggtgggggccctgctggcaaccctgagccctgtccaaggttccctcttgtcagatctgagatttcctagttatgtctggggccctctgggagctgttatcatctcagatctcttcgcccatctatggctgtgttgtcacatctgtcccctcatttttgagatcccccaattctctggaactattctgctgcccctttttatgtgtctggagttccccaatcacatctagggctcctccaagaaaaaaaaaaaaaaaaaaaaaa

SEQ ID NO: 51926 - DNA, 590 bp, Homo Sapiens
tggccgggattacagcagtgaactatttccacctggtaagaagggtgcacttgagaagggggttcaagtactctaggaacatagatgtaagttctggatgcacagtagttgttgcttagctgtaagctggaaatttcaaggcagaaacagcagataccacaactataactgggtctccttgtttttggttttatgtgtatacgtgagattatggggaaagacaaaagtaatgcatagagatttattttttaacattcaattcataagcagggtttatacctcttggtacttacttgaaaagtgtatattatgtaaatttagtataaaaacactgggactaattcataccatgtggtaaaatttcacattcaaaagaaatacccttctgttattaaaaataaaaaaaaaaaggagccaggagggtggctcatgactgtaatcccagtgctctgggaagccaaggtggagggatcatttgaggccaggactacttgagaacagcccgggcaacatagctagatcccttctctacaaaaagtgaaaaaaaaaaaaaaaaaaaaaaaaaaaaaacatgtcggccgcctcggcct

SEQ ID NO: 51927 - DNA, 721 bp, Homo Sapiens
atttcctcaatgacctgaagaaggagaacttcagcctcaagctgcgcatctacttcctggaggagcgcatgcaacagaagtatgaggccagccgggaggacatctacaagcggaacactgagctgaaggttgaagtggagagcttgaaacgagaactccaggacaagaaacagcatctggataaaacatgggctgatgtggagaatctcaacagtcagaatgaagctgagctccgacggcagtttgaggagcgacagcaggagacggagcatgtttatgagctcttggagaataagatgcagcttctgcaggaggaatccaggctagcaaagaatgaagctgcgcggatggcagctctggtggaagcagagaaggagtgtaacctggagctctcagagaaactgaagggagtcaccaaaaactgggaagatgtaccaggagaccaggtcaagcccgaccaatacactgaggccctggcccagagggacaagatctaaaaaaaataatgctgggaagtcctaaccacatcaagaatgcctcagatcagtgacccaaggaccttccagaatggatgaaatagacccaaagctgaattcacctaattttagggccaaaaacccaaaaaacaaaacaagaccaaaaaaatcttcagatactgggagaacaaatctcaattgctcaattgtatcttatgaaaacaatttttcaaaataaaacaaga

SEQ ID NO: 51928 - DNA, 671 bp, Homo Sapiens
cccccaaacatcgtcccagaggacagcagccaaagagcctcctggctcagagccgtcagctttcgcgttcctgaacgcctgacccgatggcctggccctggagtcttcagcttcagctgctgtctggggcggtctgtgcttcctgagcagcctcaaccgtagctgctacagtctccaggcagcttgacttgagaggacgaccctagggctacctcagtttcccccatctcctctgccagaggctctggctatttggacttgaatccctacgagggatggcaggtggcagggcttcagaaatgtcgatctcagggctctcagggggcagtccctgcctgtcttgccctcagacatgaggtttcttgtatgaatgcggaagcgactaccaggttccttatttcattttgatctcagctccctccttccccaggaggtcatgagcagcaacaagccactgctcccccgtcccatcggggtggggtaggtgctgaggctgggtttggtgcatgtgggttgagggtgtcttgtccgggctgccttgtgctgtctggcctgaggccatttcaagtctcagatccctacgtgatccttccctggctctcacctgctcctttaggctgtaattgcttcctacacacgaagcctctgattggagcctctggtccatctca

SEQ ID NO: 51929 - DNA, 585 bp, Homo Sapiens
tgacttgaaaacagcaggaccacaatctcagttgcttgctggaattgttgaggataagccaccttctactatgcaattggaagatgatgatcatggcccaccagctcctcctaacccatttagtcatctcacagaaggagaacttgaagagtataagaggacaatcgaacgtaaacaacaaggcctagaagatgctgagcaggaattactctcagatgacgcttcatctgtgtcacaaattcagtctcaaactcagtcaccgcaaaatgtccctgaaaaattagaagaaaaccatgagctgttttccaagagcttcatctccatggaagtgcctgtcatggtagtaaatggcaaggatgatatgcatgatgttgaagatgagcttgctaagcgagtgagtaggttaagcacaagtacaaccatagaaaacatcgagattactattaagtctccagagaaaatcgaagaagtcctgtcacctgaaggctccccttcaaaatcgccatccaagaaaaaagaggaaatttcgcactccttctttcttgaaaagaacaaaaaaaggaagaaggtgaggcctaaataaag

SEQ ID NO: 51930 - DNA, 580 bp, Homo Sapiens
atcgctcctactgctactactttaatgaagaccctgagacctgggttgatgcagatctctattgccagaacatgaattcaggcaacctggtgtctgtgctcacccaggcggagggtgccttcgtggcctcactgattaaggagagtagcactgatgacagcaatgtctggattggcctccatgacccaaaaaagaaccgccgctggcactggagtagtgggtccctggtctcctacaagtcctgggacactggatccccgagcagtgctaatgctggctactgtgcaagcctgacttcatgctcaggattcaagaaatggaaggatgaatcttgtgagaagaagttctcctttgtttgcaagttcaaaaactagaggaagctgaaaaatggatgtctagaactggtcctgcaattactatgaagtcaaaaattaaactagactatgtctccaactcagttcagaccatctcctccctaatgagtttgcatcgctgatcttcagtaccttcacctgtctcagtctctagagccctgaaaaataaaaacaaacttatttttaaaaaaaaaaaaaaaaaggcc

SEQ ID NO: 51931 - DNA, 759 bp, Homo Sapiens
agtttctgtttctattcttgttcttctctcttgcctttattctatggccttgatgtcaaggtgcctcttaaagagtaaccgaaaacatggataagatcccaggaagacaagtgcttctaaaccttcaaagatggcaaaattgtttacaccagtgagagggagatcaaaagctaagaactaccctgtagccaggactacaactgtgtattttaaagccattattcaaggtttcttacttgacagttcctacacaaccctgttgaaattctattttatatgctgcatttaatgaaacatgtatatgtcaaatcagaagagaagaactataaacatatattgtgtaaagaaaaagttcagcaatggaactagtttctgcagatcaagcaaagatgtgtcttgggcatggaaccaaagttacaatgaaatattcaacccctgctgtgcaggggggtcattttaatgtaacaccacaccccatggaaacactagtcctgataataaacatcattttaaaagatcaaaacaaacaaacaaaaaaaacaaggggtgggtggggagtgaagcacgaggaatacctatgaagagctatttacaataaaatgtttcatttgaaaagtctggtttcttactacaggggattggttttctgtctttatgattgttttaaactcaggaacagagacatccgcatcgtaaatgggaagaaaacactctctgttttgttttcttccaaaggtgagcttggggaatcattcacaa

SEQ ID NO: 51932 - DNA, 710 bp, Homo Sapiens
  misc_feature (23)..(23): n is a, c, g, or t
  misc_feature (32)..(32): n is a, c, g, or t
atgcgaccagatcactggccagnttgtggggntttttgccctgtgctggttacctgtgcatgctgttaactgtgtcactcttttccagccagctcagggtaaaaataagcccaagtgggcaatgaatatggccattcttctgtcacatgccaattcagttgtcaatcccattgtctatgcttaccggaaccgagacttccgctacacttttcacaaaattatctccaggtatcttctctgccaagcagatgtcaagagtgggaatggtcaggctggggtacagcctgctctcggtgtgggcctatgatctaggctctcgcctcttccaggagaagatacaaatccacaagaaacaaagaggacacggctggttttcattgtgaaagatagctacacctcacaaggaaatggactgcctctcttgagcacttccctggagctaccacgtatctagctaatatgtatgtgtcagtagtaggctccaaggattgacaaatatatttatgatctattcagctgcttttactgtgtggattatgccaacagcttgaatggattctaacagactcttttgtttttaaaagtctgccttgtttatggtggaaaattactgaaactattttactgtgaaacagtgtgaactattataatgcaaatactttttaacttagaggcaatggaaaaataaaagttgactgtactaaaaatgt

SEQ ID NO: 51933 - DNA, 550 bp, Homo Sapiens
agaatggagcatgggggtggcagtggctagggacatttcctggggacactctcccctaaccccccagaaggacttcacaaaaacctgtggataatggaagggatgttacggtacaaacgtatatttatgtgtgtgtgtgtgtatgtgtgtgcgcgcgcgcgtgtgcacataggcgtgatgtctgtgaccctcctctcctcgtcacatttcccccagaatgaatgctgtcctgtctgctcatgtttgtgttgaagctgccaaagtcggggagctctggtcctgcccagacccctttggaattgctggcccatcctcccactggagagctggggtgcagctcaccttggggaaggaaacctcatgcctcagagtaatttcttgtgaatgcaaagcctgggggagcgggtctttggggggcaaggagccagtcaggggcttgtttcccctcatagagctccccagacgtgcctccgcaatgcctgaaacccagacctaggctaataaacggttcaatttctgtaacaacaaaaaaccaaaacacaacaaaaag

SEQ ID NO: 51934 - DNA, 880 bp, Homo Sapiens
gtgaagagaaggtcttccccagccccctctggactccatgcaccaaggtcatggccaggagctcttggcagctcagccctgccgccccagagcatgtggcggctgctctctaccagccgagagcttcggagatgcagcatctgcggcgaatgccccgagtccggagcttgttccaggagcaggaagagcccgagcctggcatggaggaggctggtgagatggagcagaagcagctgcagaagagatttgggggcttcaccggggcccggaagtcggccaggaagttggccaatcagaagcggttcagtgagtttatgaggcaatacttggtcctgagcatgcagtccagccagcgccggcgcaccctgcaccagaatggtaatgtgtagccggaaggggcgctcctcccagctgtaccggccactgcaacccatgagcgtccaggtgatcccccaaacagcatgtgctcagccccagacctgccgcctgggaatcaggattccttcttccccaaggcactgagcgcctgcagatcccgcaggcttcgtttgcctccagaaccttcccgtctgattgttcctccccagccccctggcatgtttcaccacaaccctgttgctacatcagagtgtattttttgtacattcctctagctaccatttcaatagccccatctctcctgctcacccgcctcttggccccttctaggggcaggtgaaaggaataggaaattgaaccctggggttttgacttgccactgccataacttgtttgtaaaagaggttgttcttttgactgattgtttaaacaacgattctccttaaactctactgagcattggttaaaacccaagaaaaaaaacccggcctctttgggggga

SEQ ID NO: 51935 - DNA, 858 bp, Homo Sapiens
  misc_feature (17)..(17): n is a, c, g, or t
  misc_feature (584)..(584): n is a, c, g, or t
  misc_feature (848)..(848): n is a, c, g, or t
atgtcaatgcctttggnatttcccccactggagccctctagtactactagggcatactatggaaatattaatttttttggaggtccttctaatacatctgtgaagacttctgcaaaactaaaacagctagaagaggagaataaagatgctatgtttgtgtttttatctgatgtttggttggaccaggtggaagtattggaaaaacttcgcataatgtttgctggttattcaccagcacctccaacctgctttattctgtgtggtaatttttcatctacaccatatggaaaaaatcaagttcaagctttgaaagattccctaaaaactttggcagatataatatgtgaatacccagatattcaccaaagtagtcgttttgtgtttgtacctggtccagaggatcctggatttggttccatcttaccaaggccaccacttgctgaaagcatcactaatgaattcagacaaagggtaccattttcagtttttactactaatccttgcagaattcagtactgtacacaggaaattactgtcttccgtgaagacttagtaaataaaatgtgcagaaactgcgtccgttntcctagcagcaatttggctattcctaatcactttgtaaagactatcttattccaaggacatctgacttccctacctctttatgtctgcccagtgtattgggcatatgactatgctttgagagtgtatcctgtgcccgatctacttgtcattgcagacaaaatgatcctttcactacgacaataccgaatggctctgcataaaccctggctcttttccagaagtggatttcattcaaagttttttttccttctataagaaggggnagataggcaa

SEQ ID NO: 51936 - DNA, 628 bp, Homo Sapiens
ctcgggaccgtccttatcccatttaattaatttctctgacaattcaattattttctgttattaatgttgccactgctttctgtttgtctgcactttcttgataaatatttgctatcgttttactccagtcattcgatgttgctgagatttacatatgactcttgtcaacatctcatcttttgacccaatcttattcatttaataagaggtctcattcatttgcatggaaaaatgctcattgtatattgcaaagtgaaaataacgagttgcaaaacagtgtatacatatatgtgtgtatatatgtacactttatttgtacatttctatgtgacataatgcaaaggaaagtgtctgattttattatacaccaaaggttaacagtgaatctctgtgtgatctcttttttttctttttgcctatctgcatcttctcacttgccaaaaaatgaatatatgtttatgtgtgtatattacttgtgtcacaaaaaaccctaaagtagacagtaaaagaacttgtcaatcgcctttggaaggcaatgaaacacttaataaactctcaataacagaagcgtaaaaatgaaatgtaaacctccaattacctctggatctcttagccagagtaataaact

SEQ ID NO: 51937 - DNA, 624 bp, Homo Sapiens
  misc_feature (570)..(570): n is a, c, g, or t
  misc_feature (572)..(572): n is a, c, g, or t
gatgtgagctctctcgggtcgacggggccagcggctttcctgctgtttactaacattagattctcataggaccaggtttacagagctttatatttgcactaggattttttttttttgtaattgtcacagaaaatgtaattgtgggtgtgtgtgcgtgcgtgtgtgtgtgtgtgtgtatcgtgtgtgtgtgttttgttttgatttgggggatattttgtacaaaaagaaaacccacgggaagatgtccgtggagaggcagagctttcatactgaattagatgtattttatgggaatttggtaaatttttctttgtatttttttttttacatataagtatatatacacttagagattgtcatatacttttaccacttgaattgatcttcttgccagcaatagatctcattttcaaaagcaattcttcggtgctgtgtagcctggcagaaagttctgtccagtaaacgcaggatggaattttcctgggactctacacccatcttaaggtggtataccttccaaatcctggttcagatggaagaaatagcaggagagaggacccattagctggnanacccagggggaagaaaggagggctgtgaggagataccctcattaaacttggc

SEQ ID NO: 51938 - DNA, 986 bp, Homo Sapiens
  misc_feature (986)..(986): n is a, c, g, or t
gccagataacaccctgaggtggaaagttctgccgggcatcctattcttgtggggcttgttcctgttggggtgtggcctgagcctggccacctctggaaggtgctaccacctaaggcacaaagtgctgccccgctgggtctgggagaaagttcctgatcctgccaacagcagttcaggccagccccacatggagcaagtacctgaggcccagccccttggggacttgcccatcctggaagtggaggagatggagcccccgccggttatggagtcctcccagcccgcccaggccaccgccccgcttgactctgggtatgagaagcacttcctgcccacacctgaggagctgggccttctggggccccccaggccacaggttctggcctgaaccacacgtctggctgggggctgccagccaggctagagggatgctcatgcaggttgcaccccagtcctggattagccctcttgatggatgaagacactgaggactcagagaggctgagtcacttacctgaggacacccagccaggcagagctgggattgaaggacccctatagagaagggcttggcccccatggggaagacacggatggaaggtggagcaaaggaaaatacatgaaattgagagtggcagctgcctgcaaaaatctgttccgctgtaacagaactgaattggaccccagcacagtggctcacgcctgtaatcgcagcactttggcaggcaaggtggaaggatcacttagagctaggagtttgagaccagcctgggcaatatagcaagaccctcagtacaaaataaacgtcagaaacaaaaacaattagcttggggcattatggcacacacctgttatccgagccacttggaagctgagggggagatcggttgagccaggagttcgaagtgaggactctgattgcacatggatccaggtgcgtaccaatggactttttcaaatatacatattaagggcaaaatcgaaan

SEQ ID NO: 51939 - DNA, 553 bp, Homo Sapiens
cacgaggctgctcactaaagttgttcccctgatctctaaatatggaggtcattaccaagaaatgctttggtatgaatgagagccagatctccactgtgtgagccagtgaattatggctaattcggctgttacagccactggttggctggattttaaaccataaaacttgaagattacctacaaaagtaacagtgtggctataagcctgagctttaatggatatacatcctcacagaaaagttggaaataaccaaaactgaagtcttaatttaccttcagtttaatctgtggatttgttcaaatactaaagatcctcaggtccagaattccagcatcatttattcttttaaaatttttaagaacttgatccattgtatcagtacctcacaatcagagttggcaaatgatggatgagtgattcaagcagtgcacccggtggaagctgaaatccatctgtgaatggaactgaagtgaacgtgaatatgctgactatatcctggaagcatttttataccatcttgaaatttcaacaaactggcttttgccagttaat

SEQ ID NO: 51940 - DNA, 612 bp, Homo Sapiens
  misc_feature (399)..(399): n is a, c, g, or t
cactcagttcccgttttcttcaaggacatgaaaaaactcatactggagagaacccgtatgaatgtaaggaatgtgggaaagcattgcttctctcagttccttgcatagacactaaaaagactcactggaaaaaaactcacactggagagaacccgtatggatgtaaggaatgtgggaaagcatttgcttctctcagttccttgcatagacataaaaagactcactagcattctctctaaatgtatggaatgtgggaaagcatttattaattttatttcatttcagatacttgtacgaaacacattggagatagaccctgtgaatgtaagcacttggtaaaaccttaagtaatttcagtttctttccagtacagtcatcccttgatacctgctgggtatnggttccagcactccgtgagccatgtccagtcccttttataaaatgacatatttgtatgtaacttacccacatcctcttgtatactctcaattatgtctagattacttaaaatacctcatgcattgtaaaagctatgcaaatagttgttctattgtattgtttagggactcatgataaggaaaagagtctatgtattttcagtatagatgcaga

SEQ ID NO: 51941 - DNA, 579 bp, Homo Sapiens
tatcagcttgggaaacgctttggtgcttttctccagttttctggtaccagttacttgtttataaactgaaccttttctgtatatagccatggtttcattcttatcagtccaaccctttgcctgaaacattgaatcttgttaaaccacagcttttagctaaaatgaggtatacctagatgtcaagtaagacagatccaaggtaactgggtaggaaatcttttgacatcttaactcatgttgagtttgtgctgtggtgtcaccagaattccagataaacacacagcctttcccatacctttttttttcttactataaaatattataagatccattgatgtccaaataataccaccaagcatctcttcacctctcctcctcttggtccacttgctaatgcccagttttcttctccatttccactttttcttaggctccctatttactattcattttgacttccttctgttttatttttttccctttagcattgcatgtgaataagaaaataatgtttaaagaaaaaaaaaaaaaagcaaacctccaaaacgtggacctaaccattgcttcacttacacttca

SEQ ID NO: 51942 - DNA, 751 bp, Homo Sapiens
aagattaaacagatgatgagaatttctaaaaagattagcaaggtcatttcttcagtcagaaaactttaaaaaatatttattaaataaaatcaatttttaggaagttttctgtagtcatttactaaacatatgatttcactagaaaagctgatcataagtgaatttatacctacctgtgtggtactctgaaacacactgaaagctctgttgcaattaggattttgatgtgacaataatattgttgtataatttcgagatttgtaggaaggtctcattcttccaagctgagagtctagcactcattttctataacagatatggcagcttagaggtgttggctttgtttggatgtaatttagggtactaaatttaaatttaaagatattgttcaaacaatatcatatcatcacattgagctgatataaattctgtgggtccgataatatctttgtgataatttaagagctaaccagttaccacacatctatgatataaccctaacacacacagaaaagcatacatgcaaaaagaaatgactaattagggtacatttataattgcatctaggtaatttttaccctaatgtcttcataaagtacttgagtgtaatgtttgttacctccaacagaactaaatgttctatggttatgaaagaatatatttatttaaagcattgcttttattttgaaaagcttcttaattaatttgattaacaaatatgctaatttggggaaacctagagaagataatt

SEQ ID NO: 51943 - DNA, 892 bp, Homo Sapiens
  misc_feature (649)..(649): n is a, c, g, or t
  misc_feature (669)..(669): n is a, c, g, or t
  misc_feature (672)..(672): n is a, c, g, or t
  misc_feature (808)..(808): n is a, c, g, or t
gccgccaaagcaggccgtctggtccaccggcgtcgctgggttcttcggtgcttctggccgagcaggcggcctacttgggcagggctggacgctgggacctggagctgccgccgtctcttcaaagccatgataccccctcgtgggaagaagggaccgacgcgcgagtcgcgctccgcagtcgagccgggaggaacccaggctgctgccctgcccagcccgaccctgccccggccccgcttccaccttgcgcatttggtactggcttttgtgatacttaggaaccctggcatcttttctatattatccagtgtgataatcttttcacgttttatagagcaaagacagagcagttactcttcatattgcaatatctgtgtttgactaggaataatagtatttttatggaacatttacaaaattatattttttaagaaaacaatcaaaacaagcattgggggattggggcaaggatggaaggagcagtggggcagctgccagagctcaggcgagccatggggtctgctgtggggtctgccctggccacccactgtgtgtctgggtccttgaggtttgtacgtttctctttgatgaccaggaagaaatcccagcaccccagccacaggctgtggctgctcccagcagaggcggngccggcagagaaggggcctnctncacccagagtcctggccttggcccgctgtcaccttcaaagctgactgtgccccgctgcgggaggggacggcaccccagtggtggcagagcttgggggcctgggcaggggcccgtttggcgggcccggcaacacgtnaacattcttttctggtcttggcattaatattgctggcttttttaaaaaaaaagtttaattaaaagtctcagagcatctttagca

SEQ ID NO: 51944 - DNA, 626 bp, Homo Sapiens
ccacacccagctaatttttgttatttttagtagagatggggtttcactgtgttggtcaggctggtctccaactgttgccctcaggtgagccactgtgccccaccttttcctgggtttcataaggatctgaagtggtggattccttgtttttgctagtatctcatttagagttgagatggaccttaaaactcatctgttttaactcactttttaatagatgagttaaacttaatttacttaaggatgtacagttagagcctggaacttcaaccattattcactccccatgccctgtttccccccacttcgaaattaaatgcggttagcatcatatagttcattttccccctccatgctgctgtgtgattcttgactttgggtatgagtttttcatccttcatgcagggttctgtcagttcatggtatagtgattcagtgttaaaatggtggtgtctcagctgtgctgtgcacattccaaccttgtcaaattaatagtcctgagcaagcaagaaaaagaggtaataacatacccatttctttatgaatataagcttataatattttttcatgtgctatttttactgagcaaattgtatgtctcacatgttaacacaataaatatcttg

SEQ ID NO: 51945 - DNA, 568 bp, Homo Sapiens
gacaaggtatttgtagatttatttaatctttcaacatacctgattccccgacactggataccgtagatgaacccaaccattcacaaatttctatatacagcagaatactgtgatagctcctacttcagcagtgatgaatcagattaaaatcgtctgcaaaatctatgaagaatactagtttcacagcctattttttattttctatggattttcataaatacagtttgaatatatgtatgcatatattgttcagcaccacgatgctctgatttaattctagaaacaatttgattacctcttgtttgtgacaagactaagcattaagatgagaaggaatacatttaaatagtaacattgtacatagggtgttttcctattaaaaattcagtttctcctgagacttaatgtaaccacttaatgtaatcactatctcattgtttcatctttataaacttgtaaacttcatctatttcaaatattttatgcagtacattatattattctgtacaaaggctttcaaacaaaatttttaaaataataaagtattaatctttcaaaaaaaaaaaaa

SEQ ID NO: 51946 - DNA, 492 bp, Homo Sapiens
ctgggaccccagggtggcccggagtcagtgggtgaggtgttccgcctgggccggccccggctggctgcccactgtgcccgctggacactggggtcagagcagtgcccgaggaagcggggtctggccctggtggggcttgtggaggcagcaggtgaagaggcagggcccctgacggaggctttgctggctgtggtgatggggattgagttgggggcaagggtccctgcctagactgttgacgtcccctgggaaggggacccaaggatgaattggctgtgaaggatcctccctgagactggcaagggaggaggctgagcagaaggagtcatcatggaggagcggtgagaacatggaaccggactccaagatgacgatctaaagacccgggagcgagaagccaaggccaggttctgggtgtagggcccagagaagcagaacagcccagagccccaggtgcctggcctggcctggcctagacctctggaattgaga

SEQ ID NO: 51947 - DNA, 747 bp, Homo Sapiens
ggcgggacgctgagtgctggccttaaccctaggcgtggaagagaaaatgtgaggttgtttagatactcatcaggacctcacaggagctgagacttatcagccagaatgtgttcttcggacagtcgtacacatcttacagaaaaccctccttgtagagttggttgtggtatgtgtttgatgctataaagctcatttttaatgtgtacacctgctctagggacgattcgtttgaaagagagtaagatgcattaacagaaactatcctgggattaggtgaaaaatgtctagcaaaagaaacaaagtctttaatagagtggcctctttcgctcttcgattatgactgctgcagttttaccccagcagtcagctgtctttgtcaaccatacgtttttggagattgggtctagcacatgtcacccttgtccacgttgtttcacatctggttagggggcagatttttaaaatgtagttttgtaatgttacatttaagcatgataaatgattagactaccagatgttactagtgctaactttgtattcttagacattaaaatgattgacataaactctttgtgccttgaaaatgaaaccaattattaaaatgtttaaatggaaaaaaaaaccccccaacattctattttaccctatttaccacatcttgcattcccactaaatgcattattaccccctccttaacccccctttgccaaaccgttccgtactctccatttcccctctttcccggcc

SEQ ID NO: 51948 - DNA, 1056 bp, Homo Sapiens
ctgcaaattccgagaaatgtgaaacttggtggggtcagggaggaaaggcagaagctgggagcctcccttccctttgaaaatctaagaagctcccagtcctcagagaccctgctggtacccagacccccaccttcggaggggacttcatgttccgtgtacgtttgcatctctatttatacctctgtcctgctaggtctcccaccttcccttggttccaaaagccagggtgtctatgtccaagtcacccctactcagccccactccccttcctcatccccagctgtgtctcccaacctcccttcgtgttgttttgcatggctttgcagttatggagaaagtggaaacccagcagtccctaaagctggtccccagaaagcaggacagaaagaaggagggacaggcaggcagcaggaggggcgagctgggaggcaggaggcagcggcctgtcagtctgcagaatggtcgcactggaggttcaagctaactggcctccagccacattctcatagcaggtaggacttcagccttccagacactgcccttagaatctggaacagaagacttcagactcaccataattgctgataattacccactcttaaatttgtcgagtgatttttagcctctgaaaactctatgctggccactgattcctttgagtctcacaaaaccctacttaggtcatcagggcaggagttctcactcccattttacagatgagaatactgaggcctggacaggtgaagtgaccagagagcaaaaggcaaaggggtgggggctgggtgcagtggctcacacctgtwttcccaacacttttggaggctgaggttggaggattgcttgagcccaggaattcgagaccagcctaggtgacatagtgagacccatctctacaaaaawaaaaaataaccaggtgtggtggcmgtgcctgggagtccagcgacttgggaggykgagtgggaggatttttgagcygggragkcgagstgtgktarcctgatgcacmmtgtwctcarcctggggraagggaaamcyktttaaaaaaaaaaaaaaaaa

SEQ ID NO: 51949 - DNA, 698 bp, Homo Sapiens
ttattctaaagtacccagaaccgtgtttgagtgctgacaccatatgcaacatggggcatccgggctggagtgatccagttttttagttggtggtggcgatgatttttctttccttttggtttataattttctgttcatttttccccctttctcccccacattcattaagaaccctactgaaaccctaggtgacaaaaggtgtgccttctgttgccacatttgacccaccacaggactcactggactggacttctatttatattgtattaagtaactgatatatatatatatatatatttttgattgacaccaaaaaattaccttggcacaaatgccagacctgtgaaggtcagaggcccgctgcttttcccaggagggagggaactttttggttgtctgtggcaattcctctgtacagattgtaactttttaaaaatttcccttcaccccgtcacttgaatatatgttcatagtaatttgtaagatacttcttttccttattttggttgcaagacccttccgaacacattcctgtataaagtattttgcactatttaaagaaacccatatgggtgaagtcaggatgttgcatatgatggcgtaacagtgctcatcgttgtacctggaatgtaactaatcaggttaaatgtactattttaaaattgaaaaataaattttcccatgagcatgttttaatg

SEQ ID NO: 51950 - DNA, 718 bp, Homo Sapiens
ccgcctctttagttatacatactccactgcaccaacgcctgtgatggataattcccggaatgctcctttggctggtttggttacggcttgccaatttctcgtctgtatgccaagtactttcaaggagatctgaatctctactctttatcaggatatggaacagatgctatcatctacttaaaggctttgtcttctgagtctatagaaaaacttccagtttttaacaagtcagccttcaaacattatcagatgagctctgaggctgatgactggtgtatcccaagcagggaaccaaagaacctggcaaaagaagtggccatgtgaagagggacactcaggacactttacgggatcaaagtgggtctgcaccagtgctgcttcctgaatgtttgtgtgtgaacccttgtttcctccaaaacaaacgacagcaacgaaaactccttaatcagaacactgatccaatgaggaatggagcttgtttctgtgacccaggagaacttagtgcaagactacaggagttaacagatggccagctccttattttttaatgtagaataactcctggagtttatatccaaatccttgaagaaataagcctcagctttccatctgttttgactacgaataagaaaggggagtgacgtgtgaagatggtggttcagcagtttcactaagactgaatttttagggctcttgttcacttcaaaagaaattgggg

SEQ ID NO: 51951 - DNA, 886 bp, Homo Sapiens
gggggagagagtatgaagtcacggcgcgccgaattcggcacgaggcagagagtccctgggggttctgctctgaccgtgtgggtggtgatccttgtcaggatgtacagtccttgctcccaccccatccgggatggccgcctgtccctgactattgagtcctgttgttgtaagccaggcatggagggctcctgcccttctgctgagccacagcccattgcagcactgtgctggccagacttcagctgccttgggaactgaagccctgccactgttgctagtcaggggcttggttctcccacttacactgttgacatctattttctgaagtgtgtttaaattattcagtgctaatcattgttttttcctttgtaaatgttgattcagaaaaggaaagcacaggctaagcagttgaaggttccccaccattcagtgagagcagaacccccattccccagcctctgctggtagcatgtcgcagtttccatgtgtttcaggatcttcgggctgtcgttagacaggttaatgaagaacacttctcaacagtttcctttttgttttcctttataattcactaaaataaagcatctattagtgtctgatttaggaatgtaaaatgattctgtattaatgtaaataagattatctattgcaaaaaatatttcaacctaaaaaaaaaaaaaaaaaaaaaatggccttatccggcgctcgctacttagacgtatagtaggtccttatgagggtattatatgaaaagagatatatatcacattcgtgccctatcctttttcgctttgctctgttgctccaaaccgtgataaatctaaagtgtccatgtatcatgtcaacgaactgagtcccaacttcaaactagtctgggtcttgcgaa

SEQ ID NO: 51952 - DNA, 574 bp, Homo Sapiens
ctagaaagcattaccagtcacctactctgcattctcagatgtaaaccttgtgtagtgttctttttgcaatgacctatttatttaacctatttatatttatttaatttttactctgaaatgtatccagttacaattgtacttgcttaaagcacatcagatttgttttggacaacacccttgaccattttaaaactggaaaagtgatactgtatccttccatgggatggatgctttacagtagtcttattattaaagggtgattaatttggtcggggtaaaatgttaatttttaggtgatttttaagaattctgtgccattatgtcttctgtgtggatggttaattgtttaattagtacgtgttaattgtgtgatacagtcttctttgtggaacccaaaatcctctttttagctttatattttataaactgccagattgtacaacttttatgtgcatttttaaagcttgaagacatgagggtcattatctaagttaaacagcctatttttgtgcctcctgtacagttttataattctgctgatggcggcatcttatgtcgagccaaccacaataaa

SEQ ID NO: 51953 - DNA, 811 bp, Homo Sapiens
  misc_feature (655)..(655): n is a, c, g, or t
  misc_feature (661)..(661): n is a, c, g, or t
  misc_feature (670)..(671): n is a, c, g, or t
  misc_feature (673)..(675): n is a, c, g, or t
gggaagtgtcatgagctaccttactttaacattagggatatatatgcacagcggatgcacaccttcattaccagtctctcttctgtaggcattgtggtgagcgatcctgactccacagatgcttcaagcattgaagacaatgaggacatttgtaacaccacctccttggagaattgcacagcaaaatgagcgggggtgtttgtgcctgtttctcttatcctttcccgacattaggttaacacagctttataaacctcagtgggttcgttaaaatcatttaattctcagggtgtacctttcagccatagttggacattcattgctgaattctgaaatgatagaattgtctttatttttctctgtgaggtcaattaaatgccttgttctgaaatttattttttacaagagagagttgtgatatagtttggaatataagataaatggtattgggtggggtttgtggctacagcttatgcatcattctgtggttgtcatttactcacattgagctaactttaaattactgacaagtagaatcaaaggtgcagctgactaagatcccacaaaatgagacaatgcatgtaaatccatgctcatgttctaaacatgggaaactacgagcctaataaacctcctaattcagtatggaaaaaanaagaanccgcccganntnnnaaattgtcggcccgccttgggcccttcaaaaagcttttctagaacctttcgttttggcgccgggggccccagaaggtaaaggggaaattggggccataactggtttccctaggaagatccctgggccatgaaatag

SEQ ID NO: 51954 - DNA, 953 bp, Homo Sapiens
  misc_feature (767)..(767): n is a, c, g, or t
ctgggtggcgaaatcagcacctgggatgccccacccaaccccgtgggccctgcagaccccagtagggaggtatggggagagctcaggggagtgtggtttctgagggctactgtctggggacacctctgaacttactgtaccttcctctccccatgaagacacctgaatagagtctaacatgcctcttctccaacttcctacctacaacaacagaacagttctaatgttgcacggcctagtggccagggggcaagctaagaggctgtctggaggctttatatgtgtctggagttaaggggagaggaggagggtagacaggggtctctccccaggtgggatctgaatatctgtcctcccctcttcttcatgccacctgactccttcggccccctggctgcctttagctgtggtactgctgacaaccctgcttgctactgccttatccagcacagtgaaaaacttctccagcctggcaaggccacgttggttaatagtccctttcccatgtccagctcctacaaatatgtcccttaatgcatttggtgacatttacacctcactcatgtgctctttccctattcactccttcactcattcaaagcattaaaatcctatgtatatataggatagacaaatatatagatatatagatatatatatatatagcaagagattgatataaaatagtaaatatcattgctgctttgggctgctttggaggaggaggccatgaatatggggaaggcagatctggggtgcaggggtangtaaggaggctgggggacccagtgattcagtacaatcaaagggatgcaacgcgggctttgtttaatctttgggcctggaacagttttccctggttgagaaaaaaaaaaaaaaaaaaaactccgagggattctatggtcggggtggcggagaaaagaagtaaatggaaaatggggacaatggggtcc

SEQ ID NO: 51955 - DNA, 534 bp, Homo Sapiens
tttatacagccctagatttagagattgtggccctgagtatctggatagttgagttgtgtgtttatgtgcttatatgatagaggtgctttgttcctgcagcttagaaacagaagcagccattcactgagaagcttaagagaggaagtatcaacctcattttccaaaccagcattactttcaccgctcgtggatctgaaagattacatttagaacatttagtactattacactctcagaaactggggtaaaaagtcacattttcaaaacttcatgcatattgtattcttgttggaaataagtcctatagtttcttaattgtcttcatgccgtccatatttaacaaacattgcaagtcctttttatatttgggtaattatttgtaatttagtgaaggagactaggggatgttttcttccaaagggaatttaaaatcaattttatggtattttgaaagtaaaatactccttaacgtgtcaatatttttaaaatgttatctcgaagttttctattgctcagggatataatctaataaaa

SEQ ID NO: 51956 - DNA, 633 bp, Homo Sapiens
ggtgctgtcctgggaggtggtgttggaggccccatgaagagcgccctggactgctgagggtgggccaacagcccagagctcaggacacttggctttggggggaaggaaactgaggcccagagaggggcaaccactggccaagggtcacccagcaagttttggctaagagcctggcctccagccccagcagtgtggcccagagcaggggccgactgccaaagtaaccatcatccatatgggccgtgtggtgatgctggcccggaaggcagaaagaggcagcatgggcactgccagggacagccacatcctgctggtctgcagcgtggtccaccccgcctctgcccagcctgtctacaccgtgtgagctgaatcgtgacttgcttcccacctcctttctctgtcctctcctgaggttctgcctgcagcccccaggaggtgggcctgccccatcctagctggactcatggttcctaaataaccacgctcagaagctctgctaggacttaccccagccactgagtggcaggcgcatgagatttgtggctgttcctgatgctagtggcacacagtgcttatctgcataaataaacactggccaccagcaaaaaaaaaaaaaaaaaaaaaaaaaaaact

SEQ ID NO: 51957 - DNA, 2489 bp, Homo Sapiens
ggttgcagtgagctgagatggcaccaccacactccagcctgggcgacagaaaaatggctccaaaggttaaatgaagcaggaaaaatacatagatgcagccttgcagcctctccagatgtttggggataatattccagatagaaatattgatcccttggattaggtaactagtcataatgaagaaaattagtcttaaaaccttacggaaatcttttaacttgaataaaagtaaagaagaaactgatttcatggtagtacaacaaccatcgctagccagtgactttggaaaagatgattccttatttggtagctgctatggtaaagatatggccagctgcgatatcaacggtgaagatgaaaaaggcggaaaaacagatcaaagcgagagcctgatgggtacgctaaagcggctttctgcaaaacagaagtcaaaaggcaaggcgggcacaccctctgggagctctgccgacgaggacaccttctcctcctcctcagcacccatagtctttaaagacttgagagctcagaggccgataaggtccacgtcgctccgcagccatcactacaggcccgcgccgtggcctctgcggcccacaaactccgaggagacctgcattaagatggaggtgagagtcaaggccttggttcactcttccagcccgagtccagccctgaatggcgttcggaaggatttccacgacctccagtctgagaccacgtgccaggagcaagccaattcactgaagagctcggcttctcataatggagacctgcatcttcacctgtatgaacatgtgcctgtcgttattggacttatgcctcaggactacattcagtatactgtgcctttagatgaggggatgtatcctttggaaggatcacggagctattgtctggacagctcttctcccatggaagtctctgcggttcctcctcaagtgggagggcgcgctttccccgaggatgagagtcaggtagaccaggacctagttgtcgccccagagatcttcgtggatcagtccgtgaatggcttgttgatcggcaccacgggagtcatgttgcagagcccgagagcgggtcacgatgatgtccctccactctcaccattgctacctccaatgcagaataatcaaatccaaaggaacttcagtggactcactggcacagaagcccacgtggctgaaagtatgcgctgcatttgaattttgatccgaactctgctcctggggttgcaagagtttatgactcagtgcaaagtaatggtcccatggttgtgacaagccttacagaggagctgaaaaaacttgcaaagcaaggatggtactggggaccaatcacacgttgggaggcagaggaagctagcaaacgtgccagatggtcttttcttgtcggacagtcttgacgaccgtaccctttagctttgacttcgctccatggtaacacttcacactgaattgagcactcaatggagtagctttatgaacagcgaatgtgagcatacgtcatagtgatctaatgagcatcatcaggctcgaatgacttgtattcaaggttcggtgccgatttgcaacttccggtaaattgccaacagtcgtcagcagtgcgctcgtcagtacgtgtcgttggtaacggcagttccgataactatcaaactgcttgcaccatgaagattattcaggaaggctctgaagttgaaacctgatctgacctggatttagccagttgaatccagttcaaccttcaattgcatcaaatctttgcgccaatacattcagtttatgggtaaaaggtcatcagttgtttaggtgggaagtgccagcaagtgtctgggttatttggttctttaaaaaagggaagtcttaggtttagaggtgtggattatgtttcatcaatgtgcagatatcacatgtgaattatcaaattctcctcaatgcccccgccgcccagtcctttgctgctatccactgtgatttttatgcattaaaagcacatttcatgtgtattcaacctaagtaaagttgaatgaaacttacagaatggaaattgctatgtctttttaaatggtccattttcaaaagacagtgttgaataaacatacctgtgtgataaaacacagaatttacatatacactgaagatgagtttttaatctcttactttaaaaagatttatttagaatcgtgaattgacataatcttgggtaatggaacggagatctgcaacatatcttttaacaacacttttttataaattatttctaaggttgtgctaattcttttggttgtgaaaagttgaatttttctgttgccttcgttttcatcttctagtttgtctattttaataaatggccttacattaaaaaattgtaaagaaatgtataccaccaatttagaaattgttgccttttctgtaattaaactcgggtacaaattggcaaacatgaaaacctatggaactagaattattattaaagaaatattagatgatcac

SEQ ID NO: 51958 - DNA, 775 bp, Homo Sapiens
caggcaccaggttgggagcaccagctacgcgtggcgcagcgcagcgtccctagcaccgagcctcccgcagccgccgagatgctgcgaacagagagctgccgccccaggtcgcccgccggacaggtggccgcggcgtccccgctcctgctgctgctgctgctgctcgcctggtgcgcgggcgcctgccgaggtgctccaatattacctcaaggattacagcctgaacaacagctacagttgtggaatgagatagatgatacttgttcgtcttttctgtccattgattctcagcctcaggcatccaatgcactggaggagctttgctttatgattatgggaatgctaccaaagcctcaggaacaagatgaaaaagataatactaaaaggttcttatttcattattcgaagacacagaagttgggcaagtcaaatgttgtgtcgtcagttgtgcatccgttgctgcagctcgttcctcacctgcatgagagaagaatgaagagattcagagtggacgaagaattccaaagtccctttgcaagtcaaagtcgaggatattttttattcaggccacggaatggaagaaggtcagcagggttcatttaaaatggatgccagctaattttccacagagcaatgctatggaataccaaaatgtactgacattttgttttcttctgaaaaaaatccttgctaaatgtactctgttgaaaatccctgtgttgtcaatgttctcagcttgtaacaatgttgtcaatgtcactttgttgacaattaa

SEQ ID NO: 51959 - DNA, 704 bp, Homo Sapiens
  misc_feature (21)..(21): n is a, c, g, or t
  misc_feature (28)..(28): n is a, c, g, or t
cttggccgggaaatagtctgnaccttgnagtttctaagtgatgcttcagtgacagctggaggtttccaaatcaaatatgttgcaatggatcctgtatccaaatccagtcaaggaaaaaatacaagtactacttctactggaaataaaaactttttagctggaagatttagccacttataaaaaaaaaaaggatgatcaaaacacacagtgtttatgttggaatcttttggaactcctttgatctcactgttattattaacatttatttattatttttctaaatgtgaaagcaatacataatttagggaaaattggaaaatataggaaactttaaacgagaaaatgaaacctctcataatcccactgcatagaaataacaagcgttaacattttcatatttttttctttcagtcatttttctatttgtggtatatgtatatatgtacctatatgtatttgcatttgaaattttggaatcctgctctatgtacagttttgtattatactttttaaatcttgaactttataaacattttctgaaatcattgattattctacaaaaacatgattttaaacagctgtaaaatattctatgatatgaatgttttatgcattatttaagcctgtctctattgttggaatttcaggtcattttcataaatattgttgcaataaatatccttgaacacacaaaaaaaaaaaaa

SEQ ID NO: 51960 - DNA, 718 bp, Homo Sapiens
  misc_feature (19)..(19): n is a, c, g, or t
cacagagcaactgtcaagnctgcttaccccctcacccagggctacagcctgtgcccagccctctaatttgtgcctctcttgtgttggtggtggtgggggttattcctttccctttcctgctctggcctccttgaaagttcagagtacccagtacaagtcagctttaaagtacagcttttagtgtttcctgggttgtttctctggggctttagtgagggacctttgccctctggtttttcttgcctcctggtttagggagcatctcacacttgttagtatctggttgttgggccagccgtgcctcctctagatctggagccaggccaggcaggggccacgtgtgggccagtcagccactacaagatttttgctaagctttgggctgttggcagcatcttggacctcatgcctgggcctgaatgaggctctttcttaagtgtttttacaagtttgtgttttatttatggagtgacttaccccttccattcagagcagccccacccagccagcccttcagcctctgggctcctgctgcttaaaggcagagccgcctggttggtctccaccctgtgcattgggagcccagccaccatgctgacgggtatttttcctcataaagtttataaccagttatttatatgaatctttgttatgtccatttgtttgtattgcgtattttgattataaaataaagtatcttaacaaaaaaaaaaaaaaa

SEQ ID NO: 51961 - DNA, 784 bp, Homo Sapiens
gagagacttgttaggaatggggtctcctggtcccattcgagcatgctgcccttgggaagctcattgcccgatgaacttttgtttgctgacgactcctcagaaggctcagaagtcctgatgtgaggagaggtgcggggagacattccaaaaatcaagccaattcttctgctgtaggagaatccaattgtacctgatgtttttggtatttgtcttccttaccaagtgaactccatggccccaaagcaccagatgaatgttgttaagtaagctgtcattaaaaatacataatatatatttatttaaagagaaaaaatatgtgtatatcatggaaaaagacaaggatattttaataaaacattacttatttcatttcacttatcttgcatatcttaaaattaagcttcagctgctccttgatattaacatttgtacagagttgaagttgttttttcaagttcttttctttttcatgactattaaatgtaaaaatatttgtaaaatgaaatgccatatttgacttggcttctggtcttgatgtatttgataagaatgattcattcaatgtttaaagttgtataactgacttaattttctgatatggcttcctaataaactatgaactaaacggacaaaccaaaccaatcacccacaaaacacacaaaaacgcaccaacagacaacgcaaaaacgacccacagcacgccaccgaccgtcagacacccacagccccacgccgcccggacacaccacaaggaacacggagacaccggcgacgccaacacacg

SEQ ID NO: 51962 - DNA, 901 bp, Homo Sapiens
ggatggtcctggaaagtatcagctctttgccttcattagtcacatgggcacctctaccatgtgtggtcactacgtctgccacatcaagaaagaaggcagatgggtgatctacaatgaccagaaagtgtgtgcctccgagaagccgcccaaggacctgggctacatctacttctaccagagagtggccagctaagagcctgcctcaccccttaccaatgagggcaggggaagaccacctggcatgagggagaggggctgagggatggacttcagcccctctgctctgtaccctttttccttttgtccccggcagcagggaagaagctggaggccgtgggagaatggctgggcagagcagaggggcagcgatagactctggggatggagcaggacggggacgggaggggccggccacctgtctgtaaggagactttgttgcttcccctgcccccggaatccacagtgctctgcttctctgtgtcgccccgcccagccccctggtgtggagggaggggtctcgtttgtgcgcgtgggtgtagctttgtgcatcctctcccagtggagcgatcacctgtgcctcccctccccctttgtttgcccctgtgtggttggtcaaggagggatgtgagggaaatagggaccccccgacttgccctcctgcctcagtctttcccccaccctgtctcttccttgtccttctctggaaaatgccaaaatacacgatgtgaataaaagtaaaaaaaaaaaaaaaaaactccaaggattctatgtccggggcggaagaaagaggaaatgaaagggcccatgggccatacctgtttcctggacccactttcttgaacaaagggggtagatcttgccggtcctcccctataggggagtcgaatttattttccaatag

SEQ ID NO: 51963 - DNA, 530 bp, Homo Sapiens
aagagtgcattccttaaggggacctgctattcttcgaggggacctgctattcttcgaggggacctgctattcttcgaggcagtggaccctgtttgctgatggtcaacactctggctgtgctgccccatgtccctgtggagaagtgtgaaggacgggtgccttaaacccacacttccagggacccttcagcacaggtcctgcctgttcccatggtgcttctcaccctgaaccctcccagctacagccagggatagagcagatgagcagtgagctggtttccaccctctggggcaggaggggcttgggcttccctttgaccctcttccttcctttcccagatcttcaatatttgttgtgatgtaacagccataagagctgtaagaggaactgtgggctttgggagctttcttgggttgaaagacgggtggggggaggggatgcatgcaggggtatgaaggcagcccaaggtctcccagaggctcgggaggaaacccttttggaatacatgtgttattgttgcattactgtgt

SEQ ID NO: 51964 - DNA, 592 bp, Homo Sapiens
cggagatgcctgacgcatctgtctgaggagcggtcagtgacgcgatggagcgggcaagggatcgcttacacctgagacgaactacagaacagcacgtaccagaggtggaagtccaagtcaaacgcagaaggactgcctcactgagcaaccaagagtgtcagttgtacccgaggcgttctcagcagcagcaagtacctgtggtggatttccaggctgaactgaggcaggcattcttagctgagacaccaagaggtggttaaagccatattggagtagcgaggaatctgattccaagcaaaaaccaggctccatctactctttgaagcttctgcccagcttgcattgtttctaggagaacccgcgtcatacctttatctatagccttcccctaggtcttcagaagcatcaagttttaactgtggacattggatttggtggaacagcaatcatgactgttggcaagagtagcaagatgctgcagcacattgactatagaatgagatgtatcctgcaagatggccgaatcttcattggcacctttaaggcttttgacaagcatatgaatttgatcctctgtgattgtgatgagttc

SEQ ID NO: 51965 - DNA, 568 bp, Homo Sapiens
  misc_feature (43)..(43): n is a, c, g, or t
gcacccgctcccgataaagtacaaatttttacttctcatctcntggaaaaaagtccacaccggccgtctacacccgcgcctgggggagaaagcagggaagaaacggggggtgcatgagaaacgttttcatttgctccagggggaaaaatgtttctgcatcttctgatggaaagaaatctttacaagacacaggttttccggtggttattgttttttattttctgtttttaatttttttcatgttagtgacagtgatattttaatatttttttaagccagtaataatttttctccattacagggctaagttctgtggctggtggtcagtttgtaaatttatacttaaagagacttaatagtaacttcatttatttgtctggttatgttattgtatatataaatatttatgttttcatatattgcatataaaaatttgtgttacatgttactctcagaacagattgctgtaagacaattgtaaaaaacatgtctttcgtctgtttctcaaagcaatgtaaataaaacctatggactgtccaaaaaaaaaaaaaaaaaaaaaaaaataggt

SEQ ID NO: 51966 - DNA, 813 bp, Homo Sapiens
  misc_feature (795)..(795): n is a, c, g, or t
atgggaaatgccccttgaatcctcacagccacctaggaacatatggagtttttacaaacgctgcatttgacccgagtccttaagagacctgtccttttcctggtctcctcattcagcctccatatgatcctgttgtgaacatcaagtttcctgctacactggacttaactataatgcatttgctgcaggtttccataaacacccatgaatcaaagacatggaattaccttagattagctctggaccagcctgttggacccgctctggaccaaccctgtttcctgagtttgggattgtggtacaatctcaaattctcaacctaccaccccttcctgtcccacctcttctcttcctgtaacacaagccacagaagccaggagcaaatgtttctgcagtagtctctgtgctttgactcacctgttacttgaaataccagtgaaccaaagagactggagcatctgactcacaagaagaccagactgtggagaaataaaaatacctctttattttttgattgaaggaaggttttctccactttgttggaaagcaggtggcatctctaattggaagaaattcctgtagcatcttctggagtctccagtggttgctgttgatgaggcctcttggacctctgctctgaggcttccagagagtcctctggatggcaccagaggctgcagaaggccaagaatcaagctagaaggccacatgtcaccgtggaccttcctgccaccagtcactgtccctcaaatgacccaaagaccaatattcaaatgcgtaattaaaagaattttncccaaaaaaaaaaaaaaa

SEQ ID NO: 51967 - DNA, 583 bp, Homo Sapiens
aaatgtggcaaagcatttatatcatcctcaaccctaaatggacataagagaattcatactagagagaaaccctacaaatgtgaagaatgtggcaaagcatttagccaatcttcaaccctaactagacataagaggttgcacaccggagagaaaccctacaaatgtggagaatgtggcaaagcctttaaagagtcctcagctcttactaaacataagataattcacactggagagaaaccctacaaatgtgaaaaatgtggcaaagcctttaaccagtcttcaatccttactaaccataagaaaattcatactatcacacctgtaatcccactactttgggaggccgaggcgggcggatcacgaggtcaggagatggagaccatcctggctaacacagtgaaaccccttctctactaaaaaatacaaaaaattagccgggcgtggtggcgggcgcctgtagtcccagctatgcgagaggctgaggcaggagaatggcgtgaacccgggaggcggagcttgcagtgagccgagatcacgccgctgcactcaagcctgggcgacagagcgagactccgtctcaaaa

SEQ ID NO: 51968 - DNA, 866 bp, Homo Sapiens
cttatacacagattttgtttttaaccaaatgcagatcaaaaatacagtactgacaagatgcagaacctgtgtttatgtgaaatctctgtatacagagggccgacttcttctatatatgggtcctgcagggtaactgtggaactttaatgtctgtggattttggtatccatgggcagccctgaaatcaatccccctggttccaagagacagtgtacttaacaaccaatcaaaggtaaacaagtttttggatgcagatcagaagtctgtgttataatatttttctaattccctcctttttcagcctcatttttcactgagagaagcatttaaacttcattatgcaatactgtctggaatatcaaaacactgataaaacttacagatttttccaggatagcacgagctggaaaatcaatttctaaaacatctttcaaatttgtaacacactattttctggatccctgaaagcatggggaaaaaaattatgctgtgaacttgtaaaatcaccaaaaagtaaaaattatatgccaaggtacctaccacaaatgtatgttcctgctcagcttaattcccagggttttaccacttcagattaaaaaaaacaaaagtttaataatgtgatgctcctactcttggtttctaaaagcacatttgatacagaatgtgttcttacctactgtgattagaaaatcagattatttgttttttgttaaaaacaaaatatcaggtcagaatgtgagacttgtcttaaataatatcatattgggggaccgagatggcataactaatttggggaagagaaattcgttcaaaaaaaaaatccttattcaaatggcgaataaacagggaaggtatagataaaaagg

SEQ ID NO: 51969 - DNA, 588 bp, Homo Sapiens
gctacaggtccctgagatgcaatcagattaagcgtagcaagcattgccaatgggaaagtcaaaataatttattttttttccctttccccctaccccatccccagccaagaatttcttttcaagatatcgtcatcattcttaaacaacattcttaacccccagctggggtccccattttaatagatgtcattgcttcaagtctaacggcgccgggaggcctgtttgagggaaaacattagtttgaaaaatccccgttcccttcatccactgcccttgttctccacgtgggagtgtgcttgtggcccctcagaaagatagtctgctggctcctaggggttggggtgggggacacacctttttctcaggaagaggtgatggcaatgtaaaacatctaagcaaagttttaaatgaaaaaaaggaaacacatttaaacatcctgataatggagggaaggggggcacatttacacatagcccagaacttgtagaattctgcatagtgaatgtatattgaattagtctcctgccttatacattcaggaggaataaatttccataatgtaaggcaaaaaaaaaaaaaaaaaaggac

SEQ ID NO: 51970 - DNA, 699 bp, Homo Sapiens
ccgggaggggtgagtcccctactccctcttcactgtggccacagcccccttgccctccgcctgggatctgagtacatattgtggtgatggagatgcagtcacttattgtccaggtgaggcccaagagccctgtggccgccacctgaggtgggctggggctgctcccctaaccctactttgcttccgccactcagccatttccccctcctcagatggggcaccaataacaaggagctcaccctgcccgctcccaacccccctcctgctcctccctgccccccaaggttctggttccatttttcctctgttcacaaactacctctggacagttgtgttgttttttgttcaatgttccattcttcgacatccgtcattgctgctgctaccagcgccaaatgttcatcctcattgcctcctgttctgcccacgatcccctcccccaagatactctttgtggggaagaggggctggggcatggcaggctgggtgaccgactaccccagtcccagggaaggtggggccctgcccctaggatgctgcagcagagtgagcaagggggcccgaatcgaccataaagggtgtaggggccacctcctccccctgttctgttggggaggggtagccatgatttgtcccagcctggggctccctctctggtttcctatttgcagttacttgaataaaaaaaatatccttttc

SEQ ID NO: 51971 - DNA, 591 bp, Homo Sapiens
gactgtgtagttcttgattggtggctttaatccattatcattaggtatctccttgaacgttctcaaacactgaaagtcttaagctttcattaaaaaaaaaagagtaaatgcagctttcagaaaatccaggattctgtacagtcttcgagtgtttcacttcagcttccctgtcctgttattaccaacagcaggtacccgggtggtagacaagaagcctcatgggatagataaggaaatgaagataaacaaacatatcacactgtatcgtaaacatactttataagtacatttcttattagcttcttatccaggtagagattataaaaatttgctgcaagtatccagaccagaatttatgttttggaaattatcagtgttcacaatacctgcagggaagaaaaaaatacaaaaactcaaatatgaatactctttacacccaaaagaatatttttatcattcttttatttgtttttggctctgtcaaaaattaaagtgcttggaatgctgtagtctgtggtctcttgaaatttaatcaatgagaacttagcattttcacagtatgctgtcactttggacattcataataaaaat

SEQ ID NO: 51972 - DNA, 607 bp, Homo Sapiens
cacgaggtatttttgtatgccaacctagataggattataaagcaagactgatttcttctgtggtttatgaatggatcttaaggtaattacaaaagggaaattccaagaatgcataacacaatgacaacatggtgagaaaagtgcagtactacttccaaggtagctagtgtaaaggacacttgagtttttaaaactgtggttaaatgttttatgtggaatttgatgagtttgtatattaaataccactgcttgctgcttttactagaatcaagttaagggacacgttagaaatagaacagcttaatatcactggcttcagagcaaaatgagctcgggtgactgcagattatgatggtaaatatggctttaattacaaacatgaggaatgattcactgaagatgaaaagataggacggatgtgatatgaaaaaaacccaaacattttggcattgaatgatggctaaggtgttccaagtattccatcttttaagatgaattgcttaattaattgcctcgctaccccaggattctcattctttggaaataatttttattaaatttcaataaactgtgaatcccaatggtattttactttaaaaaaaagaaa

SEQ ID NO: 51973 - DNA, 650 bp, Homo Sapiens
ggaatgggtcctgggctcatagacaaaaagagagatgtcacatggagatctgagggctcaaagttttgggtttgttttgttttgagatagagtcttggtctctcgaacaggctggagtgcagtggcgcggtctcggctcactgcagcctccatctcccgggttcaggcggttctcctgcctcggcctcccaaggtgtgggattgcaggtgtgagccactgcgcctggcctaaacaaacttttgaaaagctgtttctaaaagattccttaaattcagatatgacagctaattacctcatcataaattacttttatactaatgtttccaggttttagagtagttgaatgtttatttcacaaggcaccctaaattctatagaaataaaacctcagatgagtctccttcttagagtgttacaatgaatgggagtttacaacttttatgtgtcatgtttccaacagctgtgttggggtggtcactggcaggaggggaccgtatctcagaatggcacattatttctattttacacatgagcaaattgaggcatagagagttagataacttgcccaggttacacagattgtaagttgatgacgctgggattgaatcttcacatgtgtgtacttatcacatacaaatgtaggaaactc

SEQ ID NO: 51974 - DNA, 546 bp, Homo Sapiens
tcgtgtaactgtaaatccagaatctatcctgcatcgcagcccaccgtgtatagagatataaatagagggaaagatataagaactaaatttgctaatgacatagttttaacctaaatgctatttatctctgagccgtccccgtcctccgtgcagagcaagttgaggtcattccttcttttcttctccgatcttttttcttggcttctgaccaaaaaccaagctctaccccatccccatcccagacctgcaggagacgagcgagcgggaaggcgccgggcccgggactgtccgttctcggggccagagctgctgggggaccgagtttgtacattttccattttggaattttgagttccaattgttgtaaaacttaatttctccccagtttttatatatatattttttagagttccgtttttatttattaaaaacaaaagccccagccctgccgaggcctgggcggcgtcctcagtcgggtggtcccggggcctttgcggtcccgcccggctgagacgcctcgccccgacgcatggacccgagaggcga

SEQ ID NO: 51975 - DNA, 700 bp, Homo Sapiens
gaaaaaagggcgagttaagaaagcccacaaatccaagacccattgagaagtgggtgggaaataaggtaaaattttgaaccattccctagtcatttccaaacttgaaaacagaatcagtgttaaattcattttattcttattaaggaaatacttgcataaattaatcagccccagagtgctttaaaaaattctcttaaataaaaataatagactcgctagtcagtaaagatatttgaatatgtatcgtgccccctccggtgtctttgatcaggatgacatgtgccatttttcagaggacgtgcagacaggctggcattctagattacttttcttactctgaaacatggcctgtttgggagtgcgggattcaaaggtggtcccaccgctgcccctactgcaaatggcagttttaatcttatcttttggcttctgcagatggttgcaattgatccttaaccaataatggtcagtcctcatctctgtcctggcttcataggtgccacctgtgtgtttaaagaagggaagcttgtacctttagagtgtgggtgaaatgaatgaatggcttggagtgactgagaacagatatgatttctgttttggggaaaaagaatgattgctatgaaatcgggggtggcgattgagaagatatcatgctatgtcaaatgggctgattgataaaaacaaataagttgagtgtggg

SEQ ID NO: 51976 - DNA, 636 bp, Homo Sapiens
atgcggtggctgtaaagggccgctgaggcggtggaggcctggcagagagcgtccccgcggtcgcggcttctggcttctctgtggagcttggttcttccgtggtggtgcagcaccccaggaacttcaggaaccagtccttccttggagagctccccgggacagccacgggggccaagtgaaactagcgcgttttcttggatcctacactttatagtgagtcataaatactttaaatacaaagccaacaacatttgctgcaaataaacgtaaaaatactgttaaagtgtaaagtgttttcctccgtaccatctgacgtttctggcggttcgttgaacgcgagagaacgctgagccgtctgcactgagcccgggagcatcttcagggcagcgccgcccacgcgcgaggtgaatgaaggacacggcctcttgacactcccaggcagcacagatagacggatcctggctagaagtgaccccaggatttttttattatcaagagagactagaagaatcatgagacttttcctagttgcctttcaagaatatgaagaaaaaaatggttctcaaagtgggtttgaatgagtattgttccaataaatgaacttatattcatatttcaaaaaaaaaaaaaaaaaaa

SEQ ID NO: 51977 - DNA, 501 bp, Homo Sapiens
gggccagagggagctccctcaactaggcagcacagccctactgatcagcgcatgtgtgtaaggaaccacctcaggccagagaaagagccatgtgagaagattagaaggaacagtggtgctgacacaggacctagggtagggcctgttcccaccaccctagctggaaaacctcatgatttatggggcactgggtagaaaacacaagtgagaaaccctagatgggcactgccacctgacacagctatacagcaggacctgaaaggatcacactgcatcctaggacaaagctcaaaagtacctctgggactacaaaaatattcagtgcccaagaaggtaaaatgtacaatgtctagcatccagtagagaggcatgaaaagcaggaaaatacattgcataatacagagaaaaattaatcacaactgacctggatctcagatgctagaaatagtagacaaagatgttatttcccagtgcaaataaagaaataaagatagcaagctg

SEQ ID NO: 51978 - DNA, 710 bp, Homo Sapiens
tgcaaagaaactcaagggcaccgaagatgaactggacaaatactctgaggctctcaaagatgcccaggagaagctggagctggcagagaaaaaggccaccgatgctgaagccgacgtagcttctctgaacagacgcatccagctggttgaggaagagttggatcgtgcccaggagcgtctggcaacagctttgcagaagctggaggaagctgagaaggcagcagatgagagtgagagaggcatgaaagtcattgagagtcgagcccaaaaagatgaagaaaaaatggaaattcaggagatccaactgaaagaggcaaagcacattgctgaagatgccgaccgcaaatatgaagaggtggcccgtaagctggtcatcattgagagcgacctggaacgtgcagaggagcgggctgagctctcagaaggcaaatgtgccgagcttgaagaagaattgaaaactgtgacgaacaacttgaagtcactggaggctcaggctgagaagtactcgcagaaggaagacagatatgaggaagagatcaaggtcctttccgacaagctgaaggaggctgagactcgggctgagtttgcggagaggtcagtaactaaattggagaaaagcattgatgacttagaagagaaagtggctcatgccaaagaagaaaaccttagtatgcatcagatgctggatcagactttactggagttaaaca

SEQ ID NO: 51979 - DNA, 585 bp, Homo Sapiens
tgaagcaggagtgccaaacaagcctcataggctcttcaccctacaacatctatgttaggtagaaaagtatgtggatttttaaaaatcatctggtataaagagtttttaagaactatcttcatcatctgtagtatcagattgtgcttgagaagttaggtacaatgtaatgtgattcattgctaaaaacaaaatgcctcccacaattgcagactcactcattttaccaaactatggaatttgtcaacaccttttcttgggaccaaggaagcaaagtcagtggataccgtgtcctgtagacatgtcacttgtgataaggcacggacaacatgaactggcaaaaacattggcatttggtcaaatgcttatgagctaaggatagaagggaaaaaatagttgtgtgaatgattttacctcttagttcttacgaaggatggttatcgggctggaaaaatgtttattggactgatgctttggagcctctcaatgaatgtaataaaaaaaatgtgtagtgagcacaaatgtatggatttgcagcacaatccaactttgaaaatgtgaaaataagtgagttagtgatatgtttgg

SEQ ID NO: 51980 - DNA, 602 bp, Homo Sapiens
  misc_feature (9)..(9): n is a, c, g, or t
  misc_feature (57)..(57): n is a, c, g, or t
aatattttnagcaaagctttaaaaccagaaatactgtgtaactgtgatctatgtggnatactctgagagaattctgtgtcctgctcattgtcttgagtttctaaccatgtgcagatgcaagcgttcaggagtaggaattaatgtccatcttttctttcaggcattttcatctgctgtccacgtatttcacttgactgaaagctcatatgagttaaaatgtcccttcttcctagcgagcatatttcaactgttcttcataaatgtttatgtgccttaaaagactttatgttaaaggattaaatagtttctctgacaggcagtttttaactgttttccacaaataaaaataatatgtcatgggattaaaatgtttgttttcaagcatttttaacagttttacacacttacatacaccttaattaaaaatttttttctgtcagacatttaccaactattttctaaaactaatttgacaaatcatgacactagaaaacgccaatgttttatgtctttgcccatctcaaaagctaatattgattcttctgttccatcagctttcattgttaagtagaatatgtatgttgcattttatccataagaaa

SEQ ID NO: 51981 - DNA, 493 bp, Homo Sapiens
ggcacgagggccgctcccaggcaggctgattagatacctgaaatacgagaacacccagtaactggggccacggggagagaggagtagcccctcagactcttcttactaagtctcaggacgtcggtgttcccaactccaaggggacctggtgacagacgaggctgcaggctgcctccctctcagcctggacagctaccaggatctcactgggtctcagggcccagagctttggccagagcagagaacagaatgtgtcaaggagaagaatcatttgtttacaaactgatgagcagatcccagaccttctctaccttcaggaatggcagaaacctctattcctggggccagggcagagcttgaggtgttctggggaaggtggtgctcagagccttccctgtgcccctccacttgttctggaaaactcaccacttgacttcagagctttctctccaaagactaagatgaagacgtggcccaaggtagggggtagggg

SEQ ID NO: 51982 - DNA, 933 bp, Homo Sapiens
tgggcaggaaatacacagtacgcctgggagaccacagcctacagaataaagatggcccagagcaagaaatacctgtggttcagtccatcccacacccctgctacaacagcagcgatgtggaggaccacaaccatgatctgatgcttcttcaactgcgtgaccaggcatccctggggtccaaagtgaagcccatcagcctggcagatcattgcacccagcctggccagaagtgcaccgtctcaggctggggcactgtcaccagtccccgagagaattttcctgacactctcaactgtgcagaagtaaaaatctttccccagaagaagtgtgaggatgcttacccggggcagatcacagatggcatggtctgtgcaggcagcagcaaaggggctgacacgtgccaggcgattctggaggccccctggtgtgtgatggtgcactccagggcatcacatcctggggctcagacccctgtgggaggtccgacaaacctggcgtctataccaacatctgccgtacctggactggatcaagaagatcataggcagcaagggctgattctaggataagcactagatctcccttaataaactcacaactctctggttcctggctgtctctgttttggccctgtggggagggctggatggggatccgggatgttcctgtggcagactagtggggatgtgcagaaacaagttctcatggtaatttggcaatcacaatggtaagtgatcctcgtttctggagaatgggtagagttattccggaaaataatacacgttcaacatcggggtgttgtgaagaggttgaaattggtgttcggaacttaagtgaaaaatcctaaaatgagggggagcggatatggagacgggatcggggaacgaggacctaaaaagggggggaaaggaaagagggtctacaaatgtgcgg

SEQ ID NO: 51983 - DNA, 493 bp, Homo Sapiens
ggcccggacgggggagctttcccagagacccggggagctttcccagagacccggggatggattggcctccagggcgcaggggagggtgcggcagggcaggagcttggcagagagatagccgggctccagggagtggggaggagagagggggagacccctttgccttcccccctcagcaaggggctgcttctggggctccctgcctggatccagctctgggagccctgccgaggtgtggctgtgaggtcagggttttagagagcagtggcagaggtagccccctaaatgggcaagcaaggagccccccaaagacactaccactccccatccccgtctgaccaagggctgacttctccaggacctagtcggggggtggctgccagggggcaaggagaaagcaccgacaatctttgattactgaaagtatttaaatgtttgccaaaaacaacagccaaaacaaccaaactattttctaaataaacctttgtaatct

SEQ ID NO: 51984 - DNA, 675 bp, Homo Sapiens
ggcatcatagggggacccctagagtcagttcaccacaggccctggggagagtcaaagacccccgagggtgcccagccccccacactgtgactcctcacactcagcgatgacctgtggggtggggggccctgggacgtttttaaacctagggtttggagtctggactaagctccatccacgtcactcacaagtttctgtttatatttctagctttttttaataaaataaaaaaaaaaaagaaaacagaagttttcacaacccaggggcctggcacgccggtctgtgcctgccgccccgccctggcccaccggccccactccctgggcacagagtcacacccactcatccttccgccaacagtccaggtcacacagcagcagtcactgtaacagactgcacatacacactcggtctcacactcacctgtgggttttggttccgttcaattgggtttttaactttacagggtcagttccgcttcacctccttttgtatggagttccatccagggggtttcaccctctgctccagtcctgaggcctcctgaccctgacgttgtgatacgccccacagagatctatgtttcttatattattattatgataatacttattataatatcattatgtcataaattatacggaatgagcacaaatagtgggttatcaaaccagg

SEQ ID NO: 51985 - DNA, 556 bp, Homo Sapiens
cgccccagggcactacataattgctgttctgctgaatcaaatctcttccacatgggtgcatttgtagctctggacctgtctctacctaaggacaagacactgaggagatactgaacattttgcaaaacttatcacgcctacttaagagtgctgtgtaacccccagttcaagacttagctcctgttgtcatgacggggacagagtgagggaatggtagttaaggcttcttttttgcccccagatacatggtgatggttagcatatggtgcttaaaaggttaaatttcaagcaaaatgcttacagggctaggcagtaccaaagtaactgaattatttcaggaaggtcttcaatcttaaaacaaattcattattctttttcagttttacctcttctctctcagttctacactgatacacttgaaggaccatttactgtttttttctgtagcaccagagaatccatccaaagttccctatgaaaaatgtgttccattgccatagctgactacaaattaaagttgaggaggtttctgcaaaaaaaaaaaaaaaaaacgcgg

SEQ ID NO: 51986 - DNA, 559 bp, Homo Sapiens
gcacgagagacaagggtgtggcatgtttggggaccatttcagaaattccatctaccacagtaggacactcacattcccccatctgcaaagtgcatttaccctctcccctgaggtttccagatttcatgtcattaaagcattagttcaacatgaaaaatgtcatgtagaccacatcagatcaaaagtttaaaatcccatctaaaacatccacaccaggtgtgaatgaggcttccgagagtgtccattaagtgcagatccttgacataattcccttacctctgtcgacctgtgaaactgaacaaacagcttatctgcccctaatgtgaaatgatgggacagacatagaataacaactacagtgattctagttcaaaatgagggaacatggaggggataaagaagtcactaacccaaaatagtttggaaatggagctgggcaaaatccagcaggagtttcttagttaggatccacagcctgggactgaccctctgtcctgtgggtctttacctctgggctctctgctctgcatttcttgaaaccattattatttatcatttt

SEQ ID NO: 51987 - DNA, 976 bp, Homo Sapiens
gcggagatccctgttgcagctccgattttattcgcatccttgtgatcttctctggaatgttccttgttttcaccctggccggggccctgttcctccatcaacgaaggaaatatagatcaaacaaaggagaaagtcctgtggagcctgcagagccttgtcgttacagctgccccagggaggaggagggcagcaccatccccatccaggaggattaccgaaaaccggagcctgcctgctccccctgagccagcacctgcgggagctgcactacagccctggcctccacccccagcccggcgaccatccaagggagagtgagacctggcaggcacaactgcagtcccatcctcttgtcagggccctttcctgtgtacacgtgacagagtgccttttcgagactggcagggacgaggacaaatatggatgaggtggagagtgggaagcaggagcccagcagtgcgcctgcgctgcaggagggcgggggctctggttgtaaaacacacttcctgctgcgaaagagccacatgcgacaagacgggcaaaataaaagtgacagatgaccagccaaagaaaacagggaagaacgcgaaacggccgcacacgcgcaaagccaaacggggacaaggaaaaggacccgatacagagatggtccgccttggggcacagctacgacttcgggggaagctacaaccgactaacggggccagaaccgacgccaccaaaacagcgggggggcacgtcacgcaaagcaaccaatgagacacaattggcgaaagcgacggcgccagcaaatgggacccagggcgccccaccagaatgtcacgggccctgagagacacaagcatagttgagcgtaacgtgctctccaccgagacgcgactgcgaacaagaacacgacgcaaagagcccaccatcacaccagacccacaagacacaaaagaacagtcggggaccacagaaccgcacgccgcgaacc

SEQ ID NO: 51988 - DNA, 683 bp, Homo Sapiens
aaagtgctgggattacaggcgtgagccccgtgccgggccagtgtttttaactgtccacacttactaaattttccagtacttcttcctatggttcatgatagtaaacacagaaacatataaggaacattattagagttaccagatgttagctgttgcatatgtgcacattcctagattcaagggtgtttttgccttaaatttaagtgggtcattggttgtcttgggaagatcatggaaaattcgggattttttagaattctgaaccaaaatatgttttgagtgtttcttagtaaatgtgtgatcttccaccttccacattcagactgcggactacacttcataaatgcctttttatttccagttatggattcaactaaatgactgccttgggagcacataattactttgctacctttttccccctttgctgttgtggctcgagtttggttctcacctgagaagatgcattgagcatatgttgttacccagccctggcttaatggtgtcctgtggggtaggggtgggaggacgaggggcacggggccagagcatgtgaatggatcatggttggacagctgtgacctgccagcactgcgggtaagcaaaactacaaaccgttctttcctctgtgacattgaataaaccttaataaaattcataattagcacaaaaaaaaaaaaaaa

SEQ ID NO: 51989 - DNA, 562 bp, Homo Sapiens
attctgagtagctgggatcacaggtgctccccatcacaccctgctaatttaattttctttgtagagacagggtcttgctatgttgcctaggctggtcttgaactcctgggctcaagtgatcctcccgcctcagcctcccagtgttaggattacaggagtgagccactgcctctgccttcaggtagcaattttattagcaaactataagcctaaagtaatagttaaaattctcactgtgatattcattactaacccctgaacctgtacccttcagcttaccactacagtacttctgtagtagagcgagtatgggttttggtatcagacagatccaaatttgaattctggttctacctttcatttatcaaatgactttgggcaaagtacttaacctctctgagctttagttcccttctctgtaaaagaataaaatatttcagtcttatcgtgtagatgatatacagagggcacataacaaatgttagatctctcaaatgtttttctgtaacccaaatatgcttacaactgattaaagaatgttctcactaaaaaaaaaaaaaaa

SEQ ID NO: 51990 - DNA, 566 bp, Homo Sapiens
  misc_feature (516)..(516): n is a, c, g, or t
cttgctgctagccacgccttgcagtgacttctcgtctgggagtgggcactgagtcctctcagtaaactaataagacttgcacctgacaaaggtcaagatatgtagggaacacagtgtatgctaggctgagacctatggtggtggcaggggtggctgttgagcctgaacttccagtactcctgcccttccttctgtttacctggcttggcctacagggggcacccctggtcttgatgcctcaagcccagcatttctgggtcccctctgcaagctcagagagcagggaggcttctggtagtgctcttgatgctcctgtgtctggttggcacaaagatcctgtgtaacatgaaatgaaaggtgcatcagcttgggggctgggaaacctgcagtatgggtttactccgtccctatcactggtgtggctgtgggcaaaccacttattgcctgacctacctcacagggatgttgtgagggtttgatgagagaatgaatgttaataggaattggaaaattcanagcattaaacacatgtaaacaggtggtaaaaaaaaaaaaaaaaaacgcgg

SEQ ID NO: 51991 - DNA, 497 bp, Homo Sapiens
agatagtgtattatgcttccaacagacagtccctctcatataaagtttatgtaccctaaaatctaacccaataacctgtcccgttgccaatagattgagaatttctggtttgcttactctacagttattcaaatgagagtcacgcttttaaatttacagctcatcacagaaatcatcagctatacattagtaaaaataaggacatgaggttttctttcttggtttttgtccaagatctttgcaccttaatattaatggactgtttcaggtaaaagagaatgaatgtatgattgtgaactgtgaagagaatgatgcaggatcctatttagttactgaataatacagagtattcaatgcatgttgtatgtgccaccaagttactattaactgtttttggaattgaagactctgtatagtcaatagttgtgaaattcttctcaggctccttaaaccctcgctttgttgtaaaagctaaaataaacagcatgctatattgt

SEQ ID NO: 51992 - DNA, 596 bp, Homo Sapiens
tggtttcttcagaatcatgaagttcttttgccagataaatattttgatattattttcctttttaatataaaggataggtttgaattgtacttaaaatgcatagcattattaaaaacaatcttttaaaatataatttataacatagattgaagcctccccttaagaaaccttaaagaaataagtatcctactcaaaaaaggaagtctgtttcagaactttagggcctttgaaatatttcctcaagcctatttcatgagatctacttggtttacccaagtcatgtttttaatagactgctaatatcaaaggagaatttttaaagccttaacaatgcctactttccattcactgttaacatggaataaacacaattcccaacatcttagatagtgtattatgcttccaacagacagtccctctcatataaagtttatgtaccctaaaatctaacccaataacctgtcccgttgccaatagattgagaatttctggtttgcttactctacagttattcaaatgagagtcacgcttttaaatttacagcttatcacagaaatcatcagctatacattagtaaaaataaggacatgaggttt

SEQ ID NO: 51993 - DNA, 562 bp, Homo Sapiens
aaagttgtaacatccagagggagtcaccccacccccaagaccggcaactgagatgtttaaaggaactggctggccctgaaggaaagactgaggccattcatctgctctggagttcatcctcgggatctgagatgcacagcctgaagacatctcatcagccatcagctcccttaagctatctttcagatcattcagagcataaggatgggcatgtgagaaagccagggatttgacaccacctccctcccactggaggcgggaggacaacggaagcggtcagccagtttctgcgggaaacaagcaggccacacggaatagaaaaaaacgctcccccacttgttccctgatcacttcatcgtggatgtcagaccaaattgccttctcacaggacatcttggtgcatccgcgttctcaagcggaaaggacattttgcttttctgttggcaggattagtagccacgcgggtcgtccgcagcagtgctgtctttttggtttttcccttggtttcactaatgcgtgcatgtggccctctgaacgatcactggtttactttctatggata

SEQ ID NO: 51994 - DNA, 527 bp, Homo Sapiens
tcagataatgaatttcatttgatgaagtacctatgaatatgacatagatttggtaaaaggtgaaattataaggagagaataatctggcaaaacagaagaaagtaattcttgcttcttgagaacagacatgtaaaattagcttgagaaaaaaaaaagtgccaaaaaatctacatcattctgttttccaattgtgaatctttgattcatagaatactgcgaatattctcgctgttctgattttgtaatagtcaggacaggctaaacattcgctatattaagaccatgcatgtgtccccaaacctagttctttccctaggtctggttttataaatgctggtgataaaccaattttattatatgatcattttatgtgattatataatggctgtgattctaggttatctttggtcaaccttaagaaaaatgacagtacagctaatgtgataacttttgcaaaaagtcagtgctaaatttgcagaccattgtctacagaagggataaccaaaggtagagaaattttatggtac

SEQ ID NO: 51995 - DNA, 755 bp, Homo Sapiens
  misc_feature (579)..(579): n is a, c, g, or t
agtggatcccccgggctgcaggttagtgttgcgttgtggggatgggacatataagaataagatgtttattgccctaatcatgctaagagactattattcaatatgcttttcccgcttttctaagaggaataaacttagacaaattacattataaacagttcccctactactatctcccactctagataaagccagtgggtggtatgggtccttttattccttatagtattatgccaaagaatcaacttattttcattgaagattataaataaatgaagcttgttatagccataatgatttgagtcagtataccattttacctataaaatgcaaaattcatccttgcaaccccattcaccaggagccttgaagcattttgtttactccaaaggccttgtcaaggaagcataattttttgttttgccttcttatttagtcagtttggtcatatttacttaaaaaaacaaactgaaaatcacactcctttatatgttgatataactgattttatagaatctgtctgttctttgtttaacaggtctctgtaagcaagcttgcaagtgtattttgtgtacattntatctgaggtggaaatgaaaattctaaagagaaaatattttaaaagatatcgcacttatgttgctcgcgtcgtagaataaagattcaaatgcattaaaaatctggtacatgaaacacttgtgtttactgaataaatatatataaatacaaaaaaaaaaaattcactggcccgcgct

SEQ ID NO: 51996 - DNA, 827 bp, Homo Sapiens
  misc_feature (635)..(635): n is a, c, g, or t
ggttcagagctcgaaccttcacattcaccggtgcatccacacaggagagaagccttaccaatgctatgagtgtgggaagggtttcagccagagctcggatcttcgcatccatctcagagtccacactggagagaagccctatcactgtggcaagtgtgggaagggatttagccagagttccaaactcctcatccaccagagagtacatactggagagaagccctatgagtgcagcaagtgtgggaagggcttcagccagagctccaaccttcacatccaccagcgggttcacaagaaagatcctcgctaactgacattagcccattcaggtcttcacagcgctcatactgtaaaaactgttaaatatttagtatcactcttactttatattctacaaaggagagagatgtaagggttatttagatatgttccctcactgaaaaatcactcattcaaaatatttaagtatcaagcactttgttatgctgtacaatgaatggattgttcttgtttctcagatgggtagagtaaaagtgtctgtactttacaattcaactacatgttctacccagcattttaacggcaagaactttatatttattctcaagcagggcatgtttccctttgttcacatntctctgagaaattgaaactctggtttctcttcagaaaaagatatagtacaaagaaccccgggcttatacgcgggggcgggaaaagggtatggaaggggccaggggcaaaggtgttccggacccggtttttgacaagggggaaattgccggccccaaaaggggggataattccaaagccgggaacgtagaagg

SEQ ID NO: 51997 - DNA, 671 bp, Homo Sapiens
ggacagacctggataggcccagcattcgttctgaagatcacagttcacagacagcttttgcttcgtaaagataatccaaaggacctgagacccgctcttccttttccctttgttcccttgagagtcagccatgaacggaatacctgctagcttccaggaatgagctcacctaacagacagcaaatgtgtctggttagatctcagcagagcccattctgcaagacctggctgagccagatgagagggtgggccctgtgctggggggccttgggtcacacacaggaaccgagacctggcttccgccccccagtcacccacttgggttatctgctggaagttatcgataggactgtgtggccaaccaagtgcttgtgagatcactgacactgcaaaaacaaagcaaactgccccgggtaccaggacttcctccaacctggcaagggtgtgtgctgaggcggggcttgcaggtgagggggctgtatgcttcaggaactaactaaatgcatgcagaaggtaagaggcatgatgggaggtgttcaagcacagcaatcccatttgggagttattttgatactgcgatgagtaagggtaagggcgcatggaatggggctaaggtgggagtgaacactgggggtgaataaattttaaatcaaaaaaaaaaaaaaagggcg

SEQ ID NO: 51998 - DNA, 1085 bp, Homo Sapiens
  misc_feature (663)..(663): n is a, c, g, or t
  misc_feature (1085)..(1085): n is a, c, g, or t
ctctacttcctggctgggcagaggctcgtacgctttgcccgagatgccaagccacccactggccccagccctgccaccccggctcgccgcaggctgggcctgcgcagatccgacagaactgacatgcagaggatagaagatgtgttgggcagcagtgaggactctaggcggacagagtccacgccggctggtagcgagaacactaaggacattcggctgtaggagcagaacacttcagcctgtgcaggtttatattgggaagctgtagaggaccaggacttgtgcagacgccacagtctccccagatatggaccatcagtgactcatgctggatgaccccatgctccgtcatttgacaggggctcaggatattcactctgtggtccagagtcaactgttcccataacccctagtcatcgtttgtgtgtataagttgggggaattaagtttcaagaaaggcaagagctcaaggtcaatgacacccctggcctgactcccatgcaagtagctggctgtactgccaaggtacctaggttggagtccagcctaatcaagtcaaatggagaaacaggcccagagaggaaggtggcttaccaagatcacataccagagtctggagctgagctacctggggtgggggccaagtcacaggttggccagaanaccctggtaagtaatgagggctgagttgcacagtggtctggaatggactgggtgccacggtggacttaggctctgagggagtacccccaagccaagagatgaactctgcggactaatatcattagacccatctggaggtccatggctaagagcagtgtgaggtgtactatctaaaggttggggggcctgtgaactgtcccattggggtggcgcggacaaaggcatggggaggagatttacagacaaagagggcttttcaagggtcctttgacacggcttaaaaggtcgaggagcaaaagagacactcagagaagataccgatgaagggtgtgtgagttgtgaaaaaataggcggctatcaaggagagcatggtgagaagaggcgatgaggtgggaaatatactgtaggtaatatgctcaatn

SEQ ID NO: 51999 - DNA, 415 bp, Homo Sapiens
tgtgtatcagaatctgttataattaatccccacacccgcacacccttcattgggactcacatttcactttcagaaggacaccgaactaaagaagaaatggtcaacacaaaagctgttgaccaaggtatcagcaacacaagccttctaaactcaaggatttaaactcaacttaaggttgagctttaaacttccaaaacttcttcctggatgataaattattcttagaaactgatttggactgttaaaggctaaaagtagatgtatttaaagactcttcttgacacattctgcctacactcgctatgtaaatatgtatgcctgtcatttttgtttcctttgttcctttttacgtttatactctgctcttctgtacataagagctaaaaataaacatttgggcctcgctggcctcaac

SEQ ID NO: 52000 - DNA, 733 bp, Homo Sapiens
gccttctaattagtataacttaaatggacgggattcacttaaaagcaagaagaaaagcacatgaacaggtgtcttaatgcatttggatactttggggtgtgtgcctgtctgtgtgtgtgtcttggtgaaggtgggctgtattttcaccaagccttttcataatcaagtttgctttgcaaaccatctggccttgcccccagcagtacagtccttcctaataacggggatgctctgtcatgtttctctgtaaattgttgtgtgttgggaagttctgttgaggcttagtttgatcttccatggtggacatgtctgttctgtatataaaaagcattacatctgtgttttagcaggtgggatttgaagcttttccacagtccttgtgctctgagatggctgttgagctctgctcagctgtcacagctgaattcttttttttgtgctgaacactgggcagcctcaccttgttgccaacgtgcttctggggcccctgtgactgctgccggatgctgtgcacacaggcagagtgccttggcaggtttgtgcaccccttggcgagccagaactgggaaccccgcggagtgacccacttctcatggggggtcaggcagggggagtgcctaatttttaatcttgtttgttgcgcaatggaaatcacttgtgattttgtacatattgcccttaggaaaatttttaaccgcttgtctaatttatgttattaatacttgaatgattc

SEQ ID NO: 52001 - DNA, 709 bp, Homo Sapiens
  misc_feature (645)..(645): n is a, c, g, or t
  misc_feature (680)..(682): n is a, c, g, or t
  misc_feature (684)..(685): n is a, c, g, or t
  misc_feature (687)..(709): n is a, c, g, or t
gctgatggctacgcagccattgcccaggctgacaggctgacccaggagcctgagagcatccgcaagtggcgagaggagcagaggaaacggctgcaagagctggatgctgcatctaaggtcacggaacaggaatggcgggagaaggccaagaaggacctggaggagtggaaccagcgccagagtgaacaagtagagaagaacaagatcaacaaccgggcatccgaggaggctttcgtgaaggaatccaaggaggagaccccaggcacagagtgggagaaggtggcccagctatgtgacttcaaccccaagagcagcaagcagtgcaaagatgtgtcccgcctgcgctcggtgctcatgtccctgaagcagacgccactgtcccgctaggtgcctgctaggtgcatggccacagagcatgggctgggcctgggcacaggaggagcagctgctttggtcggggtggagactcgcagcagctgctacccacagcctattccactcctccccatctccaggcgctgggaggggggccctcaccccatcacgcctcgctccctcctggccctctggtccagcccctcacgcctcctctcagtctactcaattgtgactgtccctcctgatgtattttttttcttggcttanagggtgtgttgttgactctttttacacttaaaaannnannannnnnnnnnnnnnnnnnnnnnnn

SEQ ID NO: 52002 - DNA, 537 bp, Homo Sapiens
  misc_feature (477)..(477): n is a, c, g, or t
gacagcgatgggaacccagcagggcacaggatgctaggataaagctgtggcgccccaaaagtggcctgctctgccaacatacataaatacatacagtctgagcttgacactgtataatttggcccagaacaatatgtattttgagctcatttaggtgaatgactttggcattccatgtacccactaggggaagctttatcaggctgcatttgccttatgcagaagtatgcctttgttctgagaaatggcctcagaacacactgttgagctgtctcctttagtgagtgtcatcctctcatccatttcaaaagattgcagatgccgtcttgaagtcctgcttgtaagaaatgcaggggttgggaatggaggagatgacgatgtagtttgcttttagttttcccaaacctgtttacattttttaaaaatgtaaccaacccataattgcattttacttgtcgtggttcaatctgatgtatngtcgaaggactatttttgaacctgtccaaataaactctgcaaagtatttccacaaaaaaa

SEQ ID NO: 52003 - DNA, 523 bp, Homo Sapiens
tgcagctgaatggctaggtcatatggtgatctagtatgtaactggaattatgttatacattgcccttcctctcccataagatggacaaaagtgtttctgtatcactgtgtcccagacaatatttagaattacccagctttccagtttttactttagaagtttaaagtgatatagaatatatctggtatttctcatattgaaatacatttgaacattagttcatatcctttcattgccttttgtttttcctcttctgtcaatggtctactcatatgttggcctgtctttatttgtatcttgactttttattgtgtattttgtttatggtggggtactttattggtgattaatacgattttcaagtatattatatgggctagtcccttgatactattgacactgtatttatcttcagtctcttgttggtatctaactttggttctgaagtttatggaatggaagtatttaattggaaagattaaacatattgattttaattaaaaaaaaaaaataaaggccccat

SEQ ID NO: 52004 - DNA, 710 bp, Homo Sapiens
cccacgcgtccggcctctccagtatccattctttatggcaggttccctacttcagcaaagcgtggcagcgtgtgatacagataccactgctttcagcctcttgtcctttaagtcctgatcagctgtcagattgttctgagagtctcatcgctgtcctcgaatgtccagtctcaggtgatcttgacctgatcggagtcgccaggcagtatatccagttagaacttccggcttttgcattagcttgtctgatgctcatgccccactcagagaaaagacaccagcaaattaagaattttctgggttcctgtgaccctcaggttattttaaagcaattggaagagcatatgaacacgggccagctagcaggattttcacatcaaattagaagtctgattttgaataatatcatcaataagaaggagtttgggattttggcaaagaccaaatactttcaaatgttgaagatgcatgcgatgaataccaacaatatcactgagctagtgaactatttggcaaatgacttaagtttagatgaagcttcagtcttgataactgaatattcaaagcactgcgggaaacctgtgcctccagacactgctccctgtgaaattctgaagatgtttcttagtggattatcgtaaatcactgaacctttttttcaagaaggacaagaattttggagtctgctattaatggaccatatttattac

SEQ ID NO: 52005 - DNA, 644 bp, Homo Sapiens
  misc_feature (621)..(621): n is a, c, g, or t
aagttcttctctcttatcctgctgatgttgagacagtggctttgtataagcttttatttatacctatttcaacatcatgaaaatttttccatcagcattttcttgcaactttaaaaatcacaagggattatttgtttataaagagatacaggatctataatttattggcaatactttcttttaggaatcttcaaattgtacttaataaataaatcacaggtcaaaatgactgtaaaatcaattaggctttctcgtaagttatttcctgaaaaccatccatgataaatacaacaaggcttggcgaaacctcattactcttggaagtcttcagaggttattatacctactgatctgtatttgtctctaagagacatttgaaacacagttacaatgtcaatttggtgtaacattacctgtagtagagctcagagtatatggcagtgcacggtcactcaagatgcatggcgtgtcatttgggtcgctttgatgggtgctcgggtagaattagccttgtagagactaatgtgttcatgctatctctgatcctgtggtgttgtataaaaatgaacagctaaaaatttacccatgacaagattaaagcaaaaataaacacaaagttgntagactttaaaaaaaaaaaaaaa

SEQ ID NO: 52006 - DNA, 863 bp, Homo Sapiens
agctcctccgaggtccgggtcaccagtctctgctcttcccagcctctccggcgcgctccaagggcttcccgtcgggaccatgcgcggcgtgagctcccgctggtcctgctggcgctggtcctctgcctggcgccccgggggcgagcggtcccgctgcctgcgggcggagggaccgtgctgaccaagatgtacccgcgcggcaaccactgggcggtggggcacttaatggggaaaaagagcacaggggagtcttcttctgtttctgagagagggagcctgaagcagcagctgagagagtacatcaggtgggaagaagctgcaaggaatttgctgggtctcatagaagcaaaggagaacagaaaccaccagccacctcaacccaaggccctgggcaatcagcagccttcgtgggattcagaggatagcagcaacttcaaagatgtaggttcaaaaggcaaagttggtagactctctgctccaggttctcaacgtgaaggaaggaacccccagctgaaccagcaatgataatgatggcctctctcaaaagagaaaaacaaaacccctaagagactgcgttctgcaagcatcagttctacggatcatcaacaagatttccttgtgcaaaatatttgactattctgtatctttcatccttgactaaattcgtgattttcaaagcagcatcttctggtttaaacttgtttgtgtgaaacaatgtcgaacaagagtcttccaattaatgttttttatatctaggtactgtggttagattcaagggccgagtgttaccatcacataaaagctaaacttgtccaaaaaaaaaaaacgggttttgggggggaaaggttaaagggcagggaagg

SEQ ID NO: 52007 - DNA, 916 bp, Homo Sapiens
  misc_feature (571)..(571): n is a, c, g, or t
  misc_feature (758)..(758): n is a, c, g, or t
gctactaacctgacatcaccaaggtgggtggaattggagaaaagcacaatcaacttttctgagctggtgtaagccagttccagcacaccattgcatgaattcacaaacaaatggctgtaaaactaaacatacatgttgggcatgattctacccttattgccccaagagacctagctaaggtctataaacatgaagggaaaattagcttttagttttaaaactctttatcccatcttgattggggcagttgacttttttttttgcccagagtgccgtagtcctttttgtaactaccctctcaaatggacaataccagaagtgaattatccctgctggctttcttttctctatgaaaagcaactgagtacaattgttatgatctactcatttgctgacacatcagttatatcttgtggcatatccattgtggaaactggatgaacaggatgtataatatgcaatcttacttctatatcattaggaaaacatcttagttgatgctacaaaacaccttgtcaacctcttcctgtcttaccaaacagtgggagggaattcctagctgtaaatatanattttgtcccttccatttctactgaataaacaaattagcaatcattttatataaagaaaatcaatgaaagatttcctattttcttggaattttggtaaaagaaaattggggaaaaatgaaccttgtaaataacctccataattttaatttttaatagggccccaaaatccaaattaccataccaacnctaatgggaaatttttttcaaagcccaaataattattaaatgcccaacccaagggtggtggcaattggttaaaaagaatccgggaaaaccctgggaaatcctgggggggcctgaaattttttttttaaaaaacttaacaaatataaaaagggccgcgc

SEQ ID NO: 52008 - DNA, 844 bp, Homo Sapiens
  misc_feature (571)..(571): n is a, c, g, or t
  misc_feature (574)..(574): n is a, c, g, or t
  misc_feature (585)..(585): n is a, c, g, or t
ggggtttggcaccttcttgaagctaccaaaaaaatgacactccattgaagtgcttaaaagctgttctcataagaattctactggcctattgtaaataagaaaaaaaaaaagaaaaagaagaaagacacaaagaaaataatctaaacaccaaaaactaaacacacttccaatcctttttctgtacctcacgcgcattgatttgctgctcctatttttttttctgtttatgtgtttttatggatctaagttaaatcttttggcaatatataaaaatgtaaatagtaaactttatttattaagaatgtcatcttttttaatttatatttacacaattgttcatctaatttattttttctatacagttttaaatactcagacatattttgctgttcatgatatttttatcctgttctcatggatttgttttcccatactgttttctctgatctcaattacaggttggatctcacaaataataatgtcagagacagaaatattttgccactgttgattactatactgtaaagttctatattatgaaaatatataatagcttgtacgcttcaaaaanatnatcgtaaacangaaatcagacaaccaccttcaaatacccatcgcccgccccggccccatttcttttcatacaactaacccctgaataaagttgatatttttgggcgcccccctggcccccaaaaaaatttttttaaaacacttctccttgtggccgcccggcgccccgagggggaaaagagaaaaagggggccctacggcgttttccccaagaaaaaactccggggcccaaaacacagggcgtgggctcctccccacataaaaaaaaccc

SEQ ID NO: 52009 - DNA, 579 bp, Homo Sapiens
ctgccacttcgaaaaatgatcgtctttttaactacatgtattctactgctcctagacccagcctggagcctaccagagctgcccctttggctggatttggttatggtttgccaatttcccgtctgtatgctagatattttcaaggagatctgaaactgtattccatggaaggagtgggtactgatgctgtcatttatttgaaggctctttcaagtgagtcatttgagagacttccagtttttaataagtccgcatggcgccattacaagaccacgcctgaagccgatgattggagcaatcccagcagtgaacccagggatgcttcaaaatacaaagcaaaacaagacaagatcaagactaatagaactttctagaggactgaatgctgtggtcctctctgtgaagaaagattgccttctgcaagtcaaacagagagaactgctttctcccacctgctctgagcgtggcatcacagttattcctagtgcttaaatgtgtattttctctctaccacctggactttcccaaagagtttttcctgtagctactccagatcttccactaaagtagtaacttttt

SEQ ID NO: 52010 - DNA, 767 bp, Homo Sapiens
  misc_feature (715)..(715): n is a, c, g, or t
cgtgttagctacaggctgctgggggtcatctcactgctgcacctggtgctgtccatggggctgcagctgtacggtttcaggcagcggcagcgagccaggaaggagtggaggctgcaccgcggcctgtctcaccgcagggcctccttggaggagagagccgtttccagaaaccccctgtgcaccctgtgcctggaggagcgcaggcacccaacagccacgccctgcggccacctgttctgctgggagtgcatcaccgcgtggtgcagcagcaaggcggagtgtcccctctgccgggagaagttccctccccagaagctcatctaccttcggcactaccgctgagccggcgcccgggtgggcctggacacagatgacctctacgggagtctgaacgccaagatttagtctcaggattaaccttgcttgcacagaagttagaacactctcagttttttgtcatgtaagatactaacctagccaccctgggagagaacagaaagctgtccctggctgcgctttctcagccctgggaggggcgcctgaacccagaacatttccctaaccccaacctggtaggactcagccacttcttcaggaatttcacttatttggacgggattttaggtttccctcccttccccaaaacatacagttgagaagtaattcagaagtaggccagaagacactttattcgtttatattgtgagaaaacagnccatcaggcttgtgtaaggcatggactgaatgagtgcgtgctgggtggggtc

SEQ ID NO: 52011 - DNA, 580 bp, Homo Sapiens
ctgccatgtgaccgaccacattcatgctggaatggaaaccacttacaccgttctacaaaatgaagcatcttctgagactcacaggagaatatggaatgtgatctacccaatcacagtcagtgtgattattttattccaaatatctaccaaggaatgaccaggagaataagatcctccgatgttcgcaatggtgtggtgtcaggaggctgcctcttagacaatctccagatgtactgtgatgtgagtttgaaaaagagttcctgaagtaccacatctgggagacatgccactagctgagcttcccaaaagtctaccaagagctgaggaattgtatcttcatccttagcacaaagcaccttaaaaacagtaaaaggagcctctatattccagataaatatagcactgataaagcgacagctgggctgaatatcacagcatcacatgggccacgcaatcaataatttaccattagcattagcgccatggcaaaagcaaatttagacatttttaaaaggaaacagattctaggatgtacaaataaagtttctacagatatagtcttttaattagtacttttatc

SEQ ID NO: 52012 - DNA, 1048 bp, Homo Sapiens
tgtacctgggtggatggagcgggaggatggaggagacgggacatctttcacctcaggctcctggtagagaagacaggggattctactctgtgcctcctgactatgtctggctaagagattcgccttaaatgctccctgtcccatggagagggacccagcataggaaagccacatactcagcctggatgggtggagaggctgagggactcactggagggcaccaagccagcccacagccagggaagtggggagggggggcggaaacccatgcctcccagctgagcactgggaatgtcagcccagtaagtattggccagtcaggcgcctcgtggtcagagcagagccaccaggtcccactgccccgagccctgcacagccctccctcctgcctgggtgggggaggctggaggtcattggagaggctggactgctgccaccccgggtgctcccgctctgccatagcactgatcagtgacaatttacaggaatgtagcagcgatggaattacctggaacagttttcgttaagtatagtaaggttttagtgggggggggcaactaaacaaacacaaagtattctgtgtcaggtatagggctggacagggcagttgtgtgttggggatggtaaattactctatttaaagtaggtcttgtgttctaataatgtttacaatcttgctcaatcactctgtcgtttataaagattccacctccagtcctctttctccccctaatcaggccttgaggctataggaatggctgaaggaatcacagatccaatcaggcaactgccattttatttctatccggaaaagaaaagcctccgggacgttaaaataaggggcacagatctgtagggaacaaaacagagaggggggcgcaacgaatccccgggaggcccgaatctcgaccgacctggacaggggcacataagagaaaaaagagaaggcggcaaaagccagacacggacgcgtggacgaacacgggggacgaaccacacagccggcaactggtggcgtcgcgtagcagtcaacacacggactagccaa

SEQ ID NO: 52013 - DNA, 760 bp, Homo Sapiens
ggagtctgtggttttctgttgaagcagtctgaattgactaaaacagtcacttggagtagttataaaccactttcctgttgaaagcagaacatgctgattcaactgttttgttcaatagcaatgatagattttgtttaagtcccctacactttcttatttctaaatgatcaagagtacacttcctggcagtgattaaggagtgtgtatctaacagaaaaaatatatataccctgtgaacccgaatatggaattcagattgtttctgccctcagtatcatacttaaaaaacaagcatacaaacaaacataagggaacaaacagcaaccataacaaaaacaaacctttaaaggtgggtttttgctgtgataaatgaatacggtactctgaaggagaaaaaagtttctcaaatgagcttaaactgcaagtgatttaaaaattagagaatataattcttaaagctattgaaagtttcaaccagaaaacctcaagtgaattttgtatgtaaatgaaatcttgaatgtaagttctgtgattctttaagcaaacaattagctgaaaacttggtattgttggagtttatgtagtaagtgacttggcacccatcagaaaataaagggcattaaattgaaaaaaaacaaaaacccgaacccgccccacaaccctggaactcaggaataaaccaccatattccaccttaccaaaaattccggccctgacctattttaaaaactttgtgggggcccccactggcccccgaaaa

SEQ ID NO: 52014 - DNA, 793 bp, Homo Sapiens
cagctgggatgtttatggtgaaatggcctgtacaagtttaactaagacaacttaacttgcattgttaatcaaaaattcttttctcaaagggttaactggttgccattttgaatagtatgttcaagggtgtagcttcctgtttctttccaaattataagtagctacctaaatatagtataattatatattaataatatggcttgctggcacagtagtttaccctgttatctgtgtttcataatgggggctgtatgaatattatttaaaactaataaaatgttgccagaattatactaaactgttggatgagattaggagatcagaggctggaccttctcttgataatgcttgttttgttaaaggtataatgaaataatttgtatatgatttgatgaagattaaagacccttattttccacagctttaaaaaaaaacctttatttatgatcaagtaataaagataatattctacttgtgggatcttacattacggaaatagtttgacgtttttgacctcaagagtatgtataatttgaagagatactttgtaactatgcttgggtgatattgagcagttcctaaagaataattcatttaaaaaaaaagaagaaaaaaaaagaagaattcattctaaataacctgatcctttcaatttgcccttttcgaatttacagatactacttgtaccattggcataactagttgaattggggcattcgtaccatggactaactcttgatagtttcctgtaggaagaccatcgcaggtaatacgtcatggccgtccgaaacgc

SEQ ID NO: 52015 - DNA, 636 bp, Homo Sapiens
ggcagtaatgggatggctgagtcaagatggtatttctagttctagatccctgaggaattgccacactgttttctacaatggttgaactagtttatagtcccaccaacagtgtaaaagtgttcctgtttctctacatcctctccagcacctgttgtttcctgactttttaatgatcagatagcctcctattttttaactatgagttggaatttgctgcttttgatatgataagaaagttcaaagtttctcttccttgctttgttgtgtgttctaattcttttctgcccatcccccagtaaagaaaaggctcagtatgatttcttgaatagattgtttaagctattttcaaaacaggacttggtcaggggcaggtagtcttaaatgttcagaagccactggatggaaaattgtgagcacataagtgtttttcttggtcaaccatgtcattttatagccaaagtttgacttgacatactggaattaatccacacgactttgaaaagaataaactctttaaaaagagagtgagcgctccgagggtgttatgagagtcactgtctgaaaccctattgatcatattgtggcagaagaaatagagtcctgccatgaattatacttttcaggttaaaaaaaaaa

SEQ ID NO: 52016 - DNA, 684 bp, Homo Sapiens
  misc_feature (626)..(641): n is a, c, g, or t
  misc_feature (644)..(644): n is a, c, g, or t
  misc_feature (646)..(655): n is a, c, g, or t
  misc_feature (657)..(658): n is a, c, g, or t
  misc_feature (663)..(663): n is a, c, g, or t
  misc_feature (665)..(665): n is a, c, g, or t
  misc_feature (667)..(668): n is a, c, g, or t
cttacaccatttgccttgctttttaaatgactttgtttttcaaggtgctgtcattttgcaaaaggaaatctttatatgaaatgtacaaaaaccgttactaactggacaacagggaaggtgctggccccacattagtgcctgcccaccgctctacttctaaccagggacacggatcttccattctctacatccaccggactgcagcccaagtctggacctggctgcagtgggcatattaccgtatggatatctttttctttctttttttaaagtgaggagattcttcagggggtcaggctgagaatgtaataagcctgacattggaacagatttctcccgtgtggtctagctggacccctccggcatttgccacactccctgccagtcctgacattgacttcctgaatgtgattaggtggtaatgagcaagaatttcctaggatgttgaaacatctgtatccaggcccccaatcaaatgctgctgaatattgtgaatgtttttactccgctcactttcccactgtgctttcctctaaccaaaatatacgtgtagccattaccaatgtacaactctcaatgcggagttgccgccacggtttaaaataaatctctgtgaaaccaaaaannnnnnnnnnnnnnnnggngnnnnnnnnnngnngggcncnannaaaaaagggggcccgc

SEQ ID NO: 52017 - DNA, 470 bp, Homo Sapiens
ggagcggcgcgcgcgcggcgaggagctggccgccctgggcaagcaggcgagcttctcgggcagcgtggaggtcatcgaggtgtcctgacccctccgctgccctcggccccgccgcccgcagccaggcccgttataaatgtatattatatataatgcaaagaaaggtaaatggttttactgggatttttatcgagaagtaaatatttcgattttttatttatttaagctgttcattctggcaatgatttggcaacagtgcgggtggtcctcgagctctatttttactgtctggtatttaaactgaaacatacgtttctaagcaatacgaggccaccttcagtcgcaagctgggtgccaggcctggggcccctcccagttcccccgccccaggaaacactgctgacctttgcaaaggctgccgagctttcgtgcactttttacataacaaaaaggtgaaaaaaaaaaaaaaa

SEQ ID NO: 52018 - DNA, 563 bp, Homo Sapiens
ggccaggagtaagacaagtgggattggggcctcaagaaatatactctcccagatttttactttttcccatctggctttttctgccactgaggagacagaaagcctccgctgggcttcattccggactggcagaagcattgcctggactgaccacaccaaccaggccttcatcctcctccccagctcttctcttcctagatctgcaggctgcacctctggctagagccgaggggagagagggactcaagggaaaggcaagcttgaggccaagatggctgctgcctgctcatggccctcggaggtccagctgggcctcctgcctccgggcaggcaaggtttacactgcggaagccaaaggcagctaagatagaaagctggactgaccaaagactgcagaacccccaggtggcctgcgtcttttttctcttcccttcccagaccaggaaaggcttggctggtgtatgcacagggtgtggtatgagggggtggttattggactccaggcctgaccagggggcccgaacagggacttgtttagagagcctgtcaccagagcttctctg

SEQ ID NO: 52019 - DNA, 960 bp, Homo Sapiens
tttacaatgactcacttaaccccacaaacatgtttcactgctgccttccccagttgtcgcttatgtactgttgttacctttcagttacatgcctttgatcctaaaattctctacttttgttgccttatcagttctttgcaatctgcctgtggttatcagcacttaaagcacaattttgaaggggaaaaaaatgataatcaccttagtcccaaagaaataatttctgtcaaactgccttattagtattaaaaacagacacactgaatgaagtagcatgatacgcatatatcctactcagtatcattggccttttatcaaatggggaaactatacttttgtattacatagttttagaaatcgaaagttagagactctttataagtaatgtcaaggaacagtaatttaaaaacaaagttctaacaaatatatgtttgcttaatcacaatgccctcaacttgtatttgaataactaaaataggacatgtcttccttggagctgtgggcattagttcagaagctctacctgcatcttaattttcaaaacttaagttttattagcaaatcctcttctctgtaagacttagctatgaaagtggtatatttttccaaatatttttctgaaaacatttgttgttgtaactgccaagtaaaaactccaggtggcaattaagccaacaagaagcccaacaacagcgaaacaaacagaacaagcgggggcctaagataacccaaggccccagtcgagcgacacgccttcgtacacaaggccccaaggagacataataccaacgacgccgcgtaacaggccgtgcgaacaagcgcgggacacgtcgacgcacctctgcgttggcatggacaccccgaaagcgggataatcgcttagcaccgctctcccgaagccggtgaagcagcgacagaggcagagtcacggacagctcagacacgaactgcctaacaccc

SEQ ID NO: 52020 - DNA, 695 bp, Homo Sapiens
  misc_feature (622)..(622): n is a, c, g, or t
agaaacattgtgaaatctccaactcttaaccttcaacatgaaagtctctgcagtgcttctgtgcctgctgctcatgacagcagctttcaacccccagggacttgctcagccagatgcactcaacgtcccatctacttgctgcttcacatttagcagtaagaagatctccttgcagaggctgaagagctatgtgatcaccaccagcaggtgtccccagaaggctgtcatcttcagaaccaaactgggcaaggagatctgtgctgacccaaaggagaagtgggtccagaattatatgaaacacctgggccggaaagctcacaccctgaagacttgaactctgctacccctactgaaatcaagctggagtacgtgaaatgacttttccattctcctctggcctcctcttctatgctttggaatacttctaccataattttcaaataggatgcattcggttttgtgattcaaaatgtactatgtgttaagtaatattggctattatttgacttgttgctggtttggagtttatttgagtattgctgatcttttctaaagcaaggccttgagcaagtaggttgctgtctctaagcccccttcccttccactatgagctgctggcagngggtttgtattcggttcccaggggttgagagcatgcctgtgggagtcatggacatgaagggatgctgcaatgt

SEQ ID NO: 52021 - DNA, 739 bp, Homo Sapiens
  misc_feature (108)..(108): n is a, c, g, or t
actactctacatgtatatataataatagatcaatgttacattaattgaaaacaaacctttatatccaatgaaaatagtataaacagaatgatttttataccaccttgnttaagattggtgcttttggtaacttgtactgacacaacagacatgtgctagtatctgataacattaagtacattttatgtcgtttaatataattatttactttaaaaattgtacttcagaacatcagattttattcacattttttaactcactgaactttaataatcaggtcacctgtactctagtcagcactgtatatattcttggagtttgtacatgggacttagcaaccacactgagtgaggtaaaagcatttgatttcagatctaaaattcgtaacaacctaaatttgagaggtggctgaaatgtgatgaaaagcaatacgaaaagacaatgtaaactttgaaaaggattttagagggaaaattgcatagctttttgtaacatttacttaattttaaaactaaactcatacttttgctatctttttaatatttatctcgttagggagtatacgtgtttttaaaatttgtgttttctatctgtttactatagtgtagctactggcttcatttaataaaaataaatgattttgaaattacatataatatagaattcacattttatatagctctctcaaaatgatttttattcttagcatttaaaaacatttacaactgtttgtactcag

SEQ ID NO: 52022 - DNA, 918 bp, Homo Sapiens
taccagaccctgtgaaatgaaccaaatttcttaatgtaaacacacaagtaataacatccacttttaagtggcccccactccatgccaaagggaaaaagaaccgccaaattgaaaaagggttctaaatacctgtcctgattttggaagtttcactggggaaaaactacctaagattattttcacagctaccaatttgtcagaaactttggtggtgttttgtgggaggctgagattttttaaattaaaaatcaagtgaaaacacaaagactctaagacacgatcctgatttgtgtcatttctaagtatcagatttgttctcccttcatttgacaggtgttctcagtctctcctcctgtaagattctgtccttcccctgatgacaagccaatagttcttggtggggttgcatgtctcctagagccccaggacccctgtcgtgtcggggaaggggggagggcaggagggtgggcagagactcgggttgggggagggagttcaaagaaagagtgaaaatatgggtttatataaacatatttaaagcagtttagcaaaagctttctcgttgaacagctttaagaacaatgtgaatgaaatcttaccaacttggttagtaatctgaaaagtctattaatgtatacttgaaattctggttgtataaaaatgcattttcccctttattttaacactgtggtaaaacaacattatggatgtgcagtgggtctgaaaattaaagggcttaatactcgcaaaaaaaaaaaaaaaaaaagggcgggccggttcttaaaagattccccttcgagggggcccccaccgcttaaccccgtaacccaactttttccttggtaccaagacgcgggccccctcaatagcccgagctcgcgagcgtttccagccccatgggcgccctcgcgccccggc

SEQ ID NO: 52023 - DNA, 688 bp, Homo Sapiens
ctgatctcaaactcctgacctctggtgatctgtccaccttggcctcccagcactttgggagcctgagataggagtattgcttgaggctaggagtttgagaccaacctggcaacatggcaagaccctatctctacaaaaattttaaaacttagccaggtgtggtagtgcacctgtagtcccagctagtcagtaggctgaggtgggagtattgcttgaggctgcagtgaggtgtgatcacgccactgcactccggcctgacagaatgagatcctgtctcaaaaagaaaattccccagaagaagaattctaattttatcaagctgaattaaagtttgagagtcttttttttaaaatcttactgtgtcaaaagaggcattatgttgcttgtgtgatatagtgaatagtgtccctccaaatttcatgtacacctggaatgtcacaatgtgacttaacagtagccacccctcacccccgcccttatctgtggtggatacatttgcaagatccccagtggatgcctgaaaccgcagatagtactgaaccttatatatactgtttgttttcctatgcatacatatccctatgataaagtttatgaatttggcacttaacagcagaactaataagatgaaagagttgtaacaatatactctaataaaagctatttaaaatgtaaaaaaaaaaaaaaa

SEQ ID NO: 52024 - DNA, 994 bp, Homo Sapiens
  misc_feature (994)..(994): n is a, c, g, or t
ggctgcaggaggaggccttcatgtcacaggtgcacagcgtggtgctgtcagagcgggacctgcagcgggagatcaaggcccagctggcccagctgcccgattccgcgccgggacccccgccccggccacaggtccgcctcgccggggcccaagccatctttgaggcccagcagctggcaggagtgcgacgaggcgccaagcctgaggtgcctcggattgtggtgcagcccccggaggagcccagaccaccgcggcggaaaccccagacccgcggcaagactttccatgggctcctgactcgggcccggggcccccccatcgaggggccccccaggccccaacgaggctccacctccttcctggacacccgcttctgagaggaccatggacttagtgtcccccagtctcaattgcctgatggctgatgccagcccggcaaataggcaccgcactttactcttgggactcggggacttggcttccttcctggcaaggaccaggcagtggggaaggaggaggtcctccgtggtacatactgggtcaggcactagcatggaggagggtcacagagtggggcacgtgaggacccatggaaccgtcctggtgcccaggccctcacaagtaccaaagccagcaccaaaggagtcagggaagggggttggctgagtcaagggacccagagggcaccaggaataaatctttcttgaccgaaaaaaaaaaaaacaaacacaaaaaaaaaaagaagaaaagaccggggacctatataggggggcgagaagcgtgataatgagacaggaacatagttcttagagcattttgttaacaggttgagaaggggggaccacaggggagggtatatgacaggatgcggaagaaagagagagcgaggacgttgtgagtggtgttagagggagggtatcccaacgggagacagagagagagataatattcttatatatacagggtgaataagacgtagaacgatgggtgaagn

SEQ ID NO: 52025 - DNA, 530 bp, Homo Sapiens
ggggaggaggtcagcgacctggggccgtatcggcaggcgaacggtgcctgctacccagctggaagccacaaggtggctggctccaggggcggcttttgttggaagttgagtgaagccctccccctgtcctcagcgtgcagccctagaggaccccagggctgaggggcagtggatcctgcgggagtctcccggggcgtggggagtaaggccccgggggtggggggccgggtgggccgggcgtgacgcgcggtcaaagtgcaatgatttttcagttcggttggctaaacagggtcagagctgagagcgaagcagaaggggctccctgtccggcccacgtgccctttccctcgacgacagtcgagggctcgggctctgtgggactgtgggagctagggtctgcggggcgcctgcccgggcgaggtcggaagctgcaggccagctgggcccgggccggagcgtgcccggcggggctgcccgggcgggcagggggtgggggctgctcctttcccaagtggtgttgtgaggggcaa

SEQ ID NO: 52026 - DNA, 795 bp, Homo Sapiens
attcacgattgcggccaagcaccacatctccattgctgagatctatgagacagagttggtggacatcgagaaggccattgcccactacgagcagtctgcagactactacaaaggcgaggagtccaacagctcagccaacaagtgtctgctgaaggtggctggttacgctgcgctgctggagcagtatcagaaggccattgacatctacgaacaggtggggaccaatgccatggacagccccctcctcaagtacagcgccaaagactacttcttcaaggcggccctctgccacttctgcatcgacatgctcaacgccaagctggctgtccaaaagtatgaggagctgttcccagctttctctgattcccgggaatgcaagttgatgaaaaaattgctagaggcccacgaggagcagaatgtggacagctacaccgagtcggtgaaggaatacgactccatctcccggctggaccagtggctcaccaccatgctgctgcgcatcaagaagaccatccagggcgatgaggaggacctgcgctaagcccgacccaggcccccagtgcccgtcttcctgtcccatctgctcagagagagccaagccctaaagcacatgtagccgcgtgagacctgctgtttctgctgggggcaggctcctctgcccccagccccgggagcctcccccagcttcctgcaagacgccgagctctcaggttagaccctggagcctggagcttaggggattctccagcacccagcccacacctgctccttccctaatgcttagaggttactagg

SEQ ID NO: 52027 - DNA, 661 bp, Homo Sapiens
aatgcccaaggccagcaagagattgtctactatgtgctgtctgaagccccaggggagcctcccccagtccctgagccaccttcagggggcatcatggaaaagcttcaaggaatagctgaggagccagagatccagatggtttgaaggccgcagagccagaccatttcttccccaggtcctgaagtttgagccaggcaagtggcagtgcccctagtgggcagccgttgccaatggatgcctttaggagtggtgccgagagcagtgtggtccactctggcctgggtttgcatcattctgcagactctaaagacttcccttttctgccagactacattttgtggggagcctgaggactctggattctttgaggggatcctggatgtgtgtgttcttgttaaagaggctgttatcaggcttaactataaccctcaagatctgcttgacagtgattaaatccttagctcacatccattcccatctttcgggctccttaggcccaaggatggcatgtgactggtccctgcaagggtcctttctttgtcaccagccaaggcattgataaccaagtagccattttcctcttaagggttcctctacaaccccaaggactttcatgattatcctcagggacaggattggaggcattgaccgtgtttattaa

SEQ ID NO: 52028 - DNA, 655 bp, Homo Sapiens
  misc_feature (19)..(19): n is a, c, g, or t
caaaacttcccccctgggnttttgtgcccactctctgagaagttggggctccatcaagccccattctagtcatgtgcccctttcctgtccctaacagtccacaggcaaacaaatggtacagtcataagagccatctgtcacggacccacgcccagaggaacgtgcagaaaaaagcagagctacatggctgtgggcaactataagccaaatatttggctcagaacaggtgtccatgggacaaaaaagaacgatcctccacttgaccaagaaaaaagtgattctcccagaagcacaaagcatactcttgcccctcaggtgttgcttgtgtacatcgtacccatccattcggcttcacctgcagccaacggcctggaatcgcaaagagacaccactctgggcagagcagagcagggtatggggtggggagagagggtggagggttttataaacaaacttaacagcaatattgaaaggaggtgggggattgagggagggacagagtgttggagggccagagactagtcctgagatggaaacagcaacttgtacagtggctgagaaaataggatatagttttgatttttttaattgtaaaatattttggagggagaacaaaatcttttaacattttgaataaatttagagttttataaaa

SEQ ID NO: 52029 - DNA, 748 bp, Homo Sapiens
cgcgtccgggtgagttccctgcacagtacccaaacaacgccgccccttccttccagtttattaaccccacaaccatcacatccaccatgaaagctaagctgctgaaggtgggggtctgggttcccaaattctccttgctgttctgcatcattgtctagatggattagtaaagaagaatgaaaactccagtagatgagattcggaagtcatctgtttcgtacacacactagtattagcaacgtaacctctgaacttgccatttactttgtgcagaaaacatcagagcagtggttcttaaccttttttgggtcatagacttcctttgaattctaatgaaaattatggacccttcctcagaaaaatctgcacaatgattgcatatgatttgagaaatattgcctgtaaatatgtgaattgcatagaatctgcccacagatctcattaatactatgcattcatctccggttaggagatttgcaatccaatttcatttagcagcccaggttaggagccctgcagtccaatttcatttacctgaaaacaacaagcaagatgtattctgaagctaaaagatattttataattagaaaaaaacatatgtaaggtcataaaaaaaattttatcccatagaaggagctggtgttatcctagagacaggctggctagctgcacagtaggtgtccaggtggaggcaccacagcctggcatctgtgtttaattctgcagattcagagatttaatgcatcag

SEQ ID NO: 52030 - DNA, 787 bp, Homo Sapiens
tcttgctcctgtcgcccaggctggagtgcaatggcacgatctcggctcactgcaacctccgcctcccaggttcaagtgattctcctgtctcagtctcccgagtagctgggattacaggcacttgccaccattcccagctaatttttgtatttttagtagagacggggtttcaccatgttggccaggctggtctcgaactcctgaccttgtgatctgcccaccttggcctcccaaagttcagggattacaggcatgagccaccatgcccggctgtttttttaagatagaaaaatatacttcatgtatagcctattgacagataatgactgatattttttcttatagataacacatagtaaacattgtgaagactaataagtaacttgcttattcttttcagttctaaaacctgtaggaaagaatgtttagaagctgtcaacaagttgataatgtagcccgatctctacccatgataggagagtaaggcttatatattttatagtagggcactaaatacaggaaccatgtatttaaaaactttttagtgattatctcagaattctaggtgtccctctgctgtacatccctaaattttttgcgtaggtattattaataaattcattattttcaaagatggactgtgttctgtaaaaagcttttccagtatctgcaaatcacacagtttttttttaactctattactattatataaaatgatttcttaatattgaaccaaccttgcatttctagaataaacctcctttacccatgaaaaaaaaaaaaaaaa

SEQ ID NO: 52031 - DNA, 1218 bp, Homo Sapiens
gccgctcgcagctcccagtctgcctccccgaaccggcgccgccgcccgcactcgccgcaggaccggcccgcccggctcccggggtgcgccctcctcggtcccgcgccctccgggctcgcagggacgtctcctccctcccggctcgcggccccgcccggcccggcccccgcccagagccccagcgcgccgaggatgtgagtcctgctcgcctctggcggagcagcagccactcgcgcgcggagccggagcgcagcgcagcgcagccgcgggcgctctccgggccgctcgcgcgagtgccgcgctcttgccctagcggcgtcccccggcctctcgccggcgccaccgccgcagcagcccgcgggccgtccccggccggccgcccccggccccagcgccgctgaccctgtccgccgcgggcggggacgcgggcggaggaggcgccgcggcggagcccccggacgcgaccatgtcggaggtgctgccctacggcgacgagaagctgagcccctacggcgacggcggcgacctgggccaaaatctctcctgccgacttaccgagcccaaaacttccttcggcgccgggtgacaaacagtgtaccccttcttaaaatatcccttcaaggggaccctcccttccccccataccatgcgttttttgctccctacacgcaccccctaccgcgaatccgtaaaaatcggtctcccgcaagctggcgccccttcctcccccgttctttcgcaatccccccccctacacccatccatccttaaattaccgccctcaataatcccctaccccccgcctcgtgccgccaaaccgttccccgcgtatttcccgtttcctacgcgccgcttgactcctttgagtcgccacatctgctactttcacctcgccctaccctgatactcccgcttacgtgtgttctttccgcgcccagcccgcccttattcggccgcccactcctttttcccgtcgcttcactccgaaccgctaccgctatcccccaccctttcttagttctctgcctccccgaatcccctcctctccgcccgctattacccccctatattacgcccgcctccttctttcttccctgctagcgccgcgttctcttgcaacgctgcctactatgttaccctggaataatacttccaagcacgacaagacgctacattctcaatccacgttgtcccccgccctcactctttattcccgtc

SEQ ID NO: 52032 - DNA, 642 bp, Homo Sapiens
ttttttttttttttttttcagccaagagttctctttattccctttgatcctcccccaaggtgagggcttaggcagctgtagaaccccaggaaagaacggaatccaggcaatctgtttagagaccccccactccaaatttatccttttcctttccttcccctaagatgtttccagggccctctggtgcccacactgtcctcttccttccacttgggggtggggaaatccttcctgcgaggtcagggcatttctctacaaagtggcctgaatgaggccaggccctgagaaggagccaccagctggaggaaaggggctccaagccttgcttttaacacccctgcaaaacccccaccctcccaagatgttcacaaaaggtgagaaattcaggtacgaaaccatcaatggacaacttgaaaatgcatgttcctcaggcctatgcagttcccagagactcttgacaccggtctctgctgaggctcccagcctcagtttcccccacagcagcacgggccccactgtgctgctcttcaggtccccacagccctgcctttggttcctggacatttggtattctgccctccactctggtactatcagagtagggcaggctctggattaaagcttttagccggtctaaagcta

SEQ ID NO: 52033 - DNA, 587 bp, Homo Sapiens
ggtaaccgtcttcgctatcaacattcatcatcgttcttcctcaacacataatgccatggcgcctttggtccgcaagatatttcttcacacgcttcccaaactgctttgcatgagaagtcatgtagacaggtacttcactcagaaagaggaaactgagagtggtagtggaccaaaatcttctagaaacacattggaagctgcgctcgattctattcgctacattacaagacacatcatgaaggaaaatgatgtccgtgaggttgttgaagattggaaattcatagcccaggttcttgatcggatgtttctgtggacttttcttttcgtttcaattgttggatctcttgggctttttgttcctgttatttataaatgggcaaatatattaataccagttcatattggaaatgcaaataagtgaagcctcccaagggactgaagtatacatttagttaacacacatatatctgatggcacctataaaattatgaaaatgtaagttatgtgttaaatttagtgcaagctttaacagactaagttgctaacctcaatttatgttaacagatgatccatttgaacaggtggct

SEQ ID NO: 52034 - DNA, 699 bp, Homo Sapiens
gttttgatcctcagggggcctctcaacttaataacaggttacagggaacaaaggcctggattggagcatgtgaagtatatatactcctgacctccctaagggtaaagtgtcatattgttgattttcacaaatcaactggtcctttgggtacacaccctcgcttatttgaatggatattgaactattattcttcagagggagaagggagtccaaaggtagtgtgtacatctaaacctcctatctatcttcagcatcaaggtcacagtcgaactgttattggaattgaagagaaaaaaaaccgaacattatgcttactaatacttgatcctggatgtccttctcgagaaatgcagaaattattaaagcaagacatagaggctagcagtctcaagcaacttcggaaatctatgggaaatttaaaacataagcaataccagatattggcagtagagggtgctctttctctagaggagaaacttgccaggagacaagcttctcaagtctttacagccgagaagattccttgaagaatcaagcatttaagcatttcagtgattgagaacaatactttgttttctaaatgtagatattgaactccttaatacaattatgaatctgtgaattctcttaagtcttaacatataatttaatttctaaaatgcctgtgttaattgaattatacctatcatacttcattgt

SEQ ID NO: 52035 - DNA, 650 bp, Homo Sapiens
ccatttctatatctacctggatggaccaagggccaagtctggatcaatgggtttaacttgggccggtactggacaaagcaggggccacaacagaccctctacgtgccaagattcctgctgtttcctaggggagccctcaacaaaattacattgctggaactagaagatgtacctctccagccccaagtccaatttttggataagcctatcctcaatagcactagtactttgcacaggacacatatcaattccctttcagctgatacactgagtgcctctgaaccaatggagttaagtgggcactgaaaggtaggccgggcatggtggctcatgcctgtaatcccagcactttgggaggctgagacgggtggattacctgaggtcaggacttcaagaccagcctggccaacatggtgaaaccccgtctccactaaaaatacaaaaattagccgggcgtgatggtgggcacctctaatcccagctacttgggaggctgagggcacgagaattgcttgaatccacgaggcataggttgcagcgagtggaggttgtaccactgaactccagcctggctgacagtgacacacctccatctcaaaaaaaaaaaaaaaaaaactccgaggcatcctatgtttggcgcccggacaacc

SEQ ID NO: 52036 - DNA, 505 bp, Homo Sapiens
ttttttttttttttttttggctctagagggggtagagggggtagaagaaattattcccgaagaaaaaaagaatgaaaagtcattgtactgaactgtttttatatttttaaaagttactatttaaaggttggtttgattgttgcgtcttaattgcctctcctcccagtttgccagtcccgccccccgccccccgggaaaacagccaggccactgttgctgtcacattctggagcctgggccagggccatttcccatcgatgtgagctcttctcatctcacagcattccctgcgctgcttccacccccttctccccttccagatacccagcatcgcagcagggatttcacaatcccatactgtgtcgcctcccatccaagcgccagggagggtggggggtaggagctaagacttcctctggacagatgggcagggcagagttcactgaggtgaaggaagaccacaggttaacaccaaagtattgtacagctgtcaatgccctcttgc

SEQ ID NO: 52037 - DNA, 659 bp, Homo Sapiens
ccaggctggtacgctcggagtacgggatatccagcccccagccctggggcagcgaagacaggcacagcctgggcagatgggctggggcttagcaccacccaccaaatgttcttttccagaaggtgaaagagaaagggcctgaacaaccttacaccaaatattcagtagcttcatccaaaggatgtacagaatttttagcattgtgctcaacagaatgtgtccctaccatgtgtccccttctcccctggcccccagctctccccacctgggcagggggtcttgctttaacctcctccctccccccagcaggggagagttcaagggaaggcctgcggacaacttttcatcccctgttcctccctcttttcccctttgaagggtgggctaggccattttgccaagttctagctctcacaagtccctcctcaaccctgtcaccctcctctgctctggaactgactccctccccagcctatgggaacggtggaaatttcaggcaagaggggatgaagacattcagttgagggcattcagtagtcctttgttccagtcctgtctgatttccctaataaaaaaacacaaacaaacaacaaaaagccaaaacacacactcaaacaacagaacaaacagaaaaccaaaacacacacccacaccgggct

SEQ ID NO: 52038 - DNA, 582 bp, Homo Sapiens
tagcaattgtaacaataaatcacagccacttgacaagaaaggatattcattattttcaaatggcttttggactatcaaaaacagtaaggcttttgttcagaaatcacctttagtcaaaaggtttaagaagcaaattatttagtagcagaacttatctcaggaaaggaaaatatgcatggttggtgagaatctaataacattaaaatgctggggcaagatgcagtacaaagttgaagagactttattctcaataagttgatttactgatgatatgtcatatgatgcaaaaaaggttttgtgtcattaactgaaaagtagcagcttctctatccaggatgatgagtcaacaggtttcactaatatttgtcatgctgtagcatttgtaagatttgtaaatgatgaaattcaaagaaaactttttctattgctaggagcctgccagaacaaaggccaatatataatgttgtgacatcatatctgataaccagaggtctggtatctacactcctggtgccccatcagtggttgtctccataagtcattttgcgttattaaaaaaaaaaaaagaaatcctgatgttga

SEQ ID NO: 52039 - DNA, 458 bp, Homo Sapiens
cctaaatgtcttaatgctctctatgtgagacagaaatagacgtgaccattagtaatgcaactatttttgtcaaatttagtgggattttttggttgttgtttgttttcttgggtttttttttttaaatgacaaactctaaaaatgtaccaatgtgaaaaaacactttcctgaatgccattactcatgccctcaaagctttcatatctgtagcctactcctgtaaagggtttctcctgtttctagtttctagtttgcaaaggtatgccaacgaatctggcaacctggtatttgttactaaaacagcatgtgttttcaggtttcttttctattgtacctaaagcagtctaaattaaaacttagtagaacaccaggagtatgattctgtttctgaaaggtgagtggtgtattgctgtcattgggccctattttttttttttaaatatatttttctttcttac

SEQ ID NO: 52040 - DNA, 509 bp, Homo Sapiens
caatcccattattcagagcgcgtatggagtggaaacgcttgtagggtttcaccagtctttcccagggaactccgatgaagtgttccaacaaaatgagcgagtgaaccaagaagaggatgacattagatccaggagatacaacagaggagataatctccaggatgcctgtgaagaaagatccctggatcccaggatgattataggacaagttgttcataatccagcaggccagaagacttccagggaaactcattcaaggaggtgaaaatgatggatgactcctccaagatgaaaatggaccagccgcagtggctcacgcctgtaataccagcactttgggaggctgaggcaggcggatcacttgaggtcaggagtttgaaactagcctggccaacgtggcaaaactccatctctattaaaaatacaaaaattagccaggcatagtggtgcatgcctgtagtcccagctacttgggatgctgaggcaggaagaattgcttgaacctggga

SEQ ID NO: 52041 - DNA, 802 bp, Homo Sapiens
cggacgcgtgggttgttatgtgaagatggatgttgaattgtgtagaatttgacagcagtatcaagagctgaggagaaggagaagatggaaaggagtctagcaacttaaaaatctcacagcattctctgtgaggtgaccttttttcctgttggtggctcaatttctttaggacataaagaagatactgaggcctgtgacagcctgtgacagtatcatcaagtcgtatctgaacttattgaactgtttcctccccttccttattctttattcacagtttgcttttcatgtgcataagttgactcatttgtttcctgttagcatttgaaacaccatatagccaccataagtcctgacaaaatgacttttaataaggagggggaaggtccatgtcccaccttcctatgaaattttggcctattcacaagtctacccccacataagagaagtagttatgttctgtaaagaagaggttgataaaaacctttagcatggtgttttgtgacttagaagttttaagtagtcgttcttatatctaagcatttattaattttggtaagaacattactatacgtttctgatgtcacttttactgttaagaggtgccagggatctggtgacctgtcacttcaggatttgtgtgaatcagaccatctaaatataatataaattagagactggtacttgtatttcctgattaaaacaaagtaacgtctgttttactattgaagtaagagtactttataatgaatacaaaaatgtatattaaatatccagtagagcatgaaaaaaaaaaaaaaaaggc

SEQ ID NO: 52042 - DNA, 631 bp, Homo Sapiens
agctgaagaatgtcgcgaagcttgtaaccaatcctcaaaacgttaccaaacataagaaaattcatactggagagaaaccctacacatgtgaagaatgtggcaaagcctttaaccagtcctcaaaccttactaaacataagagaattcatactggagaaaaaccttacaaatgtgaagaatgtgacaaagcttttaaatggtcctcagtccttactaaacataagataattcataccggagaaaaattacaaatatgaaaattatggcaaagctttaatcaatttacaagtcttactaaacataagaaaatttatactggagagaaactactaacctgaaagatgtgacaataattttgacaacacctcagacttataaaagtaatcatactggtgagaaattctaaaaatgtgaagactatggcaaagtctttaaatggttgtcacactttaggtaagataattcatattggaacaaactacaagtgcaaacaatgtggcaaaacttaatttatgctcacaccttactgcacagaaaagaatatttagttgagaaaaagttacaaatataaagaatgtggaaaagccgttaatatctgctcacatcttactcaacattcttcagcacgggg

SEQ ID NO: 52043 - DNA, 588 bp, Homo Sapiens
ctcccctctgaagagcaactcaaacagcgccaggctccccatcagctcgggcagcacctcgtccagccgcatctaggcctccagcccacctgcccatgtgatgaagcagagatgcggcctcgtcgcacactgcctgtggcccccgagccaggcccagccccaggccagtcagccgcagactttggaaagcccaacgaccatggagagatgggccgttgccatggtggacggactcccgggctgggcttttgaattggccttggggactactcggctctcactcagctcccacgggactcagaagtgcgccgccatgctgcctagggtactgtccccacatctgtcccaacccagctggaggcctggtctctccttacaacccctgggcccagccctcattgctgggggccaggccttggatcttgagggtctggcacatccttaatcctgtgcccctgcctgggacagaaatgtggctccagttgctctgtctctcgtggtcaccctgagggcactctgcatcctctgtcattttaacctcaggtggcacccagggcgaatggggcccagggcagaccttcagggcca

SEQ ID NO: 52044 - DNA, 840 bp, Homo Sapiens
  misc_feature (550)..(550): n is a, c, g, or t
gaatcttttctgcttactgaaaaggaagagtctgatgattagttactgatcctctttgcatttgtaaagctttggagatattgaatcatgttaccatttctgtttttttccaccctgttttcttccatatttactgaagctcagaagcagtattgggtctgcaactcatccgatgcaagtatttcatacacctactgtgataaaatgcaatacccaatttcaattaatgttaacccctgtatagaattgaaaggatccaaaggattattgcacattttctacattccaaggagagatttaaagcaattatatttcaatctctatataactgtcaacaccatgaatcttccaaagcgcaaagaagttatttgccgaggatctgatgacgattactctttttgcagagctctgaagggagagactgtgaatacaacaatatcattctccttcaagggaataaaattttctaagggaaaatacaaatgtgttgttgaagctatttctgggagcccagaagaaatgctcttttgcttggagttgtcatcctacnacaactaattcaaattagaataaattgagtatccaaaaaaaaaaaaaaaaaaaaaaatttgtgctgcgcgcttgggccctggagaaagtttttaacacatctgtgtggcgccgggggcccattgggtacctgcacactgggccaaaggggtcccaaagataccccggggcaaggaacaaggcccggggtttccccaataaaaaacgcggggggaccccgaggttcgcaccactccaagggggtccggggcacaaccgggtctctcacaggggcccaggaaccaaaaataa

SEQ ID NO: 52045 - DNA, 971 bp, Homo Sapiens
  misc_feature (836)..(836): n is a, c, g, or t
ggcaagcaagctctcttgccgaggagccaggcaacttcagtcctgggagacccatgtaaataccagactgcaggttggaccccagagattcccaagccaaaaaccttagctccctcccgcaccccgatgtggacctctactttccaggctagtccggacccacctcaccccgttacagctccccaagtggtttccacatgctctgagaagaggagccctcatcttgaagggcccaggagggtctatggggagaggaactccttggcctagcccaccctgctgccttctgacggccctgcaatgtatcccttctcacagcacatgctggccagcctggggcctggcagggaggtcaggccctggaactctatctgggcctgggctaggggacatcagaggttctttgagggactgcctctgccacactctgacgcaaaaccactttccttttctattccttctggcctttcctctctcctgtttcccttcccttccactgcctctgccttagaggagcccacggctaagaggctgctgaaaaccatctggcctggcctggccctgccctgaggaaggaggggaagctgcagcttgggagagcccctggggcctagactctgtaacatcactatccatgcaccaactaataaaactttgacgagtcaccttcaaaaaaaaaaaaaaaaacaacaaaaaacacaccgggggacataagcggcggcggggacaacgggtagaacgggagctggctaagtgtggcccgacccctttctgtgaaggggaaacgggcgcccacaaggaagggaatacgaacctgactgacgccgccgcaacgngaagaaagcgcaacgagaaacaagaaggacagagagcagcacacagacagaacgataacaacatcacatacaaacacgacacaacaacacaagaaggccggccgaccgaccggccaagaacccaagagaccgtgc

SEQ ID NO: 52046 - DNA, 559 bp, Homo Sapiens
accctaggtgtgctatctgtttgctcggacacattcaaatgacccaggacagcttctgaggaaccacctcaaccaggtgggacacactggtggtcttgaacaggttgaaatgttccttcttgcctatgctgtgcgccacaccatccaggtgtaccggctctccaagtacaacacggaagaattcatcacagtctaccccaccgacccacccaaggactggccagtggtaacgctcattgctgaggacgatcggcactataacatccccgtcagagtgtgtgaggagaccagtctatgagagacgcatgctcctgacagcctggcgacgtggcgaagacgcacaggtggctcctgggcttgggctgcaggtttgggggtctctaagaacaatctctgagaagaacccttgggcccctgggagccaagttggacaggatgtcctgaagactagcttttgataagagaaattaaccaagtctttcccctcatctatgatgcaatatatttcagtgggggccttcagagcacacctgttggacggtgcaaaccatatcttctc

SEQ ID NO: 52047 - DNA, 675 bp, Homo Sapiens
ccattgtcagtgtgctcgtgggctggtgactgggtcttgggatcccaggccacgcgccagccaggctgtgggcagggcggggccagggacgccaaagagaggttgcagtcagaaccgtggacggggtgggttgaggcctctctgccacccgtcttcctggtcagcagaagtgcatctcggcttgggtttggggtggtccgcatcccctgcttgccactatgcgcaccaaggtttccccacatccttcccagcacccttaggaaggcccaggcagggcctggaagcagcggacctgggctgttctgtgttgaaggagtgtgcccagtgcccttgggcaggacctgtgagagccacctcacaggcagagcccccaccaggcagggcaaggagactccgctcactccccacggccagcgtgggcacaggactgacccttcttcagagataatgacattttatcttctccttttgatgaaaactgtcactttagcatgtaatccattacagaatcccatgcagtgattccaggatttgaaattgtatgatgtgttacataagaatttatttgctatcgacattcccgtataaagagagagacatatcacgctgctgtcatgattttgtgtcaagatgatcccataaagttgtaaaacaggcaaaaaaaaaaaaaaaaaa

SEQ ID NO: 52048 - DNA, 823 bp, Homo Sapiens
tctgaggtatgtactaatactaaagcttatgttaaaggaaggcagaaaaattaagtaacttggcctaagtttgcataactgtgatctgggatcaatatttgaacccatacaggctgattgcagagcctgcactcttaattggagtgtgatatttatgtgcagtacctggctataagtacccacaaaacgtttcaaattctttataaaattgcttagttaaaaaaaagtaccaattgcataatatggttataagtctggtagaagttaggctttttacaagacatgctgcttactgcaccaaggaggcaagaaggctttttagagagcccagaatttcctttcctcaactcctgcttccaagacagtcattttgcatgataaccgtttccccaaaaaacacagacacaaaatttaaagaactggaacagaggaagcagagcttatcatagtatatatgtttagtaccctgtcacttaggtccacccctctttctttgtggatggtggacatttggtttaactgtaaatcatgagaatatatgactgtgagacttttccaagggatttttttaaaaaacacattaggctttgtgcagaagtaaagaaacagtggtgtgaagaaccccagtaaggtatttactttccactgtactcatatgtttggttgaactcttaactctatccttattggttattacttgttaattctgagtttccctttataaactttcctaaaaaaaaaaaaaaaaaaaattgggggcgcgcgcagaaaatttaacaccattgggggggcagaagaaagaattttagaacggaaaaggggc

SEQ ID NO: 52049 - DNA, 640 bp, Homo Sapiens
gtcagtttgaggtggtggagactcagatttgttgctgaaagttcagtaacacagtcctggtctttggccctagagaaactttttatatgagaagtgttctctatatacatgtttgaggtgactctggaatggattatgaggtcatatctcaaaatgtcagaaaacgttatagagcactcgaacttttgtatttgctgcttaacctcaatattacagccacaaacaaggggtaccaagacaaagtataactgagcataagcagaaaatgttaaccctccaggtttctttcttaagcacaataaaagtgggagcgaacaacacaaggatatttttacatttgacccgtctcaaaagtagcacaccctatccttgtgccattatttgtacaaggaaatatatgattagaaggaatataacccccagttgtcatcagcttttttagacaccacaggttgtagcagtttgaacaaactgaaaactttatacttctgtgtgagctgaactcaagtttcagaataatcatcgccatgtgggaggctttttgttaaatgcagaagaaatttcaaaatattgtatttatatctgccttccactgctgccaatttagtaagcatctcctatacaatcgacaataaacagc

SEQ ID NO: 52050 - DNA, 500 bp, Homo Sapiens
tataactatggtgtcacagccctgtggctactggagtaagttgtcatcaactagtgacaagagctggtcgcaacacttagtaggaagcacagtggcataaggaaacctggactagtggggcctttatatctaaaattatgtattattccttataggcagaatctgtaagtacgttatgactgctaatgacttttaaagcaaacatgttaacgatctttctatggtaaaaactgttatttggggacatcaccagatgatgtggacattcttgcaggtattttggcatacccaggcaagctgtcattggtgtatattccagttaacctctggagatgatcgtaacagtttacagggcctttccatttgggatggatatatcaagagggagacaaactggtccaaatcaccagaaagaaaatctcacagcaccgacttggcatctgtgttaaaaaatagcaactatatttaaaataaactgtacaacataaaaaatttaaatt

SEQ ID NO: 52051 - DNA, 773 bp, Homo Sapiens
  misc_feature (729)..(729): n is a, c, g, or t
  misc_feature (744)..(744): n is a, c, g, or t
  misc_feature (754)..(754): n is a, c, g, or t
  misc_feature (771)..(771): n is a, c, g, or t
tttaaagctataatgaactgatacacatcaatttaaatcttgttttattctttcaatgaacactgtatcaaaatttttttatgaagtaatgttagtctttgtggtcaatagttattggtaatactactagtaatatgatacatggctataagatgcttagcttagtgtcagttattattctaagagtttaaatctaaaaagcttccctcttgtgctctgaaaaatgcttactcaattgctttgaaaaatgtttatccttttccacagaaattcaagatgtaaatacaacaaagccttgtcatattagctatcttttttcaaattagacagaaaaaaattcttgacactatttaatttcagtgctagtgagcagatgttttagggtgcaagagccatgttgctatttcagttatgatgtaattaagcaacaactgtctggcctgggtctacttcggtcccctttgcaggtcagttgcttggtgtttctttgtaaaccagaaaaaactgagcaaaacattcattcatgtagctgtagcaccaatttgctggcatcaatattatggtaaggaaatgtgtttttgaacattagcctaataagctctttgctactgctatggtaagatatcaaatgaaaaacctctgtaaaacatttccaggttttttctttcttatcacaatatcatttaattatgccacatattttattatacttacatattttaactttgnttcttggacttgagntcatttaagntaataaaattcagaaantt

SEQ ID NO: 52052 - DNA, 774 bp, Homo Sapiens
gccaggtggctactctcaacaacaatggtgaggaagcctccactgaagggacctgctgccccgtcaactgggtggagcaccaagacagctgctactggttctctcactctgggatgtcctgggccgaggctgagaagtactgccagctgaagaacgcccacctggtggtcatcaactccagggaggagcagaattttgtccagaaatatctaggctccgcatacacctggatgggcctcagtgaccctgaaggagcctggaagtgggtggatggaacagactatgcgaccggcttccagaactggaagccaggccagccagacgactggcaggggcacgggctgggtggaggcgaggactgtgctcacttccatccagacggcaggtggaatgacgacgtctgccagaggccctaccactgggtctgcgaggctggcctgggtcagaccagccaggagagtcactgagctgcctttggtgggaccacccggccacagaaatggcggtgggaggaggactcttctcacgacctcctcgcaagaccgctctgggagagaaataagcactgggagattggaagcactgctaacattttgaattttttctctttaattttacaaacgatggtatagtgttcttaagcttttattttttttccaacttttaacaagtccacttcatgaaggtcatatttttacatgataaaaatgcactcattcacccgagtagaccatgactttgaccaaatatgcatgcctaggtgactaccactcc

SEQ ID NO: 52053 - DNA, 703 bp, Homo Sapiens
  misc_feature (668)..(668): n is a, c, g, or t
tgtcctgtgggtccctgcagtcgacatcatgtttggctgggcatcgatgcctcctttctgggactcccggcacaactcccctcatccagggagggaggcagctgctggggaggggcttggctaggtagttctgtgtggcggtggtcattcccctcattaaacaccagttcttggtgacgccaggggctggtaggtcattcaaagctgtggccagctcacgcctgcttcctccctccctgccctgctgaatcctaaagctgtgcctatatctgtgatttgaatgagggagccctttggggcaaattcaggtgcccccattgtctcaggctggccctggtcccaggtggcagcggttgaggaggggtacagggctctcaagcctgaggttttcttctctgggcttaattttctcttggggtacgtgcctgacagtgtttaaggtgtccgttgaactggagttgcagacttttaaatagatgaccccttcagatcatctgtgcctacctcctgcccatcaggcgtctacactgtcactcagacacctgtggcatgtggaggagactgccctgtcctgagcctggaaaatgtgaaactgtctcctgcaacctgctgggcatgtgggcctggctgtgttcaattgcaagaacaatttttatgaaatggattanagcttgttttttaaaaaaaaaaaaaaaaaaaaaaa

SEQ ID NO: 52054 - DNA, 904 bp, Homo Sapiens
  misc_feature (90)..(90): n is a, c, g, or t
  misc_feature (800)..(800): n is a, c, g, or t
aatgcatatacttttttaaagcaatatctgtgatgctaataaggttaaaggaagaaaccagctgccctgggtgaagcccaaccaacaagngtttggaagaaaataaatctttaaaggaacagaaaaaactgaatgacttgtgtttcctaaagagactattacaagagataaaaacttgttggaataaaattttgatgggcactaaagaacacgtgaaaaatatggagtggcaatatagaaacacgaactttagctgcatcctccaagaatctatctgcttatgcagtttttcagagtggaatgcttcctagaagttactgaatgcaccatggtcaaaacggattagggcatttgagaaatgcatattgtattactagaagatgaatacaaacaatggaaactgaatgctccagtcaacaaactatttcttatatatgtgaacatttatcaatcagtataattctgtactgatttttgtaagacaatccatgtaaggtatcagttgcaataatacttctcaaacctgtttaaatatttcaagacattaaatctatgaagtatataatggtttcaaagattcaaaattgacattgctttactgtcaaaataattttatggctcactatgaatctattatactgtattaagagtgaaaattgtcttcttctgtgctggagatgttttagagttaacaatgatatatggataatgccggtgagaataagagagtcataaaccttaagtaagcaacagcataacaaggtccaagatacctaaaagagatttcaagagatttaatntaatcatgaatgtgtaacacagtgccttcaataaatggtatagcaaatgttttgacatgaaaaaagggacatttcaaaaaaataaaataaataaaaaataatcc

SEQ ID NO: 52055 - DNA, 582 bp, Homo Sapiens
ggatgcctttgtcattctggtggagaatgctttgcgagtggctaccatcaacacagtaggagattttatgttattccttggcaaggtgctgatagtctgcagcacaggtttagctgggattatgctgctcaactaccagcaggactacacagtatgggtgctgcctctgatcatcgtctgcctctttgctttcctagtcgctcattgcttcctgtctatttatgaaatggtagtggatgtattattcttgtgttttgccattgatacaaaatacaatgatgggagccctggcagagaattctatatggataaagtgctgatggagtttgtggaaaacagtaggaaagcaatgaaagaagctggtaagggaggcgtcgctgattccagagagctaaagccgatggcttcgggagcaagttctgcttgaacctagccgacggttatggaaacccattgacattccaaaacaatatatacacataactatgtatttgtgtgtgtgggtgtgtgtatatatgtatatgtatgtgtgtatatatgtatatgtatatacacacacacacataaatcagccaaaatcag

SEQ ID NO: 52056 - DNA, 582 bp, Homo Sapiens
tgtcctcaaccctttctacacataagattattcatactggagagaaaccctacaaatgtgaaaaatgtggcaaagcttttaaccgatcctcaaaccttattgaacataagaaaattcatactggagagcaaccctacaaatgtgaagaatgtggcaaagcatttaactattcctcacaccttaatacacataagagaattcatactaaagagcaaccctacaaatgtaaagaatgtggcaaagctttcaaccaatattcaaaccttactacacataacaaaattcatactggagagaaactctacaaacctgaagatgtgacagtgattttgacaacacctcaaactttttcaaacataaaataaattatactggtgagaaattctagaaatgtaaagaatgtgataaaggctttacatggttgtcacacttgattgtaggtaagataatttacattggagtaaacttctacaagtgtgaagaatgtggcaaaacttttaattaatgctcataccttattgcacaggaaagaatttttacttggaaaaaggtatatacacaaagaatgtggaaaagccatta

SEQ ID NO: 52057 - DNA, 751 bp, Homo Sapiens
ggcacttccctgtccagcactacaacttaattgctctatgcctcagtttccccataatacccttttccaacctacctcacaaggttatcagaaagatcaaattaaataatagatgtgaaaatgctttgaaaatgtttttaagtgctatgcatatttatagagttattatagttattcaaatccataagcaggttatttttatttttttactgtttgaaaagaaataagtagtgtcattcatatgagttcctgagtggatatgcgaatctttggtcttctcgacaggtgccctttctcttaccactagttgcttacaaaaatagcacccaaacacatggcacttggaagaaaaagacccactgaatctgagaaagtactttctggtggcaaatgaatttatcattttagtatagttttcgataaaggatatagcaacatcttttgataattgtgctttacaacttgaatgctgattcaaggcattatttggatgtgagtttaatcttttcagccttgtaaatgggaaaatatatattaaaattgattgtcaaatacagcatttctttggaaaccaccttaaaacattagtgctatggttatgagtgtatgtgccagtacttaccagtcaatgcattgtggatatgagctttcgttgactgcttctctgcagtcgttgatgctaataaatattggcctggttcttcatataataaattaatttttcaatttcaaaaaaaaaaaaaaaaaaagc

SEQ ID NO: 52058 - DNA, 756 bp, Homo Sapiens
aatgctgttcaacagcgcccttaaatggaaacatcttggagctcgttttattgaaattcataatcaggggtgtcctctagctcccacggtctccagagcagcaaggccggctatggagctgccgtcgtgtgaccacaggtgatgtctcagaagggctctgggtgggctgagcatctgggctgtgccctggctctgcttttcaccctggacaaagtcgctgtggacttcaatttcttcacctctaaaatgggggacttggaccaggtagatgctgagctcactaccaggttcaaagttcaatgacaaactcagtttactgaggttgagagaacatccctccagggagcctgggagctgctctcccagtctaagcatgtagatatcatcgtttgccttatgtgtgtgtgtgtcccttatttgataaaacagatgtttcgagttgttttttcttttaagcactcacttgtaatttagtttttaaacccaagtcctctaactttgcctttgataccaaacaattcaaaagtgggatctgagttggagaaagatatttcccaacctaagtgggtattatctgaaaccagatttttaatttaatagcctatattgtagtctgggatagggtgttccaaagggtgtcttctcaagtgaaaacgcaactctaggttccaagtaactcctttgctccgatcctgggtacttgaattccaaaacctgctttgaacaatcagctgtcgctatctggactcaacagac

SEQ ID NO: 52059 - DNA, 596 bp, Homo Sapiens
tcacccatacgtccaacatcgaaagaaaaccagtgttatgactttgttccatttgaagactaattgggagtccatctctctattggcactgggttcgattgcccctggctaatagagttcaattagttctatccctgggtttcctttcttagctatggggtggaagataggagggggagatctacaatttgaatatgtgttacttaataaggctaggctggccatcagttgcttatttcagatgtgtcactaaattttccttctagatggtccttgagcaaaacttaataattactgttttttatttccactgcctttataaaatcaaaattttctccttttgataaaaactgttgaatactattgatgtagagaatgtgtatatgtgtatatttgcattgattaaattattggaaaacttttcattgacaggtaatgtattttggttgtgcggatggtttgtaaaaagtatcctgtttttttaattctattcaaaattaaaaattttttttcctaaaataaagcaagaaaaataaatgtaagatatataagaaaccccagagtttccagggtgaaagttcacattagcagcttgt

SEQ ID NO: 52060 - DNA, 564 bp, Homo Sapiens
gatagctgttctagaggatcccgatggcattagacaacagcccagaccctggacctgaggaatcccaaaccttcaccatcatctgtggagggcctgacatagccatggtccttgcccaggaccctgcacctgccacagtggatgccaagccggagctcctggacactcggatccccagtgcataaggatcaagacagacaatgtcgagggacaaaagatagaagatggaggaggaaagacattatacgtgggcttggcccagccccaccgcccacgcctgggtagtagcagtgcctccctcaagggcctgggttctaccaccccactcctagggatctcttgaaccttaggggtgacctgggcccaagtctctcatcagcccccaatcccctgggtaccaggcttctgccacccccggctcagatctttgcaaatcagtacgacagcctcagagcagagcaagggttgtttgggagaatcatacctggttctaaggagtcccacgctttttgccaagcctggtactgagttcatgataccatggtggacacagctgagaaaatc

SEQ ID NO: 52061 - DNA, 615 bp, Homo Sapiens
  misc_feature (316)..(316): n is a, c, g, or t
atggagtgtcacacgtttatgcaggtgtgtggggctgcacgtggctcagtcccctcccagggggccccgcctcacctgcagcccgggggctgctctgaccacccggagggtgcacaggacgggcaccagtgggcatagggcacaggatgagcctccagctctgtcctgcatctgccccctgcgcctggcctccgagggctttcctgtctatggcggcctgtcttcttggcctggcactgcggacgctgctcctggtcctaatggctgtactcatctgctgtgtgtggtgccagaagtgtggcttcccgaggcccgngctccccactgggtcctggacctggcgcaggccgtatagactcaggtcctgatgagggcgttgtgggagctgtacctgacaggccttctgaggaagccaagacgccaggagaggctcaggcctgggagtcagtagtttcctaagagggagtggaggctcggggccactctgggtgcagcatggcaaacgtgggcggtatttcagcagctgggcttcatcaaagagaagacatggtgggcgggcgtggtcccgagccagcatgggaggccgctgccggccgaccacccgacacagactgc

SEQ ID NO: 52062 - DNA, 563 bp, Homo Sapiens
cctactcttaaatcttattgtatgaactggacaccagctcctcccacaattccttctaccttacatcctgcaagcccctttcccccacaggttcaactctggtacttccctttggaatacggattctctgagaggttttaaatttggacatagcactaatggttccagcttcatacccatcatgtgtcctacattaaaacctggcccgagaccttgaagagtctgtaatcttaatttcctctttagtattcctataacccactctccatctccccacctaccaggtctgccagtgaggagcaggccttgtcacaggatgggtctggggagaagcccatgcacacagctcctccacaggccccggccccgccagcccagtcctggacagtgggtggggacatactcaacgccaggttcattcgaaacctgcaggaacgtcgcagcaccaggccttggtgaccgcagccccgtcaaacatcttcaaagtattatttctccctcactacaggaaagagccaaagcccaaccctcataatagatggatacattcattcattcattca

SEQ ID NO: 52063 - DNA, 894 bp, Homo Sapiens
gtacttggggtgttcaacagccagaagggagggaaactgaaaaagaatcaggagtccagccatcccctccccacctcctgcccccacttccaccctggctgctggccctttgcccttgaatatgggtgatataggtgtggctattcagttccagtcacagtgctgcctctatgtcttttgcaagctggggtcttccttactcagaaggcctggaggccctgccagatgctgccttccggactggctgcccgctgcagtgttttcacgggagccaagccagccccgggcctgtagcctcccatgtgacagagtttcagacaccacagtcctcagctggaccacagtaaacacttgccttccccaacccatgattcttgcttggaaacatgaacctgatgttccacgtgcgttcagccaatcaaacctcaagaatgtgattgagcagtgaggctgcgttttgggcaagacactgagctctgaaataagacttttcttggaatctcaagccctcaacttacagtgggaccctaagaaatgcacttcagtttccttttatgtaaaatggtggtaaaattaattgtgttcattaaattgcacacaactatacatgtttacctatacactaagtggatctcaacttggggcaatttgccccccaggggacattcagcagtgtctgcggacattttttgttgctactggaggggagtgctactggcatctagggagtggaggtaaaaatgctgctaaactacagtccacaggaacgtcctccacaccaaagaattgtccacccccaaatatccataaatgcccgaggttgaggaaacccctgcccacataccccttagatgcggggttaacattgttttattttaccaaaggggaaatctt

SEQ ID NO: 52064 - DNA, 906 bp, Homo Sapiens
  misc_feature (547)..(547): n is a, c, g, or t
ctaggtgtctactacaatctggtgtgcaagatctttcctcagtatgtgctgatgtttgggttgcttgtggaatcacagacactcctagaggagaatgctgttcaaggaacagaacgtactcttggattaaatatagcaccttttattaaccagtttcaggtacctatacgtgtatttttggacctatcctcattgccctgtatacctttaagcaagccagtggaactcttaagactagatttaatgactccgtatttgaacacctctaacagagaagtaaaggtatacgtttgtaaatctggaagactgactgctattccattttggtatcatatgtaccttgatgaagagattaggttggatacttcaagtgaagcctcccactggaaacaagctgcagttgttttagataatcccatccaggttgaaatgggagaggaacttgtactcagcattcagcatcacaaaagcaatgtcaacatcacagtaaagcaatgaagagcagttttccaatgaaaactgtgtaatagagcatcaacaagtacanaattcttgtcttaataagtgggggtatataaaaattccttgaattgtcaaatattttttaaattgacattataaagcatattttaaagattcttaaaaaaaaaaaatggcctcttgggctaagcggtggagctttgcggcgtttccttaaggagggtaatcatgatctcgcttattgctcgttgcgttcggcgtcggttggggaagcggttaacttattcaagcgggaattcggttatcccaatcaggggtacgcaggaaaacttgtgacaaaggccgcaaagccggaaccgaaaggccggtggtgggttttctatggtccgcccctcaaattacaaaatcacttcaagaagggctacc

SEQ ID NO: 52065 - DNA, 895 bp, Homo Sapiens
tccagtctagtttggatctgtaccagcacttcattcggctacaaaagttcttattattgatgctgttcaacctggcaacatcctagacagtttcactgtttgcaactctcatgttctgtgcattgcaagtgtgccaggtgcacgagaaacagactaccctgcaggagaagatctttcagaatctggtcaggtagacaaagcatctttatgtggaagtatgacaagcaacagctcagcagagacagacagcctgttaggaggcatcacagtggttggttgttctgcagaaggtgtgacgggagctgccacttcccctagtacaaatggtgcttctccagtgatggataaaccaccagaaatggaagcagaaaatagtgaggttgatgaaaatgttccaacagcagaagaagcaactgaagctacagaagggaatgcggggtcagctgaagacacagtggacatctcccaaactggcgtctacacagagcatgtctttacagatcctttgggagttcagatcccagaagacctctccccagtgtatcagtcgagcaatgactcagatgcatataaagatcaaatatcagtactgccaaatgaacaagacttggtgagagaagaagcccagaaaatgagtagtcttttaccaactatgtggcttggagctcaaaatggctgtttgtatgtccattcatctgtagcccagtgggaggaaatgtctccattccattaaacttaaagatttcgattctcagtattgtacacgtgaaagggaatcgtgttagtagcccctggctgacggcaccccttgcaatctttcacaaaaggagtggaatgggcaatggggatttgtccaaactatccccctcttaagaccttggacggcctcatcatt

SEQ ID NO: 52066 - DNA, 958 bp, Homo Sapiens
ttttcgaattcacaatttttctaagtgcatagagtagttttttacattgtcacgaattccttaatacctttatttaaaatggaaaaaatatggacaatattttagaaatatgtgctacacatctaattttatctgtagtttaagtgatctaaattgagatgcctttgatatgaagagatttaccaacattatatgcactcgtgccttcaatgtggaatcaaactggttaacctcagcacagtcctctcgtttctgtgtttctgctgcactaattgccagggggtgggggagaaggcgaatgaattaattcatagtaggaggcggcgataggtgcagcaaagggcagccacagtgttgattccacattataatgttgttgcctcttcttggcaaaagacaccacatggtgggaagatctcagcttccagggtaaaagttaatttataacttaaaagtgctattaagtttttattaccaaatatatcttttatggtttatattgtagtggtatgtatgaaacatttaaaattttactgtggaaattgtgtatatatatatatatagtcgaaataggtgttcacaggtcacatgtgaacggagaactgcatgactgtacatgaaatgcaataaaccaactggaaaaagtgcatgtgcttcatcctctcaagccaactgcagctggaaagtgctgcttatcctccacccccagaaaatgcatgtatcaatatgagaataaagaacgcacactttcaattttatttgaggctttccacactatttaaaaggaaaatgtaagaaatttgacattcctggagttattataaccattaggaaaatgagccataacattcacctcctgatttttacccatttaagggggagaattaagtaaaacagaactggcttacaggggtttccccatataattggggacctggtggcactcccacaaacaaac

SEQ ID NO: 52067 - DNA, 703 bp, Homo Sapiens
  misc_feature (520)..(520): n is a, c, g, or t
  misc_feature (653)..(653): n is a, c, g, or t
  misc_feature (701)..(702): n is a, c, g, or t
gaatgctagaaaacataaaatatactcttataaattgtatgtgtgttgaaaccaaagtgtgaagaaattgtcaggtatttggagggggaaaataatttgtaaaataacctttttaagaatttggattttgtacttatttaaggtgctaatatgtgttaaaatatcccctcttgaatcagctccaggcttaaaagggcagagtggtttggattcttgtccagggtctggaaagagctcatcttgccgagagggaaataaatgtgagctttgaggcggtctaactacccagcttttagtatttatgttccccaaaatgtaaaaactgtaagttattcttgaaaatgtagtccagacatttctttgatcctggattttactgcagtttcatcatgggtttgttgaatgtgcagtccatttattgccctgtcttgcttaaatattcttgttgagaacagctggaggctttgactgggttcctagttctgttttctgggaaggcaacgtggattctgttttgtanacattaatgagctttaaatgggaattggggatgatgtatgttcgttgggcatgctgagaagcggcctcctgtggttctgggcccaaggtgtgacatacatttcccactaattgcttctctcaagaagcaaganattggctgttctcttgaagaaaaccttaaataaaacctccccattttnnc

SEQ ID NO: 52068 - DNA, 582 bp, Homo Sapiens
  misc_feature (577)..(577): n is a, c, g, or t
attttcgggagcgggattgtttcgcgcaggaagcaggctccattttagcgccgcccgccgtcgccatctgtttcccttccctcccccatacctagcccgagtctgagccctaacgagaaggctgggcctaggccgctggatgctggagtgaaaggaagggagaaagggaaaaagcgggaagagtcgagaaggctgagtgttaagaggccaagtgcgacgcgcgtatccgggcagacggactgacggacgggcccgtgcttctgccgcggctgcggcgcccgcgcgagtcgcgtctaagcggcggcggcggtggcagcggcggaaaccgaaggggagccatggcggctgacagtcgggaggagaaagatggagaacttaatgttctggatgatattttaactgaagtaccagaacaagatgatgaactgtataatccagagagtgaacaagataaaaatgagaaaaagggatcaaaaagaaaaagtgatcgaatggaatctactgataccaaacgacaaaagccttctgtccattcaagacaactggtttctaagccactgagctcatctgttagcantaaca

SEQ ID NO: 52069 - DNA, 1083 bp, Homo Sapiens
cttttgatgtagccttttaaaaaaggagtcttaaaaatgatttttttaaaggcaagagaaatcttgtagtgctaactgccttgagctgccaattacctatttctgagaattgggtgactcttatgggtaatgatggcatttacaacattgggcatttcccctttttcagctcagttaccatagaatacttccaagctttactacttcctctgtaagtcatttcagttatgccaggatattggatgatttgttatgtagaattaggtaacaaagccaattatgctatccttattattggaaggattaatcttatgacttaacataagcttgggttatatttgggtgtagtcttgggctaagtacccattaaggctagtagcaaacacttggaaggtggctaactgggactggggaatacgtgtctcaacttgagaaaccaaatagtgcgaagggactcaggttggccagacctgtgacccttggcctcatttgtaatctgtgtttcgctgaggtgatcagacacttagtaccctagaattggactgaattattgaatcttcttctgtaacatcacaatcttcctgggttttcagaataaacgtttagtgcttgtgatatacatattatactctataattaaccattgtttgactaattactatcagaagtgtttgtccagcctgtacttttccatttgtaagccatggacttagtccgtaaacatttgttaccattgagtggtccgtgtccttgaaagcaaggcccatagtatttatcgccctttttatacagaattgtgcaggacagatgtggcacaacgacgggagggccaactagtttccataagtgtttcacgcaagcaaaatgtgttcaccgttgggaagtatcaatatatcttgccccctattcttttccccaggggatatgggcgccgtcgtaaggcattttctcaagttgtgtagtgggagaaattaccaatattggagccgtaccctttaaaaatagagaggcggtaatcacagatggctgttacaaaacggtggcgacaagagaagtgtaaccaccacattgtagacaccagct

SEQ ID NO: 52070 - DNA, 923 bp, Homo Sapiens
  misc_feature (789)..(789): n is a, c, g, or t
  misc_feature (820)..(820): n is a, c, g, or t
  misc_feature (875)..(875): n is a, c, g, or t
  misc_feature (882)..(887): n is a, c, g, or t
ggctcctcggagcggccgccgggcagcggtccagacccagtacttattatgaactgttgggggtgcatcctggtgccagcactgaggaagttaaacgagctttcttctccaagtccaaagagctgcacccagaccgggaccctgggaacccaagcctgcacagccgctttgtggagctgagcgaggcataccgtgtgctcagccgtgagcagagccgccgcagctatgatgaccagctccgctcaggtagtcccccaaagtctccacgaaccacagtccatgacaagtctgcccaccaaacacacagctcctggacaccccccaacgcacagtactggtcccagtttcacagcgtgaggccacaggggccccagttgaggcagcagcaacacaaacaaaacaaacaagtgctggggtactgcctcctcctcatgctggcgggcatgggcctgcactacattgccttcaggaaggtgaagcagatgcaccttaacttcatggatgaaaaggatcggatcatcacagccttctacaacgaagcccgggcacgggccaggtctgtccctgctctattctgctccctgctccctgtccaggaaccacacttcgggatccctatcccaaccacccaggtgccctctcctcagggccaacagaggcatccttcagcaggagcgacaacggctagggcagcggcagccgccaccatccgagccaacccaggccccgagatcgtgccccggggcgccggcccccgaggggctcacctggatggggcctgcagtgcgntccccgctttgcttcctttccctgggacggncccgctcccccaaaacgcgcgcaaataaagggatttcgcaggaaaaaaaaaaaanaaaaaannnnnnaacctcgaagggccttcttatgttccgggtggcgag

SEQ ID NO: 52071 - DNA, 703 bp, Homo Sapiens
gccgtcgacccacgcgtccggcaaatgccagtcttgctgccatggcagctgctgcaggactaaacccaagcctgatggcaccctcacagtttgcggctggaggtgccttactcagtctgaatccagggaccctgagcggtgctctcagcccagctctaatgagcaacagtacactggcaactattcaagctcttgcttctggtggctctcttccaataacatcacttgatgcaactgggaacctggtatttgccaatgcgggaggagcccccaacatcgtgactgcccctctgttcctgaaccctcagaacctctctctgctcaccagcaaccctgttagcttggtctctgccgccgcagcatctgcagggaactctgcacctgtagccagccttcacgccacctccacctctgctgagtccatccagaactctctcttcacagtggcctctgccagcggggctgcgtccaccaccaccaccgcctccaaggcacagtgagctgggcagagctgggctgccagaagcctttttcactctgcagtgtgattggactgccagccaggttaataaactgaaaaatgtgattggcttcctctcgccgtgttgtgagggcaaaggagagaagggagaaaaaaaaaaaaaaaaccacacacacccatacacacataccagaaaaagaaagaaaggatggagacggaaca

SEQ ID NO: 52072 - DNA, 477 bp, Homo Sapiens
gaaacccacacataaacaatgcactaaagatcactgaactgtttaaacatttccacttgccagtttaatttcttgaacactgttgcttgtttggaatgtttcttgtcactgattttaaggttgcatctggaaaagactaaaggcttcagtcccctcccaccaccagaaatgaacaaaaagcattttacctaaaaatacaccagcaaaatgtactcagcttcaatcacaaatacgactgcttaaaactgcagaaatttcctcaacactcagcctttatcactcagctggattttttccttcaacaatcactactccaagcattggggaacacaacttttaatcatactccagtcgtttcacaatgcattctaatagcagcgggatcagaacagtactgcatttacttgccaacagaacagacagacctgaagtcaagacaactgcattctctgtgaagtctgtaaaaaaaaaaaaagg

SEQ ID NO: 52073 - DNA, 488 bp, Homo Sapiens
tatgataaagaagtgattgtttctcaaaatcgcattttaaagacgttttatggtacttgttggaattgggacttaggagttttgattttgataagaaactgggataattttctgaactttttttcctctgtatcacatttatttactatttttaaaaactttgacatttaacacttgggacaacatttattataaatgataagaaaaatcttagaggtttgtctacccacagtgtcatggaatcttctctgaaaactaatccataaagttccctggagaaattggtcagaatgatctgtcagaaccatttgaaaacttgctcaagagcagttgcttatatatagtaggattttactttttcctgcttatgtactactatatgcttaaaaaacctggaggaatacttaccaaagaggagtaaccatctctgagggtgggattctgggggaatttttgtttttttctgttttctataatgtgaaactttt

SEQ ID NO: 52074 - DNA, 521 bp, Homo Sapiens
acaattcacaaatctagaagcctcctgagccagagtaggttcagagagtcttgaacacagccacgtggtggaagaagatttatggacaggaaaaggaaaatgatgtactgaaaatgaaagtgaggtacagaaacagccagactggttatagctcagcattggccttatttgaacgagatttgaacagttggccacctttgattggccgaaactcagtgattggcacaagagtaggttgcagtctgtttacacatccttttaggttatagttcaccatgtacagagaaattttaggccaaacttaaaatatgtaaggaggcagctttaggctaaacttgatttaacagcaccaataccccctacctttagtgagcacatctgcacattccaattttaatgacagctccttagaatttcttatcaacgaagacactaacaaagaatggcgcattcctccttctcctttctgaggatgccctaccctgtaacaaagtcgtttctaataaatttgcttctttcac

SEQ ID NO: 52075 - DNA, 707 bp, Homo Sapiens
acttaggctaggtcgaggccgggttgaatcggccgaggcttttatcttcctcccctgccagttcttaccgaaataaacatgcagggttaaggcccttcccagggagccactcagtgtggctgccgggtggcctctgctgccgtcagagtctgcctttgtgtctttatctgctttgccttcctagtccccgtcctgcttcgtggcccggcatctggcagggctgggagacgcctctccagcttcctctggagcatcccctctggagcctcctctctgccctgttgtgccgggcgttctccaggcctcgtggctgtggtcctggacaggtctccccacactggtgggttcctttgtttcgggggttggatcctctagctccctggccccgtcttccttctcatttgttttctctggtttttgtccagcgtatcttcctgtagcttcttgagaaaagaggtgctcaggagataaacttgagcttgggttggtttgtactgtgagagtgggatcattttcctgtaagatttttgacggcattgcttatcttctagagctaaagttgttaccatgaagtttaacctttctgactcggtttctttgggaccagcctgagcaacttagtgaaaccctgtctctacaaaaaaaaaaaaaaaaaaaaaaaaaaaaaaaaaaaaaaacccgggggcctttttggggggggggaaaaa

SEQ ID NO: 52076 - DNA, 622 bp, Homo Sapiens
ggaagcaggtgccctccccagcgtcacttctgctaaggagggacccgtgttgccccaccaggcaagaatagtcagagtgacccatgtatctgggaagactctagtctggactgtggcccagcttggggaccttgtgtgctcagatcatcttcaggaaggaaaaggcatcctggagacaggagtccattcactcctctgctctctacccactcatttgcttgccaaacttagctttgccagtgatagtcaatattaaagtgtacttttttcccctttaatccaatatagttgataattaaagtgtattttgaatgacacagatattgtgatttactgcaaggatcctaacacacacttaaaatcaagagccaaggagtagtgagttgtagataaaaaaagaatgtcagctttggagacagtctgggtttaaatcccagttctgtcaatttgagctgtttactgtctctgagcctacatcttcttgtctgtaaaatggagataaaatgggtttaatgaggtctaccttgcagagccattgtgagcattggaaatgatgaatgaatcataccagaacgtctagtataattacagtcatgcattgcttaacgatggggatacattc

SEQ ID NO: 52077 - DNA, 579 bp, Homo Sapiens
attcggcacgagggggatcatgtcctgtgcagcaacgtggatggagctggaagccattatcctaaatgaactcactcagaaacagaaaaccaaataccacatgttctcacttataagtagaagctaaacattgagtacacatggatacaaagaagggaaccgcagacactggggcctacctgaggtcggagcatggaaggagggtgaggatcaaaaaactacctatctggtactatgctttttatctggatgatgaaataatctgtacaacaaaccctggtgacatgcaatttacctatatagcaagcctacacatgtgcccctgaacctaaaaaaaaagttaaaagaaaaacgtttggattattttccctctttcgaacaaagacattggtttgcccaaggactacaaataaaccaacgggaaaaaagaaaggttccagttttgtctgaaaattctgattaagcctctgggccctacagcctggagaacctggagaatcctacacccacagaacccggctttgtccccaaagaataaaaacacctctctaaaaaaaaaaaaaaaaaaaaaaaacgatt

SEQ ID NO: 52078 - DNA, 395 bp, Homo Sapiens
gcagatgcaccttaacttcatggatgaaaaggatcggatcatcacagccttctacaacgaagcccgggcacgggccaggtctgtccctgctctattctgctccctgctccctgtccaggaaccacacttcgggatccctatcccaaccacccaggtgccctctcctccagggccaacagaggcatccttcagcaggagcgacaacggctagggcagcggcagccgccaccatccgagccaacccaaggccccgagatcgtgccccggggcgccggcccctgaggggctcacctggatggggcctgcagtgcgttcccgctttgcttccttccctggacggcccgctccccgaaacgcgcgcaataaagtgattcgcagaaaaaaaaaaaaaaaaa

SEQ ID NO: 52079 - DNA, 665 bp, Homo Sapiens
caggaagactttccttcacccaccatccccctaacctcggcagggcttctgtcctgtggagttccctggacaccttggtctggctcttgtgccaagggctgaaggaggtaccctcttggcagatgggggcatcacttgcttcctttgggaagctctaaggttgctgcagtcaccttcctcatcttgcaggtgctgaaccaacatcatcagtttctattctaatcaggccccttcccaatctccatttctctgccaagcccatttacccccacctcatgcatcccaaggctctactgggtccctggacctaaccctgctttcatcctggtggccttaactacagtggaggtggaacttcccaggaggggaagggacagaccagccccagccgctgggccaacttccaatcattccagctagaagagcttccccctgacaccctgtgactgagcctgtgtcctgtctgcctgcccagccatgctccatcggctgtgagggcagtgcccggagaggccagagggttggagctgcagggacccgtttggacccacagcctctgttctagagatgcttgtataggctgttaattgtgatgaataaacgttcaaccctcggcctgcagccagagtagccaggccgcgcaccccaaaaaaaaaaaaaaaaac

SEQ ID NO: 52080 - DNA, 384 bp, Homo Sapiens
tgttgcccgggctggtctggaatttctgacctctggcagtccacctgtttccgcctcccagatgctgggattagaggcgtgagtcactgcacccagcccgcagcctcttttataagggcattaatccccttcatgagggatattctctcatgacttaatcacctgccaaagaccccacctcttaatactacatcagtgatgggttcaatgtatcaattgggtgggagggggcacattcagaccatagcatctagtcattctggttttattaagatttattagacctgaggcatgaaaaatagcatactggatgggacttcagcatcgatgagttgccttagtaatactgttaataaaaagcactaaatatgcaaaaaaaaaaaa

SEQ ID NO: 52081 - DNA, 620 bp, Homo Sapiens
  misc_feature (423)..(423): n is a, c, g, or t
tgactggctttgttttaaaagaggatggcagtccttgttcgtgtcagtgtgccactgggtttttgctgttccgtgtaattcatatcaactttgtgttgccatttgcaaggtaaaaggcaaagctgtagtgtattcacctatgtagacagattgctagatatctttttgatctggggcgagttcaatattgattccagacttatttggatttttttagtattattttcccctccctttctaatttaaatagacaaattaagcaaaagtgtgtgttcacaaccaaatgttgatgcccttatctactgataatatcctctcaatgttcactgaggcatagaaattatttcagagtagaaattgcagcatgaggataaactcacctctttgttctgaaaatagaactttatcactatgctttccggnggttttcccttttacaatcgaaatcttgtgcctcccaagtgcattggaaaatgacaaaagcctgtctctccaaattcctatttaacagtttgatttttttttttaatcaccatctttcaaatcttagctcaactctcaccaagtgaaaattggctacttggggagaaagttaactttctatggtgggatggggaagg

SEQ ID NO: 52082 - DNA, 697 bp, Homo Sapiens
gggccaggtgggtggatcacaaggtcaggagttcgagaccagcctggccaatatggtgaaaccccgtctcttctaaaaaaatacaaaaattagccgggtatggtggcgcatgcctgtagtcccagctactggggaggctgaggcaagagaattgcttgaactcgggaggcggaggtcgcagtgagccgagatcgtgccactgcactccagcctgggtgacagagtgagactttgtctcaaagaaaaaaaaacaataataggtaaagtatttaaggaattctcagatgccttatggacctcttcaagaatgtggttagccaattgattcaacttttataggtttatatgctctcatgtaaacctatttgtttccgagatcagacgagatcgggcgcgttcagggtggtatggccgtagacaacctatttgttaaaaacccttggaaacacatcttttagtagaggttcttatttacttataaagattaataatcaaattactacaattaatatccatttagccttttcagtagtctaaatatttgggtaactccctagccatctataacactagttcaaaacaaggctaattcataacctgtcttaaaaatgtttgaagtggtatcaagagcattgtttatgcatgttgtgatactatttgtggaactgtttaatgagctatttcaaactgtagaaga

SEQ ID NO: 52083 - DNA, 607 bp, Homo Sapiens
  misc_feature (431)..(431): n is a, c, g, or t
  misc_feature (546)..(546): n is a, c, g, or t
gcacgaggggcgcagtgactcgcgcctgtaatcccagcactttgggaggctgagtagggcggatcacctgaggtcaggagtttgagaccaacctggccaatgtggcgaaacgctgtctctactaaaactacaaaaattagctgggcgtggtggcgcgtgcctgtaatcccagctactcggcaggctgaggcaggagaatcgcttgaactggggaggtggaggttgcagtgagccgagatcacaccactgcattccagcctgggtgacagagggagactccgtctctaaaaaacaaccccccccccccaaaaaaaaaaatgcatagcaagctgtaatgctctttgtgttttagaatagtagaggtctggaaagttgtttgcttttccccagttttttttttgctgtgttacctctgaagggaattgaggtanaggggagagttagaaggaatattcggcttttctattttatatcctcctaggtgaaatttttacaacaaacatgtactggtgtattttgaaatgtttttaaatttttgtatttcanaataataaaatataaattcaaactgcaaaaaaaaaaaaaaaaaaaaaacacttaatgcgcg

SEQ ID NO: 52084 - DNA, 604 bp, Homo Sapiens
cacgaggcaccaaaggcatccatgaatacgactttgaaataaaaatgttcctttcaaaatggttgatgtaggtggtcagagatcagaaaggaaacgttggtttgaatgtttcgacagtgtgacatcaatacttttccttgtttcctcaagtgaatttgaccaggtgcttatggaagatcgactgaccaatcgccttacagagtctctgaacatttttgaaacaatcgtcaataaccgggttttcagcaatgtctccataattctgttcttaaacaagacagacttgcttgaggagaaggtgcaaattgtgagcatcaaagactatttcctagaatttgaaggggatccccactgcttaagagacgtccaaaaattcctggtggaatgtttccggaacaaacgccgggaccagcaacagaagcccttataccaccacttcaccactgctatcaacacggagaacatccgccttgttttccgtgacgtgaaggatactattctgcatgacaacctcaagcagcttatgctacagtgatgtacaaaagacttgctgttttaagatcgttttgtgtgtttgaggttttctgtgtggtttgttttttaa

SEQ ID NO: 52085 - DNA, 619 bp, Homo Sapiens
gaaacatcaagctaaatacatgtcctcagaaagataaaggtttacattttcacccccatcaaatctgaaagctctctgcctgtgtttttctaagggatagggacatcattactcagtccacaacctggactcatgtagggtcccctgtcagtaaaggagtcagtcaagcccaccaggtataccaaggactcttaccctcagcccctactccttggaaagctgccccttggcctaatattggtgtttagcttgagcctgactccttctcaacactaagagctgatgaagtcctgaagcagaaagagctctgacctgagagtcaaacatccttattctgatctcagctcagcccctgatttgttgtgtgaccctggatatgtcacttcctgtctttttgactttttaaaatgaagggtagactagaggagagcttctaaaactttaatgtggtcaacgaaatggaataggaaattccacaagtctgtccttccacaaaagcagcaaataaggtggcaaaaactcaaatttatgggaactctggaaacgaattgaaagtttacagcaatcaggtgaatacctaagaataaaagctggatttagtaagaaaaaaaaacacaaa

SEQ ID NO: 52086 - DNA, 579 bp, Homo Sapiens
cacaatggcaggatcagccggggttaatcggcaccgaggccacgcagcctgcgtgcactttcttaccgccacgccagacccatccaggtctgtgttcaaacctttcatcttcggggtgggggtggcccaggccccccaggtgctgtcccccacttttggagcacaagaccctgttcggaccctgccccgattccagactcaggtagatcgtcggcataccctctaccgtggacaccaggcagccctggggctgatggagagagatcaggatcgggggcagcagctccagcagaaacagcaggatctggagcaggaaggcctcgaggccacacaggggctgctggccggcgagtgggccccacccctctgggagctgggcagcctcttccaggccttcgtgaagagggagagccaggcttatgcgtaagcttcatagcttctgctggcctggggtggacccaggacccctggggcctgggtgccctgagtggtggtaaagtggagcaatcccttcacgctccttggccatgttctgagcggccagcttggctttgccttaataaatgtgctttattttca

SEQ ID NO: 52087 - DNA, 911 bp, Homo Sapiens
  misc_feature (10)..(10): n is a, c, g, or t
  misc_feature (750)..(750): n is a, c, g, or t
  misc_feature (792)..(792): n is a, c, g, or t
  misc_feature (824)..(824): n is a, c, g, or t
  misc_feature (836)..(836): n is a, c, g, or t
  misc_feature (890)..(890): n is a, c, g, or t
  misc_feature (901)..(901): n is a, c, g, or t
  misc_feature (907)..(907): n is a, c, g, or t
tttgttgccnttgttagaccactcctactatgctgcgagaagacgacagaagggaaagaaggagatagagggggaaggaggaaacagcgcggcttctgctgaagccagtacaagcctggttatctggcttgacccgcccacacggaggcctccccagcgttttctttttcccgagaagagctccagctcgcaggtccttagaacacggcagagcaggagcatctcgggaaccaacggccagctccttggcgctgtccccagccccacaggcctgctgcggccatccgcaaacgggcatttccttgaacttttgagagtgcctttgaccagctgttcgcagctgggaaactccaacttttgaagtcagagcttggagcggcccccgcaagggcgtggctcaaaccctccccagagctgggagccattgcttatgcaagcccgtttcttttgatgtaaagatggaagtcgttactatattttaataatgcaaatacatcttttaaaataagttaacatttcttaccaccagatggatcaggctttgaatttaatcatgtaaatgtttgtaattttatgtcattttgttaaaatgggacgctttcaattggtttccaagaaagatgatacctctgcattttctggtggaaaaggtgtaatacccttaatgagatcaaagtgttaggggaaaaaaattccaaaagtagttacaagctatatcaatgtcaaagtaaatgcacttcatcaaagctnagaagtcacaggaattgttctcaggttttaaaaaaaattttnctgaattcaggaagtgtcttctgatacactanccaataaaccgngtgtgtgtactgcactgtaggtgaacttaaaaaaaaaaaaaaaaaacttttganccgccacctcnatgatnatat

SEQ ID NO: 52088 - DNA, 778 bp, Homo Sapiens
cgagatgccttctcctcaggagcttgaggcctcagcacccaggatggtgcaaacccatagggcagtgcgggctctctgtgatcacactgctgcaagacctgaccagttgagcttccggcgtggggaagtgctgcgtgtcatcaccacagtggatgaggactggctccgctgtgggcgggatggcatggagggtctggtgcctgtggggtatacctcccttgttctgtagccctgggaccctttcctgcgtatgtgtctccttcctgtcacctgggaatggaatggccagtgaacaccatcccagaagcattttccctctgcaaaatgacgtttcttcccacgtctgtttctgctaatatttaaaataaactttccttcttccctcctatacccacctgtaaggtgaaatctgctcttcttccaaatatataaaaaaggaattgccctccaggtaatccctttcctttttcccgtctatataagggaatgtcttccttcctatctatctgcaaaatggaaatctagacctccttcttcatccataagtggactgtgccagtacaatacatgcctcagcccccaagcctagaaggacctctagtctccttcctgtgtggaatcttccccactccatccctcccaagttgcctgtattgataatgtactcactcatgctgtactaggtgctgaagcctggacacccttggtgggtgggcctgtggtgatggtttgcatccttcctcctttgtcccaataaagtatgggagttgaaaaaaaa

SEQ ID NO: 52089 - DNA, 603 bp, Homo Sapiens
aaaaaatagccatgacaatttattaatataagtgaattaaccatttctcaggtgggaaattctctttttttaaaaatgtgtgtttatcgtctggtgtggtggctcagcctccgaaagtgctgggagtacaggtgttagccactgcgcctggcctcattgtactccttaacacaagaagacttcaacaatgataagtagttgtttataaggaagcaggatcattaccaaaataaatcctgctaaaacaacaggaatcatgttttaaagcctagtttgctaatttttgctagtaggataagagtgatcgtaatatctcgaacattacatagacacttaaaacctttagttgtatttcatcaaaaatctgttcataccccacgttggtttcaaaacatactatgctttttcttcgtgttatttcctatattcatttttgtgtgtatgtgtatgtcacaaatattgatatgcctggttgtttatttttgttttctattatgcctttttcaaaatataaaaataaacttgtaatttctaactaaaaaaaaaaaaaaaatcaaggcccctgcccagctggctcgtgctgtgcttcattcacctctccat

SEQ ID NO: 52090 - DNA, 779 bp, Homo Sapiens
cgcgtccgaagaaaccagaaaagggagaggaaccaaccacagagaaaccaaaagaaagaggagaggagattgatactggaggtggcaagcaggaatcctgtgcccccggtgcagtcgtaaaagccaggcccatggaaggctcgctggaggagccccaggagacgtcacacagcggcagtgataaagagcacagggatgtggagagatctcaagaacaagaatctgaagcacaaagataccatgtggatgacggcaggaggcacagagctcaccacgagcctgaacggctttccagaaggagtgaggatgagcagagatgggggaaaggacctggccaagacagagggaagaaggggagccaggacagcggggctccgggggaggccatggagagactgggaagagcgcagaggtgtgacgacagtccagcacccagaaaagagcgactggcaaacaaggaccggccagccttgcagctgtatgatccaggagctcgcttccgagcgcgagagtgtggcggaaacaggaggatctgcaaggcagaaggttcggggactggtcctgagaagagggaagaggcagagtgagtcactgcacgcacctggcctccatggacgagcaagggcatcccagaaacgtgtaaatgaccccgagtgtgactgggaaggagaacttattccttaccaggaaactggaagctaaaatacagagggtgacgtagaaacacgcagaaaccattctaaagaaagtagtgatcttgtattaaattgagcagaatt

SEQ ID NO: 52091 - DNA, 461 bp, Homo Sapiens
cccatgcaagagaccagaacaaaacaatatacaaaagagagagaaaatcccacacctcttggtaactggaaaggctgaggccatgggtgagagcacctcccatttccctgggaaaggagaataagtaaaacttgaattccttcaattagagactcatctaagaatcctttctatcttcccactctgttttgaagtaggacagggggcccagcatcacagacgacaaggttcttaccttgtagttctggtctcatttgtttctgtatttatcaagcctggtacataaacacagtaggtaggtggatggatgaatttgctgtccggtcaagacttcagctagcacattcctaattgacctgcctttacatatatggtttctaaaacactttcacactgggatgatgacagagttctggagatggatggtggtgatggttgcacacactattgggaatatactt

SEQ ID NO: 52092 - DNA, 605 bp, Homo Sapiens
ccagttggtactgggaacaaacgtcctggtgatccaaaacatagtagccagacaagcaacttagcacataaaacctatagcttgtctagttctttttcctcttccagttctactcgtaaaaggggaccctctgaagagactggaggggctgtgtttgatcatccagccaagattgccaagagtactaaatcctcttccctaaatttctccttcccttcacttcctacaatgggtcagatgcctgggcatagctcagacacaagtggcctttccttttcacagcccagctgtaaaactcgtgtccctcattcgaaactggataaagggcccactggggccaatggtcacaacacgacccagacaatagactatcaagacactgtgaatatgcttcactccctgctcagtgcccagggtgttcagcccactcagcccactgcatttgaatttgttcgtccttatagtgactatctgaatcctcggtctggtggaatctcctcgagatctggcaatacagacaaaccccggccaccacctctgccatcagaacctcctccaccacttccaccccttcctaagtaaaaaaaaaaaaaaaaaaggacgcg

SEQ ID NO: 52093 - DNA, 626 bp, Homo Sapiens
ttgggtcagctcctgaatgatcctttcctctcagagaaggagtgtgtcaatggaggtggaaccttccccgacgtccccggcgcctctcatccaggctgagcacagctactccctgtgcgaggagcctcgggcccagtcgcccttcacccacattaccagtgacagcttcaatgacgatgaggtggaaagtgagaaatggtacctgtctacagacttcccttcaacatccatcaagacagagccagttacagacgaaccacccccaggactcgttccgtctgtcactctgaccatcacagccatctccaccccgttggaaaaggaggaacctcctctggaaatgaacactggggttgattcctcgtgccagaccattattcctaaaattaagctggagcctcatgaagtggatcagtttctaaacttctctcctaaagaaggtctgtctgccctccctgtgtccctttgggttatggatatggtctctgggtctacagagagggaatatggcgagagagctgggatgagtttgtaccacagatgttgtagctggctttatgaaatagctctgttcttaaacaaataaaacattttgcttccaaataactacacaaaaaacaacaagc

SEQ ID NO: 52094 - DNA, 773 bp, Homo Sapiens
ggtgcgtgacccaatccccttcctcctggctggacgctgtggcttaagagtaacagcagccaccgcccagttccagtggccccacgaagcccccagtggctggctgtccagctgggcaaacagtggcacccctcccagctcttctgagtggggagtcttccaggcctcctcagaggtcttccctttgcctccccaggacagggtgagtcagagctcagcatttaatctcctctccaaagtagagagcaagtcgcccacagtgggcgtgtctgtaaatattgtgacagtatttttttactgtgctgttttttttgaaaggggatgggtaaaaagtagggtgttcttgttttttgcttgggagggtgggggtgggggagggtcttattttatcttatcttttctgtggatcagaaaaaacagaagccaaactcggggtcatctttgtttttaaagctgaagtgggactgtctggcactctgtgtatttatgcgttccagcatctggaacctcccatccctgccctcctcctgtgtagctgccacctccccgctgggcccagcatggctcacctgtcccgtgggcttgtgtttcttgctgtttttctcttttgcaaagacatagctaggaaagcgaatgataagggaaacagttctcagggaattgacagtgttgttgctatggtgacgtccttttgctgtgaataaaggtgctctttgcagcaaaaaaaaataaaacacacaaaccacaaaaggggggggggcaaaaaaaccccg

SEQ ID NO: 52095 - DNA, 631 bp, Homo Sapiens
cgcgtccggcttcatcttccgcgtggccagggtcaaggcacgcaaggtgcactgtggcacagtcgtcatcgtggaggaggatgctcagaggaccgggaggaagaactccagcacctccacctcctcttcaggcagcaggaggaatgcctttcagggtgtggtctactcggccaaccagtgcaaagccctcatcaccatcctggtggtcctcggtgccttcatggtcacctggggcccctacatggttgtcatcgcctctgaggccctctgggggaaaagctccgtctccccgagcctggagacttgggccacatggctgtcctttgccagcgctgtctgccaccccctgatctatggactctggaacaagacagttcgcaaagaactactgggcatgtgctttggggaccggtattatcgggaaccatttgtgcaacgacagaggacttccaggctcttcagcatttccaacaggatcacagacctgggcctgtccccacacctcactgcgctcatggcaggtggacagcccctggggcacagcagcagcacgggggacactgggcttcagctgctcccaggactcagggacagatatgatgctgcttgaggactacacgtctgatgacaa

SEQ ID NO: 52096 - DNA, 687 bp, Homo Sapiens
ggcacgaggaaaatgaacactgaaccgttaatcatactgatatgtactactgacaaaggaaatctgtgaggcacacatgattgatgggtatggggccatgaagaccttgaagagcttcaccagaagtatggaaatcaagactttacagagtcttttgtataaagcacacgtgcaaaaacaaacaaaattagaactaacaatgctattgaaagatacaaaagaattgcagtccatagattggtgtttgtaaatatggcctttttctcgtccttattaaacccttagtatacaaggataaataaattctcacctgcttaattttagtgcaattgaaacacataagcctttttaaagagagaaattcccatgaaaacctactagtcagcaatgggaagttgtataaattcaagggataaacctatccctgttttcttcctgcactgtatgataataccaaaatttgggacagtcacatactaacttttcagatttgttcttgtgtttcagaaaaaagtgctcagcatgaatttggaatgttgttttatgtattgttgtggatctctcagtgtttaacatggtgccttgcatatggtaaatgctaagtaaagcgggatcaatgaattatttccttctcaaacatttatcttataccttgtgtgttcatattattattataaacagagctca

SEQ ID NO: 52097 - DNA, 800 bp, Homo Sapiens
acttcggagactgcagttgcagttgttccgtgtaggctgttgttgactctcgtatgaaagcccacgcgatccaagtgccctgcaggttttggtccaggaaaagttggtctctgcagatgactgtaaatgactacctggaggtcgattaaagtgcggtactgcgggattcagccgatttccttcttcctctgactgcccggaaatatcagccaaaggccagcgttctaaggacatatggaattggctatggataattcatatgctttcaatcaacgaagcacatgtaatggaattccatctgagaagaaaaacaacttccttgtatcagaagatcatggacaaaaaatcttaagtgtactacagaattttagagaacaaaatgtcttttatgatttcaaaataattatgaaagatgaaataatcccgtgtcatcgttgtgtgttagcagcatgcagtgactttttcagggctatgtttgaagtaaacatgaaagaaagagatgatggaagtgttaccattactaatttgtcctccaaggcagtaaaagcatttctcgattatgcctatactggaaaaacaaaaataacagatgataatgtggaaatgttcttccagttgtcatcatttcttcaagtttccttcctatccaaagcttgcagtgaccttttaataaacaagtattaatcttgtcaattgtttacagttattatctatatcagatagctatggctccaccagtttgtttgatcatgcattacactttgtacaacatcacttttctttattatttacatccagtg

SEQ ID NO: 52098 - DNA, 984 bp, Homo Sapiens
tgcctaaagagatccacggaaactttatttcctgggagcgacctgagagaaaacagaggcaccaggttccatcaggggacgacaccgtgctctgggaccctgtttttcttggccatattaaagtcatttggaaacaaatcaactctgaaatgggaaggaggggggaaaaacagtctccaagaaaaarratrattatattgacagcttctgaractaacagactgaatagcaaagccaaaagaaaagtatcctcaaagtaaccttggaaatraaaggrtcgggaaggagcagagggagagggggaacgtccgctgaggagtggcgagaggccccggccgagtcgggtcgcgggcgggcgggcgaactgggagcagagcgggggcccagccagcgaggccgccgagccaggcccggccgcgtacccaggctttgacggctgccattcagggtggacgatgcctaaagattccaccgctaatattttttttattaatattttttattttttatttctggactgactcagataaaggaatttagaaagactgagcaccagccgctgcacttctctggacttctctcctcaatccgttgccaactttgattgaatgggtgctgtggatgtgattatataatactgccatttccaagcagtgtttttggtaggttttaataaacagacttttcaaaagacggcaatatagaattgttagatccgttgttgatctaaaaatatttgctttatattttcattaaatgacttcttttaatattttattcagaatacttatgaactgctgcaaaacggtaatttatttttccccagatcttgtattacgtgtttttttcagacgagcacaaatcaaaatgaaatgaaaatatggacagttgttaggtaataagggtatcttttgatgtgatcatttgattgtaatttaatttgagtagtgattccgtaagagctgatcgagaaataaatttgtt

SEQ ID NO: 52099 - DNA, 633 bp, Homo Sapiens
gggcgtggcgtcgtcctcttcacagatgccacgtgcagccccaaggcctcaccattttgcgttttttagaaacccattttcttggtcatttataaagctgctttatagatatctttgatcctggcatgccttggtttcctctcccttccctctttccaatcctggtttcctaacctcctcttgtagtaattctcaactcaactcaaagtcccaagaatttggaatggtaggatgctgtgcggggagttcgaggctgaggcataatcactgcttcggttctgctcatcaggggacacgctcccttactcatggcagccatgtttgattgtcacagagccccccgaatactcttgtctatagtgacacactgtaggtgtcataaattttaagaaacctgcttttaagtactatttataggtttttctgttatacttgcaacctagttttaaaatacatgaggattttatgaaagctttatacagacatttataggaaactcattctttgattttaggtgccatttaaattgataacacttactttataaaaagatgttttgtctggatagagccttatagtttaaaatatcttcatatattgccatttgatcaaataaaatttcttactttaaaa

SEQ ID NO: 52100 - DNA, 515 bp, Homo Sapiens
gccgcagtgtgcctggattccgcagacgcggggacgctggctcgctccctccctccctccctccgacgctatcaaatgatgctgtttggaaaaatttcccagcagttgtgtggcgtaaagaaactcccatggtcatgtgactccagatacttctggggctggttgaatgcagtgtttaataaggtggattatgatcgcatcagggatgttggccctgacagggcggcatccgagtggttgctgcgctgtggggccatggtgcgctaccatggccaggagaggtggcagaaggactacaaccaccttccaacaggccctctggacaaatacaagattcaggcgatcgacgccaccgactcttgtatcatgagcattggatttgatcacatggaaacctcaaatatttgttgttaagtgatcttcctggagtaagagaaaaagaaaatcttgtccaagcctttaagacagcactgccttctctggaactaaaattacaattgaagtaaaaaaaaaaa

SEQ ID NO: 52101 - DNA, 918 bp, Homo Sapiens
caggccctgcggaggtggctgggatccgcagggctcccctccttcaggaacaagtcacctgcaccggtgcccgtgacgtacgagctgcccacactgtataggacggaggactattttcctgtggacgccggggaagcacagcaccacccccgcacctgccctcggcctttgtgagctttgtggtcttcccatcaggaacgctggaaagtgacattgtgtacacactgcagcttgggggttttttctttgtattgctgtttattttatattttaaaaatatttaaaaaaatgtcgagatggggtctcactatgttgtccagactgatctcaaactcctgggctcaagtgatccacccaccttggccttccaaagtggtgggattatgggcaggagcctccgtgcccaggctgctgccattttcaaatttcctccctgcctcatgtgagaccacagggtttggagaagcagttggaacccacgtgtggtgatgcctcccacatcggcctgcttggggttctacaggggttgagggaccaggcctggccggggctgatggacagtggggactttccttctctccatgatggctttgcaggggctccatggtccttctctctgtgatgggtttttgcacggggtgtgctctgccactgtggtgggtgggtggatgctgcttctgttgcctccagacctcggtgcccacagccttgaggatccttccaataaaggtgtcaagagctcaaaaaaaaaaaaaaaaaaaaactcgagactagttctcctcaccaaatggcggatgacgccggtgccaccggggggggcccgggggcccctggtggcccctggggatgggggaaccgcgggtggctttccgccggaaggttttcggcacgtgggcattccggggggccccggggttc

SEQ ID NO: 52102 - DNA, 782 bp, Homo Sapiens
  misc_feature (60)..(60): n is a, c, g, or t
tcccgggatgctgcgccgtgaaaaccagctgctgcagccgcagaggcagccggagcgagnaggggcggcgggcaggaccagacagggctgggcagggggctggccgagcgccgtgcgcgcttgggagaaggccggaagcttaccagccgagaaggaattcctagctagcttcagagccggtgcctccggagccagcgtggtggccatagacaacaagatcgaacaggccatggatctggtgaagaatcatctgatgtatgctgtgagagaggaggtggagatcctgaaggagcagatccgagagctggtggagaagaactcccagctagagcgtgagaacaccctgttgaagaccctggcaagcccagagcagctggagaagttccagtcctgtctgagccctgaagagccagctcccgaatccccacaagtgcccgaggcccctggtggttctgcggtgtaagttgctctgtcctcagggtgggcagagccactaaacttgttttacctagttctttccagtttgtttttggctccccaagcatcatctcacgaggagaactttacacctagcacagctggtgccaagagatgtcctaaggacatggccacctgggtccactccagcgacagacccctgacaagagcaggtctctggaggctgagttgcatggggcctagtaacaccaagccagtgagcctctaatgctactgcgccctgggggctcccagggcctgggcaacttagctgcaactggcaaaggagaagggtagtttgaggt

SEQ ID NO: 52103 - DNA, 701 bp, Homo Sapiens
tttttggcactgctttggattggggtcaattgcagtccacgtaactggctgcagagaaatctaccgagcaaggmaaaggcacacacacacgtttgcaggggtgtctcggtttgcatttctgttggaatgatccgaactggactyacatcctgtatggtggatggactgtatattgagggttccattcttcgcgcagtttagacatctctgttttgattctttgttgttgtttttattttaaaaggcacaaactctagatattagttgaatgttgaggctttaactttttcggtgtctttctacaactgtgttctgtgactcaattgtatcgtgttaatatcagtacagactgtctcctctacgtgactgtataatgtttttctcttcttgtagtctctatggcgtgtctytatggtgtaataaggttctcacgggttcaatcttttgtgtttagagaggccacggttcagacaatggtatatatttttgttatcaggtgcatgtctgtctgatttctttttttttcctgttggactatgtvtgtgaacataattgtsataagtdatgtktcagatttttgaatttatttatatgtgttataatgaatgcttctatttaaaagggaaatatttctacatgtgcatatagttttccaagagtgtaccattaamttgattgtkgakaataaaaacaaaaagcaa

SEQ ID NO: 52104 - DNA, 593 bp, Homo Sapiens
ccccgcgtccgcagtcctccgccaccgcttcccacacactcatactctgcacatcttggctacattaaaatggactgacagaattatttaaaaggcactatgaaggtagaacactaccttaatattttatcctagtcagaagcctgatttaacactgaactttgaagggaagcttagctgtagctcatggctttcaaagattagaagaaacatttactggttctatggaaaatagtcttcttgctaggtagattggaaacaaagaaattgcattggtggtgttaaaatctaacatttataacaaatcctgttttattctagatgaaatacttagacaattcttccagtggaaaccagtgaacttttttaacagctttgggaattcttttgtatgataatttttaaaatgaaatgtgtactcttcaaactaattaaagcttgaagttttccaggagtcgcattttaaaagtgtttgtacacattttaacacttggatattttctattttggttttgtatatttttatgtatacacaatgtacagacttttttcttgtaaataaaacatgttttcatttgtctagaaaaaaaaaa

SEQ ID NO: 52105 - DNA, 735 bp, Homo Sapiens
ctccacagcctctcccagaactcctcccgcctcaccaccccccgaaactccttgaccctgccctccatccccgcaggcatcagcaacatggctgtcggggacatgagctccatgctcaccagcctcgccgaggagagcaagttcctgaacatgatgacctagaggcccgagcgcctggtgctgagtgcacccggaggggtcatcgctgcccagagcctggggattccagctgtcttgtctttttccaaaaaagtgttaaataggcttgaggggttgttgcgcaatggccgcttcagatgacagatgttgtaagagaaggtttatgggcatcctctctggtcttttggattattcctcagaacaatgaaaaaagtctccataggacaggaaggaatgcaaaactcatttacacagtgctttccagcctttggtgcttacaggaccgcgctgttccggcttcttcacggctgacattcggctaacgagggattactttggccaaaacctttcaaaggatatgcagaaagatggtagggagcatttgggtttgaatctgaatgctatactggatactctgctccggaaagatgagctttttattctacttacttggaaggaaaaggaattcctggtccacctgaattcctctttgaagcccaactcttgaagtctttaacataccttgtccataagggaaaagccccggattttaccctggatgattcaggagcacat

SEQ ID NO: 52106 - DNA, 665 bp, Homo Sapiens
cagctctctgtccttgcaatagcccgagtgcaggcagaacgcagtcatttgtgtttatctgagaggagctttgggatataaatagtttcaggccccgctgcgctgtcattccagcccagcctcctgattgagctgcttccgggcgggctttcttcttgttggcggtcccatgctgtgttcagatgggctctgtgacaggtttggatgttttctatcactgaataaaactttccactttggaacatattttctacactctattatctcatgtaagtcctgcaacaactattaagtaggcccattttatggactgaaaaagcgaggcacagagtatttgcccaaggtctgagtcactgaagtatgataatgtgtgaagtgaacagtataataataatgactgaagcacagtaagaatccagtcatgctttctccttccctgatctcactaagccacacttttaggggcttacaaaccagttcttattgccaagccctctactctaccctatcctttcatgaatcggagcctagcctctgataacataaataatttacttctcttgatgtagaaagagatgacgttgttaccctgagtgacagtcacgacagaacaaaaccacaagaccagaccacatttgtggataaatatattagcaaataaatat

SEQ ID NO: 52107 - DNA, 813 bp, Homo Sapiens
  misc_feature (761)..(776): n is a, c, g, or t
  misc_feature (778)..(779): n is a, c, g, or t
  misc_feature (782)..(784): n is a, c, g, or t
  misc_feature (786)..(789): n is a, c, g, or t
  misc_feature (791)..(797): n is a, c, g, or t
  misc_feature (807)..(807): n is a, c, g, or t
aagggcccagcgggccaggccccgaccctgttgtgacccacctgggcaccttcccggaccagctccgcctcccctgccctcctctctccaggaaggagccagaaccctcacccctctcccaccctccccaggggtaaccccaggccaagcacagatagctcagctgcgacctctggcctctggggacataaacggggcggctgggccagggcggaaggtgctcctgtttccctccttctgcgtggtccctttgacgggccggccaccgtgtccgaggcgcaacgctaggcctccaggccacgcatccatctccaagttaacagcccgtcctgcccaagttctggggcaggtaggagagggccgtcacacacctgtccgcccgtgagtgacccgggggggcttccgggtggaggtggagccaccacgcccttcctcaaggggtcacttattaaaaagtccacggcctgaggccaggccctctgcacagaagccatatgccggccagccgcgcctcctcctctgtccacggaaccgctgcccatctaaccttcgtaaagacctgtctcctgtttccagccgccgcctgtggttctagcaggttctatgccatctgcattgggatgtctggttgtttttatttctgacttttttaaaattccaggtgtgccgcacccactttctcgcagtgttttaatattgtgtggagttgtcgataccacgtgaattcatacacaataaaaaagctcactctccccttttannnnnnnnnnnnnnnnannaannnannnnannnnnnnaaaaaaggcncgggcg

SEQ ID NO: 52108 - DNA, 645 bp, Homo Sapiens
taagcaggtgttgctagaaattcacttatatacaagaaaactttttgtgtacatatttgcatatatatgtacaaatgggtagaaacgatacatgattaatcttaatcgggaaggaaaagagatttagggaaggaagcagtaagtgagaacttttattctatttactcctgcacgtttaaatattgtttacagtgagtatatcaacatgtaagtgttaaaagacaataagctactagtgatttttaatataaaattaactataaaatattttaaatattagcaaataatatagcacactcatgaacctaattcccacatttgatagttgttacattttgccatgtttgtttaaaggtctaagtcataaaatcttataaagctaaaccccacccttctctttctcctctctctccaggataattactgttttatagtttgtggatatcattcccttacttgtgtttatacttttaccaagtgtgtatgtattcaaaaaacagttgttttgtgattttaaaatgtaaatgaatggcgttatgctccatgtattctgcaacttttcatcatacattaggttttggcgatttagccataatttggcatgaattcaggtcttttaagttttattccattgtaagaataaac

SEQ ID NO: 52109 - DNA, 708 bp, Homo Sapiens
  misc_feature (674)..(674): n is a, c, g, or t
aagcagcagcgcaggttgtccccgtttcccctcccccttcccttctccgggtgccttcccgggccccttacactccacagtcccgggcccgccatgtcccagaaacaagaagaagagaaccctgcggaggagaccggcgaggagaagcaggacacgcaggagaaagaaggtattctgcctgagagagctgaagaggcaaagctaaagggcaaatacccaagcctaggacaaaagcctggaggctccgacttcctcatgaagagactccagaaaggggtatggggcatagtctcttaccctctttctttggagctaaaggaggttcttcgaatgaagtctgtagaggttctactggatccttttctggagggtttgttggtgaacagaagtagaggcgaatttgaaatttgaaaagagcaagtcaaattaatggaaatccctgatgtggtatcaattccctcctgatttcccatgtaggaaattaaggcctaaattggagcatttgggtgtgtggggaaatgagggaaagatgttagaaactgaaatgcagactgcccccaggcatttgcctgtttgaatgttggaggttttaggattgtgcactttttaagcattagagataaattttgggatgcatcatttcagaagaagatcaaaccatctctcctacaganataaatcctcaacttggaaaaaaaaaaaaaaaaa

SEQ ID NO: 52110 - DNA, 623 bp, Homo Sapiens
  misc_feature (371)..(371): n is a, c, g, or t
gcacgagggtgaaggagaaaggtgaaaatgctggaaggtggggcttagtgatgaaacaaaccttggggacaggtgggcgtggtactgagagtcccagtgaggggagtgccctcaggcaggcgccggtggcttctgtcacaggagggaacagcgctgacattcagctggttcgcactgatacggctcaaccagtttgttaaaacatgtctgttccagtgtcagtaatatacgagtaactgcaatatgcagtaaaaattataaattctaatacaaactcagttcaagctaattaagagatcgcaacagccgttggtaaatggacttcccgctgcatttgagaagctttgcagcgccatctgccggtgtcgtancatcactgcaggctgagaggctgctttgcgccttcatcttgaagcactctgaaattgcctgtttaaattaccttggaatcatggagttgctactgcttctgaatagtttagcttctactttgattttattgttagtgcattgtcgttcttgtgtcagtagcaagtttcagtgttttaatatttacaaatacaaaaatttttaataaaatcataaagccaaacttgaatgaagagaaaaaaaaaaaaaaaaaa

SEQ ID NO: 52111 - DNA, 792 bp, Homo Sapiens
ctcaccctcactccaggacggtagtcctgccagtggagtggcccaggggcctgctggaggcgcccaggacagccccaagggcacccactcggggctcgaggtcttctcagggatgatcttgaaggtggaggaggagatatagggctggtcgggggtgctggcagagccaaagggcaggagcagggcctccagtctttcccctgctgagtccaggcaggggagaggtggcagtgactgggtctccagggcaccgggacaactccagtccaggagaccggaaggatgagaggatgtgggctgtctacctgtgatgtcgcgtccttgccattgcctgtagagggtggtgacctgcagggaaaggctgcagagagccgacctgtggggctcagtggaccaggtctactcagggatgatgctgttggaggctccaaccccatgtggcagcagctgcgaagtctgcagcccagcgtccctggaagcaggggaggtggggaagatgcactgaggggccccctgctcactggaactctggaaagggtggctcagccaggctctaaaaaggtcccaagcgtgatctggtgtgactcctgaaagcccctgtccctttggtgggcatgcacacttggagggcagggctcctctgccctacgtggttctggcccaggggaaccacatcccatatgcctggaataatttctatccaattttctgttataaatacataaatatatatatatatatatatatatatatatatatatatatatatgcctatatattacttggtactgt

SEQ ID NO: 52112 - DNA, 612 bp, Homo Sapiens
  misc_feature (592)..(592): n is a, c, g, or t
ctttgaatgtcattgctaagaattacactttgagtagcatttctggatgtctgagcttttcaaatgatacttcttttctgctgtggctttcctttctgttggactggttcccagagggtcctcttgtttgtccttgccctcgcttttatatcagttcatgttttctcttctgtcatcttccttcccagcgctgtttctccaccccctcctgctgcactcacaacagcttcccctctcctgtttagaggtggaagcatgtaagaatgcgtttgagggggatgcttgccaaaggacagcatattcaacatctggtatcaacaaggtaatgtttaaccttagactagccaaactagtgatgacctgcttccatgctgcatctgctgctttttgtgttgatgggactcagaaatcatgagaaaggtcttcagtgatccatgactgcaacaaattcttttcctaattgtgccgtatattatgcccctcaatacaacttactaatctctgcctcagtttctccatctgtgaaagtggtgtaatacttatctacctcccttgaatgttgtgaagattagtatatgttggtaaagcactnttaaaataaagaatgatata

SEQ ID NO: 52113 - DNA, 434 bp, Homo Sapiens
  misc_feature (4)..(4): n is a, c, g, or t
  misc_feature (21)..(21): n is a, c, g, or t
  misc_feature (23)..(23): n is a, c, g, or t
  misc_feature (80)..(80): n is a, c, g, or t
gcgnccgccggctccgcggantnggcgctctataactcctaccgccacggtaaggccgcccgcgcctcgcccccgtggtncattggagccgtttcctgtgggtaactggaacatagcctaggtcggggtaccaaacctggttgcagctcgtaaccactcggaacgtttatgaaaatgcagattcctggatcccacctaaacgcactgaatctgaatctgaatctgcagtggagggagaaatgtgcgtgaaaccgaaagtctgtctttaaactacttgggagaatctgtcatgcagccatattgagaacatctagactaaatagatgattcataagtaccgatcagtttataatatcctactagaaagtcaactccgaggtcgaggaccatgtctgcctcgttccactgcatctgcagccttctggatagtgcct

SEQ ID NO: 52114 - DNA, 547 bp, Homo Sapiens
tgtttatacaacgtatctatgttgtgtaggggaagtggtgttattttttaaaaattctactttggttttgttgttgttttgatttgtttttggctaagtagaggacatggactagttgtagcaaacagaacatgctgtttgctcttgccaaaggtcagtgagtgagtgcatttgctgcagtggtggcacgtagagaactagatggtaataaagatttaaaactatgaagaaggttacagtgtaactattttggtactagaaccagttcatgctggccgaaacgacaatggtttatggacttgcatccattttgtatttttgtaatatttgtaaatatgaactttttaaattgctgcaaagatggtttcttttgtaagatgttttcaacgtttacattcaatccaagcctttgtatattttagagctgtgcaacactttaagtcttgtatttatttttagtaaaaatggtgacagtttcattgtgaacccctctcaaaaaaaatgtatcagaaaagtgtgattacctagaaagtgtgtatagaaactg

SEQ ID NO: 52115 - DNA, 621 bp, Homo Sapiens
  misc_feature (581)..(581): n is a, c, g, or t
cttaatggtgaagtaatttaaaatataaatccattcaggtgacaacccatcatcaaaattacaaattttctgattgaactcatctgaatcatcagttccttgatggagagagagaaggagatggaatgtgtctggtaaccccaaatggagtacaagtagcctttgttttcctgcataaatggacttgttgaatgcgaacgaatatatgcaattcatatacttttggagatgaacgtagatatgtgtgtcagctttgagatggtgtgtcctggattaatactttgtctcccaatatcacagaaaaatacatgccagtgactcttgaggttaaggtagttgggatgaaatggcctcaggcaatttcacattccctaattacctggaaagttctacagtaattaatatgcagctaactcctgttgccctcacaagagcatcagccttctagaatcggagctccggagtgtgaagattcagtattgatatgatatgtataccaaactccagccaacttactgccatttttcataatctgagtggctgccttgcttatcctaagctgtggttgcagaaaccgtggncatttatataagctataacatcaaatcagggaaaaatgag

SEQ ID NO: 52116 - DNA, 999 bp, Homo Sapiens
  misc_feature (598)..(598): n is a, c, g, or t
  misc_feature (642)..(646): n is a, c, g, or t
  misc_feature (649)..(649): n is a, c, g, or t
  misc_feature (651)..(653): n is a, c, g, or t
  misc_feature (655)..(656): n is a, c, g, or t
  misc_feature (658)..(659): n is a, c, g, or t
  misc_feature (661)..(664): n is a, c, g, or t
  misc_feature (794)..(794): n is a, c, g, or t
gggatctatgtgcaggaaatggccaagctggacgccaactaggctgagcaatgacagaaccagctgcaccatgtaccccaccttcagtttaaaagaaaaaaaaatccccttcactcctactgggaggtgggacccctttcattttcagttttgctcatctagggaaaataaggctttggtttccagtttaattgtttttgaccttctaaaatgtttttatgttagcactgatagttggcattactgttgttaagcactgtgttccagaccgtgtctgacttagtgtaacctaggagattttatagttttattttaatgaaaccctgattgacgcacagcagtggggagaacagcgtcttttacctgtcaccgaagccaggaagccccgtttgtaagcgtgtgttgtggtgctttattgtacatcctccagtggcgttctttttactctaatgttcttttggtttcccccctcagaagaatcatgaatttgcaacagacctaatttttggttactttttgtcttattgatggatttgaaaatgaaagatttaataaggcaaagcagaatctgttgtccttaattatatttgcaatttgngaatttgtgtgagttgatttagtaaaatggttaaaccgcaaaannnnncancnnncnnannannnnaaaaatgtgcggcccgcctcgggccctcgaagaagctttcctagacctttccgttttggcgccgcggggcccagtaaggtaaaggggacatggggccatagccttgttttcctagggagaatccctgggnccaaggacctaagggcgtttggaattcccccacccaataaaaaaaaacgccccggcgggggaaacgcgaggcgtttctgaaacaaatcccacaaagggaggtccctggaggccattaccttggattcttactcacagggactcccaagcgcagcttccaaattcaaaattaacccccccaccctgggccaatcatatggaagaaa

SEQ ID NO: 52117 - DNA, 630 bp, Homo Sapiens
ttttctgagttcagatgtctactttgtctaaaaataacatacgcactcaacttccttttctttcttccttcctttctttcttccttcctttctttctctctctctctctttccttccttccttcctccttttctttctctctctctctctctctctttttttgacagactctcgctctgtggccctggctggagttcagtggtgtgatcttggctcactgctacctctaccatgagcaattctcctgcctcagcctcccaagtagctggaactacaggctcatgccactgcgcccagctaatttttgtatttttcgtagagacggggtttcaccacattcgtcaggttggtttcaaactcctgactttgtgatccacccgcctcggcctcccaaagtgctgggattacaggcatgagccatcacacctggtcaactttcttttgattagtgtttttgtggtatatctttttccatcatgttactttaaatatatctatattattgtatttaaaatgtgtttcttacagactgcatgtagttgggtaaaatttttatccagtctaaaaatatctgtcttttaattggggtttatacaacttatatttaataaaattgttgaatttaaaaaa

SEQ ID NO: 52118 - DNA, 642 bp, Homo Sapiens
ttttttttttttttttttaagagatacttacatttccatttattgtttgaaatgtcgatcaagagaatcaacagatgatagtccaatttttactcagtgactgttgtagcattttcctgtttactgattagagtggttattcattattcctcaggttgctgaatcccatcaggctgttattatgaaggaatttgattgctttgctgcacagcaggacctgtgctttgagatttttttttctcttttaaaatatcctgtaactacaatgatggtaaagccatgttaaatgacttgattgtacttggagtaattgcacatttttttctatgcataaaaaaatgatgcagctgttgagaaaatgaagtctttttcattttgcagaaggaaatgatggaatttttctgtacttcagtatgtgtcaactgagagtcatatacattagttttaatctcttaatattgagaatcaggttgcaaaacggatgagttattatctatggaaatgtgagaaatgtctaatagcccataaagtctgagaaataggtatcaaaatagtttaggaaaatgagaggagaacagtaggattgctgtggcctagacttctgagtaattaataaagaaaaagaagtaccctttggcctac

SEQ ID NO: 52119 - DNA, 600 bp, Homo Sapiens
tctagcgaggtgacagcgtagaaccagaatcctgcagtcatggcgcaggaagaggaagatgttagagattacaatttgactgaagaacagaaggcgatcaaggccaagtatccgccagtcaataggaagtacgagtatttggatcatacagcagatgtccagttacacgcatggggagatactctggaggaagcatttgagcaatgtgcaatggccatgtttggttacatgacagatactgggacagtggagcccctccaaacagtagaagtagaaacccaaggagatgacttacagtctcttctgtttcactttttggatgaatggctttataagttcagtgctgatgaattcttcataccccgggaagtgaaagtacttagcattgatcaaagaaatttcaaattacgatcaattgggtggggagaagaattttcattgtccaagcaccctcagggaacagaagtcaaagcaataacatattcagcaatgcaggtctataatgaagagaacccggaagtttttgtgatcattgacatttaagacaccaaaaaataaaagactcctacgaaaaaaaaaaaaaaaaactctccagcgctg

SEQ ID NO: 52120 - DNA, 522 bp, Homo Sapiens
gcaggttgcccccaagtttcctggcagtgtgtgatactgaggaggtgagcttgtttctggagctgtgctttaaggtaaagttgatcagcttaatcctcctgatccctttcccatcggatctgaacactggtcttggtggtcgtaaaaggaggaaaagtaatagtgaagctggcctaaatgttgtaatctggtatatggcatgtgggctagtttcagacaggtttcagagatggttggatctctgaaattgtaaaatgaagtataatcttaggctaagggaaggatgcgtgtgaagctctggaggttggtatagtaatagctgacctattactgcatttgggagggatctgtcatagcttccttgcctcttaattaagggtggtgtttttttcttttagattcatgttacatgtaaagctgtcctcatttgtgactatggacctatggagttgggacaatctctatgggaagcagaaggcaaggaccccggtcattttaggtagaaacaacagcattctaatg

SEQ ID NO: 52121 - DNA, 641 bp, Homo Sapiens
cgggagttctatggtgatgtacattcgagtgaagattatgtttaataagaaagaaaatgccttggttcagatggcggatgcaaatcaagctcagctagcaatgaaccatctaagtggtcagagactttatgggaaagtgcttcgtgctacactgtccaaacatcaagcagtacagcttcctcgagagggacaagaagaccaaggtctgactaaggatttcagcaatagtcctttgcatcgctttaaaaagccgggctctaaaaacttccagaatatctttccaccatcagccactctgcatctttccaacattcccccttctgttacagtggatgatctgaagaaccttttcatagaagctggatgttcagtgaaggcttttaaattctttcagaaagatcgcaaaatggcgctcattcaattgggatctgtggaagaagcaattcaggccctcattgagcttcataaccatgaccttggagaaaatcaccacctcagagtttccttctcaaaatctacaatctgacttttctgtgaatttttctcctaaaactggaccataatttcagtaaaaccttcagacatagactgaagcagctcaagaccaattttgcctctttcacaaaaataactctttctga

SEQ ID NO: 52122 - DNA, 611 bp, Homo Sapiens
gggactgaggccaaccaagcctatagtgtccccacaaaaatgggatccaaactggaagacatcctgatggacgacaccctttctcccgtcggtgtcactgatccactcctttcctcagtgtcccccggagcttccaaaacaagcagccggaggagcagtatgagcatggaagagacggagcacacttgttagcgaatcctccctgcactgcattcgcacaaactgcttcctttcttgatccgtagatttaataacttacctgaaggggttttcttgataattttcctttaatatgaaattttttttcatgctttatcaatagcccaggatatattttatttttagaattttgtgaaacagacttgtatattctattttacaactacaaatgcctccaaagtattgtacaaataagtgtgcagtatctgtgaactgaattcaccacagactttagctttctgagcaagaggatttgcgtcagagaaatgtctgtccatttttattcaggggaaacttgatttgagatttttatgcctgtgacttccttggaaatcaaatgtaaagtttaattgaaagaatgtaaagcaaccaaaaagaaaaaaaaaaaaaaa

SEQ ID NO: 52123 - DNA, 304 bp, Homo Sapiens
tctttggggcccgaggtgccaatgggtcatgtttggttagaaggtgacaatctacagaattctacagattccaggtgctatggacctattccatatggactaataagaggacgaatcttctttaagatttggcctctgagtgattttggatttttacgtgccagccctaatggccacagattttctgatgattagtaagcatttattcttttgacttgattattgtctccttttcatgtgaatttattactcccgttgaaaccgtgtacttaccaataaactatttgctattccaaaaaaaaaa

SEQ ID NO: 52124 - DNA, 667 bp, Homo Sapiens
gctaggccaggcatggtttccacattcgagcaatatcaattcctatatgacgtcattgccagcacctaccctgctcagaatggacaagtaaagaaaaacaaccatcaagaagataaaattgaatttgataatgaagtggacaaagtaaagcaggatgctaattgtgttaatccacttggtgccccagaaaagctccctgaagcaaaggaacaggctgaaggttctgaacccacgagtggcactgaggggccagaacattctgtcaatggtcctgcaagtccagctttaaatcaaggttcataggaaaagacataaatgaggaaactccaaacctcctgttagctgttatttctatttttgtagaagtaggaagtgaaaataggtatacagtggattaattaaatgcagcgaaccaatatttgtagaagggttatattttactactgtggaaaaatatttaagatagttttgccagaacagtttgtacagacgtatgcttattttaaaattttatctcttattcagtaaaaaacaacttctttgtaatcgttatgtgtgtatatgtatgtgtgtatgggtgtgtgtagtgtgagagacagagaaagagagagaattctttcaaagtgaatctaaaaagcttttgcttttcctttgtttttatgaagac

SEQ ID NO: 52125 - DNA, 489 bp, Homo Sapiens
agggcgcgtctggcaccgggaaggtgtagatcatctagaatgacggcgattccgacgccccggtcagtcctgcgtgattggcgagggtgcatctgtcgtgagaattcccagttctgaagagagcaaggagactgatcccgcgtagtccaaggcattggctcccctgttgctcttccttgtggagctccccctgccccactccctcctgcctgcatcttcagagctgcctctgaagctcgcttggtccctagctcacactttccctgcggctgggaaggtaattgaatactcgagtttaaaaggaaagcacatccttttaaaccaaaacacacctgctgggctgtaaacagcttttagtgacattaccatctactctgaaaatctaacaaaggagtgatttgtgcagttgaaagtaggatttgcttcataaaagtcacaatttgaattcatttttgcttttaaatccagccaaccttttctgtcttaaaa

SEQ ID NO: 52126 - DNA, 540 bp, Homo Sapiens
aacattcacaacctttattatgggtgagagcttcactacaactttagaaataaaaagtaaaattacaacataggtcctaggccttggcgagcctgaaaaagaagattgggaaggagggcacagggtccttccacctccctggaaaggtgcagaatgagccaggcctaactacagggccatgagcctctagaagcttaggggggaataagaaacactgtgaacttagatatataaatagagagagacccaagcaataggccgggcctgactcccagacccctgcagatcatggctaaggccttacatcctcctctgtcatactggagtaggaggcaggggaagtcatctttggagtattttggtttttcttatttatgtacaaaaaagtccacatccacaatccaaaataaagttctctgtccatctctgaaactgcctgtctcagtttttccacctgtctgtttggccgaagggaatggaatagacatgaagagacaatggatgtgaagaagaaatagagccatgggtttgggtaataag

SEQ ID NO: 52127 - DNA, 505 bp, Homo Sapiens
  misc_feature (431)..(431): n is a, c, g, or t
tacaggcttgagctaccgcgcccggccgtgaacgctattttctaagcagccagcagtgaatctaaaactctggaagaagtcttctgtttgaaaggcttatttaagccacacgtacacacactgtcttagagtactgtgagcccaccccacattggtcatcttccctatcacacaaatgatgttattttggactagcttaattttgaaatggtaacaaagtttcctattccatactgttcatttctaatactcttacgaaaactattctaaaggaggcaggagccaaggccaaaagtgaacgtacaggtttgaaatggctgtgataaggaccagctggtattaactgataactttacctttgggtttttgttattttgtttttctagtccctacctgtgtttaaattatggataactcgaaagacagctcangtgaaggccagtaatgatttttttgaagtttcaatggtgtgaaataaatttctgttcttaaaaaaaaaaaaaaa

SEQ ID NO: 52128 - DNA, 784 bp, Homo Sapiens
  misc_feature (709)..(709): n is a, c, g, or t
ggggaagtgttccctttaaaaataagaacaactgtcctggctggagaatctcacaagcggaccagagatctttttaaatccctgctactgtcccttctcacaggcattcacagaacccttctgattcgtaagggttacgaaactcatgttcttctccagtcccctgtggtttctgttggagcataaggtttccagtaagcgggagggcagatccaactcagaaccatgcagataaggagcctctggcaaatgggtgctcatcagaacgcgtggattctctttcatggcagaatgctcttggactcggttctccaggcctgattccccgactccatcctttttcaggggttatttaaaaatctgccttagattctatagtgaagacaagcatttcaagaaagagttacctggatcagccatgctcagctgtgacgcctgaataactgtctactttatcttcactgaaccactcactctgtgtaaaggccaacggatttttaatgtggttttcatatcaaaagatcatgttgggattaacttgcctttttccccaaaaaaataactctcaggcaagcatttctttaaagctattaagggagtatatactttgagtacttatttgaaatggacagtaataagcaaatgttcttataatgctacctgatttctatgaaatgtgtttgacaagccaaaaattctagggatgtangaaaatctggaaaagttcatttccctggggattcacctctcccagggatttttttaaaagtttattttgggggaa

SEQ ID NO: 52129 - DNA, 737 bp, Homo Sapiens
  misc_feature (377)..(377): n is a, c, g, or t
  misc_feature (615)..(615): n is a, c, g, or t
  misc_feature (710)..(710): n is a, c, g, or t
ctcataaatatgtttaaagaatattataattatatgacttagattgtaaaacaatatgtacagcagtgtcctattttttagaataaaattataaactatgtgctcacatatgtgtttgtgcatgcatagaaaacagattagaaaggaatatattctaacaccattatctctagctggtagaattatggaaaatttttatttccttctttttgcttctaaattttatataatgagcatatttggctttgtataatcatttttaaaaagttgttttagaagaatagtactgatatatcattcccttttagcagttttctctaggataaaaaataagaggaagtctgagcttaactaattaaaaaaacagatttctttanaaaatattagcaaatcattagtgttcttactggagaaagggcagtgttcaaagaagaattaaacaaatcattccagttgcaggaaaaattcaatttactgcatgcagactgtttcttgactgaaaagttaattcctttcattcagaatcagtatgcatattcactggctatatttcatctcacatctgcaaacttaatttttcctttcttggtcatcagaagattaggaaataaattntagtccaggcaatagatcctacttggcaagctcaaaataactcaattattaaaaagcagcacacaaagaccagtagtgacttccaaagggattgntaacaactacttaaaaaaaaaaaaaaa

SEQ ID NO: 52130 - DNA, 829 bp, Homo Sapiens
  misc_feature (697)..(697): n is a, c, g, or t
  misc_feature (717)..(717): n is a, c, g, or t
agaggtaatccatcgtcaacgtgcagcctattgacgatggctggatgtacggcacagtgcagagaacagggagaacaggaatgctcccagcgaattacattgagtttgttaattaattatttctccctgccctttgagctttattctaatgtatcccaaacctaatctttttaaaagatagaagatacttttaagacaacttggccattattttacaatgatgtatccttcctttgacaattagacacacaggtaccaggaagaaggaatgacctctgggctgaaaacagcagcattttcagtaattcctacaaacaaaaatctttgtgtctggacacctggtgctgctaattgtgttcatggtttcctttgattggctattgaacccttctgggaaatgtatttttgtagactttaatagagaagttgattgtcccttaaatgtagtgtgtgtttgaaacttcttagctgtcactttggaatcaccccaagccaattctcttaactctgtaatgcagccaataatttcaaacccgttttgcttttgagtcatgaggcaatttccaatattagtgaaaattgcccaatataataagtgtaaacagtggcagaaggacagtctggttaaaattatattgactggtggccttagggatctagaaacttctactaaacagagaaatttcccttgtcctangctgactggtatctatttanttctcatttgtaccaaggcatctcctactctccattatattctatgggaccagtctatgctcagttccacagatgtcaggaccaatactttacgctatctgcaagggcatta

SEQ ID NO: 52131 - DNA, 339 bp, Homo Sapiens
tggtctcgatctcctgacctcgtgatctacccacctcggcctcccaaagtgctgtaacctaagcagacagttctgtgaatgcgtgaggaccacctgaagtctgcagccacggtggaggtcaccaaagggtgaactgagagagaagagggaattcacttgcccaaaggtttacagatgcccaggcaaactgatttttccatccagaattatcttgttctttaactctcctcaattgtcatatataaacatgaatttatatacatgtgtgtcacatgagtatgtcgttttaaaacaacgtgtacatatgtaagttttgtctggatacagaaagctgcttta

SEQ ID NO: 52132 - DNA, 748 bp, Homo Sapiens
cggggtggatgtttttacacattgaggtaatacatagtcaaatcctttgctctcaaatagttgtacactttccatacatttctgtcttattttttaattctagtgatacacaaattacatgtgggctacttcatttggtaatttggtccagctttttggtggctgtagagtggcctctaggatacagaaaatgattctctgaaatttttcgttgtaattgttaaatactactctgcttgacttactcagttttggtgggaagatctgggtcaattggaatagtacacctttctcagggttttcagtttaataaggttgtcatattattcccaacatgggaatatagtggcttctaaagtttgcaaatgaattatgtaaaaggattttctgtgtattaggaaggcaacctgttctgttcatggtatattaacacttcattgtcatgtgtctacccttaaaattgctatttgtagtgaagaaaaaagcatagtggtatttagtcacttctgggttcctcttgtcagtttatatgcaaacattttggcatgtgggacttggggaggagggacaattggttgtatgtkttgaccacttccacctatgaaaattatctgaacattattcagatttaagagttcatgggagcaggtggtacagaacctagtgttgaatataatttttgtgccatgcttgaatgtattttgacggattagcaaaataaaagtgaacctcctatttttcatcttaa

SEQ ID NO: 52133 - DNA, 472 bp, Homo Sapiens
cggaagcaggaaatgctaaaggagatgccactgcaggacccaaggagcagggaggaggcggccaggacccagcagctattgctggccactctgcaggaggcagcgaccacgcaggagaacgtggcctggaggaagaactggatggttggcggcgaaggcggcgccagcgggaggtcaccgtgagaccggacttgcctccgtgggcgccggaccttggcttgggcgcaggaatccgaggcagcctttctccttcgtgggcccagcggagagtccggaccgagataccatgccaggactctccggggtcctgtgagctgccgtcgggtgagcacgtttcccccaaaccctggactgactgctttaaggtccgcaaggcgggccagggccgagacgcgagtcggatgtggtgaactgaaagaaccaataaaatcatgttcctccacccagaaaaaaaaaaaaaaaaaaaacgcgg

SEQ ID NO: 52134 - DNA, 722 bp, Homo Sapiens
  misc_feature (650)..(650): n is a, c, g, or t
atggaaaaactgttacagcatttgggagttgtttttcttttagacatttgcagatcttatctcaaggtgactaggaacccagagctaagtatctgtgaggcaatctctgcgaacgctgaacttacctagttggtttctatgaaatatgtagaatgcactgcagtagccattgtaagaaggtactataccggttttttggggcttgttgttgttgtttggtctgagaatgtactgccaacccctcttttataagagagaactgattttgatacatattttaaaatatgatagtacagagttaatggatgttaaaattttatttctttgttttggtaagtagattaaatcgagaatcatataatcagtacatttgagaattatataaccagtatataataatactggacacaaccatttgccatcttttcctgttatcatcccatagagtgggtggggagaatgaatagacataaacctagaataatgataaatggtttttaaaactctatattgaatacattccagctgataatgacttttctttttcaccttggtgatatcagcctcagggtaaaaaaaaaagtttcataaatcttttagttataaacaggaaagttttatattagtgtgtcatttcatttctagactgntgatggtgatgatgataaagaatttggagccaattttgatatatgaatgtattgcttttacatgtgatgatt

SEQ ID NO: 52135 - DNA, 750 bp, Homo Sapiens
cgtccgatcgtcccagacccaaagaaagctgccgtgtgggagatcacaggggctgaattctccaaatcggaggctcatacagctgacgggatctccatccgattccctcgctgcacccgaatccgagatgataaggactggaaatctgccactaaccttccccaactcaaggaactgtaccagttgtccaaggagaaggcagacttcactgtagtggctggagatgaggggagctccactacagggggtagcagtgaagagaataagggtccctcagggtctgctgtgtcccgcaaggcccccagcaagccctcagccagtaccaagaaagcagaagggaagctgagtaactccaacagcaaagatggcaacatgcagactgcaaagccttccgctatgaaggtgggggagaagctggccacaaagtcttctccagtgaaagtaggggagaagcggaaagctgctgatgagacgctgtgccaaacaaaggtattgctggacatcttcactggggtgcggctttacttgccaccctccacaccagacttcagccgtctcagacgctactttgtggcattcgacggggacctggtacaggaatttgatatgacttcagccacgcacgtgctgggtagccgggacaagaaccctgcggcccagcaggtctccccagagtggatttgggcatgtatccggaaacggagactggtagctccctgctaggtttgctgtcttccctctccctcaggc

SEQ ID NO: 52136 - DNA, 664 bp, Homo Sapiens
tctaagcacccccaagccactatccactttgaatcctgctccatacattgggtgtatatttattctgaacgggagaagttatattgttaaaagtgtaaaagaataattgtgttatgaagctgccttattttttttctttttgtaagttactattttcatgtgaatatttatgtagataaaatttgcctcctggtaaccctgtaatggatggggcccagaaatgaaatatttgagaaaaacaagtgaaaaggtcaagatacaaatgtgtattaaaaaaaaaaaagcctattaatagggtttctgcgcggtgcagggttgtaaacctgctttatcttttaggattattcctaaatgcatcttctttataaacttgacttgctatctcagcaagataaattatattaaaaaaataagaatcctgcagtgtttaaggaactctttttttgtaaatcacggacacctcaattagcaagaactgaggggagggctttttccattgtttaatgttttgtgatttttagctaaagagagggaacctcatctaagtaacatttgcacatgatacagcaaaaggagttcattgcaatactgtctttggatattgtttcagtactgggtgtttaaaggacaaatagctgctaaaattcaggggtaaatgtaagtg

SEQ ID NO: 52137 - DNA, 529 bp, Homo Sapiens
aaagagaagtggcgtgccataggggttacaaacagggcttcaaggttagcactgggatcaaattccgactttgcaacttaactttcttgagtaagttgctacacctctattagcctcagtttcttatctgtaaaatgggacggctaagtacctatttcattgggctgttgaataatgatggtctcatctatgcaagggcttagtaccagctgggtgaaactcagtgaatggcaggcaaccctattatgactaggcttctgccaatgatcagacttgaaccctgtgctcatccccccatcactttgtggaactagatgtcctacgttgcacatggcttgattcatggtttggagttgttttctggttgtttcctgtgtgcaggtttaatctcaacctgtgatcccttgaaagctgcaattttatccctccccgtcctcctccctctcaccccaaggccaagtttaatactgtgcattctgaaatcttgcaatgttgatgatgtaaaataaatcttctctcctgtgtttct

SEQ ID NO: 52138 - DNA, 620 bp, Homo Sapiens
gctccaggagcaagctcaccaggcctctcagaagtcccagcaggatctcacggactgccgggtcggcgcctcctgcgcgagggagcaggttctccgcattcccatgggcaccacctgcctgtctgtcgtgccttggacccagggcccagcttcccaggagagaccaaaggcttctgagcaggatttttatttcattacagtgtgagctgcctggaatacatgtggtaatgaaataaaaaccctgccccgaatcttccgtccctcatcctaactttcagttcacagagaaaagtgacatacccaaagctctctgtcaattacaaggcttctcctggcgtgggagacgtctacagggaagacaccagcgtttgggcttctaaccaccctgtctccagctgctctgcacacatggacagggacctgggaaaggtgggagagatgctgagcccagcgaatcctctccattgaaggattcaggaagaagaaaactcaactcagtgccattttacgaatatatgcgtttatatttatacttccttgtctattatatctatacattatatattatttgtattttgacattgtaccttgtataaacaaaataaaacatctattttcat

SEQ ID NO: 52139 - DNA, 643 bp, Homo Sapiens
aagaccctgtctcaacaaaaaaataacaggttctgttgctgctgagctttcgtcaggaagataagactttcccaacagtccgaagcctaggatatgagggctgaggaggactcaaaccgttgcagtcagagagacacctattttggtgaatattttttgaaatagttaagtggcctccagtacaaactcccagttcccagaaaagacttaaaactagtatctggagattccaagtcctttaaaaggattttagctgatatgcaggcatctggatgttagcctggggttttggctggattccacctcgctcagtgatgatagtctgtttccctggaacattcctgtggttttagtagtaatgagatgtgtgcaccactccagtgggaactgaagctcttagtagttacattgtaattaaaaaagaattataaaacaagaaatcagcaagcctgcttacctccagagacacaccgttccacttacagtatctagcttcctcgactcctttgttaaaatcgtggagtatgaactgtgaccagagaagtaaatatggagccgttttattgagcagtttcctccagggatgacggctgtcagtgtgtttcctgccagttttccagtccttactctctgcccttcaatc

SEQ ID NO: 52140 - DNA, 905 bp, Homo Sapiens
gggtagcatggtaatgttaatcggagcaaggtacatctcaggtattccataaaacctaccaactcatggattcccaagatgtgagctttttacataatgaaagaacccagcaattctgtctcttaatgcaatgacactattcatagactttgattttatttataagccacttgctgcatgaccctccaagtagacctgtggcttaaaataaagaaaatgcagcaaaaagaatgctatagaaatatttggtggtttttttttttttaaacatccacagttaaggttgggccagctacctttggggctgaccccctccattgccataacatcctgctccattccctctaagatgtaggaagaattcggatccttaccattggaatcttccatcgaacatactcaaacacttttggaccaggatttgagtctctgcatgacatatacttgattaaaaggttattactaacctgttaaaaatcagcagctctttgcttttaacagacaccctaaaagtcttcttttctacatagttgaagacagcaacatcttcactgaatgtttgaatagaaacctctactaaattattaaaatagacatttagtgttctcacagctttggatattttttctgaaaagttattttgcccaaactgaaaacctttcagaatgttttccatggtccccactaattataaatgacttttctgtccgggatccttataaggaaaagaaacttttctttttttcctccacacctttccctttttaaaaattttttaacctttggaagggaataacaataaacatgccctaattatatttttaataccactgggagggggagagcccccatttttttatatttttaacaagcccacttttttttattctccgagaaagggttta

SEQ ID NO: 52141 - DNA, 863 bp, Homo Sapiens
gggatctgggaggggagaaccaaatgccctatcctccagttctcagcatatagaagggagctctctcatctgctagccactcctgcctcactgtgccatgctttctgtaatgcactctgggtccagggactgcttggcaggaggtgggaagaacaagaagtttagggccttcccagtttcttagggcctgtctggagagggaactagcgtttactgagtttttacgatgtgttacacaccatgtaaagccctttacctacattatttcttataccccaaacagagagcaaataagtatccccattttttagtcacatagagttccagagttgccacagttacatcgcaaagtcaggatttgaatccagtgcagaccgcaaacaccatggttttctctccaaagcagagcagctccagaggtggaggtgactggaatgtcctagattcagtgggaccaggagctgggggtgctagcagaggctctcatctccccagggtcttgtcagtcagagtcctaaacccttcaattaactatccctctaatcccagctgaagcctgggtaatacctcccaccaagaggtatctgtgtggaacctggccctatttagggattaggtgatggagataaatttccatggcaaacggccctcgtccccgttcgtttgcagagcacaacaatccagattaaggtacagagtttgggttttatttggagattagttggtattacaggtgatggtgataccaaaacccaatgctgctatacctgcctccatcccagatctgtcaggttgtctccacagccccacatcagagggcatccaatctgatctttgtgaaaattaaatcaacataagcccca

SEQ ID NO: 52142 - DNA, 579 bp, Homo Sapiens
taatcaatcaagttgctgcagcctatgcactggcccagaataaaaaacgtggtgattctgctaaagcttctctgtctttccctgtgtgtgaaatcttaacgtctctacttgggaacgctgatcccattcatttagagttgatgtttccacgtggctatttccaagctttgccttcaaataaattctgtacttaatcatatattctaaattttattatttactgctgacatcagtttctgtcggattgtaggagcctcaccagagagggcccctgtcgccatgttgtaaaactcacacttgccaaaagttgtgggttagggtttctccccctccctcaggatgacgctagttagctgacacagatggtcacctccattaccaagtagagtcaggatgaactatgtgtgactgttcaactatgtgtcctcttccctgaggactgattagtgtttatcttgaaaacatgtccttaatgggttgtatagaacactgaagcatctgatttcaaactcttagctcttttcctctatttcccatcacattctggtctaaggcttatttattaataaaatgattttt

SEQ ID NO: 52143 - DNA, 775 bp, Homo Sapiens
  misc_feature (775)..(775): n is a, c, g, or t
cctggggatgcggctctaaatcatccggacatgtgcgtctaccgaagagggaggaagaagagagtgccttacaccaaactgcagcttaaagaactggagaacgagtatgccattaacaaattcattaacaaggacaagcggcggcgtatctcggctgctacgaacctatctgagagacaagtgaccatttggtttcagaaccgaagagtgaaggacaagaaaattgtctccaagctcaaagatactgtctcctgatgtggtccaggttggccacagacagcttagaagccattcggttgtctccaaaaggcctttggaaagacttgaatatgtatttaattccccccaccccctgccaatggtggcaaattttgtgaattgtttttctctcttccccttatctggctctaaaaccttctgctgcccaacctgactttgtagttctgatttttacttgtttattattggttgtgttcttgcctagggtttttaaaatatctgtttttaatgttttgtttctccctccaggccagtataaagggacttgaagtattttttaataatctgccccccaatgaacttcagaagtgccattctgatttaagggtttatttaaaaaattactttatttgttcattcccagcactgattatcttataatccattaggacagaatggttttcagtcgtttatatactggtattaggtaattgaatcattatctctcaacaattgccctgaggcaagtgggataggcaggcagtgctttggggtn

SEQ ID NO: 52144 - DNA, 701 bp, Homo Sapiens
  misc_feature (644)..(644): n is a, c, g, or t
  misc_feature (660)..(660): n is a, c, g, or t
  misc_feature (682)..(682): n is a, c, g, or t
cccgcagcgctctcctttgagcaagccgagctctccttgttaccgtgttctgtctgtgtcttcaggagtctcatggcctgaacgaccacctcgacctgatgcagagccttctgaggagaggcaacaggaggcattctgtggccagccaaaaggtaccccgatggccaagcaattcctctgaacaaaatgtaaagccagccatgcattgttaatcatccatcacttcccattttatggaattgcttttaaaatacatttggcctctgcccttcagaagactcgtttttaaggtggaaactcctgtgtctgtgtatattacaagcctacatgacacagttggatttattctgccaaacctgtgtaggcattttataagctacatgttctaatttttaccgatgttaattattttgacaaatatttcatatattttcattgaaatgcacagatctgcttgatcaattcccttgaatagggaagtaacatttgccttaaattttttcgacctcgtctttctccatattgtcctgctcccctgtttgacgacagtgcatttgccttgtcacctgtgagctggagagaaccagatgttgtttattgaatctacaactctgaaagagaatcaatgaagcaagtacaatgtntaccctaaattaatanaagagttaacatcccatggcanaaaaaaaaaaaaaaaaaat

SEQ ID NO: 52145 - DNA, 605 bp, Homo Sapiens
cccctctgaaggcctacaccccggtcgtggtgacccagtggtaccgcgccccagagctgctgcttggtgccaaggaatactccacggccgtggacatgtggtcagtgggttgcatcttcggggagctgctgactcagaagcctctgttccccgggaagtcagaaatcgatcagatcaacaaggtgttcaaggatctggggacccctagtgagaaaatctggcccggctacagcgagctcccagcagtcaagaagatgaccttcagcgagcacccctacaacaacctccgcaagcgcttcggggctctgctctcagaccagggcttcgacctcatgaacaagttcctgacctacttccccgggaggaggatcagcgctgaggacggcctcaagcatgagtatttccgcgagacccccctccccatcgacccctccatgttccccacgtggcccgccaagagcgagcagcagcgtgtgaagcggggcaccagcccgaggccccctgagggaggcctgggctacagccagctgggtgacgacgacctgaaggagacgggcttccaccttaccaccacgaaccagggggcctctgccgcgggccccggc

SEQ ID NO: 52146 - DNA, 580 bp, Homo Sapiens
caaggctgcagtaagcactgttagagcccatcagatcttcctaaatccaggactcaggactcgggaggggagcctgcctgctcacccctgctccttgggaaacagaaatctgggacatgtctctcccaattatctcgttcactgaaaaacaagaaaagggagagtgattagtgacctctgagtgattagccatatgatgcccaacgctgagctctacctcagacatttcccttcccatggctttctgtaaagataaaaggcagtgtctgaagcctgctcctgagctgagtggcattagagatggaaacatcactccacaaactactctggacctctttttctctctcattcagttcacttctgggttgggaagggggcttaccctcactctaaaggtatgtttaaataagtattcaccttactctaacttttctttaattcatatctctttgagaaagtttggattttctacaatgccacctcctatgtaaatggactgacacacataaatgcttgggtcagaataaaccactgtgatgtgggggtgattttgctactgtatcctaatacaagcactctt

SEQ ID NO: 52147 - DNA, 911 bp, Homo Sapiens
  misc_feature (766)..(766): n is a, c, g, or t
  misc_feature (886)..(886): n is a, c, g, or t
tttctaatcaacacttgaaaagcaaagtgtcttttcagcctttccatctttacaaataaaactcaaaaaagccgtccagcttatcccatcctctgattgtcttctgacttaagggatttactgtggtgtaggttctgccagccaaccctacaagctgccatttccagtcctagcatttaagtaggatgttgttgcctttaacttttcttatccaggggaaaattgccattttagggtcagcatgaacagctctttcttgtatgcgatttaaaacaaactggaaaggaaacttcacacgtcaaaatccatagaagcgcctggacgaggcttaaagtgctttgtgagtgaataggagccattcgctaattctagacccacagtgtctggtggtggggcttcccttgtggggcttctggtggtggttttgccttttcttttccctcctccatgttcttctaaaacatatacatatatacatacacacatacacatattcttcaggtctctaagcccctggaagcagcattgtgtgatattctcagaggcaggggaaaatagagggaaaaatagagactattggtatgttctccccatcagcgagttattgtaactggtcaccactggacgggaaggagaacagaggagagggaaagagaagcccaacctctgtgatcatatgagggccaaggctgagcagtgtagacagagaccctttgaaatgcatttgtctctcaaatagactagtaaacaccgacttctcctttgngttacaaacaccatttcaccttttcgggagagtcagagctaggatgtacaagaactgattctaaccagaaatccgcaagtactgtggacaagaatgcttaccatgctgcttcagccttgnagagacctaggttcttacacatatt

SEQ ID NO: 52148 - DNA, 818 bp, Homo Sapiens
caagccccaagaagccaccccctggcgagcggaggtcccgcagcccccggaagccaatagactccctcagggactctcggtccctcagctactcgcctgtggagcgtcgccgtccctcgccccagccctcaccacgggaccagcagagcagcagcagtgagcggggttcccggagaggccagcgtggggacagccgctcccccagccacaagcgcaggagggagacacctagccctcggcccatgagacaccgctcctccaggtctccataaattgtctttgggggattccaccacacccaatgctctggagccacaaggagtgtcccttcttccccagcagagccgtgggagggtccttgtctgctctcctttgaaccttggcagcccttggatggagggctccctttccctccccttttttttttctttgttcctgtaaaatgttaatctccgtgagttcttcctggttyatgttttctggggggtttggggtgggagggaatgcagatgggagttgggggaggggaggatacagttcaggataccccagcctggagtyagggccagggaggcatgtgccccacttgtatccagaagttcccaggggtgattgtgatggtggttkggactggaggttgtataaggtgttcttggaaggaaggggcaggagttggaattagttggtccctactgtcccccatgaggttgtgaacccctccccccaacttttcatgtttcttaaaggcattttggttttttaaaatctgtacagcaagagcaactttttctgtcaaataaaaatgagaaatgcaggaa

SEQ ID NO: 52149 - DNA, 765 bp, Homo Sapiens
  misc_feature (758)..(758): n is a, c, g, or t
cagacctcgtaggccctcttctctccccaccccaggttttatgccgtgtgcttttacctgctgatgctggtcatggtggaaggctttggggggaaggaggcagtgctgaggacgctgagggacaccccgatgatggtccacacaggcccctgctgctgctgctgcccctgctgtccacggctgctgctcaccagatttctgaggggagcacagctctatggatcaacactttcctcggcgtgtccacactgctggctctctggaccctgggcatcatttcccgtcaagccaggctacacctgggtgagcagaacatgggagccaaatttgctctgttccaggttctcctcatcctgactgccctacagccctccatcttctcagtcttggccaacggtgggcagattgcttgttcgcctccctattcctctaaaaccaggtctcaagtgatgaattgccacctcctcatactggagacttttctaatgactgtgctgacacgaatgtactaccgaaggaaagaccacaaggttgggtatgaaactttctcttctccagacctggacttgaacctcaaagcctaaggtggatggcttggacaatgaaaggatgctgtactcattagaatacaagattcctttactgtccctcaaccttgaccaaatgggaagcattcccccttgtcaacacaagctggcagatacatttgactctacagatgaaggtgaacaatggtaggataaaattgctttggatcntgcctgg

SEQ ID NO: 52150 - DNA, 467 bp, Homo Sapiens
  misc_feature (363)..(363): n is a, c, g, or t
ctggactcgtcattggtgctgtctacctctacagccttccccgaggtgcagccaaagccatagcctctgcctctgcctccgcctccgggccctgcgttcaccagcagcctcccgggcagccaccaccaccgcagctgtcttcccaccgtggagacctcatcacggagccctttctgccaaagttgctcaccaaggtgaagggttcctagccgctgggattgaagacattggcctggcctcgttctctcttcttgcccttggcccagctgggaccaaactctgatcagtattaggggtagagtgaggtagacactggactccctgtccccaccacccctgccccacccagggccaacatgactnagctctctcatgacccacctcagctcagccccccagcccctgccagctccacactatctcttagctgagtttttgcaaataaaatgtgttgtgtatcttgccga

SEQ ID NO: 52151 - DNA, 415 bp, Homo Sapiens
agaaggagaatcgcttgaacccaggaggcagaggttgcagtgagccaagatcgcgccattgcactccagcctgggcgacaagagtggaaactctgtctcaaaaaaaaaaaaaaaaaattcagtgaaatacacctttatatatgagatccaagtttcactttttgtgatataatgagccagttttctcagtaatgtctactaaaaaaaaagccattaacctttctctaatatttgcatgattctaataaaagtatgtcaacttcttaaaatgttttattgaaatgtggcattcctttgaattttatgacattaaaataatccacgacatggtacagctcttcactttttcagctttttaaatgtccattaataagtttgaatacgttaaaattatatgtttaacctcaacaaaata

SEQ ID NO: 52152 - DNA, 922 bp, Homo Sapiens
  misc_feature (922)..(922): n is a, c, g, or t
tcacgcgtccgcaaggctgggacagaagggaaaaggacctgcccaggaggagaagggaccgtgtgactatgtgaccataatccctacaaaaaaacacaaagtgttaagggaagacactgtgggtggcatgctcttgtgatgtagtcgtaggtcggtaaaagaccacttatgaatcaagtatattctgacaagtggaaaaggatatgaatgctctccagggtaaaattaacctcctttgcatttcattctcacattctcgcacaaaatgaattatcaagatggattttataatagctgattctctgaagaatccctgagactttgtatgattctttagtatagcagtggctttcgatgtgccaagtctacctcctcccatactgggacactcaagcaacacagatgtacacgggaattttgggtattctatactgagaatactgcacacatatcgttagtcatcttaatgttgtaacttaccaaactcttaaggtttgcaaatgtgattttgttggcatctagaaccagcgtattttttatctatgtctgacaaatatcattgtggggctttaacatgaaaaatcatggagctaatgcctatccatagatgaaattgttatgttcggaaaatgggtacttaatctttgcttcaataaaatgattattataaaaatgtttgaacaccatttcccctttccccccccctccccccctttccttttcccctcctccccctcctgctttccccctcctctttttcccccccctccgacttcctctgctacgcttactcctctcttgccctccccccccccccctctttcttcccttccccccccacatgccacccccccttatttaacccccccttcttcccccgaatcttatgcccctccccctcgccttctctttccttcctttn

SEQ ID NO: 52153 - DNA, 514 bp, Homo Sapiens
agctccctgctaggggctgccttgggtaaggaggcggccagctagcttctcacacaggccttctgccagccggctccaccgagggcccaggtccagcgcctcttttctcctgccaggaaaccgaatgcggtgctacaactgtggtggaagccccagcagttcttgcaaagaggccgtgaccacctgtggcgagggcagaccccagccaggcctggaacagatcaagctacctggaaaccccccagtgaccttgattcaccaacatccagcctgcgtcgcagcccatcattgcaatcaagtggagacagagtcggtgggagacgtgacttatccagcccacagggactgctacctgggagacctgtgcaacagcgccgtggcaagccatgtggcccctgcaggcattttggctgcagcagctaccgccctgacctgtctcttgccaggactgtggagcggatagggggagtaggagtagagaagggaacaagggagcaagggaacaaggccacat

SEQ ID NO: 52154 - DNA, 529 bp, Homo Sapiens
  misc_feature (415)..(415): n is a, c, g, or t
  misc_feature (468)..(468): n is a, c, g, or t
atcgtttgaccaggttactagctccaaacacaaaataccttccgtgtttcctagcgagagagtgcgtgcgagtgagcgagagggaagcgagtgggcgcacgggagagatggtgggtgaggaggcccgtgcggatggccgcaagaaggctgccatctgggttcttggcagcgtagcctgctgttatcagccgaatgattttgatttttgctttgatttgtactgtatcattgtgataatatccccggctggctctttttgagctgttatatggactgcttttgagtctgcgtttctctccacttgccctcctccctgccctcctccccctccccccgagttccccccacccccgcactcacgatttctgcccacccagagaccccaggcttggttcgggctctctttgggcacggnttcggtggaggcttcccgaggaacattttgtaaatggaattctgtcgtgtggncgtgtgacttgatgtttgtaccgcgattttggtaataccaagctttattaaacatatcgag

SEQ ID NO: 52155 - DNA, 583 bp, Homo Sapiens
cgccgtgtccaacaggagatcgacgacgtgatagggcaggtgcggcgaccagagatgggtgaccaggctcacatgccctacaccactgccgtgattcatgaggtgcagcgctttggggacatcgtccccctgggtgtgacccatatgacatcccgtgacatcgaagtacagggcttccgcatccctaagggaacgacactcatcaccaacctgtcatcggtgctgaaggatgaggccgtctgggagaagcccttccgcttccaccccgaacacttcctggatgcccagggccactttgtgaagccggaggccttcctgcctttctcagcaggccgccgtgcatgcctcggggagcccctggcccgcatggagctcttcctcttcttcacctccctgctgcagcacttcagcttctcggtgcccactggacagccccggcccagccaccatggtgtctttgctttcctggtgaccccatccccctatgagctttgtgctgtgccccgctagaatggggtacctagtccccagcctgctccctagccagaggctctaatgtacaataaagcaatgtggtagttcc

SEQ ID NO: 52156 - DNA, 577 bp, Homo Sapiens
  misc_feature (556)..(556): n is a, c, g, or t
tgaagaggtggagctgaaggatgtgggatggaggcagcctggcttagttgttgggtggttagggggttgcgaagcggaggagggtctgggaggctggttggctccacagctgtttcacagacattttgtttaattcttagagcaattttgtaaaatcagtgtcatcattcccctttaaccgttggaagacatgagtctgagttgaagttaaagagaagcttctgattctaagtcaagtctctctctgttgccttcctccgggcaggagggctgtgatgtatcctggcgagcctgggggcgatccagtcttaggaggtgggaggcctgcattgcagagagcagaggtgaatgggcctcccaggttgagcttgtgatgggcaagtagactggcacgggatgaggttggcagtggggagaggtaggatgcagtgcggggaaatgggcctttccacctgagaaaggcgagtgtgtctgcgtttgataatcctttgatatttgcgtatctgttattttcaagaatcacatttcacatagaaagccatgtgacagtttttanaaaaaaaaaaaaaaaaaggac

SEQ ID NO: 52157 - DNA, 595 bp, Homo Sapiens
  misc_feature (535)..(535): n is a, c, g, or t
  misc_feature (559)..(559): n is a, c, g, or t
gcgatcggtcatatcagctataaaaaaaatcaactgccagccaagaactttaaaactttaagctgtgtattatagaaccgttttgtgtagcattggaatattgtccattttgtaagtcattgtgaatgttcttaattatcagcttgaaggtatttttgtattaaaagttgacattgaagaacctaagtggatgatgggatttggggccagtagtgaaagtatgtttcctctaaaatatttccctaaacagtggtatacatggttattttattatgagatttgtatatgttctgtgtttctctgtgaacaatgtttcagtctctctgtcaccatatgtaaggggaagtccacaaatatagactacattgcacaaaactaaaattgttaattacaagaaaatataggtgcttaccttttgaaggtttattaatacatatgggttgtcacaatacgtatatatgataaatggtgtacatatacagatggtttatgggtgtataaaatttttcccatacccaattagaattatcctccnggattccttaatcaataacatgcnaattcccccttccaggtcccaaagggacagaatgcc

SEQ ID NO: 52158 - DNA, 923 bp, Homo Sapiens
cggctggaccggtccggatttttcgaaactgactcgttttctccctttctctttagaagccgcttctctgcccgagttaggtttcgcccagcgcaatttctttctctatgtactttgcgaataagtttcggagcatcggttaacagcctatgggtgaaatttggctttcattcatgaatgagaaattattcttgacagaagtattttaaaagaaaaatctttacgatggcctcagcagtacttagttctgttcccaccaccgcttctcgttttgccctgttacaagtggatagtggcagtggctctgattctgaacctggaaaaggtaaaggtcgaaatactggaaagtctcaaactttaggaagcaagtcaactacaaatgagaaaaaaagagagaaaagaagaaaaaagaaggaacagcaacagagtgaagcaaatgagctcaggaatcttgcttttaagaaaattccccagaaatcctcccatgctgtttgtaacgctcaacatgatcttccattgtcaaacccagtacagaaggattcacgagaagaaaattggcaagagtggagacaaagagatgagcagatggggagtaggaggcaatgaggaagtcaagaggaaggggatctgaagtactccatcttggacacatctgacatctgaaaatgtttgaagcagatcttgaaaaggcattgttactaagtaaactagaaatatgaagagcacaaaaaggagtatgaagaatgctgaaaatactttcaacctcagttcaaaagtttatgaattaacagagattaaatgaaggattccttcccggaaaaagaccggaccttcctcacggtattctcttaaaaagatttttccttccggaaagattcaccttgtagttaaaaagacctgaagggaattgtagtttccttttc

SEQ ID NO: 52159 - DNA, 752 bp, Homo Sapiens
gaaatagttaaaacataatgattccaaaggctgagaagcatgcagaaaaaattgaatctttattgctgatgggaatataaaactgtataccacattggaaaataatttggcaatttcttttaaagctaaacacacacatacagttagttaggcttagcaattgctgtcatggcctatttcatagaaatgaaaatttatgtgtagaccaaacctgcacttgactgttcacagaaattttatttgtaatagtcagaacctggaaacaactcacatgttattcaccaggtaaacagttaaataagtctgttatttccgtattgtgtaatacaactcaaaaattaaaaggaataaactactactatacaaataagccttagatgattctcaattctgaaggaaaaacccatttcaagttgtaacataatgcttatttttatgtatcttaatgtgatgaagttaaatagtttagagaacattgttcgtattcatctgttagggatggtagaagttagggttgtatgtgattataagactagtggaagggatacgtttttaatgatggatgagttctgcattctgattcatgcagtggttacaaaaatgtatacatgtgataaaatgtcatgtaaatgtgcacatttcaccaatgacaatgtgctggttgtgatattgtacaatgttaatgggaaatatcaccactggggaaaattgagtggtatgtggtaacggtactatatttgcagcattttgtg

SEQ ID NO: 52160 - DNA, 609 bp, Homo Sapiens
aaaaaacaaaatctagggctgtattttatatatatatatatatatatatatatatatatcttattggctctctgctttgtatttaaatgaagaatcttacatcttgggtaggtaaactgctgataaaatttgtgtacagtatgtacttacctaatgcagttgcattattacgtactgaaagatatgtgtttggaggtttatttccaggatgcatttgcttgttttggtcatggcagcagtgagttggtaatcctaaaccatcacttccagcagtattcatggtatagagctgatctgtgttcatatgttgaattgtgatagtagcaaacatgaacatatgaactattgttgctcttaatagaaatacaatataaatatgggcttgtatattttcttccttacatttaaatataaagtagaatacgcagttttattattttcaagaaaaagaaagagaagctgctgacctttctcccccataaagtttttcaggatgatcaggtcacagtgtgtacgtaagagtcagctaattatggatattgtcatctcggtaactttgtaaaaaaacaaacaaaactggcattgttaattccaaaaaaaaaaaaaaag

SEQ ID NO: 52161 - DNA, 744 bp, Homo Sapiens
ttgcagatgggtgatatataatggtaatagaatagcacagccagacttgcttcctgcatggtagggagagacacaaaagatgggaaactgcttttccacaaggaatctccgtagaattttgcggcgaccagatggtgcataggtctggaaggtctgatctcccttggtcttccatgggatggttagtgtggaggggagatatagattgtccggccgctttgtgattccatggattgattcagtcttctggatttttttttctttatattttgggtactggagcttttaaaaatgtttggtttcaggtatttttattcatgtgaagtgtatatgattctcttgagataaggttttaagctaaaatgttactccctgttttagtttctgaactctgacagattgacagggactttgctggtgtagtctttttataggttttataaaccacttgagcctatatcagtcgttttagtgtctgacctaatatttggagctatcagtgctttgttgatttagatgatgactcaagattttttctggtccatttcccatttccttttcttccctgacccccataccctcacccttaaaattctcctgtaactcaactaacaaaatcaagcctgattcaaaacatcctagggtgttttaaacacaccatctggtgccaaatgaagatttttaggagtgattactaattatcaagggcacagttgtggtactgtcattgataataatatagtt

SEQ ID NO: 52162 - DNA, 666 bp, Homo Sapiens
  misc_feature (582)..(582): n is a, c, g, or t
gctacaattacgagttgaaaaacactacttacgtatttgtatgacctattagtcagaggaaatcatacatatgctttgtaaatagactttgcagataactaaatagactgaagaaatatgttgcatttgatagaagcaattgcataaatatttggtttctatattagagtctgtgagtaaagtcaagtaataaacctaagtaggtataacagatttttaaaccttgaaacttgctttgatggtagagaaaatcattgaagatttacatactgtatataagatgtaaaatgtacgctgcttattaccctcaattttccagaagcaatggtatataatgcagttgaaaaaccaaaaatcttggaaaactaagacgggtcttgtttaaaatgtctctcagctttggcaaccttcaaatcttaatcaactatttaaagcattactgtgtcttgtagcctgcattccacaacagctctgttattcaggtaaaagacttgaactgagccgtttgggacctatactgtaatattttcattgaggaacaatatcctattttgtaaagcatttccctatgtgtgactttanactgtaaaattaaacactgcttttgtgggttcagtgggcataataacatataattgtaaactaaaaaaaaaaaaaaaaaaggac

SEQ ID NO: 52163 - DNA, 518 bp, Homo Sapiens
  misc_feature (338)..(338): n is a, c, g, or t
  misc_feature (341)..(341): n is a, c, g, or t
gttatgccactcagcaggacccgaccctggtatttacatattggatgtcaccccaaaagcccctgaccagggggtttccgggatgtaataagaatgccactctgggctttggaaggtgcaccgtatgcacacccatactatagggcaggggttagcatttcagacccctgttcctcccttgacaagcaagtgcttttctccagggaagacgttcaggttcattcatagatccattggtgccgtgggcagctcagtaacaatagctctgctgcctaccagctgctggtggaggtgttgagaatacctaatgaggaagtcagggcccctgcgtgcttcancanagctggatgcctggcatggcaatcaatggacacaaacctttggataatttccgtccttggcggtgtgttctatagcataggtatgaagtgggtgctctgggagctcagaagaggggcttttctcttaacttatgggtggccagggaaggcttcctggagctcaaatgactgagtgga

SEQ ID NO: 52164 - DNA, 497 bp, Homo Sapiens
ggagaaggggagtgagcggccgcccccagggcggagatccaggagctggcggccgccgatccgatggagaaggggggacccaggccagcaggagacaggacccccgaagctgaggccttgggatggagcagaagccggagtggcggggcacgctgccgccttccccatcacggagggtccagactgtccactcgggggtggagtgagactgactgcaagccccaccctccttgagactggagctggcgtctgcatacgagagacttggttgaacttggttggtccttgtctgcaccctcgacaagaccacactttgggacttgggagctggggctgaagttgctctgtacccatgaactcccagtttgcgaattatagagacaatctattttgttacttgcacttgttattcgaaccactgagagcgagatgggaagcatagatatctatatttttatttctactatgagggccttgtaataaatttttaaagcctc

SEQ ID NO: 52165 - DNA, 511 bp, Homo Sapiens
gaaaatattttaaaattgtatattactacttcaaatttagaactaagaaaaaaatgtatttgggattggtctcagcgctacctagaagaatcaaaggtcatggcttccctcaatattgtcccagccatttctcatatgtatatagtataaaccgtgacaaaacactgcctttatattatttagcaatatgttgtaaatagcattattaagctcttttttgtaataaagaccctttgatttgaatatagtacaataactgaactgataaagtcaatttttgatttttgtttgttttttttagctagaggcaatttcaattgtgaatttttgttgttgtctattgttctgaagactttgcataatttattggtttaatttatcctaatttatttgatgaaggtgtacaattttgtattaccaaggatgtactgtaatattaattgatatgataaacacaatgagactccctgtccatattaaaaagaaaataaaaaggtgcagtagacaattg

SEQ ID NO: 52166 - DNA, 685 bp, Homo Sapiens
  misc_feature (638)..(638): n is a, c, g, or t
  misc_feature (640)..(681): n is a, c, g, or t
tggtaacttccaggcctccttaaagctttagcctggactgggtagagcatggtttccactgcattctcttagtcacagtgagttgcaggttcaccccagcgtcagtggcgggcgggaagtggggatgacacaaggacctgagtgtccaagggggcttcatggagccctcatgtgaagtccccagcatggaccctgacacatcgtaggtcctcaacaaatgtcactccctgttgtcactctgtttagtactaagaataatgatataaaactgggacagtaaggaaaacacaaactgttgggacctatatctgaatctattagtctgcctaatagaaaagccaccatcaggattttggagattacaagctcactttagattagccatactggagtcagccctggaggctcccagagatcagaacaatcccagcgcttgacaggatggctgggaaacaatacatatgaatgccggaaaatgcagaactaatctaggaaaaagtgtaagaagaaaataaacatcatctgtcattctatctatcagagataactgctgtcaatattttggtttccttccaatattttttctattcactctgtgcataagtatgtatattttaataaaagtataattaagatcncnnnnnnnnnnnnnnnnnnnnnnnnnnnnnnnnnnnnnnnnnnaaaa

SEQ ID NO: 52167 - DNA, 735 bp, Homo Sapiens
tactcatgagttctaattgtgttccttttatttacagtttattccaatgcctgttctgtatggtgttttcctttatatgggagtttcctcattaaaaggaatccagttatttgaccgtataaaattatttggaatgcctgctaagcatcagcctgatttgatatacctccgttatgtgccgctctggaaggtccatattttcacagtcattcagcttacttgtttggtccttttatgggtgataaaagtttcagctgctgcagtggtttttcccatgatggttcttgcattagtgtttgtgcgcaaactcatggacctgtgtttcacgaagagagaacttagttggcttgatgatcttatgccagaaagtaagaaaaagaaagaagatgacaaaaagaaaaaagagaaagaggaagctgaacggatgcttcaagacgatgatgatactgtgcaccttccatttgaagggggaagtctcttgcaaattccagtcaaggccctaaaatatagtgttgatccctcaattgttaacatatcagatgaaatggccaaaactgcacagtggaaggcactttccatgaatactgagaatgccaaagtaaccagatctaacatgagtcctgataaacctgtgagtgtgaaaataagttttgaagatgaaccaagaaagaaatacgtggatgctgaaacttcattatagaattgaaccaagaggcattatacatatagatatat

SEQ ID NO: 52168 - DNA, 791 bp, Homo Sapiens
ttccagatggctatcctgcttcagtacaacacggaagatgcctacactgtgcagcagctgaccgacagcactcaaattaaaatggacattttggcgcaagttttacagattttattaaagtcgaagctattggtcttggaagatgaaaatgcaaatgttgatgaggtggaattgaagccagataccttaataaaattatatcttggttataaaaataagaaattaagggttaacatcaatgtgccaatgaaaaccgaacagaagcaggaacaagaaaccacacacaaaaacatcgaggaagaccgcaaactactgattcaggcggccatcgtgagaatcatgaagatgaggaaggttctgaaacaccagcagttacttggcgaggtcctcactcagctgtcctccaggttcaaacctcgagtccctgtgatcaagaaatgcattgacattctaattgagaaagaatatttggagcgagtggatggtgaaaaggacacctacagttacttggcttaacccttctggaagggtctgactgtgtgacccgcagcaaatagttcatgttggaaagaatgaaaacaactcaagttcatagcagccagcctgccgccattggacctcccttttaaaaactgagaccaagactcccatcagctggtctcggatttacatcggaactgctcaggattgatacatttcaagtctgtaaatacggacaccaacgccattttacctatttttagacagcggggaactgaccctcgtgcgaggctgcatgctacgcactagta

SEQ ID NO: 52169 - DNA, 547 bp, Homo Sapiens
gtaacttttgaaactagctcagatgctgaccgagcccgggagaagctgaatgggacgatcgtagagggacggaaaattgaggtcaataatgccacggcccgagtgatgaccaacaagaagacggggaacccctacaccaacggctggaagctaaatccagtggtcggcgcagtctacgggcctgaattctatgcagtgacggggttcccctaccccaccaccggcacagccgttgcctaccggggcgcacatcttcggggccggggccgggccgtgtataatacatttcgggctgcgccacccccaccccccatcccgacttacggagcggtcgtgtatcaggatggattttatggtgctgagatttatggaggctacgcagcctacagatacgctcagcccgctgcagcggcggcagcctacagcgacagttacggcagagtctacgcagctgccgacccgtaccatcacaccatcgggcccgcggcgacctacagcattggaaccatgtgaaaccttccaccgtttccttctcggaccatgaagg

SEQ ID NO: 52170 - DNA, 582 bp, Homo Sapiens
  misc_feature (2)..(2): n is a, c, g, or t
  misc_feature (462)..(462): n is a, c, g, or t
tngaaattcagggaattgaccccatagcttcagctatacaaaaccttaaaacaactgacaaaacaaagccctcaaatctcgtaaacacttgtatcaggacaactctggatagagctgcgtgtttgccacctggagaccataatgcattatatgtaaatagcttcccacttctggacccatctgatgcaccttttccctcactcgattccccgggaaaagcaatccgaggaccacagcagcccatttggaagccctttcctaatcaagacagtgactcggtggtactaagtggcacagactcagaactgcatatacctcgagtatgtgaattctgtcaagcagttttcccaccatccattacatccaggggggatttccttcggcatcttaattcacacttcaatggagagacttaagacacatttgaaaacagacatatcaagttctatgtgatgattttgnggtttttaatactataaatacttgattgtaaactaaattcaagatcatttataggaaaatctagtttcacagctatttgaatttttttctggatttactatataactcttattttttaaa

SEQ ID NO: 52171 - DNA, 609 bp, Homo Sapiens
  misc_feature (577)..(577): n is a, c, g, or t
  misc_feature (580)..(584): n is a, c, g, or t
  misc_feature (586)..(586): n is a, c, g, or t
  misc_feature (590)..(598): n is a, c, g, or t
  misc_feature (600)..(601): n is a, c, g, or t
cggtccggaattctcgggatctttgctcggacacactggaagcgagccttcaatgccacctcgttcctgcgccacatccggaagctggggcagatcccagagggcgagggggcctctgagcagggcatggcccgccacagccactcaggcctccgtgctggccagccccccaagtggtgatgcccagatgccgaggccaagtggactgacccccagatttccttcccttggatgctttcggtcccctcccccaacccctccccctggggctggcctctgctggattttgagatttgagggtgtggcgcatggcgctggggttggaatggggcacccccaagtctgtccccaggctctgccctgcctgggggcagtggctcccctcccctgttgcctctcccgcccctgccctccccgccccgccaaaagccgagggggtgctggcaggcgggcctcaggggctgtctttcctgcacggctgttgtgtgcttcgctgagtgtgggtggtcctgcttgtgtcatggtcatggccttccagccccctccagttttccccaaaccaataaagaaagatacngcnnnnnanaaannnnnnnnnannaaaaaaaa

SEQ ID NO: 52172 - DNA, 706 bp, Homo Sapiens
  misc_feature (84)..(84): n is a, c, g, or t
tttttttttttttttttagcttcagctgaactatcatcattgaaaagaaagaaaaagccaacctacgaggaacgggccatttgntgagtacaatgaaaacccaaaaggatacatgcttgatgatgcagatagcagttcattagaaatcctagaaaacagtgaaacaacaccaagcaaagacatgaaaaaaacaaagaagatttttctgttcaaaagagtcccctcaataaatcaaaagattgtcaagaataacaatgagccgctcccagagataaaatccataggagaccagatcattttaaaaagtgataataaagatgccgaccagaaccacatgagtcagaatcatcagaatatcccaccaacaaatacagagagaagatcaaaatcctgtacaatactataaatatatatttatgttttcacagtcaccaagtgtattgtaatgtatacttgaaaaatgttataacttatgaagtaaagtttctgatagtagtctttaaaagatataagacttaatatgttttattcagcttctataagtgtgaccagttttgatatttatttatgctaatatttttaacaagtcatttcaaaatatgtgtatctcaaattctccctaaagtgttgtggccttaactgttcagtattgcaacaaaaaatatatttttatatgtggaaaaaaaaaaaaaaaaaaaaaaaaaaa

SEQ ID NO: 52173 - DNA, 678 bp, Homo Sapiens
ttttttttttttttttctgttctcgtccggggatcccgagctgtcctgcagctgtaccctgagaactcagagcagttggagctgatcacaacccaggccacaaaggcaggcttctccggtggcatggtggtagactaccctaacagtgccaaagcaaagaaattctacctctgcttgttttctgggccttcgacctttataccagaggggctgagtgaaaatcaggatgaagttgaacccagggagtctgtgttcaccaatgagaggttcccattaaggatgtcgaggcggggaatggtgaggaagagtcgggcatgggtgctggagaagaaggagcggcacaggcgccagggcagggaagtcagacctgacacccagtacaccggccgcaagcgcaagccccgcttctaagtcaccacgcggttctggaaaggcacttgcctctgcacttttctatattgttcagctgacaaagtagtattttagaaaagttctaaagttataaaaatgttttctgcagtaaaaaaaaagttctctgggccgggcgtggtggctcacacctgtaatcccagcaccttgggaggctgaggtgggaggatcatttgaggccaggagtttgagacctgcctgggcaacataatgaaacttcctttccagggagaaaaaaaaaaaaaaaaa

SEQ ID NO: 52174 - DNA, 778 bp, Homo Sapiens
gggggcacacaccaccactcccggctaattttttgtgttttagtggagacggggttttaccatgttggccaggatggtctcgatcccccgaccttgtgatccacccaccttggcctcccaaagtgttgggattacaggtgtgagccaccgtgcctggcctgaaggtcatttttataaagatctctccacgtcttagatttgattcttcctttaaatatttttctcattgacatttgaaagcacctgaccttatataaaatgaacaattttcataactccataaaaggagaattatggcatcatctatttctttctcttgtctcataaatctaaaccatcaacctgcttatttttgtatactgtcacactgtgtattccctgcattgaatgcctgtctgttgacattatctgtaaaaattgtgggaagttttctgcaccctgaaatttctgttatgcggattaaatatccactatccatgtttttccaagtcttacagtagaaagggtaaatgcagccctcacagcagcctgttgttcgtcctgcaaatgtgtttccatcacattacacaaagcctctttgtcttcgtggttctaccctactaataagttttttaaaaaattatgtaaatgtgtgtatataccaatacctatatgtatgtggtgtacacataccagctgatatcctgctgagattatgtatggcatggaactatagaaattaaacttggtaatttttaagaaaaattaatattatttttggaaaaaaaaaaaaaaaaaa

SEQ ID NO: 52175 - DNA, 718 bp, Homo Sapiens
  misc_feature (6)..(6): n is a, c, g, or t
agaccntagatatgttgtatgctgtgatcttttgcagcctaatgtttgaagggagcatgatgcagagaggttttggtaaaatcattttagcccaaagctttgtgtaattttcctgcaactttgattttgatttctttctcaaatagacttttttaatgtttagaaaagttggaggtcaatttatgatgtgattcaagttttagatttatttgctattttcaaagttttttttaatagtcttctctttttccagcagagagagatcatcattgcctgaatttagctttgtgactgcaagagcaagaccagttcctgtctggagacgactgttacaataatatcatcctattattttatgttcactctttatcaatttgaacagatgtttacatgtactataattagcattttatctctacagttctctaagagtacatctgagtccaaagtgtatctgaatgtgtgctctgaccttattcttaaatgttttctccccatactttatagccatttattttttaaacaccttaagaaggaacgaaaaagttctcttggatgacgtatattcaagtctgagccaaattgaggattgtgtctaggaaatctgtaaagccatactactgtgttcattagcatgagcaatttaaaatgaaaatgaattaaaaagttaaacatgagttttggttttaattttgggggggatcttaagatatatttc

SEQ ID NO: 52176 - DNA, 2101 bp, Homo Sapiens
tcccaccttctctcccctcctctctgctttaattttctcagaattctctggactgaggctccagttctggcctttggggttcaagatcactgggaccaggccgtgatctctatgcccgagtctcaaccctcaactgtcaccccaaggcacttgggacgtcctggacagaccgagtcccgggaagccccagcactgccgctgccacactgccctgagcccaaatgggggagtgagaggccatagctgtctggcatgggcctctccaccgtgcctgacctgctgctgccactggtgctcctggagctgttggtgggaatatacccctcaggggttattggactggtcgctcacctaggggacagggagaagagagatagtgtgtgtccccaaggaaaatatatccaccctcaaaataattcgatttgctgtaccaagtgccacaaaggaacctacttgtacaatgactgtccaggcccggggcaggatacggactgcagggagtgtgagagcggctccttcaccgcttcagaaaaccacctcagacaccgtgtgtggctgcaggaagaaccagtaccggcattattggagtgaaaaccttttccagtgcttcaattgcagcctctgcctcaatgggaccgtgcacctctcctgccaggagaaacagaacaccgtgtgcacctgccatgcaggtttctttctaagagaaaacgagtgtgtctcctgtagtaactgtaagaaaagcctggagtgcacgaagttgtgcctaccccagattgagaatgttaagggcactgaggactcaggcaccacagtgctgttgcccctggtcattttctttggtctttgccttttatccctcctcttcattggtttaatgtatcgctaccaacggtggaagtccaagctctactccattgtttgtgggaaatcgacacctgaaaaagagggggagcttgaaggaactactactaagcccctggccccaaacccaagcttcagtcccactccaggcttcacccccaccctgggcttcagtcccgtgcccagttccaccttcacctccagctccacctatacccccggtgactgtcccaactttgcggctccccgcagagaggtggcaccaccctatcagggggctgaccccatccttgcgacagccctcgcctccgaccccatccccaacccccttcagaagtgggaggacagcgcccacaagccacagagcctagacactgatgaccccgcgacgctgtacgccgtggtggagaacgtgcccccgttgcgctggaaggaattcgtgcggcgcctagggctgagcgaccacgagatcgatcggctggagctgcagaacgggcgctgcctgcgcgaggcgcaatacagcatgctggcgacctggaggcggcgcacgccgcggcgcgaggccacgctggagctgctgggacgcgtgctccgcgacatggacctgctgggctgcctggaggacatcgaggaggcgctttgcggccccgccgccctcccgcccgcgcccagtcttctcagatgaggctgcgcccctgcgggcagctctaaggaccgtcctgcgagatcgccttccaaccccacttttttctggaaaggaggggtcctgcaggggcaagcaggagctagcagccgcctacttggtgctaacccctcgatgtacatagcttttctcagctgcctgcgcgccgccgacagtcagcgctgtgcgcgcggagagaggtgcgccgtgggctcaagagcctgagtgggtggtttgcgaggatgagggacgctatgcctcatgcccgttttgggtgtcctcaccagcaaggctgctcgggggcccctggttcgtccctgagcctttttcacagtgcataagcagttttttttgtttttgttttgttttgttttgtttttaaatcaatcatgttacactaatagaaacttggcactcctgtgccctctgcctggacaagcacatagcaagctgaactgtcctaaggcaggggcgagcacggaacaatggggccttcagctggagctgtggacttttgtacatacactaaaattctgaagttaaaaaaaaaaaaaaagg

SEQ ID NO: 52177 - DNA, 417 bp, Homo Sapiens
aaaaaaaaaaaaaaaaaaaagagttgttttctcatgttcattatagttcattacagttacatagtccgaaggtcttacaactaatcactggtagcaataaatgcttcaggcccacatgatgctgattagttctcagttttcattcagttcacaatataaccaccattcctgccctccctgccaagggtcataaatggtgactgcctaacaacaaaatttgcagtctcatctcattttcatccagacttctggaactcaaagattaacttttgactaaccctggaatatctcttatctcacttatagcttcaggcatgtatttatatgtattcttgatagcaataccataatcaatgtgtattcctgatagtaatgctacaataaatccaaacatttcaactctgttaaaaaaaaaaa

SEQ ID NO: 52178 - DNA, 648 bp, Homo Sapiens
  misc_feature (401)..(401): n is a, c, g, or t
tttattcttactctaaaattattctggctttacattcagtttaagtggttaagtgaaacagtttttagggtgcaaaaattattttcccactgtttttctcatgataatttgagtctcctgagctataatttctgaaggatttttactactttggcattatgtaatctgatctctgtcacaatgatattaaataagaactatctcactttcatatgtttgcttcataaaaggatatggaatgtacacatcagctttttttttttttttaaactagcatcaacctataacttggtataaacttcccaagtatttagagaatagtgctggtgaaaatttaaataggataggcatatagaaattatgacttgtattgagtgatgtcctttcaacctaggactagngacaaccttcattttttcagagctgaagaaaaaaccgtgaatttaagatcatatttattggtgcatgtaagccattatcctgtcttaatgaaccgattaatgctgttgattgttgaaatgtgaaatgtagtcactgttgaccttgtaaatatctgccagagatgaaaaaatattttaagttattgtaaataaagatgtataaaattcagtatcagtctgcaatgcagaaacatatcttagatgttaa

SEQ ID NO: 52179 - DNA, 557 bp, Homo Sapiens
gaaataatgattgtacttgttaattctgtattggtctttggaatcaagggtttctgaacctgagataagcagcttttttgtttcataaaagctctagtcatttttctgtgttgaaagtggaccacagtaatgttcatggatttgttggctgaagcacttccatgtggcttagaagcttagcagacacggcacctccgcctttgtgaactgtcattggccactctgcaaatcctggtggtgcagtagtttagaactgtgtagaaaagatctggttgtagaggacaggaggctgatccagaggcgtctagtcacttgcctgaatcacagctaaaaagcagcagacagaatgaggactcacagctcctgatttattttttccttttgtttaaagcccagtgtattgaactgggcagtcagcatggtatttactgttttatattgtccaggtaagaaacctggagcttattgggagcagaattacaaatataagcaatgccaaccttccctgcaccttagcattacctttaatagtgtcaaaaaaaaaaaaaaaaaaggac

SEQ ID NO: 52180 - DNA, 889 bp, Homo Sapiens
ccaaagtggtctgggaaggcacctgggggttgtgatcggcatcttggtggccgtcgtcctactgctcctcctcctcctacctcctcttcctcatcctccgacatcgacgtcagggcaaacactggacatcgacccagagaaaggctgatttccaacatcctgcaggggctgtggggccagagcccacagacagaggcctgcagtggaggtccagcccagctgccgacgcccaggaagaaaacctctatgctgccgtgaaggacacacagcctgaagatggggtggagatggacactcgggctgctgcatctgaagccccccaggatgtgacctacgcccagcatgcacagcttgaccctcagacggaaggcaactgagcctcctccatcccaggaaagggaacctccagctgagcccagcatctacgccaccctggccatccactagcccggagggtacgcagactccacactcagtagaaggagactcaggactgctgaaggcacgggagctgcccccagtggacaccaatgaaccccagtcagcctggaaccctaacaaagaccatgaggcagatgctggggaactttgggactcacttgattctgcagtcgaaataactaatatccctacattttttaattaaagcaacagacttctcagtaatcaatgagttaaccgagacaaactaaaatcagaagtaagaatgtgcttttacactgaatcacaatataaatattacacatcacacaaagcaattgcaaaagtacaaacaccaaatgaacaaagtaggaaacgaaaaaacaaaaacctagaacggcatgcaacgtgggcatacgaataaggacattcgaacacaggaataacccatctttctccaacgaaaggt

SEQ ID NO: 52181 - DNA, 750 bp, Homo Sapiens
atggaactacctcattcggcaaattagccccaaatgagcgctgaatcgtgtcccatgagatcaggcgccatctgtaaagtctcctctggaaatgccaatccatccttcccccagctgcttcctcggggaggcccctgcccccaccctgccagcccttcccagtctcattagaggaagctttccaaagttctcagttatcaagacctcatccagctcgtccaaaggcttcagggatggaaacaaaccagctcgtctcagaggccagcaagctggggcctgtccgccacggtgccctgtgcacctttgggctgccctggcccccactctcccgggccgcccaccacaggctcttaatggggccgggtcagtcctacatgtgagatgggttagggcaagtctttgccatcccccagatggctctgtcttcttgtgtatggcagggctgggactgctgtcccttgtacagttttctgtcactggtgggcactggacaggcatagcagactctcttgtggccacactaggttgtcgcctttcaggcagtgtcccgccacctttgcttcccgctccttctggacattccagagccctgcaccaaacccttacttggtgtctgcacctcctttccctctctccatcttccaatccctggaaaagtctggtctgagtgtgacttgggaagctttcagtgctgctgtttggcccagctcattactttctccctttctctaccacagaaacacattctcc

SEQ ID NO: 52182 - DNA, 624 bp, Homo Sapiens
cccacgcgtccgcgagtatgtggcctgggccccctccatcggcctgcccaccagcaccatcgccagctgctcccaggatggtcgtgtgttcatttggacctgtgatgatgcctcaagcaatacgtggtcccctaaattgttgcacaagttcaacgatgtggtgtggcatgtgagctggtccatcacagccaacatcctggctgtctctggtggagacaataaggtgaccctgtggaaggagtcagttgatgggcagtgggtgtgcatcagtgatgtcaacaagggccagggctccgtatcagcatcagtgacagagggccagcagaacgagcagtgacaagacaggtggggcctggctccccacccgccagctccaggactgccccttcctgggccaactaaccagacaactgggaagagcccccaactccaacaggattattttcccaggaggagttacagatgcagccacagattgatcatctgccttaacgtgatcggagatgctttgtaatctactgtccagctgaaagcactcatgttacgaggaagaaactacaagtgatgttcaaatctattttgggtcatttttatgtacctttgggttcaggcattatttggggg

SEQ ID NO: 52183 - DNA, 242 bp, Homo Sapiens
  misc_feature (121)..(121): n is a, c, g, or t
tttttcaaaagtgtgccatatctacagcttccagcagtgtgtggcgagtgcgttacttttctatactctcactcagctggctgacatttaaaaacatcttttaaatatttattcctttttnggccaggtgcaatggctcatgtctctaatcccagcactttgggagactgaggtgggcagatcacttgagctaggagttcaagaccagtctgagcaacatggtgagagctcatctctacatt

SEQ ID NO: 52184 - DNA, 638 bp, Homo Sapiens
atgaaatggtctttaatatttccacaataatcctggtgctatatttgttttaatgaaacaaagtaactctatacacttcaagactttacaggattttttaaatcctgtattgttggatcaattaataaagatgcaaaaaaactttatagagatgtaaaaacaaaactataatggatctcctatttttctttaaatacaaaaaaaaaaaggtaaatgaactattctccttgtaaagctaaattccccattctgtctaataaaggaagactgaaaaaaggttttaaagaacataaatggaaagatacaaatgctttgaaggaataaacgaaatgttaaaacagggtcaatccatttgaagaaaaagttggacaaaataatcagcattgctccctcttttatttaatatttgggtactgattatatccacatggaagtagaaggtaaggagtttaggaaaatactagaatctactctgcttacattcttgtttaagtgtttacacagtttggttcaattataaacatttggccttttactatgttatttttattttgtatgaatacattatcctccttatttatttttgttacatttattacttatgttattttgttatgcatttacaactccatttttaa

SEQ ID NO: 52185 - DNA, 632 bp, Homo Sapiens
gatggcaaggttttcaaatgataaagaacatttcagtttaaacaatgaacggaatcaatcatggatcttaatgttaatgcagcaattttttcacgggcagtaaacaagaatgattgcatttaatagctctatacagtcacctcttgattatctatgttaatggaatagaaatgataactataatattacagtaatttgtcttttggttttgtgtaagtattttgctcttaacttggatgtagctgtgggggattctcagttaaaaaagtgagattgttcgatggagactaggaagagaaagtgtactccctatctgaagtcactcatctgtttcttcccattccttcttggcgaatgttaagaactgaacatttggcgtggacactagctacatagtagattaattatagagagttgttggacactggaaacatttcggtgttttggtcctttgtggacatttactttgtattattgtcctcttaacaccaaattgaagtataatcaaactgctatatgaagaagggcctagaaaatgtggaggttttacactacttgccctgctttctatatctagtttaagctgttaggactcaatggctctcatttgaccataataaagcatttgatta

SEQ ID NO: 52186 - DNA, 832 bp, Homo Sapiens
tccgagtcgacttgctcaaagcggtcatcacagaggccgtctgctcctttctcttccacagcgctctgctgcacttccaggaagtccgaaccaagcttcgtatccacctgctggctgcactcatcacctttttggtctatgcaggaggaagtctaacaggagctgtatttaatccagctttggcactttcgctacatttcatgtgttttgatgaagcattccctcagttttttatagtatactggctggctccttctttaggtatattgttgatgattttgatgttcagctttttccttccatggctgcataacaaccatacaattaataaaaaggaataactgttccaaagactcagactaacatacaggacagtccagctggatgtgataaagattttatcacctcatatggaaaacaccggctgcactggattcatcagtgttaacttcctttgaggaagctgccttatagttttcatcactgggactttaaaaaaaaattactgtgaaaatgaggtattctgtacttctcagttaagacttgttctttgagtgatgtattaaatgctgctagaaaagcctcattacattaaatataaatcaatcttaaatgataattgttaactttgatgaaaaacgagtacaggatgagaagggaagtaaaggtgatagtaagatcaacgaatttgtgtatcaagtgtcacccaaatgaacagaatttttaactataaaagtacaaggcgtcaacttacagaactggggagaggatactttcagccaccacctcacaaaatgataccatcaagcagtgtcatctttcaacaggaaag

SEQ ID NO: 52187 - DNA, 945 bp, Homo Sapiens
  misc_feature (9)..(10): n is a, c, g, or t
  misc_feature (16)..(16): n is a, c, g, or t
  misc_feature (20)..(20): n is a, c, g, or t
  misc_feature (33)..(34): n is a, c, g, or t
  misc_feature (882)..(882): n is a, c, g, or t
gtgaagcanngttctncctnccccttccacagnnccttaggccacacaaactgcaaattggtaagcagcaccttaatacctcttgtgacagttacggctgaagtggcagggtcaagcttgtaggtgttggcatccccctttttatatcggtcccggaagacatagatgctcccgttacagctggcaatcttccagagggatggggcagagctccaggcctcaggaaggcaaagccgggtgaagctgtctagcaagggattgtagcacaccagggagtccccttcagccacgatgaacaccagatctttatgcacagctgcgtgcatgcggcctgcaaagggcagcacatagggcttcacatggcatttgtctgtctctgtgtcaaagcactggatgagtcgggaaggtttggtaaagaagtccagatcattctcctccccccctagtaagtagatgatcccgttgaggttggcaccagcagcccctgacacagccacctctagctgagttgtctctgtccacacattatcacctacgcgataataaatgactgcgttggagagggtatcttgcagtgtcttgccacccagtgaatatatggcatctttcccgggcacagacaccagggtgtgctggagccggtcccgaggcaaaggagcacaccactcccagtcaacggtggcattgttgcacttccacatgcgccgtgggatggacccctccaccacatacaagtctccaccatgcttgcaggccgcaatgatctggtgggcacaactgttttggccacttacactgatggagtcatcttctgcacagtgccaggacacagccaacgagtgggtacgagatgactctttcccatccagtaatggggaccancttcccaatttccttaagctgtcctggatgactctggaaaacctctctttcctcttatttaag

SEQ ID NO: 52188 - DNA, 650 bp, Homo Sapiens
  misc_feature (588)..(588): n is a, c, g, or t
  misc_feature (590)..(590): n is a, c, g, or t
attttactttgctgaattttgtgggtaatttggtggatatatcctgccttatttaggattatagctggataagaaaattgccttttcattgtaagtgcccagttttggtctctagtttgaaggtactacatactgccgataaaggaaaacactcccctacaccctagtttttgtgttaccaagaaaaaaaaaacagtattggtttcatagtaggactcaaccagaattggtcctacatatatgtgagtgttcagtttttgcaaataaggtttttgagtgtgataaaacactacataagtgctaagtgtattgagaatttgctgctgattgtatttataacaattacttgacgtttgcagaaatttagcactttccctccaaatttataggtgtaagataagcgggggcaaggtgcaccacattttaaaactgcaaatgtgtgaaaatttatttagagattcagattcctaaaatgaaatttcaccacctaagtcatgcacttcttagccttttacaagccaacagactgacatgaagattgtcacagttcctaagattagcacatatcaaaaataaactttataattnanagccgcgtttacacttgtgactggccctgcgtacccacttatcgcctgagactccctttt

SEQ ID NO: 52189 - DNA, 552 bp, Homo Sapiens
gcgccgtgtgcctggaattcgggactgctgctgtcctcccttcatttctgtggaccttggaggctttggctttgtggcagggcctccccaggcagctctgggacctaggagtttgcttctgatagggtcagctttcccatttcccttcaatgcttgggaaccttctcccttagcttcacacttgccatttcaagccctgctgggaccttgtggcttggctggaatccaggactgtattttcatggagaagaacctgcagattcttccatcctcagctggccatggcccacagctctgcatctgcatctgagcttctcaggactcctggagcatggggggaatggggcggggccactgctctgtgctgacgggctccgtctcggagattcttgtcctgttttttttctgttgttttttttggctggtgctggggacaagcctgtgcctgccaaagctcccaggccaagtttgggggctggtgtttggggttgggtttggggttcaggatgctgcagtctgtgcaataataaacccgcatctgctcacggaaaa

SEQ ID NO: 52190 - DNA, 652 bp, Homo Sapiens
taatcatggtagaatgtgctagcaagtgagtttgtcttacatggaagagttctgtgttcaagggctttcggccagtggcattcctaaacacagtgttaaaggcggtagggaatgtgaaaagtatgacatagttcctgctctcaacagcttgtaattttagtattattatcgtaagctcaattgtaggtactacttcttttctggactttcaggtgcttattaccgtgcaatttagtggtatgagttgaggactaatgtttctatatcacatcctgataatctccacagttatgaaaactaaactatttcccctccctcctacacttttccccaactttattttaatggaattgtttggatttcttgattgttttgtaatagtgggacacagcaggccaggaaagatttcgaacaatcacctccagttattacagaggagcccatggcatcatagttgtgtatgatgtgacagatcaggagtccttcaataatgttaaacagtggctgcaggaaatagatcgttatgccagtgaaaatgtcaacaaattgttggtagggaacaaatgtgatctgaccacaaagaaagtagtagactacacaacagcgaaggaatttgctgattcccttggaattccgtttttggaaaccagtg

SEQ ID NO: 52191 - DNA, 852 bp, Homo Sapiens
  misc_feature (573)..(573): n is a, c, g, or t
  misc_feature (688)..(688): n is a, c, g, or t
tttaggagtgtttacagcctttttcatacctaaataggatgaacagtagatataaacttgccaaggcagaaatgtgttgataaatcaaaatgtgtatttgtggagggttgtgcatctcttggttgcagcttgctaaataggccatttaggaatcttctttcaatgcttttttcttgagcactgcctggggtggtgaaaaagcagagggcaagcctttgtctgacgccaaaaatgtcttcagtgaagaggccaagaggaaggcctccatcttccaagaagagcgatggttctgggacatatactaagttgcagaatacccaggtgagggtcatgtctgagaagaagcagagaaaaaaggtggaatcagaaagcaagcaagaaaaggctaatcgtataatatcagaggccatagcaaaagcaaaggagcgtggggaacgcaatattccacgagtaatgagccctgaaaactttcctactgcttcagttgaaggaaaagaggaaaagaaaggtagaaggatgaaatccaagccaaaggacaaagacagcaaaaaaacaaaaacatgttctaagttnaaagagaagacaaaaattggcaaactcattattacattgggtaagaaacaaaaaagaaagaatgagtcttcagatgaaatatctgatgcagaacagatgccacagcatacattanaagaatcagactctcaaaaaagaagatcaaatcgacaaattaaaagaaaaaaataccccggaagatatagaaggggaagcaaatctgaagaagaggttaaaaggttctaatgaaaataaaaaagaaattcagctcccttttacctggtgaacaagccttttaca

SEQ ID NO: 52192 - DNA, 1140 bp, Homo Sapiens
  misc_feature (638)..(638): n is a, c, g, or t
cccgggaatcgtcgaccacgcgtccgcattgttcttgcttcatggacaagaggcagccagagagagtgccagggtgccctggtctgagctggcatccccatgtcttctgtgtccgagggcagcatggtttctcgtgcagtgctcagacacagcctgccctagtcctaccagctcacagcagcacctgctctccttggcagctatggccatgacaaccccagagaagcagcttcagggaccgagtcagattctgttttgtctacatgcctctgccgggtgccggtattgaggcacccagggagctgttactggcgtggaaataggtgatgctgctacctctgctgctgcactcacagccacacttgatacacgatgacacctccttgtttggaaacatctaaacatctagtagatgacttgcaggctgttggctaccagtttcctgtctgaggtgtatatgttaacttcgtgatcagtttgtatgtttgggactcttgtcctatgtaaagttaaggtgggccgggtgcagtggctcacgcctgtaatcctaacactgggaggccgaggcgggtggatcacctgatggtgaaacctcatctctactggaaatacaaaaattagcctgagtggtgaaaacncaccccgacgccttcgcctccaccgcccccctcccgccccttctttcccccttttttccgccccacgggcccaaagggggggggccgcttctaagaaaaatcccctcgcaggggggccccaagtctatacgcggtacaccccgctctttcttttgtcaaaaaagggggtgcccctcaataagcggaggtcggtaacttatgaagactaaggaccctgggcccgcgccctttttacaccaccctcgtggaattggcgaaaaaaactgcccgagcttgtgggaaactttttgtgggagaggaaccccttacttttcggggggggggcgcacaaatttggtgaccaacctccgccccccacagaatttcgaggccccccgaggggaccaaaataaacactcttctcagccgacacattgcggctaaaacaaacgcaccgacaaaatacctttcgcgcgcggttgagaaccattttccccctccacacgggcgccacatgtccttc

SEQ ID NO: 52193 - DNA, 611 bp, Homo Sapiens
cagagtgtagcatactgtagaccctaattaatatttgttaaagtggaaaagaaaaaccaaactccttcagcttagaaacccaatgaaaagatgtttcttttcataatgaaggcaccatttcactagggattcaagatccatacagaagtgtgctatatctttagaaaaaaaaactttttcagacaatttttccaagtttgtgcctgtcgtcatcatggtgatggtgttggggctggtgaaacactgcccactgcatcaattccagagtaaaaactagattgaatccaaaattttctataaattagtgttgacctttactgagttctgagatcaatattaattactgctgtgctttgtaattataaaagggctatttgatgtttcacaccaaggatatgggtggagagagaaaagaacttgtattaacaccatctgtggtttctaactttgtaattaaggccaattcctctgtggaacattttagttattatatatcatgattattcggtctattaatatccagggaagtaccacagtttgagagccattcattctggtttacttggggagtcctattctatacctgttttgctggcataattattaaaagc

SEQ ID NO: 52194 - DNA, 563 bp, Homo Sapiens
  misc_feature (262)..(262): n is a, c, g, or t
  misc_feature (525)..(525): n is a, c, g, or t
gcaacctggaggcacagctgctccaggtgcgcgcggacgcagagcgccagaacgtggaccaccagcggctgctgaatgtcaaggcccgcctggagctggagattgagacctaccgccgcctgctggacggggaggcccaaggtgatggtttggaggaaagtttatttgtgacagactccaaatcacaagcacagtcaactgattcctctaaagacccaaccaaaacccgaaaaatcaagacagttgtgcaggagatggtganatggtgaggtggtctcatctcaagttcaggaaattgaagaactaatgtaaaatttcacaagatctgccccatgattggttccttaggaacaagaaatttacaagtagaaattattcctttcagagtaacatgctgtattacttcaatccctatttttgtctgttccattttctttggattccctattcacattgaatcctttttgcccttctgaaacaatattcagtcacaagtcattttggtcatgttggtctttgtaacanatcaaaattaccttatatccttctggacctggagtagt

SEQ ID NO: 52195 - DNA, 1002 bp, Homo Sapiens
  misc_feature (36)..(36): n is a, c, g, or t
  misc_feature (41)..(41): n is a, c, g, or t
cccgggatgagggggcgagcgaccgagcgccgcgancgcgnaagtgaggtgcgtgcgggctgcagcgcagaccccggcccggcccctccgagagcgtcctgggcgctccctcacgccttgccttcaagccttctgcctttccaccctcgtgagcggagaactgggagtggccattcgacgacagtgtggtgtaaaggaattcattagccatggatgtattcatgaaaggactttcaaaggccaaggagggagttgtggctgctgctgagaaaaccaaacagggtgtggcagaagcagcaggaaagacaaaagagggtgttctctatgtaggctccaaaaccaaggagggagtggtgcatggtgtggcaacagtggctgagaagaccaaagagcaagtgacaaatgttggaggagcagtggtgacgggtgtgacagcagtagcccagaagacagtggagggagcagggagcattgcagcagccactggctttgtcaaaaaggaccagttgggcaagaatgaagaaggagccccacaggaaggaattctggaagatatgcctgtggatcctgacaatgaggcttatgaaatgccttctgaggaagggtatcaagactacgaacctgaagcctaagaaatatctttgctcccagtttcttgagatctgctgacagatgttccatcctgtacaagtgctcagttccaatgtgcccagtcatgacatttctcaaagtttttacagtgtatctcgaagtcttccatcagcagtgattgaagtatctgtacctgcccccactcagcatttcggtgcttccctttcactgaagtgaatacatggtagcagggtctttgtgtgctgtggattttgtggctyaatctacgatgttaaaacaaattaaaacacctaagtgactacacttattctaaatctcactattttttggtgctgttgtcagaagttgtagtgattgcatcatawatawagattttargggcttttatga

SEQ ID NO: 52196 - DNA, 562 bp, Homo Sapiens
cggtgccgcaacgcgacggccgaggtgcggatgcgcaccttcctgtccccatgcgtggacgactgcgggccctacggccagtgcaagctgctgcgcacacacaattatctgtacgcagcctgcgagtgcaaggccgggtggagaggctggggctgcaccgacagtgcagatgcgctcacctatggattccagctgctgtccacactcctgctctgcctgagcaacctcatgtttctgccacctgtggtcctggccattcggagtcgatatgtgctggaagctgcagtctacaccttcaccatgttcttctccacggtatgcggtggtgtctgcatcttatcactgggtgcttgtgcatggtggtgggtcacagtctgtatttccaccacgttctccgagggtttgggaatgtctgtgccttcactgtgtcttctacagacagagacagcagtgcttcccaaactgtcatgcatagataatggtcatttttgtaagacacatggagtaaatgaacaaaactgtttgcaacttaataaagtaagtttgggcctcaaaaaaaaaa

SEQ ID NO: 52197 - DNA, 506 bp, Homo Sapiens
  misc_feature (88)..(88): n is a, c, g, or t
cttcctgaaaaggaaagttatcggaggaatccaggccaaacaacaagtagaatagagccatctaaagttattaataatgagttcaggnaaatagatgaattttttcctggcatagtcaatatttatatctcacaacaagtcaaaaataattttccatttggaaaacaaaacacaccatgactgtaattgttaaggcatataatcatgaacttcacatgctccctcaacaaacgttactgctctagggaaatcatagaaaaggaccctcttattccccaggggatcaaagcaagtccccttaggaatttcatgtgtgccatgggtctgtttttatttcacagtgactagtcatatactggagtagctctgttgttcattatttgtaacaggtccatgtaacagtcaagttagcattcaagcaattatggatgtgatactatgatgtactttcgttatgattgtatatgattaataacaaagttatttttcttaaaaaaaaaaaaaaa

SEQ ID NO: 52198 - DNA, 499 bp, Homo Sapiens
gtcgtttttctgatacaacaaaggataaggtttagaataatagtatgtcacaatatctttaagaacagcaggtgcagtggctcacacctgtaagcccagcattttgggggttcaaggcaggaagatcagttgaggccaggagttcaagaccagcctggactgcatagcaagatcctatttgtacaaaaaaatgtaaaacttaaaattgcacaaaatttgtcacctgtaccagcttttagaactgtttatcttatcctcctcagtgatacatcatgaagttgtgtgctttgcctaacatgcccagttacctgaaattgtataaattcttgccaaaagtgtttgaacttaatacaaacttcccatctcttacctcttagcactgtgctcatcttgaggggacatagtcccaattttgtattttatataatactgttagtgaatatgtgtagacttcatatggttgtgggtaagagaatactggcttcagatagaaaagatg

SEQ ID NO: 52199 - DNA, 749 bp, Homo Sapiens
gtgggttgtggcgcttcctctctctgtgtgggaccaggacagtggcttaagtctccactccaggaaagaatcaaagtttctagagttgtgagaaaaccagagagtggctgtcctgattcttcactgtgaggggcgttcttcatgttctcccagctgttccaagactgggccgtagaattccatgtttcaggagcctaagaccctcccagagcccaggggcttcaccgcagaccccaagccattgagcacatcacccaaagcagtggccaacatcgcggacccctgtgccttgtcacagatgggtgctggtcctcaggcgttggggacactgctgggtcgatggggtcggattctgccagtttctgctctgcagccaaagatggtcagaagcattgtcacttcagtaacatcaagtgctcaaagacatggcaaccgttcagtggtacttaagtattcaaaatatacaactacagattctctgacagaaaccagcacggggtcttcaccttcattcaccccacaggcgacatgcgagggagaacagcatctcagtggtgatttccaaaccaagcctttgttttcggtgtggggttttgggggtttgctttaatgtttttgaaattgtaaatgttgggctttttattttgatgtaaactgagaataatggcattttagggcctgtgaccaaaaatgaagcttgtaacgaccatggatctgaataaacatgtccttgcttctgaaaaaaaaaa

SEQ ID NO: 52200 - DNA, 1061 bp, Homo Sapiens
  misc_feature (976)..(976): n is a, c, g, or t
gccaagcacatggctgcacacggtgtgggaagaacttctcgtctgctagcgctcttcagatccacgagcggactcacactggagagaagccttttgtgtgcaacatttgtgggcgagcttttaccaccaaaggcaactcaaaggttcactacatgacacacggggcgaacaataactcagcccgccgtggaaggaagttggccatcgagaacaccatggctctgttaggtacggacggaaaaagagtctcagaaatctttcccaaggaaatcctggccccttcagtgaatgtggaccctgttgtgtggaaccagtacaccagcatgctcaatggcggtctggccgtgaagaccaatgagatctctgtgatccagagtgggggggttcctaccctcccggtttccttgggggccacctccgttgtgaataacgccactgtctccaagatggatggctcccagtcgggtatcagtgcagatgtggaaaaaccaagtgctactgacggcgttcccaaacaccagtttcctcacttcctggaagaaaacaagattgcggtcagctaagggagaacttgcgtggaaggagcaatgcagacacagtgaaatctctagaatctgctttgttttgtaagaactcatctccctcctggtttctttttcttactgatatgccaaatgatgttaactacgttgggttgtgaccacaccctccagcaagtgctacaatcccgaattggtggctatgctgcctttgccaaaagttgaaaaaataaaacaaaaggggcgggccgcctccaaaatataccccttaaaggggtcccaacctttacgcgaccccccgtttttctttgcacaaaagggggccccctattagtggcgccgcccctcattaaccccccgcccttgtggcccgcccctcttgattatacctcctgcgagctgggggtaacacctcgatcagtccttcgcgcatatanttttctcgctccgcacaattgttctcccctcccgccgagtcgccgcgagcgcagcttgtgtgccggcgtatcccctccacctccc

SEQ ID NO: 52201 - DNA, 502 bp, Homo Sapiens
cgagagctgcttccatctttccatgaagtctcagtttacccaaagaaggagcttcccttctttattctctttactgctggattatgttccttcacagccatgctggccctcctgacacatcagttcccggaacttatgggggtcttcgcaaaagctttcctcagcactttgtttgcccccttaaactttgtcatggagaaagtggagagcatcctcccatccagtctgtggcaccagctaacacggatctgagagaagccctgtcctccactcacctcacccgccgctgccaccatctcctctgtgccaactccttgtggaccgcaagaaagcatgactttgaaaaagggaagccattccgagattttaaaatgttcatggactattccatattaaaagctgtttttgttgtacaaaattcactgatgttcagttctattttattttgccttcagaaaagaagaaagtcaaaaataaaacttttgtgtattacagcaaaaaa

SEQ ID NO: 52202 - DNA, 568 bp, Homo Sapiens
  misc_feature (9)..(9): n is a, c, g, or t
  misc_feature (542)..(542): n is a, c, g, or t
tttaaattnctaatttgagtgggcggtggcgacttggtgttggcggtctggctcagctgggcagggggtaactttactgatttgggggtggtttttagtttaatttttcttttctagcttcccatcgacggtcagtgcgcacgttgtaatcagctgaggccatgtcaggagacggagccacggagcaggcagctgagtatgtcccagagaaggtgaagaaagcggaaaagaaattagaagagaatccatatgaccttgatgcttggagcattctcattcgagaggcacaggtttagtgatataggattacatttccttctctatgggtccaatcacactacttggttctgcagtgaataatattttcataatcctaacattgtaaatgctgtttattggttttcaattttagaatcaacctatagacaaagcacggaagacttatgaacgccttgttgcccagttccccagttctggcagattctggaaactgtacattgaagcagaggttactattttattttattttttcttatatcagnattgcagcattcactgtagtgataga

SEQ ID NO: 52203 - DNA, 622 bp, Homo Sapiens
  misc_feature (5)..(5): n is a, c, g, or t
tttcntaggccctgtgtgactcacgtgtctatatctgaatcaactgttacaaccaagcagatgcagagactgcgtgccctctcctggagctaggagctaggtgagtcaatcctgcactttctctacaaggcttgcaaaggtgagcaagaagattccccaaagtgaaatcagggtgctgttaccaaaagaagctatgctggcaggcaaaaaacaacagctgtttcccatagggcaaaacctgaaacacccaattactatcccattgtttgcttcaaaattaaattttgtttgaccccaactagttctagtcaagtttttgctcgatggaccacgtgaaaaaaggataaacaatgtctctatataatgcatgatcaggtggtttatgaagatgtcaagagcactgaacaaaatccaaatgctcacataaaatgggattaggtttcataagccacccaagaaaatcagtctcattattttatgtaataatgtattactgtgcccagagctaacctgtagctctaggggagtacaatgtgtttgtattattcttcattgtacacagtgcctcagacatagtaggtattcaataaatatttgttaaatcatgaaaaaaaaaaaaaaa

SEQ ID NO: 52204 - DNA, 472 bp, Homo Sapiens
cgtggagagaacagcttgatacccatcaactcaacgctggtggaaagacagggaccgaaccctggctcaggcctggtcattgcctcctcagcactccctcctgggaggccctagctctagagtgaggggtgggtggaacctgggggcacctcgttcaccctgtccccactccccacagttttaggatctaaatgattgcctctggaactattcttctagactatcccacatcagaatcactgggaaatttaagtttgcagatcccacactcaccctgaatcctcactcagggtggggtcaggaatctgcattttaactagtcgcggggattgtggggggcagtagctggctgtttcgtggcatttctgtggctctgcagttgtcctccaccccaggaccaatatgttcaggccacaccgatggcctgaaccccatgggtagagtcacttaggggccacttcctaagttgctg

SEQ ID NO: 52205 - DNA, 397 bp, Homo Sapiens
atgaagtacatggttgcttttttatgttctccatatgtattttcagctctcaaagatccagttgttcttacttctcagggtatgttgctgaacttccaggaatcattcccgtctttagtccagtgttgctgctctagtctcattggaagtgacctgtccactgactctcatccccaagttcctaatttgccagcagaatggtactggccctgtgtctagtgatcccagggataaaatgctgttgtctagtatcattgacttaaaaaaaagaaaaaaaatccctgttttatttgttttggtcagctcaagttcaggactgttagataacttaaaatctgctttgcacagatgtatttttaaggaacaaacatctacagtaacagttacagatttcctt

SEQ ID NO: 52206 - DNA, 872 bp, Homo Sapiens
  misc_feature (580)..(580): n is a, c, g, or t
  misc_feature (608)..(609): n is a, c, g, or t
  misc_feature (612)..(613): n is a, c, g, or t
  misc_feature (615)..(615): n is a, c, g, or t
  misc_feature (617)..(620): n is a, c, g, or t
  misc_feature (624)..(624): n is a, c, g, or t
  misc_feature (629)..(630): n is a, c, g, or t
ggggatataatacctttctaagggaaacatttgtatcagtatcatttgatctgccatggacatgtgtttaaagtggctttctggcccttctttcaatggcttcttccctaaaacgtggagactctaagttaatgtcgttactatgggccatattactaatgcccactggggtctatgatttctcaaaattttcattcggaatccgaaggatacagtctttaaactttagaattcccaagaaggctttattacacctcagaaattgaaagcaccatgactttgtccattaaaaaattatccatagtttttttagtgcttttaacattccgacatacatcattctgtgattaaatctccagatttctgtaaatgatacctacattctaaagagttaattctaattattccgatatgaccttaaggaaaagtaaaggaataaatttttgtctttgttgaagtatttaatagagtaaggtaaagaagatattaagtccctttcaaaatggaaaattaattctaaactggagaaaaatggttcctactacctattgctgatactggcctttgcataaatgaatanaaataaacctttttttttcttcgaaaannaannanannnnaaanaaaannaaaacctggtcgggccgccctcgggcccttcgagaagcttttccaaggaccattttcgtttggccccccccggcccccaattagggtaaagtggaaccctgggtccatagcctggtttccctaaggaaaaatcccggggcccatggacttagggggctttgggaatttccccccccaaataaaaaaaacccccccgggggggaaaacccggaggcggttcctggaaacaaaattccgggaat

SEQ ID NO: 52207 - DNA, 680 bp, Homo Sapiens
  misc_feature (675)..(675): n is a, c, g, or t
caagactgaccacggggtcccatctggagcccgggcccggggctgtggttaccagctatgcatcaacgagcaggaggagctgggcctcgtgggcccaggaggggccactgtcagcagcatctgtgccagctgagaggggctttgggcctggccctgaggggatatgaatgcttcctagagttctttctgggggtgtggagccctcttagaaggagacaggctgtatttcttgaggacatggagtctttctcaaggacacaaaactcttccagggacctggagcccttcccaggacatggagaacttcctgagggcctggagtccccctgcatcatggagtccttcttaaggactggagcctatgcaggcacagagtccctcaggaccaaggagtccctcctgcaggtgtggagcctttcctgggatgcagagccttcccaagacatggattccttcccagggagacaaagccctgtcaggagcacagcatctttccagaggaggtggagtctatcttggggaaaccaaatttccagattttcccagaggctcagcaactctggcctcaggcttccttcccagaggcagcgtctgggctgtgctgtgctgtggaggagggattgcaggatggatggagctgggactggggctgtctgggtgggctggtatcctcgnttgat

SEQ ID NO: 52208 - DNA, 517 bp, Homo Sapiens
ctggaggccctgaggagggcccacgaggtcgcgctccgtctgctgctgtgtaggccgtgggcctcgcgcgccgccgcccgccccaagcccagcgcctcggaggtgctgacgcggcatctgctgcagcggcgcctgccgcactggacctccttctgcgtgccctacagcgccgtccgcaacgaccagttcggcctctcgcacttcaactggccggtgcagggcgccaactaccacgtcctgcgcaccggctgcttccccttcatcaagtaccactgctccaaggctccctggcaggacctggcccggcagaaccgcttcttcacggcgctcaaggtcgtcaacctcggtattccaactttattatatggacttggctcctggttatttgccagagtcacagagactgtgcataccagttatggacccataacagtttattttctcaataaagaagatgaaggtgccatgtattgaaagtgtgcgtcaaagaacataaatatcagtggattttctctgt

SEQ ID NO: 52209 - DNA, 793 bp, Homo Sapiens
gagggatcattggagagggaaaacaagtccaacctggaagaagacttccttctaaaccaggcagacgaagtcaaattacaaatcaaatgtggtcgttgtcagattactgctcagtcttttgcggaaataaaatttcatttacttgatgttcatggagaggaaattgagggcaggctacaagaagggaccttcccaggaagcaaggggactcaggaagagttggtgcagcacgctagccccgactggaaaaggcatcctgagagagggaagccggagaaggttcattcctcctccgaggaatcacatgcatgtccaagactgaaaaggcagctccaccttcatcagaatggcgtggaaatgctcatggaaaatgaaggaccccagtcaggaaccaacaagccaagggaaacctgccagggccctgagtgtcctggcctccacacgtttctcttgtggtcccattcaggctttaactgcctgctttgtgcagagatgctgggacggaaagaggacctcctccaccactggaagcaccagcataactgtgaggacccttccaaactgtgggctattttaaatacggtctccaaccagggagtgatcgaactttccagtgaagctgagaaatgagaccccaaggcagcctggggttaaggagagagctctgccgccaccttccttcagagcttcgtgctttatggtggtgcttagtcacaaagatcaaacaacaggattggtgtgagttgaaccagaaatgacttttgtacatggttttattttcttaaccgaaata

SEQ ID NO: 52210 - DNA, 960 bp, Homo Sapiens
  misc_feature (26)..(26): n is a, c, g, or t
  misc_feature (798)..(798): n is a, c, g, or t
aggagcgagcctgggtggcgcataanagatgaaaacgaaagttcagccccggctgacggtgagggtggctcggaactgcagcccaagaacaagcgcatgacaataagcagattggtcttggaggaggacagccagagtactgagcccagcgcaggcctcaactcctcccaggaggccgcttcagcgccaccatccaagcccaccgttctcaaccaacccctccctggagagaagaatcccaagtatgaagaccttctttgtagaaattttggggctggttggtggtcctggttgggcctggtattacttccgtgaatgaagtaactttcagctaagttactcaccaccaaggcttgctcagactgctagaacttgacgcaggagtggccagtgacgacgtagccatccctgccggttctgaagccccgcatgtgggcttccaagccttgcactagggcatgagtgggaatggaaaggtttcagagcctcctactcatcgctgctttcatttttagcaaacatctgagtgtcttgacttctaaacattagtcttgtgtgttaaaagaaatttgtttgcattgggccacattatactttgacccttaaaaagagactgatgaatatgtataattttgcacccttctgagcatttgagacttggcaagttcagtgaatacttactaatctcccatgtcctgctaggtactgtggggcagtggctaaaatactttaattttgctccccattgtgattctcatccctggctttgagttttgcttccctttggggccctgtggngggatcctcccctccaaggaagactggccctggctgctctctggaaacatggtggtttggttccaaccactgtacttttggctttcctctcaattccccaaaaggggacccggccatcccttcatcattggcttggccaaaatcccactttgtccctttaaa

SEQ ID NO: 52211 - DNA, 892 bp, Homo Sapiens
  misc_feature (791)..(791): n is a, c, g, or t
  misc_feature (819)..(819): n is a, c, g, or t
atctatttgagtttccagctggcagaattaattgttattattttcctaggcgcaatttccttaaacgtacagtttaaattcaaggctggaccactcagttattattgctattagaaaataatatatcatgtttacttttgttcttcattattttctttcctgcattgttttagtcaagtaatggcttttgaaaaagtaaagttcaataataactaaggctgtgatttttttcaatataaaaggcacagctgttggccaaagtgaaggaatcttttttcagttttattggagaaactgaagggtaacattctaacaagtaaactgtatgtgcagataaaagtactcttgatttaacacaaaggcagatgatacacttataaaactgggaacagctggaatgcttcttgattttattttttcagagagttgttagttctctgggtttctactaaggggtttagccataactgtgcatagaaaaataattatctgtaaaaaatgaaggggataatatatgataaattatgttctgatatcctcctacagtagtttaaattgacagaaaaatttgaatgttttcttcttaacccagtcttaggctggtattccctttttatatatatctatattacttttcacctctttttcactttactttagagaactattaatatactactggcttcatgaccctgtagcatctttggccactttaatctagggtgacctagcaatcctgcagcacagggcagagagtactgtcttaggaattattaggagttgattcctgnagaaacacacattttttcccatgaacgnggctggtctgaagtcttcaattttttcctctaataggaaacagtataaattttaattaaaaaaaaaaaaaaag

SEQ ID NO: 52212 - DNA, 547 bp, Homo Sapiens
tgatgcatgtaatacctgagtgtttgtattatatatggccacaaaatgtttttgaagccagggtagtagatatctaaaagttataggcaaagaagtatgaaagttaactttctgtgatgtgtttttgaggagttgatactcatcagtaagcaaggaattgagtttattttttctaagaactctttactttgaaatatattatgaatgttgtaaatttggataacgtttttataaagaggttacatactttctgctcacagtttcagttgattggatgtgtattctctttaaaaaaaaacattttgtgttaaaacatttgacacagcaatatattttttaaatccatcaactaagtccatcagcagagctttatagagctaagggttgacaaaatgtttcattgaactacccaattttgaaagttcagttactttgtgctgtggtttcattgtaaaatgttgtaccttgtgtttcacactggaccatgttattcctcttgaagttaactttgtgacacttaccaccttaaaataactatataataaac

SEQ ID NO: 52213 - DNA, 575 bp, Homo Sapiens
agagaattagcttaaattccctcctcccttttgataaatccacagggattccttcactctgtcaggaaatggtgtggtttccaagcattagcccttcatgatctgtctggtgcatttctgtgctcctgggatcgccaagtgcaggcacggcatcgcatccccaggtgtcatcctgtgacccaggaggggaagatgacacacccaatttaggtaatgctgcacttcttgttataattggttattggaaaatgtgcctttattatcagaacagtggtgtgcgcatttctgattatggagctaacttttggatatctgacttagatactaaaaacatttgggtgttgcagttttgcacttgtagatacaacttaaaagcatgaaactggtgatttaattagatgttttctataaaatgcaccttgttacatttctgtgaaagggtcttaccagcgtggaataactggctcaagggttgagagaaacaaccattttctaaacagttaattgtttaaaggactatacatgtaagtctgcaggcaataaaggctgttgtgaaaagtaaaaaaaaaaaaaaa

SEQ ID NO: 52214 - DNA, 531 bp, Homo Sapiens
  misc_feature (515)..(515): n is a, c, g, or t
gctgctcctggccttgcccacgtatcacctctggaaacgctgccggcacctggctgaggacgacacccacccaccagcttctctgaggcttctgccccaggtgtcggcctgggctgggttaagggggaccggccaggtcgggatcagcccctcctgagtggccagcctttccccctgtgaaagcaaaatagcttggaccccttcaagttgagaactggtcagggcaaacctgcctcccattctactcaaagtcatccctctgctcacagagatggatgcatgttctgattgcctctttggagaagctcatcagaaactcaaaagaaggccactgtttgtctcacctacccatgacctgaagcccctccctgagtggtccccacctttctggacggaaccacgtactttttacatacattgattcatgtctcacgtctccctaaaaatgcgtaagaccaagctgtgccctgaccaccctgggcccctgtcgtcaggacctcctgaggctttggcanataaacctcctaaaat

SEQ ID NO: 52215 - DNA, 645 bp, Homo Sapiens
  misc_feature (591)..(591): n is a, c, g, or t
cttaaacttcgggtggtgggcaggctcggtaggcgggaaaggcccgtgtccagatgaatgcagtccatgtttatattgatgaaagacacgtataccatttggtccagctcaaccattcttaacaagtgctggctgtgagcactggtgtgtgtgtgcctgcgtgcaaccagcaatgtaagtgatgaccagctgcatgatgccttaatttgagtggacaaagtcggtcaagaaccactttcaggcttctgggtctccaagtctttgtctccctgtatccaaacgaggcattccaagtttgacagcatggaacattgcatgtccgaaataccaaccgtgaaactgggtaaaaagcttcaggaggtgatattgatgtgtatagtttaggaaataaaacccaatacttacttcaaagaacgtaatttgtggctttttagagagaaggatactttgacagttttcatttgtcgtctacatgtatatggtacgtttcattctgccttttaattaatttggtattttactatgaaaactactttgtattaataaaataatgtatttccaatgttataagttgtgttataacagtttcanaagccaaataaacaagatgcattttgatatcaaaaaaaaaaaaaaaaaacgcgg

SEQ ID NO: 52216 - DNA, 394 bp, Homo Sapiens
cacaggggggcagtcgggattataatacactgtagcagttggctggggaaaagtctatcaaattccatgaccaattggacttttctcccacctgtaatataaataaaatatgtactgtttcatactgaattttttcaatgcattggggttcaacataaaaggcacaaataaataaaaatatcattaaataaacggaaattacaatttcaagtttcatgtggagttgtatctcactgtttggttactttttccaatttaatttgacagacttagtaatagcacccaactgtttaactgaggtagatccacattgtaaagaaagctgggtcccctccattttatctctaaatttatgatacttttataaaaacaaaaatccatttaaatcatatgc

SEQ ID NO: 52217 - DNA, 673 bp, Homo Sapiens
cccaccgcagctactcccctttcttccaaacttttgcagaaaaaaacaaaaaaactacaaacaaaagcagccctctgcctcctccccagggaagaccctgaccgtgtacatagccctggtgctcctgcccagccacccctcagatgcgttcgcctctggccctggggtgtgtctcggtgacgttttctatcagacgtgctccctcccatcctccagccctgcccaccctccctccactcctctcaactgcctcagcgatttcaagaaggaaataaagggataaagaaattcatgcttgcaccgagtacaaggacagacagcaggcacggcccgcagcctggcatctgtgcgtgtggcgtggcccgtggcttggcatctgtgtgcgtggtgtggcccgtggcctggcatctgtgtgcgtggcgtggcccgtggcctggcatctgtgtgtgtggcgtggcccgtggcctggcatctgtgcgcgtggcgtggcccgtggcctggcatctgtgtgcgtggctatcaggagttctaggaactcagtgcaatacgggagtgacccagctacttgaccagccacgaacagcccgccagaggccctgaactggacggtacgttaatgtgaatgttatagtctttgcaaaatcccaaaggatttcatgagggtaataaacag

SEQ ID NO: 52218 - DNA, 449 bp, Homo Sapiens
  misc_feature (17)..(17): n is a, c, g, or t
cctcgcgagaggtgatntgctgaagccaaccagagatcttgatctctctctgaggaaaaaacctagaaatgatggttagaatcaggagacttgagaactacgaggaacatggcagcctctagctcatacttgtcgttgtacaattgagatcaagtgaattggccccggtctcacattttcagtgaagtcagactcagaactaggtcctgggtttcatgtttcctgctgctcttctcactgtgtacacaccatgcccacatacaacatacctatcagaaatggttttcattaagggagtagaatagtcacttaactggggctcttaacattgctaataacctgtggctcaatttcctcaactgtataatgaggttactactagtatctacctcaaagcgttgtcatgtggattgagatgatatgtatgaatcacataaaagagtgcctgg

SEQ ID NO: 52219 - DNA, 583 bp, Homo Sapiens
tgagtggaaggagcactgaaaacctcttaaagaaaaagctttgtgtgttttccttgaactgtctgtatcaagacgtgttacttcgagatatccattcactttataattttgactgcaaaatattttgtaaatacacttttttacttttcaaacgagtaaaataatgtgcaatgatttttatacaaatgattttcaagttgtttggtatatttcctctaggttttgcttgactcaaagtagatcgttattttgatcaaactgtgcaaacagtagtaccacgtgtagcattttgaaacattattttttaaaaaatgctgtcttgctttagctattaatggggcattgtgaggaactgtgcaaagacatttttgttacaaacctgtgggcctgttgcaatactttaaaaataaaaaattttattccatttgcttgttttgtatagacatttctattgcttctaaatatacttaaaatattttctttccttatgtactgtacagttaatcttatttgccatcatcttgaacacaaaatgtgtatttagaatatttgtataactgtgtaaaataaaaaaggaattatg

SEQ ID NO: 52220 - DNA, 691 bp, Homo Sapiens
  misc_feature (675)..(675): n is a, c, g, or t
gaattcccgggatggctgtgtgtggaaatggccaccaccattctccttccccaccccaccacaaaaagagaagctgtgtctttagacaaccctgaggtatctgtgttacaatcgttctgtgtttgatatttgtgtaaagtatgcatgcagtcttgtactgtgacctaagaacaaaactgtaactgcattagaaaccatgaaaaaattagatattgttttgtgacttttagacagtggtaaatatagaaccatgaattctggtcacattccatttctctccaacatgaaggatcaaaaaatgtttttcaatgtgttctttgttccactggaaacttagagtcatgagtttatgagctgatttggtcaccttcctctgcctttgttcactgtgagttctgatgtcttagtgacttagttcttagaagctcacgccttagtttgaaacagattctccacggtggtccccaaaacactgtctgcatatccataagaattgagcgctatgggtgttaacgtgcatgaggatcagtttgcagcagcaagtacaaaaggagaagaggaacatccgttgaatgagtgtgttttgtacataacttcagatacttgtgaacatgccttatatttgtccaacaactgtcagaataaagaacattctaaaatgagaaaaaaaaaaanccccccccaaaacaaa

SEQ ID NO: 52221 - DNA, 654 bp, Homo Sapiens
ggctgcccccattcctgstgctgctgctgctgctgctctgtggctgtttcaaagactgggcgaaaggctgtccggagggcagaccaggtgccttgccgcagagaaaacaccaaagtctcctgttcgctcataaagaagtttttgggatgggagagaatccagaccatcttggggcagccaggcccttgccttcatttttacagaggtagcacaactgattccaacacaaaaccccttcccctttttaaaatgatttctgttctaatgccatagatcaaaggcctcagaaaccattgtgtgtttcctctttgaagcaatgacaagcactttactttcacggtggtttttgttttttcttattgctgtggaacctcttttggaggacgttaaaggcgtgttttacttgtttttttaagagtgtgtgatgtgtgttttgtagatttcttgacagtgctgtaatacagacggcaatgcaatagcctatttaaagacactacgtgatctgattgagatgtacatagtttttttttttaccataactgaattattttatctcttatgttaacatgagaaatgtatgccaaatgattagttgatgtatgttttttaatttaatatttaaataaaatatttggaaggaaaaaaaaaaaaaaa

SEQ ID NO: 52222 - DNA, 536 bp, Homo Sapiens
  misc_feature (508)..(508): n is a, c, g, or t
gaacgagggggaaccttgacctgagacttgcagcctccagaactgggagaaaatagatttctgttgtttcaagcccccgagcctgtggtattttgtcccagcagcctgagcaggctgaaatggtcccaagttcttgtcccacatccagaagaataaggttatgcagacaaccagagagtgagcagggcagaaaaaaacttctattgcatgatggaacagctcccagcgttgaggggacctgagagtgggcagccactacctgaagcatcattataaactgctgatctactgtttctttgtcaaacgggaggagataacatgagggtcatgagaaatgtttgcagacggagtgaatgccttgaaagtgctgcgaccaggtgctgacacccggaggtctggctgctcgaagtgttagctgacacggaagacacacggactttccctccattccccaaaactccccttccctgactcgtcagctgcataaaaaccctctccttatctcttntgtcaggggatttgagaaatcttgctgt

SEQ ID NO: 52223 - DNA, 658 bp, Homo Sapiens
gtagaaatgcactgaaaggaagacgaataggacctattaagccagcaggacctgtcacagctgtaccctgtgatgataaaatattttacaatagtgggcccaaacgaagatctgggccaattaagccagaaaaaatactagaatcatctattcctatggagtatgcaaaaatgtggaaacctggagatgaatgttttgcactttattgggaagacaacaagttttaccgggcagaagttgaagccctccattcttcgggtatgacagcagttgttaaattcattgactacggaaactatgaagaggtgctactgagcaatatcaagcccattcaaacagaggcatgggaggaagaaggcacctacgatcaaactctggagttccgtaggggaggtgatggccagccaagacgatccactcggccaacccaacagttttaccaaccaccccgggctcggaactaataggaaaagtagactctttgtgaagaaacgagccagtgactgaaacaccctggtggaaacctgttgacagaccttccactttctcttcagaataagtagctgtgggtggatattattattttgaagaaagaaaaaacagattttagggtggaaaaaacagtcaactcacacaaagaatggaaaaaaatactgag

SEQ ID NO: 52224 - DNA, 678 bp, Homo Sapiens
  misc_feature (607)..(607): n is a, c, g, or t
  misc_feature (633)..(633): n is a, c, g, or t
  misc_feature (651)..(651): n is a, c, g, or t
  misc_feature (655)..(655): n is a, c, g, or t
  misc_feature (672)..(672): n is a, c, g, or t
aagtcatgctggaaactccggagtacagaagtaggtttacgagtgaagagaccctgatgttctgcatgagggtgatggtgggagtcatcatcctctatgaccatgtccaccctatgggagctttctgcaagacatccaagatcgatatgaaaggctgcataaaagttttgaaggagcaggccccagacagtgtggaggggctgctaaatgccctcaggttcactacaaagcacttgaacgatgaatcaacttccaaacagattcgagcaatgcttcagtagagctctgctcaaagaagaggatctatgtgctgacctcagaagatgtatatgtttacataatttaatacagattgatgttaatacttgtgtatttacataaccgtttccttcttgtcactgaaatatatggaccttaatttgtatcctgactgactcaacccagcagagcataaattgacttgagagccttacctttgatgtctgaaatgaaacccccttctccaaaggcaaaattcggagactttgatctttgctactggagtcctttaacaacacctataacgataaaaaattcctaattgtttgtggtagtattttaattctanatgtgttatctctccgggaagtatangtttataggaaacacaanatanttgatttcccggtgtcngttcag

SEQ ID NO: 52225 - DNA, 581 bp, Homo Sapiens
tgataaagggcagtggattgcctgttgttcggtgttgtgaatagcacctctgaataagattagagtgtttcttaattcatttcaaactctaaaattagattaatggtggtgctaagaaagagtattaattactttgggaatggtcaaaattaacattaaaaacattttagacaaaaagtttcattgtacattcaaagaaaatgtaagtttggaagtactaaaagactattttatacttgttgattaatcggaatgtttgttgtatgccttcattttccatttcacttatatgtgtatgtccatatatgttaattttcattgtagcaaagctaatggaaataaagctaatgctctagttgaaagaaaaggaaaactcctgaaatcctagaatgtcttgttatttttagctgactgtaaaatattatgaacagtctttgtgtattgtgcttaatgcttttgtaagaaacagaatttgaaatatttcatccttgtcatgctcaaaattttgttacatgcttgttattcagagtataataaagttttgtacaggcctgaaaaaaaaaaaaaaaaaaaaaaagggc

SEQ ID NO: 52226 - DNA, 793 bp, Homo Sapiens
gatcccagcactcccttttccagcagctgtggtgggggagggttcccctccagtttgtcaagagttgaaggaggctctgtggccaggtgacctggctgccttccactccttgtacctcagtctaaacatggagtggccgctgacaaggcgctccagccccagagccagcgtcttcatggggaagatgaatggacctgagtagctgaaggaaggcccctccctacccaaagactggaggcttctcagcctcaatttccctgtctgtacagctgagggctctgcctgtcccccactgctatcagtatggaaccccagctggggtcccctattgagtgccgactccccccaccgccagcagctgctcctccagccacacccctcctgctccccccacccctagcccttgaccctggctggcctgccccgctccacaggccaccagatgggctcctgagaccctccccaggctgcttacagctcattctgctgggggtagagatgaggggagggagtaagttaaaccttggactagcaagtagaagcctggggggatgcgtgtgcctcagtttcctcctccacaactgaatatagtggctgaaaactggggagatacttgatggcgcgaatgtccgttttctctcccttcccacctcctgcaggaagcaggacggggcaggcagcacctggtaggcacagtgctttgcccctcctccccttcccttctggaagtcttggggcctcagtgcttgcaacagccggccttgggcaaataaaaagactaggttgtttacta

SEQ ID NO: 52227 - DNA, 638 bp, Homo Sapiens
cgcgtccgggagagggagaagaggaagtgggcctctcatacttaatgaaagaagaaattcaggatgaagaagatgatgatgactatgttgaagaaggggaagaagaggaagaagaggaagaaggaggtcttcgaggggagaagaggaaacgagatgctgaagacgatggagaggaagaagatgactagatcattctaagaccagattctctaatgtttctgggtgtgcaatagagtgatcacatctttgtttcttcatgtacgatagctatccctacagaagataatgtgtaactttttataggaaaagtgtggttttactatttttgccttatcattccaaataagaactagtctgttaatgatcatattgtatgtagagaaaaattttcattgactcccattgtggaattccctagcaatttatttagacttaattttttaaattcaagcttactgtattagtcatttttagcccataattaaaacatgatcacttttacacaggtgtagtatggtgcatttcattccttatttataaattaactgaaattacagtttgctataatataaaatgacaatagtctcttgagtggtaagttggttatttttttagaggtgatccaggaatctttagtt

SEQ ID NO: 52228 - DNA, 545 bp, Homo Sapiens
gcggccgctccctgccatcactccttagagtcacactgatgaactcatttagggccaaaggaagaaggggaggcagatttcccctctagatgagtgaagggataggaggctggtgaacccaacggctgaaatgtgaagggtgagagggtagggtgagtccccccagccctgagggatgaagggtctgaagatggcactgcacggtgacagctgcagtgactcaggagctccgtttacaaaggaacatgagtgaggaacataacttaatttttttttatatctgacctgaatttctgttttcctcccccattccccacatggtagaagtgtaatctcacatcaatttggggaccctttctttccccagggatgtgtagaacttttggggatggcacatttgaagaccttagggagctttgcattttaaaggctgaatcccacactctatcatacatattaatatttacctgcattccacattaaagggttcagtttatgacttgtgtcctgtcttgtagatacttaattaaacggtattaattttg

SEQ ID NO: 52229 - DNA, 688 bp, Homo Sapiens
gggacagctgggagatggaggtggcacctgctcccctagatcagtactggctctgaggacaggtgagcagtgggaagaccaaagaatggctggcagcgctgccagggttggaaatgggggcaagatcctggggctgtgtgccctggggcctccctcacctgtcttggtggccatggcctcagggatggctcctaggtggctgaggcacagcagtggctggaaggtgccccgtggaggctgaggtggaggcgcgcccagcagctcccccctgtggccatggcgggcacggggcgtaggagctggctggcggcggctctgcatgttcttgttgcctgtcgtctgtaactctagtgttcgacattcgccgtgatacagtggtgtcacgacgtgtgtaactgtggtcagcagaccttgttccgcgtggacgcctcaagtggattaatttctggaagcctcaatctgtatgtttgagtatttacatgagaatgttatttgaatggaattttcttaacccagaaggtagtatttataatcatttacttgtagcgaactgtttaaagttaacacttgtttaaatttttttacactatagcatttatgcaatgggtttacagaattcatggagttatttttatcagtatggggaatttaattaaaaaccttgaatctttgaaaacaaaaaacaaaa

SEQ ID NO: 52230 - DNA, 584 bp, Homo Sapiens
gattggaggtggggcctttctctacagggcaagagtcccccactgccgagaatgctaggcttctggcccagaaaagaggagctttgcagggctctgcatggcaggttagctcagaagacgtgcgatgggacacatttcccctaggccgaatgccaggtcagaccgaggacccagcagagctcatgctggagaattatgacaccatgtatcttttggaccagcctgtgctagagcagcggctggaaccctcaacatgcaagactgacaccttgggcctgagctgtggtgtcggcagtggcaactgcagcaacagcagcagcagcaacttcgagggccttctctggagccaggggcagctgcatgggctcaaaactggcctgcagctcttctgatggccatccctggtgcaagtgttcatccagccgtgccagggcaacagcccaccccctagtacaactgatgctccctgagacaacctgggagacagcctggatcagccacatcaactcagttgtccaccacaggggaattttgaatgtcttttgtttttgttttgttttgaaaaataataaacaggcaactgt

SEQ ID NO: 52231 - DNA, 782 bp, Homo Sapiens
gatatttaggcaagctccctgtgcaagttcccttatctgcacaaaacatctagtttctcaaaagtctatggccctgtgttcactgtgtattttggcctgaagcccattgtggtgttgcatggatatgaagcagtgaaggaggccctgattgatcatggagaggagttttctggaagaggaagttttccagtggctgaaaaagttaacaaaggacttggaatccttttcagcaatggaaagagatggaaggagatccggcgtttctgcctcatgactacttcatgcctttctcagcaggaaaacggatgtgtatgggagagggcctggcccgcatggagctgtttttattcctgaccaccattttgcagaactttaacctgaaatctcaggttgacccaaaggatattgacatcacccccattgccaatgcatttggtcgtgtgccacccttgtaccagctctgcttcattcctgtctgaagaagggcagatagtttggctgctcctgtgttgtcacctgcaattctcccttatcagggccattggcctctcccttctctctgtgagggatatcttctctgacttgtcaatccacatcttcccattccctcaagatccaatgaacatccaacctccattaaagagagtttctttgtggtcacttcctaaatatatctggtattctccatactctgttatcacttgtattgaccaccaaattattgtaatacctatctactgctgagttgtcacgtatgttatcacttagaaaacaaggaaaag

SEQ ID NO: 52232 - DNA, 467 bp, Homo Sapiens
tagtggtattaatatccagctcacagaattgtgatgagcagtacatgaaatgcatggaaagcagttaacacagcattcccttccccctttaacttctcctggctgcaaattaatcacctcatctgcatcctgggcctcttttgaatgcacatgctgttagagcgcttctcacattgtattaaagttagtcatttatgattccatttttcccactgactgtaggttctcaagagtagggtgtaccatatttcttttacaaccccagcaccaagcaaagcacctgctacttcgtcggtattcattgttccggctatgaaagcttagactaggaaaggatcttggaacagtctggtccactggttcctgaatgctcgaccgtggacctgcaggagcagaatcacccagaagtgtgttgagaaacagattccgtaggcacatccacagagacagaaagtggatccttgggc

SEQ ID NO: 52233 - DNA, 814 bp, Homo Sapiens
  misc_feature (712)..(713): n is a, c, g, or t
ctcccgtaggagaaaatgcgggaatcctgaatgaacagtgggtcctggctgtccttggggcgttccgggcagctcccctcctggaatagaatctttctttccatcctgcatggctgagagccaggcctcctgcttggtctccacaggaggctgtggcagctgtggcatccactgtggcatctccgtcctgcccaccttcttaagaggcgagatggagcaggcccatctgcctctgccctttctagccaaggttatagctgccctggactgctcactctctggtctcaatttaaaatgatcccacggccacagggctcctgcccaggggcttgttaccttcccctcctccttcctgagtcactccttcagtagaaggccctgctctctatcctgccccacagccctgcctggatttgtatccttggcttcgtgccagttcctccaagtctatggcacctccctccctctcaaccacttgagcaaactccaagacaccttctaccccgacaccagcaattatgccaagggccattaggctctcaacatgactatagagaccccgtatcatcatggagacctttgttcctgtgggaaaatatccctcccacctgcaacagctgcccctgctgactgcgcctgtcttctccctctgaccccagagaaaggggccgtggtcagctgggatcttctgccaccatcagggacaaaccgnnggcaggaggaaagtcactgatgcccagctgtttgcatcctgcacagctacaggtccttaattaaaagtgtactggttggtttctgctgagtttttttattg

SEQ ID NO: 52234 - DNA, 582 bp, Homo Sapiens
tttgtgagttcacctgtctttatactcaaaagtgtcccttaatagtgtccttccctgaaataaatacctaagggagtgtaacagtctctggaggaccactttgagcctttggaagttaaggtttcctcagccacctgccgaacagtttctcatgtggtcctattatttgtctactgagacttaatactgagcaatgttttgaaacaagatttcaaactaatctgggttgtaatacagtttataccggtgtatgctctagacttggaagatgtagtatgtttgatgtggattacctatacttatgttcgttttgatacatttttagcttctcattataaggtgattcatgctttagtgaattcttcatagatagtatatataaaagtacattttaatagaaagccagggttttaaggaatttcacatgtataaggtggctccatagctttatttgtaagtaggctggataaatggtgcttaaatggtaatgtactccacttcttcctattggaagattaacattatttaccaagaaggacttaagggagtaaggggcgcagattagcattgctcaagagtatg

SEQ ID NO: 52235 - DNA, 450 bp, Homo Sapiens
aaaatttgagggccaaaattatttcaatggttgtttgaaatattcagttcagtttgtacctgttagcagtctttcagtttgggggagaattaaatactgtgctaagctggtgcttggatacatattacagcatcttgtgttttatttgacaaacagaattttggtgccataatattttgagaattagagaagattgtgatgcatatatataaacactatttttaaaaatctaaatatgtctcacatatttatataatcctcaaatatactgtaccattttagatattttttaaacagattaatttggagaagttttattcattacctaattctgtggcaaaaatggtgcctctgatgttgtgatatagtattgtcagtgtgtacatatataaaacctgtgtaaacctctgtccttatgaaccataacaaatgtagctttttaaagtccat

SEQ ID NO: 52236 - DNA, 453 bp, Homo Sapiens
ctgatacagtctgattagttcgtaggcttaacacttcctttttctttctcctggaatgcctcttgggatatgcattagtaggtcttatgtcttttcttggtctaggtggtgtgtgtgtttggcttgttggggcacttttagaggctccagctgcacatttccactcctctgtgtgtgttcctctctgcatctgctgttagtgtgtgtacacttttttttctgagcaatctttctccttagccacattgagttctttaacagtttttctgttttcttcttcattaagataattaataatcatactactcacatatcatgttttagaacttcctaagcctttccctttcccacctttgggacctcctaactgaatttcaaagtcttcattccttagattaaaaaaataaatccaaagataaaagaatgtaatgtcttataagtggtatcagagaa

SEQ ID NO: 52237 - DNA, 447 bp, Homo Sapiens
acctggctttgctctgtgcagaacccagcacacgtgattttgtgtgacatgccagcagcctggctcccaggacaggaggcctgccctgggggaggggctgcaggaggagggggggcaggcacccatgagtctgtccagccttgtcacagatgcatcgcccaccctgcggtcctgatttcagctcacctcagagtaaatcagaataaactgcacccagactttcacgaatgcatgttgacgctttcagttcacccctttctttgctaactttcttcctattttcttctaatgcgagagcttattaattccatatttatcattttgaataacttttctcctttttagtaacaaaatgtacttcactcttagtaaaatgtatttactattttagtaacaaaaatatacttgcctaatcatgtttaaaatatagtgatgtgaaaaattcaa

SEQ ID NO: 52238 - DNA, 789 bp, Homo Sapiens
  misc_feature (696)..(696): n is a, c, g, or t
gggagcagtacatattcaaatgtattcagaaagtcaaaagattacctatcgttctacaataaaatacatggaaatagcttgctatttttatatacatttccaaaatattaagataactttctgtaagagtcaatgattctgttcgactaaatagctgtcctttccaacacattgctacttttttaaatactgtatcataagttcagcctgtcatactttttgcattgatcgttatgaataccagaccatttgtaagtgtggttgaagagcaaaatgctaattgacatctctagtaaatactgttacaggattcatgaacttgaataattctacagtttgaaactctgatgctatatatacatggtataatgtattcagactttgattactacttatttaaaatggaatgttttatggttgtgcatatggatgtgaagtgaaaatattagccttaactttaaaatttgggtgtttgatagtgtttattttgatattggtgaattagtcaccagtaaattttaaaaaagcacttggttgaaaattgtacttgaatacatacatgcatgctgctaaactagaactttaatttttccccataacttttataagtcccatttataaacccactttttaaaaataacagggtcccaagttagagtgatgctgtgtatattattcaaaaaaatgtactggtgntgatatcttgtatgaatgatcattttaatacagtactttactggtagaagctaaaattgatcctttataattaagccgaaatttacaaactag

SEQ ID NO: 52239 - DNA, 1095 bp, Homo Sapiens
  misc_feature (747)..(747): n is a, c, g, or t
  misc_feature (840)..(840): n is a, c, g, or t
ctacccgtacgctatgtggcctgtggtatggtccatcttctcatccctgagcttggggcctgtgtggcacccggagggaacttgattgtggaattagcccggtacctggtggacgtgcggcaggagcagctgcagggattcaacacccgggtcagggagctagctcaggcagctggatttgctccacagaccggggccaggccttcagagaccttcgcacgtttctgcaagtcccaggaatcagctctgggcaacactgtcccagctgtggaacccggaactccgccccttgacatcctggcccagcctcttgaagccagcaacccagcccttgagggcctgacccagcctctgcagggtgggaccccacactgtgagccctgccagctgccctctgagtctccaggttcactctcagaggttctggctcagcctcagggggccttggctccgcccaactgtgagtcagactccaaaactggagtctgacccaacccctagacaccccttatctccaacttccaaagtcaggttgtaggatgagaacccgctgataccattctaagtccgctgctagagtcctcaattttattctaatcattcccactcagtacccgccacccccaccccgggagtgttggtagactttcaaattccatttctgagattctatggtctattcctagaattctagattgttctctcagaattccaaattccacttctgaggctctaagcccagcctangatctgacactgagtctcaggcccttgactttggcccccttgttccaggcaccctgtgggtgactagggggctgggggtgtctcctcacccanggcctggtcagcacccagatgggttcaagtaaaagcaagttgtggcccaccccccaaaagaaccagcatcttccccctgcccttattctttcctctccgtccctgctcaccttggtttccctatctcgtgccccctctccatatttttctgccccccccctcttaacacaccctctcccacgggtcccaccccgccacctgtttccccttccacccctgtgtcctcccttgcccccccccccttatttgctattt

SEQ ID NO: 52240 - DNA, 622 bp, Homo Sapiens
actccttgtaccccttgcccttctcccagctcattgctccaggagagagaagagttcaaaaaataaagtaatcataaacttgaactctctccattctcttgttcccatttacaggtgaatctcttcctttaagccatttttgtctcctgtgaatacagccttatctccacctgtttcttagatcccatctcccctggcttattttttccattcattaccctctttgttccctttacttctcaacctgtgctatatacatgctgttctctctgttgagattgccttatttccatctaacattctctctcctgctattctgatttgtcattcacaactgatttcaagagtcaccttcaccaggaagtcttccttgaccaccatcattcctgcctgattagagggcttcctcatggtaatatgtgttctcaagttttcagtgtcaaggaatgccatcccagaagctcattctcagatgcacaacagccagaacagtctcaagcagcattctagagcttggaatttaagaactacgcattgcctataaagtgaaacataggctaatatagattaaattgaatattgaataaaaaatatatttatttatccaaaaaaaaaaaaaaag

SEQ ID NO: 52241 - DNA, 445 bp, Homo Sapiens
tgcaagcaacatgccatttcaaatccgtagacttgtttctttgatactcttgctgtaggtcgccgtgaggggtagggaagcatatatactgtagggagaagtatcaaaatcatttaaggtcttttttccaaactagtgttcccctcccacatcccaataactcttggaagtctggtgctccctctaggtgaaaatcatttgctggcttatggagtcactgttgctgagtcccatcccccagttacagtgcagtggaaaacaggtttagaatctagaacttgtttgtatgttgtcacttggttatgttccaagtaggttagaaccatggaaaagagattgcaaatggtagtttcttctagatattcaaatgcatatatgtatgtacatgtaattataaataaataatgaatttttattaaagtgttgtatgaaaaaaaaaaaaaaa

SEQ ID NO: 52242 - DNA, 684 bp, Homo Sapiens
aaaaccgtgaatgaggttacacagcaggaaaagaaccggtttcctcccagactatgtcttacacgctgagttatgccacaagcgttatcatcaaaactatttaaggctggagtcttagacctctaaaaatagacaggaagggctgccctgagcagtgacacctttgtgtttttatgtctccgccagcgccgtaacagagcctgtttctttctcgttgagtattacttaaattcaggcttaaatgtgctatgaagggcatttttcatagtatcccatttgccttgtaagttatataaagtgcatgattataattttttccttagaaatgcaatatttagtttcatccagctcttatgaataataacctcatagattcctgatcttaatttaaataggtgctttaattttacagctttcaaaagtagttactgtaaattttactcctgttaatgctggattggtttaaaggatttataagggctgtgtttgctctttacaaggcaagatgccatacagtgttcaataatagaaggtcttgatacaaccgacattttaaatattctttatacatgaggactgcgtctttttcactgaccctatgatttcactgtgagtagggtgaactggactgcatattagtttatttgttgccataatcacatttttgaaaaataaatttaagag

SEQ ID NO: 52243 - DNA, 576 bp, Homo Sapiens
cagtgcccgaaaccgacactgcagcagatcagccacatcgcccagcagcttgggctcgagaaggatgtggtccgagtgtggttctgtaaccggcgccagaagggcaagcgatcaagcagcgactatgcacaacgagaggattttgaggctgctgggtctcctttctcagggggaccagtgtcctttcctctggccccagggccccattttggtaccccaggctatgggagccctcacttcactgcactgtactcctcggtccctttccctgagggggaagcctttccccctgtctccgtcaccactctgggctctcccatgcattcaaactgaggtgcctgcccttctaggaatgggggacagggggaggggaggagctagggaaagaaaacctggagtttgtgccagggtttttgggattaagttcttcattcactaaggaaggaattgggaacacaaagggtgggggcaggggagtttggggcaactggttggagggaaggtgaagttcaatgatgctcttgattttaatcccacatcatgtatcacttttttcttaaataaagaagcctggga

SEQ ID NO: 52244 - DNA, 566 bp, Homo Sapiens
aaggaggagaaaaaagcttccttaaaactgattattttgattcaattttaagtttctaaaaaaggtgatattaaagtatatgtattccttcagcattaccttaaggctagaaaaacgggataaatcttcagaaaagtgtcaaaagtgtcacagtacatgttcaaatttaaacttgaatcctggttcatctttgacttttgttgtgcatttttaatgcttctttatttttgatacacagaatgcagttgaacttgatcttttaaaattgagacatgtaagctaatcagcaaaagacagaaacaaaactgcacatctgtaataatcagatagcaattctactgcacaattcattgattgtaaggtatcctgtaacaagcaatgtttgtctcctattttttgatacctcttaaacttatgtcttttagaaagacagtgcctctgtatgctttttgtatttttactgagtgtaaatatttgttatatttttggttaagagaatgtaaaaataccatttattattatcatatctactaatacattggtggaatcaataaagaatctacatt

SEQ ID NO: 52245 - DNA, 469 bp, Homo Sapiens
ggaattgaaaacccaagaagccctaaaataagaacagtgagatcaaaggctggtttctaaaacaatgcagaaaatagaaccatgttggaattcctaaattctagctttcaaatactactgtttccaacagtgaatccttgacagagactgaatgcagatggaattttgaaacattttcagtagctacctcctctcctgaaattcctataagtggcagaggaaaatccaaatcctttaatataacatgtccatctcatgactcctgcttacacacatttgtgttgatttgcttcatttctggaggatgggaatttgcagagctggtgacatttccttcattagacaccagaaattcaccagagagagacagatctgtgccttctctttttaggatctggttattgatactttaataaatgtggtgtaaagaaaatccatggctacagtctgtatagaaaatgtaattttt

SEQ ID NO: 52246 - DNA, 913 bp, Homo Sapiens
  misc_feature (878)..(878): n is a, c, g, or t
ccgttgatggtgcagactgaggctcagtacgtattcctgcatcagtgcatcctgcggttcctccaacagtcagcccaggccccagccgagaaggaagtcccgtatgaggatgtcgaaaacctcatctacgagaacgtggccgccatccaggcccacaagttggaggtctaagtgacgagggggctgggtcggcagcccaggcatcctcaagctctggacacccacttgagcccagattcctggaagagcagagggctgggctcccagactcctgggtgctgtgggaggagggggctggtatcccaaactctggtttccccaggagagagtggtctggtgggcttcagatgagtcctatgggagctggggatctggattcctggttccctgaaggaggagagggatgatagcttggattccctaggtctttccaggatgcagaaagaaacaggctggggcctggattctgaggcaggaaggaatttgggtctggagttctggctacttgaggaccaaaggcaggaaggatcctgccttgattttacttcagaaaccaaatcagtcttctataatctggggtcggagggagtccctgtgcccaaggtctctctgcaccccaccatccacatgtatttttccttctatcccataatttattaaatcactggtctccccccgaaaaaaaaacgttcctactatgaaccttggttagtattcgcctgcgtcagccggtatccgagaaggggcacccagagccacgctaatgttcgtccaatcctcaccctcccctaagacatttgcacatccaaaccgcataagatatgccgggggcggccgcgcaccccccttattagagaaactcctccccgaatccagcncgagccgccgacaccaatatttttcgcttttgtgc

SEQ ID NO: 52247 - DNA, 406 bp, Homo Sapiens
tatacggctgcgagaagacgacagaaggggaagtaagtgattcatcatctagaatccagaaaatttgcaccaacagatggcaggtggttataacacaacagatcttgccctgagaatatctggggacccagccaacagccttcaaggcagggcactcctgcggaagagatggcttgtgaacatgactgtggacccagagtcaccccagagctcccatataaaatgcttcacagagaaactaagagcagccttggggcattcattccaattaataaccttaaagactagagccagatccacctgcattacaaaagcaggcattcgaggaactaaactttgcttttgttcatgctcttacctgccgttttaaatgggtttctaatgtcaaataaagccaccctgcctc

SEQ ID NO: 52248 - DNA, 620 bp, Homo Sapiens
tggttttggttctcccactatggtaggacccctggccagcattgtggcttgtcatgtcagccccattgactaccttctcatgctctgaggtactactgcctctgcagcacaaatttctatttctgtcaataaaaggagatgaaaatattctattggagtatgcctttcttttttctcttcgttttttctttccttttctaattttttatatgaaataatgagtagtttcttcctgaaccatttgagagtggtaagttgcagatagaatgcccctttaccactatatacctgaatgtgtattctttctttttaacacttttattttaaatataaattaagagaaatgggccaaaaccatttgtattgtttaaagaataattataaacacacttgtatccaccaaatcaagaaatggaacactgacagtaagaaccttctctatcttggccttcctttctcattatagcccccaccctagaagtaaccaccatcttgacttttttttaaaaaactttcttgcttttctgtatactttcatcacattcaaggtgttccaatacaaatagaatttatttccggccagtttttgactttaaataacattttctattttgaaaaaa

SEQ ID NO: 52249 - DNA, 773 bp, Homo Sapiens
gggactatggacagtttcggtccggattcccgggaggcgtcaagcttctgaaagaaagattagagaaattcttccatcggtatttgcaaacgctacatttgcagtcatgtgacctacttgacatttttggtggaatcagcttcttcccgttggataaaatgacttatttgaaaatccagtcctttattaatagaatggaggaaagcctgaatatagtcaaatacactgcttttctctataacgatcagctcatctggagtggattagaacaagatgacatgagaattttatacaaataccttaccacctcccttttcccaaggcacatcgaacctgagttagcaggaagggattctccaataagagcagaaatgccaggaaatcttcaacactatggaagatttcttaccggacccttgaacctcaatgatccagatgcaaaatgcagattccccaaaatttttgtaaatacagatgacacttatgaagagctccatttaatcgtttataaggccatgagtgcggctgtgtgctttatgatcgacgcctctgtccacccaacgttggatttttgccgaagactggacagcatcgttgggccccagctcacagtgctggcctctgacatctgtgaacagtttaacatcaacaagaggatgtccgggtctgagaaagaaccccagtttaagtttatctacttcaaccacatgaatctcgccgagaagagcacagttccacatgaggaaaaccccagcgtgtcgctcacttccgtg

SEQ ID NO: 52250 - DNA, 638 bp, Homo Sapiens
tgtcttgagtggggacaacgtccccccactgctgccctagagctggggagacgctgggaaaggttcaacctccacacactaaaatcattttggctcctggggcaagcttggggaatgaatgtggaagatgcctatattctgagagacaggacagtttcccaggaagatgggcagagacttgagtggcgattacctccagcacagagacgtgccaggcggtgttggcgctcggggcgagatgctgcccttctttgcacgaagcctggcctcttgcttggcgtgataaccctgtcatcttcccaaagctcatttatgagccaccagaggctcctaccccaaagattttcacagaaacttgaggccaggtgccgtggctcacacctgtaatctgaacactttgggaggccgaggcgggaggatcacttgagcccaggagttcaagaccagcctgggcaacatagtgagactcctgtctctacaaaaataaaagatttaaaaaaattagccaggcacggtggcacacacttgtagccccagctactaggggaggctgaggagggaggatctcttgtgccctagagttccagggctgaatggggctgtgaacacaccactgcacttcagcctgggcaacagaa

SEQ ID NO: 52251 - DNA, 666 bp, Homo Sapiens
ctaggtgcacagcgatcgtatggctcagcctagccaggctttgctgtagggtgccatgcctccctgggccacagattgggtgcaggccaggtcccaggcctcaccctggggctcactgtgggaatatggggagtggctgccctactgacactgcctgtcaccctggccagtggtgcttctggtggactctgcaccctgatatacagcacggagctgaaggctttgcaggccacacacactgtagcctgtcttgccatctttgtcttgtagccattgggttagttgggagccaaggggctgaagaaggcattgggtctggggccaggcccctggatgaatatcctgtgggcctggtttatcttctggtggactcatggggtggtcctaggactggatttcctggtgaggtccaagctgttgctgttgtcaacatgtctggcccagcaggctctggagctgctgctgcacctggcagaagccctgtcaattttgcactgtgtggctacgcccctgctcctcgccctattctagcaccaggccacccgcaccctcttgccctctctgaccctccctgagggatggcttctcatctgtacaccttggaagcaaacctagtatcttcccactgtccgtcgtttccactagtgtacgtctcgatcgaatctg

SEQ ID NO: 52252 - DNA, 587 bp, Homo Sapiens
ggtggctacagtgaccggagctcgggcgggtcctacagagacagttacgacagttacgaagcaggccagagagcagaggcacgtggcatcccagggcgacctcagacggccagccggttagctagttctgctgttgcttcacgagttctgagcattctctgctagcctatggaagctgcagccctcggaggacagaagtgttgtgcgcccaacagaaccctctgagacgcaagctgctcccttggctagctcatatgtggaaatagccctgtaattcgaggttgaaggggcccggccaggactcggggaagggtggcctgagagcagcgatgacctctggggtcactgtcccaggagggacttcacctggaacaagagctggaggcagccgcttgcccaggaggcttgtcccctgaggcgcttcgccagtgaggtgcgggctcagggcctcgagtctctcctggagcacgggctgcggtgcgccggcagcttacggggcggccagtccttgcccacaacgatgtggagccctgtgaaagtcggattcgaataaagggccacgtgtgcacccagaaaaaaaaaaaaaa

SEQ ID NO: 52253 - DNA, 558 bp, Homo Sapiens
gctgctgcctgctccagacattttgttcttgaatctgagagacccagaaggggcccactgagcccactcactccagcctttggcaaccattgttccaggtcccccagggcttcctcccacagcagctgtgaatggcacagtgaccttcctgcagcgtggagatggcacatccttgctgctggggacttggccctgctatttatttttgtatttatgtcttaatctcttccactgatgcatcctccaagggtagatggggagggtctgtgtgaaggggctggcttctcttggtgcctgctgggttgcaggggcaggaagcgtgtggactgcagcttctgctggtgctccccccgtcctcctggaggcagtataggagagagagcaaggattgagtctgagacttaagcactcggtcccagcttgccagttcctggttctgtgtccttggacaaactacctaacctttctgagcctcctatacctcatccgacacaaatggggatgatacctacctccagggttggcgtgaggattcatgggctcttatagatgaaaact

SEQ ID NO: 52254 - DNA, 646 bp, Homo Sapiens
gtgtgagggcacaaaaccttgacccacatgggtctggtcaccttctcacagaggtcacctttacagccccccaactctttgaaggatgtgtcccaaggtgtctcaagtctgatgcaatgaaagctgccccccattgaccacaggactgagtccagaatgtcctgcgtgtttcccagagtgtctgtcctaacaccgcttaaagattagccactgctagacagtgatcctcaggtatatggtctcaggattggccccaagcacacggtgtgtgtgtgtgtataaatatatcttcacaaagcataggtacccattaaagccatattgctttgctgaatggttctaatagctacagatgatttctagcctgaaagaaaagcaccacgaattgtttgaagttgacttgtcagatgtggcatgcttggtctaagttttgacaggaagggtatgtgggtaggggtgtacggagcatctcatgagaccagttctcctcctgagaggtccgtgatgttggaactgttgccccagatggactttgcccttgtgagactttatacttttcaatgcagtttttccctctttaaaactcgccagcttttatgtagtgttttataaaattacaggaataaaaagaatatcttttatgctt

SEQ ID NO: 52255 - DNA, 491 bp, Homo Sapiens
gcggacactgtgcccagcctccaacctaatttgagtttcatttgtatttttttcatcaccttacatgtgttaacagctgtttcaacataaactccattataatctatatacatttaaagaccgtgtttacataatctcttctgggtagaaaatggaaatacttaacctttgcattggtccctttcaggcttgaacaacagtggctgtatctgcatcgtggggttgctggtggtagaacactttggtgttaggaaagtttggaaaagaggatatccctgtattaggccattatgattagagataagcagcctgggagaaacatacaagacctgtggctactggtagagaattgggaataggcttccaacaatggactgtagagattaatggagattgtttagtgggcccatggctaggtggggtattaatacagttgaagttatgttgcccttgcacagatctttgagaatctcatacatctgtgaaaaaga

SEQ ID NO: 52256 - DNA, 679 bp, Homo Sapiens
agtgtgaagggaaggctaaggacgcatcggtgctggagagttgagaatatgccttcccctccacccccaacccagtcaccttatttgaaaaaaaattaaaaaacaccttttatttaaaaacctaaccctggaagtttgctcgctgcctgaaaatcatatgcgtggtttttcctgtttcctgctctgtagctgacatcaggggagcaacgtgaacacaggaaaatggaaatcaacatttgaaacttttaaatggaagctttattggggttccacatatggaaaactgcaaatagcagaagtatgtgactcaataaattattctggagtgaccacatcctctaactgcctcccaggacaagacggagaatgtgaacaatgctcctgaaggcccctttccctcaaagaatcactgcaattgaaggaaaaatgctccatgtcccctctgccagttggtgtttatcaaaggacaacggaggaagagagacaaagtgcctggatgtgtgtgttaatcaagagttgtcaggaccctgcctctaaaagaaagcgctaaaatgatgcttttgacaagacttttctcaaagtggatgcagtctaagggttggaaaacaaggcccaatcaggctaggtctgacttgtcgcctgcttttgtaaataaagtttttattggctcacagaccaa

SEQ ID NO: 52257 - DNA, 426 bp, Homo Sapiens
aaagtacatgagccatgagattcttccttgtgctgcagcacgctggggagtgcaatctggaaagaacatacctaatgtgtttttcaccatccattatctctgaactttgaaatattacttttgaataataggctggacacttagtttgacttgaaagagctcaatgctcatcggaaaacagggagaaacctaatctgaagatggaagcatactaaggacaattttctccactcacatccacatttgaaaagagggacagaaaaacataggtaactctactttcacaaatgaggatagtttaacggatagaagaaacaagcacattattcacctgtgttgtaaaacatctactcttttttgtcactgaataagtgttcccaaagtacagttaatcctaatatgaaaactttgaattgtaaaagatta

SEQ ID NO: 52258 - DNA, 855 bp, Homo Sapiens
aagccctgcaaccagcaaccactcccagcactatgcaaatgaagacagtaagatgggctcaacagtcactgccgctgttatcgggatcatcgtgcccatagtggtgatagccctcctgtgcatgagtggatacctgatctggagaaactggaagcggaagaacaccaaaagcatgaattttgacaacccagtctacaggaaaacaacagaagaagaagatgaagatgagctccatatagggagaactgctcagattggccatgtctatcctgcacaagtggcattaagccttgaagatgatggactaccctgaggatgggatcacccccttcgtgcctcatggaattcagtcccatgcactacactctggatggtgtatgactggatgaatgggtttctatatatgggtctgtgtgagtgtatgtgtgtgtgtgattttttttttaaatttatgttgcggaaaggtaaccacaaagttatgatgaactgcaaacatccaaaggatgtgagagtttttctatgtataatgttttatacactttttaactggttgcactacccatgaggaattcgtggaatggctactgctgactaacatgatgcacataaccaaatgggggccaatggcacagtaccttactcatcatttaaaaactatatttacagaagatgtttggttgctgggggggcttttttaggttttggggcatttgttttttgtaaataagatgattatgctttgtggctatccatcaacataagtaaaaaaaaaaaaaaaaacacttcaactccctcccccatttagattatttattaacatattttaaaaatcagatgagttctataaataattta

SEQ ID NO: 52259 - DNA, 790 bp, Homo Sapiens
  misc_feature (621)..(621): n is a, c, g, or t
ggattgtctcagtcttatatgtttggagctattttaaatagtgttgctttgaacattcttatacatgtcttgtggtaagcatatatatgcctttctgttgggggaaatatctaggaaaggaattgctgggtcgtatagatacacatttgtccagccttagtagctattgccaattagttttctagttttaccagtttgcccattcctagtgcatgaactcccattgctgcatatcattatcgatgcttgacatgtctgttttgtgttttcattttagccattctggtggatggcagagacactctttgtggttataatttgcatttccctgacaagtaattaacttgaacacttttctatatgtttattggttatttgactgtcttctttggtaaaatgctttgaagaggaacattttcaattatcagaagaaaaacattttatttttctaataacattccaaacaattatgatgacgctattctaaggaccatactttgagtagtgaggctttattgtagaagagctaagtgaaatgatatttgaaagaacctgcagaatttgattgtggcgtagcttttggcagtcttaaagggtttgaggtgagtaggagaaatctcnaaaaaaaaagaaagacggtgaaaagattttgggaacttaaactttttattatataaatatccgatatattcaatagtaagaaaagtagtaaaataaaccctgcaggtatttgtttatccagcttttcataattgtcaactggaccttttgcccatttccgggttcctcc

SEQ ID NO: 52260 - DNA, 485 bp, Homo Sapiens
  misc_feature (475)..(475): n is a, c, g, or t
aatttaagggaaaaaacattgaggggcctaatctacattttgctccggatccaatgatttaatttttgggaagaaaaatccagtgattaaagtcatgcaaggagatggcctggggcttgctaaaagtcaggttgcagtttccattgcattcaagaaaatcagaaaaataaatacaacttttagaagaaactaagttttctcccattcatgtttagctattggggggtctcatacttctggacttgcttagacctatgctatctaatatggtagcctctgcccatccatatgtggccactgagaacttgaaatgtgactagtttgaattaagatgtgctgtaactaaaatacaccctggatttcaaagacttaataaataatgtaaattatctattctttcctgttgattatatattgaaatgataatattttggatatgtttgggttaaataaaatatattactaaaagtaaaanaaaaaaaaaa

SEQ ID NO: 52261 - DNA, 804 bp, Homo Sapiens
ccaccattgaagattcttacacaaagcagtgtgtgatagatgacagagcagcccggctagatattttggatacagcaggacaagaagagtttggagccatgagagaacagtatatgaggactggcgaaggcttcctgttggtcttttcagtcacagatagaggcagttttgaagaaatctataagtttcaaagacagattctcagagtaaaggatcgtgatgagttcccaatgattttaattggtaataaagcagatctggatcatcaaagacaggtaacacaggaagaaggacaacagttagcacggcagcttaaggtaacatacatggaggcatcagcaaagattaggatgaatgtagatcaagctttccatgaacttgtccgggttatcaggaaatttcaagagcaggaatgtcctccttcaccagaaccaacacggaaagaaaaagacaagaaaggctgccattgtgtcattttctagaatcccttcagttttagctaccaacggccaggaaaagccctcatcttctctttctctcctcagtttacatcttgttggtacctttctagccttagacaaatgatcaccatgttagccttagaccaagaagctggctagtcctttctgtgaagctaatacaatggtcatttccagacaaatttaaaggaaacactaaggctgcttcaaagattatctgattcctttaaaatatatgtctatatacacagacatgctctttttttaagtgcttacattttaatagagatgaatcagttttggaatctaagctgtttgccaagct

SEQ ID NO: 52262 - DNA, 1058 bp, Homo Sapiens
aattcccgggatctttcgtctctatggagacgatgccctggacaatgctctgcagaccttcatcaagyttttcctctctattcctcacagtgatctcttggattaccccaagctcagccagtcttattattcactactggaagtcctgacccaggaccatatgaactttattgcaagcctggaacctcacgtcatcatgtatattctctcttccatttctgaaggacttactgcacttgacaccatggtatgcacaggctgctgctcctgcctggaccacattgtgacatacctcttcaagcagctgtcacgtagcaccaagaagaggaccacacccctgaaccaggagagcgaccgctttctgcacatcatgcagcagcatccagagatgatccagcagatgctgtccacggtgctgaacatcatcatctttgaagactgtaggaaccagtggtctatgtcccgaccactacttggcttgatattgcttaatgaaaagtatttttctgacctaagaaacagtattgtgaacagccagccaccggagaagcagcaggccatgcacctgtgttttgagaacctgatggaaggcatcgagcgaaatcttcttacgaaaaacagagacaggttcacccagaacctgtcagcattccgtcgagaagtcaacgactcaatgaagaattccacttatggcgtgaatagcaatgacatgatgagctgacacctccttggactctacctgtacagagcagcgtccctttggtttggcccagaggggcgaacaattgcaagggagagggcctggctgatcctggctcttttctccaggggtgtggggaaaatggcaaaggtcaacwagctgcttccccagggaawaggggtgtgagtcactcactagggggcagggcgctgctggttcctkggggactgggtgggaagggtggtgggaagarawaaaaaaaaaaaytatamtccagctctcctcytggggcaccaagtgggraaacctagtkcctgcaaamcttccttgwaaaaatgtmwtttttataaattttaaa

SEQ ID NO: 52263 - DNA, 707 bp, Homo Sapiens
ctctaaagagggcgtaagcaatagaggcacctgcagccctccttcctcagcaggaaatcaatgtggagccccagagggacattttatctcagagagagcatgctggccacaggacccagtgcagccctgcttcctgcaccgtgggtctttcctgatagctgcaggcttgagattgcagcctcaggataggacacgttcagatgccttccagactacacacactatgcttagattcgagagtctttcctgaccttaaaatttgtcccttgcttactttcacactgcagaagatttatatatatattcatcattatttttgcagcagtacaagtggaaacttcaaaaaaatcattccctttcatgtcctggtctttttaagtcttgatatgtaaccattttcataaatatccaaacagagattgtcattccccttaaaaacagaaacaaaacacaaaactagtgcttgtgaaaacacacagcgcaaagacaattatcctattgcattaaaaaaaaaatcagtctgcctagagacatttcattggctgcattgtcttaattccctaacgaaactgcatcaaaatgtcagttgtaatttagcctctgatcagctgttaaatattatttaaatatttacaggtcctgtggggtatctcccattacccatgtcgccctcaaattacataagcgatcataaaaaaaaaaaaaaa

SEQ ID NO: 52264 - DNA, 587 bp, Homo Sapiens
  misc_feature (525)..(525): n is a, c, g, or t
aaattattaataaagtaaaaaaaatttttaatgtataacagaattgaccaataggccagttttctggtaacttatgatagtagattgtttctttagaaactgggcagaagctctgcattctcacttgtactttgatttcttatttcttggtcaggcaatttgaggaaagaagaaatggcatggggaatatatatgttttgtttcttagggaaaacagtctgagaaatgaataaaaagcatgaagtacgtgtgtgtgtgtgtgtgtgtgttaccatggaaaaggatattcacagtagtacagttctcaatatttttaattagatgtcatatttttttaatatagtaaaaccttgggatatagaatattacatcttttgagaatgtatgtgtctctaagtaagtaaaatctaatgcgtataggagactgatagctaaaaatgaatggaacattaatgtacttttataattaaacctcttatctatcagaaattgtaagagaatagatacatgttttgaatgtaaagntgaaaagtctggtttactgaataaattgaaagtgatttataaaatctaaaaaaaaaaaaaaa

SEQ ID NO: 52265 - DNA, 620 bp, Homo Sapiens
  misc_feature (499)..(499): n is a, c, g, or t
  misc_feature (592)..(592): n is a, c, g, or t
gcatctgtggcaaatactagaatgaaatgcaagaaagctcactgcaaggagtctccctccctgcagattccaaggctggaatctttttcttctggctccaggcagcacagacagggcctagcctggagagggtggacaagatgtcctctcagggtcttcaatggccaagtccatgcccactgcagaatctttctgtctacccgtaagtatcctttcctgagttccaggcaaagctggggatgttagcctatgactgtcatctgacttggaaggtacacctaggggccggggggaggtcagcaggggagtttgggagccacttctccccccacgtggcactggagtgtgaactggctcattctggacaccagcatggagccagcacgggaacaggggggcagcctagagcacaagctctatctgtgtccttcagagctcctgggaaacatgatgcgccctcatgggaatggcattttgcatatcacacaggctgtcctgngagtcaggcagactggattgtcacgtgcggtgtgcatgcagcagcttgtgcactgcagtggacctgtggaccatttctaaaggtgcacaacanataataaatgtgtccttctttgtttttt

SEQ ID NO: 52266 - DNA, 662 bp, Homo Sapiens
ccctcctgagcgctcgctcctctcgctcctctcccctcacccgccgccttccctgctgggtccctctccccggtctccacctctcctccctctcctggaagggaaaagtctgccaagctggggactgccacgaccaaaccaacaaaggccgaccgaaggcggagaacttgaaaagaacttgttttgttccagttaaggaacctgcaggaaaatccacacccacattgcctggttttgaactggagagctgcgtgtgtgtgtatattccaatggagacagttggaaaacctgtacttcagagaaaagaagttttccgtggaagttcatgacccacgcagggcttcagtgacaaggaggacgtttgggcacagcggcattgcagtgcacacgtggtatgcatgtccggcattgatcaagtccatctgggctatggccataagccaacaccagttctatctggacagaaagcagagtaagtccaaaatccatgcagcacgcagcctgagtgagatcgccatcgacctgaccgagacggggacgctgaagacctcgaagctggccaacatgggtagcaaggggaagatcatcagcggcagcagcggcagcctgctgtcttcaagatctggtgccaggagacactgcattctactcccaggttctca

SEQ ID NO: 52267 - DNA, 549 bp, Homo Sapiens
  misc_feature (157)..(157): n is a, c, g, or t
  misc_feature (160)..(160): n is a, c, g, or t
  misc_feature (548)..(548): n is a, c, g, or t
tctgaagagctaaagacttcctgaaatttaaaaattagtgcttttatttgcttgtcctgctaagaccgtagcaaaggccatcctcctcccattgacagtttagagtgggcagaaacaaccacggttaccctagaagtaaatccagagctgcgggacntgngaggacaaaaccaaccttccagggaagccgaggagaagtcatgccttcaaaaggtgtctgcctttttttttttcaccctctctcctctaacctgtttgtaactgggaaatgaaatagttttggtttgcaagctgtcgccagggagtggagcaagactttgtaataaacaagagcaactgccagagcccccagcgagcctctccaaggccagactgccaagaaaagctggcagtgtgacagcaagtttcattcagcgtggccggtggtcacttgaggagcgaccatgaggaggatggccagagggggtacccccagtctcaccttggggaagagtacagcctcctattagtgagctgtgtgggctattaaaatttccccaggctgagtnt

SEQ ID NO: 52268 - DNA, 620 bp, Homo Sapiens
  misc_feature (511)..(511): n is a, c, g, or t
  misc_feature (540)..(540): n is a, c, g, or t
aaaatatgtggaagtttccaggaggcctgtcagagcctgaagagatattggagacacagcggttcgagaagtttttgaagagactggtataaaatcagaattcaggtccgtcctgagtattcggcaacagcacacaaatcctggagcttttgggaagtcagatatgtatatcatctgccgcctaaagccatattcattcaccataaatttttgccaggaagaatgcttaagatgtgagtggatggatctcaatgacctggcgaagactgaaaatacaactcccatcaccagcagagttgctaggctgctgctgtatgggtacagagaagggtttgacaaaattgacctgactgtggaagaacttccagcagtttacacaggactgttttataaactctatcataaggaactgccagagaattataaaactatgaaaggaattgattaaattcacatttatatgtttagaaacatgtagactaacgaatgacataagaaatagtggacattntggattgattaaacatctgactgtgattntctaatgtatatgatttccatgaagaaattttgtttctaaacatgcacattttaaaagcctccttttcgaataacccaga

SEQ ID NO: 52269 - DNA, 827 bp, Homo Sapiens
gggtcactgcctcatccaccggagcgatggcgtttctccgaagcatgtggggcgtgctgactgccctgggaaggtctggagcagagctgtgcaccggctgtggaagtcgactgcgctcccccttcagttttgtgtatttaccgaggtggttttcatctgtcttggcaagttgtccaaagaaacctgtaagttcttaccttcgattttctaaagaacaactacccatatttaaagctcagaacccagatgcaaaaactacagaactaattagaagaattgcccagcgttggagggaacttcctgattcaaagaaaaaaatatatcaagatgcttatagggcggagtggcaggtatataaagaagagataagcagatttaaagaacagctaactccaagtcagattatgtctttggaaaaagaaatcatggacaaacatttaaaaaggaaagctatgacaaaaaaaaaagagttaacactgcttggaaaaccaaaaagacctcgttcagcttataacgtttatgtagctgaaagattccaagaagctaagggtgattcaccgcaggaaaagctgaagactgtaaaggaaaactggaaaaatctgtctgactctgaaaaggaattatatattcagcatgctaaagaggacgaaactcgttatcataatgaaatgaagtcttgggaagaacaatgattgaagttgacgaaggatctctactcgcacaataagaacacgaaatatgtgctgagagtgtaaagtagagatgagatgtgtccatgatagcacagaacagtagtctatactgagcttctaatagaagatagtgta

SEQ ID NO: 52270 - DNA, 1061 bp, Homo Sapiens
gattctagatgcggttgtcactgaaggtggggagaattttagcgttggacagagacagctattttgccttgccagggcccttgtccgcaaaagcagcattcttattatggatgaggcaacagcttccattgacatggccacagagaatattttgcaaaaagtagtaatgacagcctttgcagaccggaccgtggtgacaatagctcatcgagtacacactattctgacggcagacctggttattgtgatgaagcgaggaaatattttagaatatgacactccagaaagcctcttggctcaggaaaatggagtatttgcttcttttgttcgcgcagacatgtgaaggagtgtcttaaaacaatacatgtatttaaaataatgcagtcataacctaattaatggatcatcagcttgacctctgtwaagtggcatcttaaaacttttacagatttttgcacaaaaagtggacatttatttttcctgtttttaaaacagtttttcaagatattattgcttaatatgttcattattgatgtttttatagtgatccagccactctagctttaagaatagctaggttgtattaaaacatgtcagcyactttaagtgataaatcaatagctaaagttttctcctaactttaagtctggtaaatatctctcaggaatggaagtgtcaatgagtagtcagtattactatactcttgtttgtaagaatatattttccttattgttggagtctccagaggttattggaaggaataaaaaaggacatgttttctaacgaaactctcaaattcattatctacttcatgagaatttatttgtattcattaacattagtaatacctatttttcttaagagccttcttttttcccttttgtttcttgtcaccaagaagttatcacacttatacttattctataaggccaagccttatctagaaagatcatgagagttttggatattttaaamtawactcgaatttcatttttcygtctgtaagrggattcttagawacaggcwaagktgttccttccarctgagtcaaratgataggt

SEQ ID NO: 52271 - DNA, 576 bp, Homo Sapiens
  misc_feature (463)..(463): n is a, c, g, or t
  misc_feature (465)..(466): n is a, c, g, or t
  misc_feature (468)..(468): n is a, c, g, or t
  misc_feature (486)..(491): n is a, c, g, or t
  misc_feature (498)..(498): n is a, c, g, or t
  misc_feature (510)..(510): n is a, c, g, or t
ctgaggtcagcagttaaagaccagcctgaccaaaatggagaaaccccatctctactaaaaatacaaaactagccgggtatggtggtacatgcctgtaatcccagctactcaggaggctgagacaggagaatcacttgaacctgggaggtggaggttgcggtgagctgagatcgtgccactgcactccagcctgggcaacaagagcaaaaatccctctcaaaaaaaaaagtaaacatgggcactgattgttttaataaaaatgggaaacagactaaatggctattcacaggaaactgataagatatatgttattttttttaatgagctagggcaatatgttttgacagaaaactctctaagatttagtaagtgaaaaaaagtaggatgcaagagtttttatagttgattccatttttgttgaaggagaaaaactaaataaatacgagtaatttcatagaaccgnannanaaaaaaaaaaaaaaaaannnnnnaaaaaanaaaaaaaaaaanaaaaaaactcgagggggggcccggtacccaaattgccctatggggagcgattaacaattcactgcc

SEQ ID NO: 52272 - DNA, 561 bp, Homo Sapiens
aatataaaagtgattaaaaggaaatagattatgcagaagtagaaaaattcattggattcatcattgtaattggtgtttataaatctaaaattgaaaatgttttgcagtcatggaccaaagaagataactgttctcttttcaacacaattgggagccatcagtggttttagaagtgttgcaatttgacagaacaaatgcaagaaagaagaactagattaataagctagcgcctgttagaaatattttttgaaatctgaaatcaatatttataagataaatatgttccaagttcaccaaaagcagtagatgagcagttagttgcatccaaaagatgttacccatttcaggtatagatgccttcaagtccaggaatagttttgggttatcattaaaatgaaaatttagagtgaagttttttttacaatttaattattcctctgcaaagttttgctaagatgacttaaatataaaagattgaaaagattcgttgtatctagattgtaagtgataatgcctgtttttccttaatggaagcattaaaaaaaaaaaaaaaaagaaaag

SEQ ID NO: 52273 - DNA, 579 bp, Homo Sapiens
ccttttgcccatgttgtctggaatgcccttcttctccctcttgtttacatcaagcatcagactgaatatccctcttgtgcggccttctaaaacctcccgtccaaagcgaaatatattgccctctatttatacttttacagcatttggcacacaagtacagagtagtagctttttatcacattctctgataattatatagatatggtatttcttagctctctctccaactggctaataagttgctttttgtctgagtgcctaattttgtgttttgtgtctgagtgcctcagttcctcaaaaaaaggttttttgattagttcattattcatttgaacatggaaattatgctcactagtggcaaatgccactaaccgtattccagaagctaggtgtcatgtttgcaataagatatattatcccttctacaagtcaccttttatttcaggcatttgtaaatgcccattaataaagtatggttcataaattttaccttgtaagtgcctaagaaatgagactacaagctccatttcagcaggacacaataaatattattttataatgccgaaaaaaaaaaaaaaa

SEQ ID NO: 52274 - DNA, 802 bp, Homo Sapiens
gacgactaacatcccagagccagtgtggtccttgtaggccgaggttgggtagatggcagaaataaaaagcattctgatagagaatgaaggcatttgcttatgttattagctgaatgattccttagcgatataggtaggagtccacaaaaatctatgaaaattataaattgttattttttaaactagacattaataaactcccttaatagtgataaagagctcctcttgactaaataagtcatcctaacatggagttcaagttttcacaatcgcttttaacagaataatacaagatgacagtatagctgacttgcaattataatacaatttcaattacaatgagcatactttctagattttctttcccaaatggagagcccaaaaagaagtaacaaaagactcattcatcaagtgaagaagaaaatcctttatttttggatgagcaaaaataagaataaatggctgttcacactggataagaccatatcaaaagtgacagtaaacatgtacactgttggtgttatatggggatggggtcctcggtaatcttgttattatttatgtttattatcatgtttatcattaattattcaataaattttaattcacagcagcgacgacaactgaacaagcacataacagagaaaaccatgctgagcgcgactcagcgggccctcaaaacagcgttctaaaacacacctctggtgagccacggcgccccaatgaggctatgcaccacggggcaaaaggggtccaaggagaactcgggggcaaacaaaaggtgtgggcgtctcaccaataa

SEQ ID NO: 52275 - DNA, 542 bp, Homo Sapiens
ctgatatgatttttcaataaccacttgtatcttccatcatccatgagaggtgggaagaggtacactgtatctctgcaataaaactttggccaggttctacctcctctgagcaaaggatacttttctatgtaggtgtagatggttctcctttactaatctgacatggtgcatctggagacaacatctgatgggatccaaagacaacttgaaacaaaggtggatgtcagctcttggtgtgttttcatttggttctcttttttaaatctcccttttgttatcgctcctgttgtagcgtgtccatcagtgtgtgaagggtgcgccctgttccaatgatactgcattgctgcatccagcctttcgtgggagcacggtaccaagcgtccggaattgattatcccaatcatttttgatatgtaactgaaaaatttggtctcatgcaataaaaatgtactggctgcattttagcaaggtttatttactcttgcaagtaaaaacgatcaaccgtgaagcgtaacaaattctgtatttagtttttttttctg

SEQ ID NO: 52276 - DNA, 751 bp, Homo Sapiens
attgcagtgtcaactaggcctcagttacttttcagtttgcccaaattgagcccatctcaacatttggcagtccttaccaagcaactacttcactgtatggcctgcaaccaacttctgcaattcagaggatccatgcttgctctggccatggttagtctggaaatggagaaactcattcctgattggctttctcttacaattgaactgcttcagaaagcacagatggatagctcccagttgatccattgtcgggagcttgtggcacatcacctttctactctgcagtcttccctgcctctgaattccgtttatgtctaccgtcccctcaagcacaccctggtgacctgtgacaaaggagtgttcagattacatccctcctctgtcccaggcccagacttctccaaggacaacagcaagccagaagtgccagtcagaggtacagcagccttttaccatcatctcccagctgccagtgggtgcaagcagacctctactaaacgcaaagtagaggaaatggaagtggatgacttctatgatggaatcaaacggctctataatgaagataatgtctcagaaaatgtgggttctgtgtgtggcactgatttatcaagacaagagggacatgcttccccttgtccacctttgcagcctgtttctgtcatgtagtttcaacaagtgctacctttgagtgtaaactaaggtagactactttgggaatgagaacatgcaaaatcaggaaaggctgtagaag

SEQ ID NO: 52277 - DNA, 724 bp, Homo Sapiens
agtttaagaggattatgaacactaccccagtgagggccttgatgcttggcctactgtggaatggaaaagtgtatttgaaaaaaaacagatttctagaagctctcaatcactttgagaaagcaagaaccttgatttatcgtcttcctggagtgttaactttggcccacgagtaatgtgattatgaagagtctcagccacaaaaaataaagatgctgttagagaaattttgttgaagaatgcaagttccctccagtgccagatgccatttgttgctatcagaagtgccatggatattctaagatccagatatacataactgatccagactttaagggttttatacgcatcagctgttgccagtactgtaaaatagaatttcacatgaattgctggaagaagttaaaaactacaacctttaatgataaaattgacaaggattttctacaaggaatatgtcttacccctgactgtgaaggtgtcatttctaagattatcatcttcagcagtggtggtgaagttaaatgtgaatttgaacacaaggtcataaaagaaaaggttcctccaagacctattctgaaacagaaatgttctagcctagagaaactaagactgaaagaagacaaaaatggcagagaagatccaaaaaaagaagcaaaaaagtaggccaagaaagatgggggggcttagagaagttatccacccaaaatgagagcgaaagaactgg

SEQ ID NO: 52278 - DNA, 417 bp, Homo Sapiens
  misc_feature (8)..(8): n is a, c, g, or t
tgagcagngcacagggctccagcagccggatagggaagggggccccagcccaccctacagctctactccctccatcctgctgcagaccccccattcacacagtgagtcagtaacaggaaggagcccttggactgcggcaatgccattagcgaccccatgggggaaaggggaagtggggagggaaaggaagaggcgaggcatcctagctccctcaggccggaaggctgcaacagctgcagccagcctcccactctgccctcaccccgtcctggccccaccactccactcactcagaggtcggtggccaggagcctggccaatcagaagcaccaagggcatcttgagacctctccccagatctactgaataagaatgtctaagatttctagccattacaactacaaagaaaaaaaaaaa

SEQ ID NO: 52279 - DNA, 768 bp, Homo Sapiens
  misc_feature (728)..(728): n is a, c, g, or t
  misc_feature (754)..(754): n is a, c, g, or t
  misc_feature (757)..(757): n is a, c, g, or t
  misc_feature (760)..(760): n is a, c, g, or t
  misc_feature (768)..(768): n is a, c, g, or t
gctcattatgactgcacaacccctttgacatttgtgctgcatcatatcggcccatctaccgtggaaagccagtagaaaagtgtccactcagtggggcctgctattcccctgagttcaaaggtcaaatctgcagggtcaccacagtgacagagattggcaaagatgtgattggtttaaggatcagtcctctgcagtttcgctaaggccccctttgtgtgcatgggtcagtcaccatatgttccccccagagaatgtgtctatatcctccttctaacagcaccttccccctgcagctactcttcagatctggctctctgtaccctaaaacctagtatctttttctcttctatggaaaatccgaaggtctaaacttgacttttttgaggtcttctcaacttgactacagttgtgctcataattgtccttgcctttccagcttaattattttaaggaacaaatgaaaactctgggctgggtggagtggctcatacctgtaatcccagcactttgggaggctacggtgggcagatcatctgaggccaggagttcgagacctgcctggccaacatggcaacaccccgtctctaataaaaatataaaaattagcctggcatggtagcatgcgcctatagtcccagctgctcaggaggctgaggcatgagaatcgcttgaacctaggaggtggaggttgcattcaactgagatcataccacttcattccagcctgngtgacagagcaagactctgtctcaanaanaanaaaaaaan

SEQ ID NO: 52280 - DNA, 919 bp, Homo Sapiens
  misc_feature (900)..(900): n is a, c, g, or t
gagattgagattgattttgaaacactcaagccatccacacttagagagcttgagcgctatgtcctttcctgcctacgtaagaaaccccggaagccctacaccattaagaagcctgtgggaaagacaaaggaggaactggctttggagaaaaagcgggaattagaaaagcggttacaagatgtcagcggacagctcaattctactaaaaagccccccaagaaagcgaatgagaaaacagagtcatcctctgcacagcaagtagcagtgtcacgccttagcgcttccagctccagctcagattccagctcctcctcttcctcgtcgtcgtcttcagacaccagtgattcagactcaggctaaggggtcaggccagatggggcaggaaggctccgcaggaccggacccctagaccaccctgccccacctgccccttccccctttgctgtgacacttcttcatctcaccccccccgcccccctctaggagagctggctctgcagtgggggagggatgcagggacatttactgaaggagggacatggacaaaacaacattgaattcccagccccattggggagtgatctcttggacacagagcccccattcaaaatggggcagggcaagggtgggagtgtgcaaagccctgatctggagttacctgaggccatagctgccctattcacttctaacggccctggtttgagattggttgtcccaatttattttaagctaggtaacgctgggggggagggtgggggccttggccccccttaccttccagggggcgggccccacgggccccccttccttttccccttgccctttttttcccccagtggggctgttcccttggccccccccccccgcctctcggggcccttggcgcgcgaccccccagtnggtccacgcccgggggcat

SEQ ID NO: 52281 - DNA, 884 bp, Homo Sapiens
gcattcttttttatatgaaatcataaactatcacccgctgcttctctgagttacttttaattttgccttgtggttatggttggcgtttccttctgttggttttcagagccccatgtctatatagtcctgagtgcaagtaattactatacttgtaaatgaagatcagtatttctgcctagatctgataaaaaattttcttgtcttagttataaaaattcaaagaaatgtgttacaaagatacttagtatagctcctcagccataacctaagacttgggatgaaatttaaaccagatacgatttacttgcagatcataaggctttttatactcttgttatcaaaatggcttatttttcaggcactaaggattgttaagagaaaagcttttcaacgaaggattgcctttcttctcccacactgttcttgatttcctctctctttcaggcctcaacaggcactgtattcattgccaatgttccaaattatcaaattcaagtgaatttatttgtgtgttctttacttatataaaaaaagataactttaaggatgtgcaagtacatttccaactgctagcacaaccagtattttgtaattaaacaaatcgctgtatggtatggtcttctacacattttatgtctatagatatctatcgatcatctttctattctgtttcatgactggaataatgtaaaaccaggtgggcattggtatccaaccagatacctcatttttaataaccaaggcggggcaaacctttcttttaataatattcttgtgtcgaaaaacaaagccagcacaaacaacaaaaaaggggggccaaatacccggggacatgcccctttgaaggcgcccagagggcaaaaagcccgcgcacaaggcaacac

SEQ ID NO: 52282 - DNA, 763 bp, Homo Sapiens
  misc_feature (701)..(701): n is a, c, g, or t
ttttttttttttttctgggaatcaaatttctgtggtttttatggccagaaattttaaggacttgtgtgtgctgggatatgagaatagaagctacagagttcttttcttgggacctagactgggaggtgcaatgtcaggacctccaggtgaatggtaggatctgagttgaccctgcagttcggttatgcagtcaattatttctttttaagaggaggaggattcacttgggtgttgggatcaaatttggattctgtcccaggccttactgtaaaactaggggattgcctttccatatctgctgggggtggagacccttatgtgcagcactcaatcccactggaagcctaatgctgcagtcagaagcaatgcctggctggggcagtaggggaaattccacccaattttgctatgagcctaaaacctctttaaaaacggtcagttaactaaaaaataaaaatcaagtctttaggagagtagaaaacacaattaactaaaaagcagggacatctgaaagagacgtattaagttaacatttttaaaaatccaaatgaaagtaaatggaataaatgtatcaggtaaaggacaagttgtaagcttggatttttaggtctagcaatacactgtttacaagagcatcacctaaaatgtgacacaagatgttgaaaggatgaaaaaaggtatagtagacatacactaaccanaaatgtagctctttgaatctcagaaaacagtagattttaataaagtgtgaaagttgtcctcg

SEQ ID NO: 52283 - DNA, 653 bp, Homo Sapiens
tttagaatttaatatatgtttatttgtgtagtaggaacattcaggtatataaataaggtaaatgctttccaacgtacagtatatcatgttcttacattgcgtggaaaaagaacctacatgtattgttcaacatggatcacgagtgcacagagagagagatcagctgcatttagtgaaacgccaagttgggaaaatggcacagcagtagcgcacaggcacacagctatctggggaggctgtggggactgtcacgtggactctacacaccgagaactgcttcaaggtcgcctgtgtctgagtgcgggtaaagtgaatatcaacacccaggctatcagggtgagacaactgaattccatcatgtccatccactttacaaaggggtgggaggcaccatggagaaactgaccagaaatgctctgccctgtcacagaggagacagagccagggcagacacggctgacctctgggaggcacagacactggcagtgatgggtcccatgggatgcctggcactcccagcacagacagctccccaaagcaggtggggaggccctttctgtgtttgggaactttttagttaaacaaatcctcagaatcgaattaagaaggatgtccacagctcgatcaaaaaaaaaaccaaaaaaaaaaaaaaa

SEQ ID NO: 52284 - DNA, 875 bp, Homo Sapiens
  misc_feature (772)..(772): n is a, c, g, or t
cggcccgaggagctgctgcaaatggagctgctcctggtgaacaagctcaagtggaacctggccgcaatgaccccgcacgatttcattgaacacttcctctccaaaatgccagaggcggaggagaacaaacagatcatccgcaaacacgcgcagaccttcgttgccctctgtgccacagatgtgaagttcatttccaatccgccctccatggtggcagcggggagcgtggtggccgcagtgcaaggcctgaacctgaggagccccaacaacttcctgtcctactaccgcctcacacgcttcctctccagagtgatcaagtgtgacccagactgcctccgggcctgccaggagcagatcgaagccctgctggagtcaagcctgcgccaggcccagcagaacatggaccccaaggccgccgaggaggaggaagaggaggaggaggaggtggacctggcttgcacacccaccgacgtgcgggacgtggacatctgagggcgccaggcaggcgggcgccaccgccacccgcagcgagggcggagccggccccaggtgctccactgacagtccctcctctccggagcattttgataccagaagggaaagcttcattctccttgttgttggttgttttttcctttgctctttcccccttccatctctgacttaagcaaaagaaaaagattacccaaaaactgtctttaaaagagagagagagaaaaaaaaatagtatttgcataaccctgaacggtgggggaagaggggtgtgctacanatgatagagggattttataccccaattatcaactccgtttttatattaatgaacttggtttcccccggtggaaagaataggcctttaacaccaaggagggcga

SEQ ID NO: 52285 - DNA, 634 bp, Homo Sapiens
tgtaactgtttgttttgttgttgtttttttttcaagccaaatacatgacataagatcaataaagaggccaaatttttagctgttttatgtacaaggagagatctgtttcattttgttttgccgtatttctagatataagttttagcatgggccaggaaggactaaaataaaagtttttaaggtactgtactttttgccatacttgactcatatactcaaaatacagagttgtcttggtgtaggaattggaaagcaagagtggaaaggaacgtaataactcgttggagtttaaaaatgagggtcttggcaagtaacactgatgtctgaaaaaaaattaaatataaataaataaataaaaatgagggtcctcagctgttctcttcatatcctattacagtctctcagattcttgtgggggcactcttagatctcccttggagacaaggttatagttatatgttgttaatctcgcagagcttccttttagtcacaatagccttcattttctgccatgccccttcataagggagaaggatgtttgtaccatgatcctccccgcataatctatggaattaggagtcctgtgtggagtcttatcaataaatatgcacattcatcaaaaaaaaaaaaaaaa

SEQ ID NO: 52286 - DNA, 722 bp, Homo Sapiens
  misc_feature (602)..(602): n is a, c, g, or t
  misc_feature (643)..(643): n is a, c, g, or t
  misc_feature (661)..(661): n is a, c, g, or t
  misc_feature (722)..(722): n is a, c, g, or t
gggttgctttgttaaaaaaaaaaagattgtattgctgtccttgaatgccatagtcaaagagagtttttaatagaaccatgttggttgcactttgtagtgtttggtgctcatttaaatatctgaacatttactacagtttttaactctactgtgtaatataaaagatcttgcagaagttcttagtgttggtttaatattacctaatgaaagtgatgacatattttttatatctggaatgagcctgttgggatcgcattgcataccttcggggtacaagtcagtttctacactgggtgctgatccttgcacgcgccctttctaccatctcacggtggggatggccgcagggctgtgcacccagaagaagatggctgttagcgtttcggccttcataatggcctgagactttctttctgtaggtggtctggagctgtccggctggtggccccctattttgccatttagcgaacaaccacaggaattttaaaaacaaaaacatcccaagattttttcatttcaaaatgcttcagagtccacattagatcagatactccgctgtcggcacattcagctgaggttcattaccatcgagactgcaatgngatctatgtttcatctcgtttttagataaaaagcttcaggnaacagcccaagccctcanataaaaataaaaataaaaaaatacatgctgcgcctcgccctcaaactttctaacatcgttn

SEQ ID NO: 52287 - DNA, 577 bp, Homo Sapiens
gcacgagtaacggcctataggattgttaagactgaatattttaaaagagcttagaatggtgcctgacaaatgagaaacaataaatactgattattggccataaagtggtattaaaactggatctcttttcttccatggcactactctcattttgaagtttatgaacagtaggacagtgtattgtaaattccctttagtttgttacagtagccaattgaaaatgtatatcccaaaatttaaaaaaaaaagtaccagcagcaataaaattgcactagttttatctggtacatacaaaaacagccatttaaaatctgatgattctgtggaattggtgtccctgttagcaatggcagagaccagcctggagcctagatctggtgcttcttctgtgctgtggtttaccccaaacctttaggttgtttattcattcagattagatagactggagccataaagttaatttgcacctagctttttggagaatagccatgattaactgctattcgtggtgggggtgggggggaaccctatgatttactatgcagatgaagagggtaggaactaaataaaggacttt

SEQ ID NO: 52288 - DNA, 791 bp, Homo Sapiens
  misc_feature (770)..(770): n is a, c, g, or t
  misc_feature (775)..(777): n is a, c, g, or t
  misc_feature (781)..(785): n is a, c, g, or t
  misc_feature (788)..(789): n is a, c, g, or t
gatgaacctattctgaagcacttgaaagatattaaagtgaagttctcagatgctggccagcctatgagttttgtcttagaatttcactttgaacccaatgaatattttacaaatgaagtgctgacaaagacatacaggatgaggtcagaaccagatgattctgatcccttttcttttgatggaccagaaattatgggttgtacagggtgccagatagattggaaaaaaggaaagaatgtcactttgaaaactattaagaagaagcagaaacacaagggacgtgggacagttcgtactgtgactaaaacagtttccaatgactctttctttaacttttttgcccctcctgaagttcctgagagtggagatctggatgatgatgctgaagctatccttgctgcagacttcgaaattggtcactttttacgtgagcgtataatcccaagatcagtgttatattttactggagaagctattgaagatgatgatgatgattatgatgaagaaggtgaagaagcggatgaggaaggggaagaagaaggagatgaggaaaatgatccagactatgacccaaagaaggatcaaaacccagcagagtgcaagcagcagtgaagcaggatgtatgtggccttgaggataacctgcactggtctaccttctgcttccctggaaaggatgaatttacatcatttgacaagcctattttcaagttatttgttgtttgtttgcttgtttttgtttttgcagctaaaataaaaatttcaaatacnaaaannnaaannnnnaannag

SEQ ID NO: 52289 - DNA, 762 bp, Homo Sapiens
tgcttacccgaggccgctgctgtgcggagacccccgggtgaagccaccgtcatcatgtctgaccaggaggcaaaaccttcaactgaggacttgggggataagaaggaaggtgaatatattaaactcaaagtcattggacaggatagcagtgagattcacttcaaagtgaaaatgacaacacatctcaagaaactcaaagaatcatactgtcaaagacagggtgttccaatgaattcactcaggtttctctttgagggtcagagaattgctgataatcatactccaaaagaactgggaatggaggaagaagatgtgattgaagtttatcaggaacaaacggggggtcattcaacagtttagatattctttttattttttttcttttccctcaatccttttttatttttaaaaatagttcttttgtaatgtggtgttcaaaacggaattgaaaactggcaccccatctctttgaaacatctggtaatttgaattctagtgctcattattcattattgtttgttttcattgtgctgatttttggtgatcaagcctcagtccccttcatattaccctctcctttttaaaaattacgtgtgcacagagaggtcacctttttcaggacattgcattttcaggcttgtggtgataaataagatcgaccaatgcaagtgttcataatgactttccaattggccctgatgttctagcatgtgattacttcactcctggactgtgactttcagtgggagatggaagtttttc

SEQ ID NO: 52290 - DNA, 806 bp, Homo Sapiens
  misc_feature (550)..(551): n is a, c, g, or t
  misc_feature (553)..(554): n is a, c, g, or t
  misc_feature (557)..(557): n is a, c, g, or t
  misc_feature (606)..(606): n is a, c, g, or t
  misc_feature (647)..(648): n is a, c, g, or t
  misc_feature (655)..(655): n is a, c, g, or t
gggggctgaagaaatcactattgtgtatatactcaagtctttttatttttcctcttttcataaatgctcttggacattattgggcttgcagagttcccttattctggggattacaatgcttttatcgtttcaggcttcattttagcttcaaaacaagctgggcacactgttaaatcatgattttgcagaacctttggttttggacagtttcatttttttggatttgggatagattacataggagtatggagtatgctgtaaataaaaatacaagctagtgctttgtcttagtagttttaagaaattaaagcaaacaaatttaagttttcttgtattgaaaataacctatgattgtatgttttgcattcctagaagtaggttaactgtgtttttaaattgttataacttcacacctttttgaaatctgccctacaaaatttgtttggcttaaacgtcaaaagccgtgacaatttgttctttgatgtgattgtatttccaatttcttgttcatgtaagatttcaataaaactaaaaaaatctattcaaaccnncnnaanaaccacaaaccccccaacccccaaccccaaaaccccaacccacccacancccccacacccccacccccaaccaaacccaaccaaaaaccnnaacacancccctttttgggccgcctcttcgcccttagaaaagtttttctaaaacaccttcttttgggggcgcccgggccccccgtaggggaaagggaaaactggggcccaaaagctggttttccccaaggaaaaacccggggcacaagcacaaggggg

SEQ ID NO: 52291 - DNA, 368 bp, Homo Sapiens
ttttttttttcctatgtgaaagttgaggacaatttatataactcactttttgtcatgtaaaaaaggttactcaagttgtactacccacataactgaaaatattggccatttggccttatctgtgagatttgacactaagtttttgttagagattggaaattatactagtccttttaaggggtaaaaaattcaattcaatactgacaaacttttgcttgtagttttactgtacatttatttttaaagaaaaagaaaacaaaagccagacaaacccaagttgtccaggcaaataaactcaaatctttgtcacgtctgatattataatcttctatgtaagttttttaattaaagttatttctatatgccgg

SEQ ID NO: 52292 - DNA, 741 bp, Homo Sapiens
ccctctaacatttttcatcagcctatggcaagtggttttgtggatttttctaaaggtctgccaatttccatgtatggaggcaccataataccctctcatcctcagcttgctgatgttccaggaggccctctgtttaatggacttcacaatccagatcctgcttggaaccctatgataaaagttatccaaaattcaactgaatgcactgatgcccagcagatttggcctggcacgtgggcacctcatattggaaacatgcatctcaaatatgtcaactaagttagaaggtctttactctttagccttgtttaagaaacctatgaccttggaagaaccatggggattttttttttaatgtgcctaagaaattttctctgaggctttagcaatggaaatttgattgcccattgtataagaacaaattgatttcctatccacctgattatgttctctggttagtttagccattttgaacttaagatcatatgaccttagtgcttttggctaaacatacagaatactacttgtatgcagaagagaattagttgattacatgtttcaaccttttagggtgataaatacatgtataattgtttacatacttaaaaggaaaaagttgagtaaatttcttgtcatatagtggctctacgtaatgtagcctgtattaatgtgaaaatattttacagaatattcaataaaaagatgaacagtcaaaaaaaaaaaaaaaaaaaaaagggcggg

SEQ ID NO: 52293 - DNA, 912 bp, Homo Sapiens
tgaagggagtgttgctcccagtccagaggcctgattctgttcggactgggttctcaagacacgaccaggttctcaagacacgagtccccttgttcctccccattaaagggggtttgtcagaagcaagaacagcccctctccccagtcacagcctgaagggaggccccgagagcttcctccttccccccacctgctccttaccttctctgccctgctttttagaactgcagttcattgttttaagggatttgggggagggagcctggggacacaaaccttttatacaatacaaagctttgcttttttttttttttcttccttttccctttctcggttctcttctctcctctgaatggctgaagacccctctgccgagggaggttggggatggtgggacaaggtcccttggtgctgatggcctgaaggggcctgagctgtgtggcagatgcagttttctgtgggcttggggaacctctcacgttgctgtgtcctggtgagcagcccgaccaataaacctgctttctaaaacaaacaaaaaaactgaaatacaaacatataaatcaataccaagagggggtgcccactaatgaaaatatccccagagaggggcaaaatatttccggtgtatcccggtatttggtgtacaaacagttggtcccattattgaagtcgcacttttatatacacacatagtacgatgtcaaccgttgttttacacaccgctggagatcgggcaaaacacgcgaacagacacggggcgaaacctcgggcagaagcgcaccccaacatcacagagggggctgaacaccaaggcgcaaaactcaaccataaagcgagattaaagacagacgagggcacaaagtaaaacctgtacacgcgccaacacgggacacaacacaacacgagatatgc

SEQ ID NO: 52294 - DNA, 718 bp, Homo Sapiens
  misc_feature (696)..(696): n is a, c, g, or t
ggacgcgtgggcagcgtggaggagaagatcctagctgcagccaagtacaagctcaacgtggaccagaaggtgatccaggccggcatgttcgaccagaagtcctccagccatgagcggcgcgccttcctgcaggccatcctggagcacgaggagcaggatgagagcagacactgcagcacgggcagcggcagtgccagcttcgcccacactgcccctccgccagcgggcgtcaaccccgacttggaggagccacctctaaaggaggaagacgaggtgcccgacgacgagaccgtcaaccagatgatcgcccggcacgaggaggagtttgatctgttcatgcgcatggacctggaccgcaggcgcgaggaggcccgcaaccccaagcggaagccgcgcctcatggaggaggacgagctcccctcgtggatcatcaaggacgacgcggaggtggagcggctgacctgtgaggaggaggaggagaagatgttcggccgtggctcccgccaccgcaaggaggtggactacagcgactcactgacggagaagcagtggctcaaggccatcgaggagggcacgctggaggagatcgaagaggaggtccggcagaagaaatcatcacggaagcgcaagcgagacagcgacgccggctcctccaccccgaccaccagcacccgcagccgcgacaaggacgacgangagcagaagcagaagaagcgcg

SEQ ID NO: 52295 - DNA, 500 bp, Homo Sapiens
aaagaactcaaggaaaatatatcaatgtaagaagttcactcttagacccagtgttctgaggtcacatgggtttggactgtctcaatcagaaagattaatgactgttatcaagaacatgaacattggcttcctccatagagaagaaatcagtatctgagttgcataccaggcagtattaaaatctaacaggtctgtttggcccattgatagatactcaaatggtgtctccttctggttatggattttgaccattgattacctttctcaatgtaatgaagtattttacagtcaatttgtggtgtaaatgttgctcttgtctttccttgcttacaaactactttcacattgaacagctgtgagacagacatattgagatgcctgcccttgttagtattcattttatgctgcccaagatatcatttaatttagacttaacaagtatttccttgtgattatattactctgtccttgttaataaagtgctgctgtgtttgactctg

SEQ ID NO: 52296 - DNA, 609 bp, Homo Sapiens
ccggtcaactgctgttcagcctcagaataaaggtgccgttcactggctcagttacctcctgtgtaccggcatcttgtgttgggaatgttcccccctccctagggaccaaggaccacccctacaaaaagagtaatggttgggtgatactccctcaagccaaagaggagctccccaacctgttctagggacccaggtaacctagaagggtgggagagaatacaatgggccagatgtggtggaagcccagctctggggctcaggttcctggaagacttctactaccctccctcctcaaggcctggatacagactaaatttgtataagtcaggcaggggacctagtcagggtcttgggagctaccttgtcgttgggaccagagcaaaatagtggagggcaggctagggaaatgtgggcacatcccccctcccaggaggggccggggagagtggcagtttgcatggcgaaccccccacttcctctttgctgccccttcactttcttgctgcccctttcccagtctctcttcacacccactcctggtctgtcctgatcccctcttctgtatcaggtttattggttgtacatataaattatactttcctttcaaaa

SEQ ID NO: 52297 - DNA, 467 bp, Homo Sapiens
tatgatgctaattactcattttaatgtgtagattctcgtctttggggtattaggatgaaggaaaagaagaaagaagcagaaaggtgactgctctatgtaacagaaataagacctaatgtgtgagttaagcataaagtcagtctactttatttgcagtcttaattgtaactgtcataattctttgcattggtacatttttaattattcttcctcttcctgtgtccttttttctgtccttttcagttatcctcaataaccactaggaacctctgcttctttctcctgaatttcttctttctcctacattgtgtccatatattaatcagttcagttagtgttgctcactttagatagtaaaagtatacacagaacagcaaaatgtcaggatatgtgaaatataaattgctttttgacagttttgccttatatccttgtataatgtgagacatcatatcctgaattctctg

SEQ ID NO: 52298 - DNA, 544 bp, Homo Sapiens
ttctactccccttaatctaatctaaaagctctgttccatgcaactggagttccttatccctctcttccccttcccttatatattgaggctatggggtaggagaaaagtgcacaacccaccaccccctttactcgtgcattaaaatttcttatttacccttttcccccttcccatttcttcccactttcatctaccttttctggcaaaaaggagccttttgctctctgtgaccctaagagcacactgcacagggaaaattgccccatccagacctggctccactcttgatctctcttgtcctcttctgctcttttcttggtgctcttttttctcggtggggtgtgggtaatagaacagccgtgggcttttggggacctttaacttttttttctctcttttgtttataaaaaacactaaacattcaattccagagaaccaaaaatcccaccttcccaccgaacactactaaggggcttgtgttctgctccataccttttctcttttctttctgtcttgttaatgcttttaaaaacaaatgagtttt

SEQ ID NO: 52299 - DNA, 778 bp, Homo Sapiens
ggggttacatggtattcctttgcaagtcaatttaggtttcgtgttataacttttcctctttttttaagaaaaatgaaaaaagtaattcttttgtctgaaggggaaaggcattctttcatttttttcttttttttttttttttttttatgacctgcaggcacaatatctagtactgcaactgccagaacttggtattgtagctgctgcccgctgactagcagctggactgattttgaataaaaatgaaagcattaaagggtttccctacaaaacatttttctttaaaatacttttgaaatggctataagcagttgactttcacccttggagagcatcacactgtgtgaggttcagtgattgttgaccctccccagcccctcctgcttctttaagttatctgtgtgcgtgcgcttcctctcaatcttctttgcacgctcatttctttttctctgacccatgagaaaggaaaacttactgaagataatttttaaatagtgtaatttattcctttatagcatggcaggataaattaaaagaaaatttgtctggaaatgctgccgggagcctattgtgtaaaatgtaggtatttttgtaaaaaaaaccttgaaaattgtaaattgacacctgtttgggcagaattggggtcaaggtttaaattggttttggttttccttttttcctttgttttaatttgaaaaactatctttaaccaaaaaattaaattcccaggaattaatcaaatttctggcctttaaggggaaatttaaggccccttaaa

SEQ ID NO: 52300 - DNA, 598 bp, Homo Sapiens
gtatacatggagaaactggcaggttttatttccattattttatttccactatatctatgataagatgcaattataaggagagaagtgactgttttttattgataaggcaagattttcagaaaaatgagtaaaataattaatgaaacatatttagagcacttaatggtctctgttttcaatataattcttgatttcatttttctctggaatatattggccttctacagctattactgaattatagaaactggtttatttctggcagaaagctgcagtgccacctgagttccaaattttaccattctttgtaaacagttggatggattatgataaagaagatgctaccaatgaaatagaaaaccaacgagatgagaagactgtgatcctcatgtactcagaggcacttccctcctaagtcaaagaccatcctcactgactatgtgccaacgcctcgtttcaggcttgtgactcaacaaagggcttttccattgatagaagcagtttgggatttgtagttgcgacttcttcgatagttacctgcacgtccattgctggcaactgacttgtcagttaaaacctgggctcttttgggttaacc

SEQ ID NO: 52301 - DNA, 741 bp, Homo Sapiens
ggggaagtgaagtgtgaccccttacttggcataggaagttaacttacacctaataactgacaggtttttgttttgatgacctattaattatgtagcctaggattaatatcccaaaattactctggtttaagtagctttattcagtggcataataacactgttttcttccttaagtcttcaatgaagtgacttaaaacagtcactttacatattaaaaatgaggagagcaattctctggaatctctcctttcagttcctttgtaggatttctggccttgaggatagtcttcatgttcaaaggcactatgcttttattatataacttccttcagaagactgaaccacatgatattctcagccctgttaacactaaaaatatttaaaactgaatgatagtagtgactcattgtattacttaaaacttatataacacgctgtattagatgtgtgtaaattagccaaaggttattttacaaagtgagacattggtttttatgtctaaatgctatttctgaataaatgaaatagtaattagatcaagagctgattagcatcaatgtgtttgaaagatataaaatttatacatcaccttaacctctgtatgcacatgatgggattgataaaatattaaatgagaaccaactagatatgattaggacattttgaaccctaattgtgaaatttatttttaatagttactggaatgaaaatatttaaaataatggcacaatgttcttaggt

SEQ ID NO: 52302 - DNA, 871 bp, Homo Sapiens
ctacaaggatacgctggggcccatgcagaaggagctggccgagcagctgggcctgtctactggcgagaaggagaagctgccgggagagctagagccggtgcaggccacgcagaacaagacagggaagtatgtgccgccgagcctgcgcgacggggccagccgccgcggggagtccatgcagcccaaccgcagagccgacgacaacgccaccatccgtgtcaccaacttgtcagaggacacgcgtgagaccgacctgcaggagctcttccggcctttcggctccatctcccgcatctacctggctaaggacaagaccactggccaatccaagggctttgccttcatcagcttccaccgccgcgaggatgctgcgcgtgccattgccggggtgtccggctttggctacgaccacctcatcctcaacgtcgagtgggccaagccgtccaccaactaagccagctgccactgtgtactcggtccgggacccttggcgacagaagacagcctccgagagcgcgggctccaagggcaataaagcagctccactctcaaaaaaaaacaaaaaaaaaaaaaaaaacccggggcctatttccggggggggaaaaaacgggtctctgtgaatggcgcccggttgccaatacgcgtggtttccgtgacccccgttctttcttgtccccaggcggcgaatcaccgcggggtcccccaatagggagcccatataaatttcgacacgccgggttaaccggggttaactattgcgtcacaaatcgcaacccacacgcgcgcaccatctcacactccccgcaccctgaacatgaccatccgccatatacgcaccaacacacgcgagtacacagccacctcaatacgt

SEQ ID NO: 52303 - DNA, 752 bp, Homo Sapiens
ggctctctgcaatctacgtgaaagaccccacacccctccttgctggaatgtgtctggcccttcagcagtttctcttggcagcatcagctgggctgctttctttgtgtgtggccccaggtgtcaaaatgacaccagctgtctgtactagacaaggttaccaagtgcggaattggttaatactaacagagagatttgctccattctctttggaataacaggacatgctgtatagatacaggcagtaggtttgctctgtacccatgtgtacagcctacccatgcagggactgggattcgaggacttccaggcgcatagggtagaaccaaatgatagggtaggagcatgtgttctttagggccttgtaaggctgtttccttttgcatctggaactgactatataattgtcttcaatgaagactaattcaattttgcatatagaggagccaaagagagatttcagctctgtatttgtggtatcagtttggaaaaaaaaatctgatactccatttgattattgtaaatatttgatcttgaatcacttgacagtgtttgtttgaattgtgtttgttttttcctttgatgggcttaaaagaaattatccaaagggagaaagagcagtatgccacttcttaaaacagaacaaaacaaaaaaagaaaattgtgctcttttctaatccaaagggtatatttgcagcatgcttgactttaccaattctgatgacatctttacggacactattatcactaagacc

SEQ ID NO: 52304 - DNA, 887 bp, Homo Sapiens
cttcgctacttgaaaaatccaaggttccattaagtgaatttgacttttcctggtctaaaatttctgacattcagtctcagcttgagaaattgattgaaaagaattactttcttcataagtcagcccaggaagcatataagtcatacatacgagcctatgattcccattctctgaaacagatctttaatgttaataacctaaatttgcctcaggttgctctgtcatttggtttcaaggtgcctcccttcgttgatctgaacgtcaacagtaatgaaggcaagcagaaaaagcgaggaggtggtggtggatttggctaccagaaaaccaagaaagttgagaaatccaaaatctttaaacacattagcaagaaatcatctgacagcaggcagttctctcactgaacacatgccttcctttcatcttgaataactttgtcctaaaatgaattttttttccccttgatttaacaggatttttgtagactttagaatttggacttacctaacaagagtataaattgacttgggttgcaagcactgagcactgttacttctatcacgtctctcttttatttctgggatataaaacaggctttaagtttcttggttgcccaagggcagagcaaggaatatctggtgtttcttgtgatgataatattttaattttaaatatccctccctcatacaagtgtatgttaccattttaatataattctttttgtacctttccttcttgttttgtgaagatttttgtggcatggattgctgtgctcactgctgtaaaaggtgacctagtgtactgggcagctggtggcggtgcagaaaagagtctcaggttattttttgtttttagttatttcttggaccttgacagtatctaatgactcc

SEQ ID NO: 52305 - DNA, 670 bp, Homo Sapiens
agcgtcgccgccgtggtagcagcctcagccgtttctggagtctcgggcccacagtcaccgccgcttacctgcgcctcctcgagcctccggagtccccgtccgcccgcacaggccggttcgccgtctgcgtctcccccacgccgcctcgcctgccgccgcgctcgtccctccgggccgacatgagtggggaccacctccacaacgattcccagatcgaagcggatttccgattgaatgattctcataaacacaaagataaacacaaagatcgagaacaccggcacaaagaacacaagaaggagaaggaccgggaaaagtccaagcatagcaacagtgaacataaagattctgaaaagaaacacaaagagaaggagaagaccaaacacaaagatggaagctcagaaaagcataaagacaaacataaagacagagacaaggaaaaacgaaaagaggaaaaggttcgagcctctggggatgcaaaaataaagaaggagaaggaaaatggcttctctagtccaccacaaattaaagatgaacctgaagatgatggctattttgttcctcctaaagaggatataaagccattaaagagacctcgagatgaggatgatgctgattataaacctaagaaaattaaaacagaagataccaagaaggaggaagaaaagaa

SEQ ID NO: 52306 - DNA, 626 bp, Homo Sapiens
tgacctacctccgtgactgctctttttcctctgtctcttaagtgtgatggttttccagagtccaatcctcaggactttcccgtccacacacaggcctggtagtcaggtggctctaaaccattaggtgggttgtagacctctctcaagctgccacctccttgctgtcgccagatcgtatttcagtctgtcaggggttatctgtatctggaggttccactgttgcttcagtctcagttacttagaatggaacccagagtcctgcccctttccacctacatgctcttacttgaaagcacctgagacttattgggtccctgattcctgcttcgtctgtatccgcagagtagttgcatgtcatttggcctgttttctaaataatcccacatcatgtcctccctgcacttacattgccactgctctgatttgggcttaattttttttttgggacaatgcctctgtcccaattctgagtaacagctctggttcttgccactaccagagttctctagcaaatctgagcatctgacagggtgaaaaattctgaatggcttcctgatgcctgactttatgggatcaaattcaagttgcacgctggcactcagtgcccttctggtatcatctgccaa

SEQ ID NO: 52307 - DNA, 775 bp, Homo Sapiens
gggatcgaatccttccgctgccctccaagcgccctctggggacagaccaatctgcgtgtgtctgtgaccgcctgtctcagtggcacggccacttcctttctgtagctgggttagagcctgggtctgccttttgtccagatcagctgtttttttaaaatgtctgactttttttgcatttctaaagaagcgtgagaaatgggctgggagtgcttctgtcctgctgacaccccgcggtgggtccctggagcgcggcctccagctgccgcaatttccatgccaggatatttttccgcaaatcagtcggttgaaattcagaggagtcagaatgactcgacctgtccttcaatgttgataataaatgtctcagccaaaaaccttccttgagctgccatgcttttccccttgacctgcacctcttcccctaaaacttctgcagggaagcccctggcggaggcgccattgaaagcatggtcttgccagtggctggcaaggcggttttgttctgctcagtttctggagagggttggatgcgtcccctgccatccagccctccccgcttgaggccagcactgagtctgggacactcagcgggaagggggctggcatcgccagcgacccacacattcctcacgtagcttctgctcccaggaaggtagtttaaatcctgtatatactttttagagactcttttaaactttctgaagtgctgatgtacatactttctcgtacacacttttgtgaagatttcaaggggaagggagtcgtctgccattca

SEQ ID NO: 52308 - DNA, 664 bp, Homo Sapiens
cccacgcgtccgggcctctccccctcctccgaccctggatagattcggacaatcgaccgaaagcaagaggtgcctcatgatgggcccatgtgtgacctcctctggtctgacccagaagacaccacaggctggggcgtgagcccccgaggagccggctacctatttggcagtgacgtggtggcccagttcaacgcagccaatgacattgacatgatctgccgtgcccaccaactggtgatggaaggttacaagtggcacttcaatgagacggtgctcactgtgtggtcggcacccaactactgctaccgctgtgggaatgtggcagccatcttggagctggacgagcatctccagaaagatttcatcatctttgaggctgctccccaagagacacggggcatcccctccaagaagcccgtggccgactacttcctgtgaccccgcccggcccctgccccctccaacccttctggccctcgcaccactgtgactctgccatcttcctcagacggaggctgggcgtggggggggctgtcctggctctgctgtcccccaagagggtgcttcgagggtgaggacttctctggagaggcctggagacctagctccatgttcctcctcctctctccccacttgaaccatgaagtttccaataatttttttt

SEQ ID NO: 52309 - DNA, 899 bp, Homo Sapiens
catttatggcaaagtgaatattcactcaatggttttagcttcagctcggacttacaaagtacccaagcatctagtctggaactgacagagataagtagagaaaatgttccaaagtctggcacgccccagcttaggctgccattcgctgcaaggttgaacacccccatgggccctggacgaactgtcgtcgttaaaggagaagtgaatgcaaatgccaaaagctttaatgttgacctactagcaggaaaatcaaaggatattgctctacacttgaacccacgcctgaatattaaagcatttgtaagaaattcttttcttcaggagtcctggggagaagaagagagaaatattacctctttcccatttagtcctgggatgtacttgagatgataatttatgtcgatgttcagagaattcaaggttgcagtaaatggcgtacacagcctggagtacaaacacagatttaaagagctcagcagtattgacacgctggaaattaatggagacatccacttactggaagtaaggagctggtagcctacctacacagctgtacaaaaaccaaaatacagaatggcttctgtgatactggccttgctgaaaccgcatctcactgtcattctaatggtttatatgtcaaaatgagcttgtgcacaattagggtcctgctggggtgtctcagtccttgccatgaagtatggggtgtctagcccctgaatggggaaactgcggggcagaacaacttattgcagttaaaccactctgccctctttctacttggcttgactcttcagaaaagcattccaccgcttcatggggtcccacataatcagaggcacctgtctgagcccgatctttcgcgaaacggcagaactcagatatctggcgacacacacggt

SEQ ID NO: 52310 - DNA, 591 bp, Homo Sapiens
gctgaggcaggagaattgcttgaatccaggaggtggaggttgcagtgagccaagatcgaaccactgcactctagtctgggtgacagaggagcaagactctgtctcaaaaaaaaaaattctataatttttatagaaataataaaaaactaaccttagcttactgtaaattttctagtttagaaacttatttaaaaacaatttttggactcttctagtaataacgtagcttaaaacacacattgcatagctgtacaaaaatattttccttatatccttattatataagcttttatctatttaaattttgaatttttaaactttttggtcaaaaaccaagacaaacacactagcctaggcctatgcagggtcaggatcaagacatccctagcaggtgacaggaatttttcaactccattataatctgtggggccaccatcatatatatattgtacattgaccgaaacatggttacatgactatataatttgcgtcaatactgctcagtgtgccatatttaaatttacatgactatattgtgatattcttttcacaataaagtttatttgggagaaaaaaaaaaaaaaaaaaagg

SEQ ID NO: 52311 - DNA, 676 bp, Homo Sapiens
  misc_feature (11)..(11): n is a, c, g, or t
  misc_feature (566)..(566): n is a, c, g, or t
aaaatgcaagntagctccctgctaccttggcgttgtcagtcctccacatagcactcttcagctcaaattgcattttataaaatccccagcaagcctttgtctcctggcagtcaactcgtctcttactgacctgcccattgctcccttgcaatgtattttcctactttctctaataaatctgcctttcttgacctaaactgtcatggtaaattcttcttactcctatgtcaccagccacagacagtcgccacaagccatgacaagtctgcgatttcatggtctttttttattttgatgatatttccccagtgtttgggggacagaagaatgcccacaatctataggtcttagtcacatggatggggacagaatatctgagagagagagaaggaacaagatctactggggctccttaaaattcttcttgaagaactcctttctcaccttggagtagggaagactttctgattatgactcaaaatttagaagctaagaaagaaaatacctttaaatctgaaaacataaaactcaaaaacttctgggtgttttttggggggggggttggntttttttttaaacagcacaagcaactcaaagggcaagtgacaaactggggagagaagaaaaagatgtgactcatatcacagtttcccttctacttaaaaaaaaaaaaaaa

SEQ ID NO: 52312 - DNA, 641 bp, Homo Sapiens
  misc_feature (503)..(503): n is a, c, g, or t
  misc_feature (517)..(517): n is a, c, g, or t
  misc_feature (537)..(537): n is a, c, g, or t
  misc_feature (565)..(565): n is a, c, g, or t
  misc_feature (571)..(571): n is a, c, g, or t
  misc_feature (576)..(576): n is a, c, g, or t
cccacgcgtccgcctgcccagtgttcccgtggaatggaatgagattaatgctgcttggggccagactgtgttgctgctccatgctctggccaataagatgggtctgaaatttcagagataccgacttgttccttacggaaaccattcatatctggagtctctgacagacaaatctaaggagctgccgttatactgttctggggggttgcggtttttctgggacaacaagtttgaccatgcaatggtggctttcctggactgtgtgcagcagttcaaagaagaggttgagaaaggcgagacacgtttttgtcttccctacaggatggatgtggagaaaggcaagattgaagacacaggaggcagtggcggctcctattccatcaaaacccagtttaactctgaggagcagtggacaaaagctctcaagttcatgctgacgaatcttaagtggggtcttgcttgggtgtcctcacaattttataacaaatgacttttttccttangggggaggtttgcncttaaaggctttttaatttntgtttttgtttgggcaacatggttttanatttanattcngggtaatattaaacagttacatgtttttacaataccaaaaaaaaaaaaaaaaaaggggcgggacc

SEQ ID NO: 52313 - DNA, 539 bp, Homo Sapiens
tttctatcacattctgactccatctgcggcctcattaaggtgatagaaacatactaggaataaggccgcagatggagtcagaatgtgaaattacaaataatcactggatccatctactgttttccatcaccttccccactgatgctctgggcgagagagtgatgtgtcaccttcaactgtgtgtaatatgtcagacacgtcctacaataacaggcgtcatatttgtattatttttagtttactgtagaaaataatgtcaccgccaaaggtgatgagagtcacgttttgtaggatctgttttcttatacttaaagacagacttctgctacggtaattgccagtattcatggcttcctttctgtgtcagaagagaagggatctgctttctcttggctgatttcacatagcattggtaatagacatgcatttctctttctaaaggggagtaactttttaaacccttcctgattttagcctggcaatgtaagtgtccttaatgtgactgttttgataattaaaaaaaggtatataatttaaaa

SEQ ID NO: 52314 - DNA, 665 bp, Homo Sapiens
ggcctcgtagaggcagtgctggccgcgccagggcatcagtgctgatgtgggagctgtgcttccacctaagccgttggtaggggactgtggcatttaagaatgtagagagcgcatcctttttgatctcctgggcggagtgaacctgcaggggccaccccagaaaccttggttctgacccactgcaagcaagtaaccagcttctcactccagtttcaagtggctattatgtaatataaattcaaagcacattgtgaatagaacctacatgaaaacatacactttgttgcccactgacatgttaccagaagttgtaccatgatgttgttttgacccctgtgagctgatggccccggccctgctctgtgcacatttctgtccgtgttccccagcactctggttggagagagtccacatcttcagctccgtgtggacatctccctgtacctctgcatcagcacatggatttaagagttatgtaatcgtgagagaatggtgtttgtggtttttccccctctttggctggtggaggataaagttcctgctcttttacctccaagacgagggcctcattgattcacttccagaagtgctgcacttctgaagaacaaggatgcactaaagttagcaagtttataataaagttaaatataaattattttgtttta

SEQ ID NO: 52315 - DNA, 537 bp, Homo Sapiens
tttttaaaacacaacactttattattatttttatcttagaaggaattcaccaaaggcttcatattatgctatggcatctttaattataaaaataagcaaataaaataacttgcatctgtcattaccatgatatgtttcataacctttatatgcacatggagcttaaaaatgtaatttaacaataaataatgacatataccagatatgctcactgtttattccagtactcagccaaaaacctaaatatcatttaaattataaatacataatgcaaatataatggcacaaaaatgtctaaagtgcaaccaaatcacaagagaagaatcatgcaaactggtctaggtcagcccccgaatcactctgcagcaaacacaagacgaagctttggaagtttaagggggaattggagggagtagggtgggggaaagagaagcaaaaaactagcaacattgtgagaactgcttctttctgtatgtgtagatatatgtattgtagatacatatatagatatcatcgtggggagaaaagggggggtac

SEQ ID NO: 52316 - DNA, 1090 bp, Homo Sapiens
cggacgcgtgggcggacgcgtgggttcagatagcgctcccttctgggtgttatggaagagtggctccacggtcaggcttggctgcaaaacactttattgatgtaggagctggtgtcatagatgaagattatagaggaaatgttggtgttgtactgtttaattttggcaaagaaaagtttgaagtcaaaaaaggtgatcgaattgcacagctcatttgcgaacggattttttatccagaaatagaagaagttcaagccttggatgacaccgaaaggggttcaggaggttttggttccactggaaagaattaaaatttatgccaagaacagaaaacaagaagtcatacctttttcttaaaaaaaaaaaaaaaagtttttgcttcaagtgttttggtgttttgcacttctgtaaacttactagctttaccttctaaaagtactgcattttttacttttttttatgatcaaggaaaagatcattaaaaaaaaacacaaagaagtttttctttgtgtttggatcaaaaagaaactttgtttttccgcaattgaaggttgtatgtaaatctgctttgtggtgacctgatgtaaacagtgtcttcttaaaatcaaatgtaaatcaattacagattaaaaaaaaaagcctgtatttaactcatatgatctcccttcagcaacttattttgctttaattgctttaaatcttaagcaatattttttattcagtaaacaaattcttttcccagggtacaaaatcttgcataagcttgaactaaaataacaaatgaaaagggagagattaaaggggaattccttggtctttccccttctctttccctaggctaaaaaccttctttgttaatcttaaaggattctttggtgatgaaaggggaagaacaagcctccctccagtttatttttttcccctattaaaccttttctttttgaaaaaatcctctaatggaatggggataacaagttatttttttgtgaaaacacaatgcaaacttgggggggaattcggctacccctttaagggttgtggcttcccccttcggacattttcctcccccacatcgaggggcaaaaattgt

SEQ ID NO: 52317 - DNA, 799 bp, Homo Sapiens
gttagtgtaatcttgtaagttcaaagctgggttctcagtgagcagcaaaaggtgttagatgcatcaccacacttcacaggacctcctgaatgactgcagatgtgctgtgtaccttcttaaggggctttggctgaccttatgagagcaggagctcaccatgcttatgggtgactatatcaaaaagatctgcaataaggctcacctgggagatgctctagcattcaaattcctatactcctcttttatctacgctgtcagatgaaaactgcttactgcttttaaaagatataataaacaatataaattctgatagtaaagcactataaaaattaggtatgatatttttggcacaaagcactttttaaacccaagctcattttgcaaaatatatgtctagagtttatcatttgaaaataaaaacatatacacaatatgtaaatggttttataagtgaattaattagaatgtacattttcttaaatactgcacataccttcagcttactccagtaccagacatctgcatgcacaccccacattctactattacacagatattgcacaagtttcaatgccaaaatactaatgcagtctggcaagatttagggtttacctttcagtattatttcgtgaacagtatccagattcaatactatttcgcagaaaagctacatgaaccaatttcacgaaaagaatgctttgtatctttccttgatccacagtattaaatctgtaacatatatttaggcatttcattcatgtcttccagcatttaaaattccgaaaaactgggtttgaca

SEQ ID NO: 52318 - DNA, 768 bp, Homo Sapiens
aaaatgtaactttttaatcatctggtttttaaaagataaacagtttagcccatctctccagagagcaaacataggaatatgactcaggagcctcctagggcttatcatcagccctcacacccgcttccccctccaacccacagcctttgcttccaggtggcaggattactactttgcctcttcagcagcatctactctaggcatattgatcattttagacactgggagaagagaacctcaaactaggaggaaaagacagagcctccacttagttttgggaggggatggcagacagtcaaggagatgagcgtcctaaggcatgttgggatagggtcagatgcaccacccatggagaggtttgtcaacacaaagacatggaaggttagaggtttgtcaacaaaaagacatggaaggttaggtttgtcaacacaaagacatggaagattagaggtttgtcaacacaaagacacaggaagaatgggctgcagaagatttagatgttttccatttgggcacattttacttagctggagaactaggtttaaaacagcctgggtaggaaaattagaagcaagctggatgcagtggctcatgcctgtaatcccaacacttttgggaggtccaggcaggaggatcacttgggcccaggaggtcaagcctgcagcgagctgagatcacaccactgcactccagcctggggtgatagaacaagaccctgtctcaaaaaaaaaaaaacaacaaaaacttagaattgaggagttgtacctc

SEQ ID NO: 52319 - DNA, 729 bp, Homo Sapiens
  misc_feature (439)..(439): n is a, c, g, or t
tcgatgcaaaaatcctcaataaaatactggcaaaccgaatccagtagcacatcaaaaagcttctccaccacgatcaagtgggcttcatccctgggatgcaaggctgtttcaacatatgcaaatcaataaacataatccatcacagaaacagaaccaatgacaaaaaccgcttgattatctcaatagatgcagaaaaggccgtcgacaaaattcaaaagcccttcatgctaaaaactctcaataaactaggtattgatagaacgtttctcaaaataataagagctatatatgacaaacccacagccaatatcatgtggaatgggctaaagctgttgacctgatagatatgggttcaagaggacacagctgaatactgtgcttaggaaaagaacagtttcaaaggctttccagattgtcagatttgatgatatcctccttnggtgcacacctctcttggctatggggcacataaaccacctctaccaatctaaaaaaaaaaaaaaaaaaacgcgggcggccgcaagcttattccctttagtgagggttaattttagcttggcactggccgtcgttttacaacgtcgtgactgggaaaaccctggcgttaccaacttaatcgccttgcagcacatccccctttcgccagctggcgtaatagcgaagaggcccgcaccgatcgcccttcccaacagttgcgcagcctgaatggcgaatgggacgcgccctgta

SEQ ID NO: 52320 - DNA, 562 bp, Homo Sapiens
gaggaaagacgctctttaggttttgttttgttttttttttttggttttgttttttgttttttttactctagggaaaacactgacgaatggtcagagctcctatcctgatcttttcatcaaggcgcctttcctaataatatggttcaactgtgaatgtagaagtgggggggaggggggagaaaaagaaaactctggcgttagaggatatagaaaaatataagtacaattgttacaaataacgcagacttcaaaaacaaaaaaatcacaacccaaacaaaccaaaatttaaatgatcagaattggcagcacaaagaaaacgccctctcctgacttgtattgtggcagtctgaacgcccccagaaaattgtgccaaagagtttagaaaaataaatatacaataaaagtaaacacatacacacaaaacagcaaacttcaggtaactattttggattgcaaacaggataattaaatgttcaaacaattctgataaaataaccatttggaaactgcttggccttctgttcttttatttgattgactacaatgcggtattggtctcttc

SEQ ID NO: 52321 - DNA, 608 bp, Homo Sapiens
agtgtggaaaatggacatcgtaaacgatcttctcgacctgcttcagcctccagctctactaaagacataaccagtgcggtgcaatccaagcgaagaaaatccaagtaaacaagcaggactgcgacttgatacttggaaatgtgtgtgacttttacaaagagcaattttgagctgtgacttttttaaatcaatttctgtacagttagtaattttaataatgtggcccttttcctagtccctgcaacctgtttcataaagtgcaatggggaaagcaggactgttgagcccttttggtgttgcgagttgaagttcaaggtttctaaaatgttgtcttgtattgaaaggagctaatgccattataaatgttactagttttcacatttcctaagcagcctagagtacagggtgagcatttttagatctcctaatgtattgtgccgtggaagtactgtgtgtgaatagcagtagtgggggcaaaagcaatcttctcatttggaaatgttgtaaataattttattatatagtgttttggatgtatttgttgtagaaatggaccagtgaataaagagaatctaaggatttgtacaatgtgaaaaaaaaaaaaaaag

SEQ ID NO: 52322 - DNA, 536 bp, Homo Sapiens
  misc_feature (73)..(73): n is a, c, g, or t
aatttttaaaaatgtattccttgccagggcaggcaaggtggctcacgcctgtaatcccagcacttcaggaggntgaggtgggcggatcacctgaggtcaggagtttgagaccagcctgatgaaaccctgtctctactaaaaatacaagaattagccgggcgtggtggcgcatgcctgtagtatcagctactcaagaggctgaggtgagattatcgcttgaacccaggaaacggaggttgtagtgagcggagatcgcgccactgcactccagcctgagtgacagagtgagaatccatctcaaaaaaagacaaaaaacaaaattgcttgctaaagaagtggtctcctgaggtcttaagacattcctgacagtgtcttgagtgggtgggagagaggttgctgtcattgcgctgtggaatttcacagatgagaaccacgcctagccaaaatcacttttcctgtttgcctcagtgacacagctgcagggaccctcgtggatgttgtattaaataaatttgacctttactctttgcaaaaaa

SEQ ID NO: 52323 - DNA, 583 bp, Homo Sapiens
  misc_feature (23)..(23): n is a, c, g, or t
catttcgttgctacccaagtggnattctcgagacaggcaccatctccttgttccccctctctcttttgcctcccactgactgcccttttccatgtgtcttcattctgcctgaagaaggctttcccaggatgcacgtcctcagagggagcagcctatctcccccaagctggaggcggcagaggactgggccaagccccaacctgcctcccagccaggctcctccaggcctctggtttagcggagccccctgagcccaggcctgtgtctagccccagtggctcactgaactttcagggcagtcagggggtcctgcttagaagccagtcaccagccctctgcctgcagccatggaagggggtgtgcacgtgcctctgtgtgtgtggctgagtgtattctgcgcgtgtgtgtggagggagggagggaggggagcatggtgtctcccgctccaccgccctttgttgagccccatcagctgcccccttttactttgcattgaacggcctgtccaaagatcctctctctagggcagcagagagctttttgcactttaaaaaaaaaaaaaaaaaaaaaaaggccccattgt

SEQ ID NO: 52324 - DNA, 920 bp, Homo Sapiens
  misc_feature (16)..(16): n is a, c, g, or t
  misc_feature (781)..(781): n is a, c, g, or t
  misc_feature (881)..(881): n is a, c, g, or t
cacaaccaaaccccantacattctgaactactaactttgtggttccagattttttttaatctcctacttctgctatctttgagcaatctgggcacttttaaaaatagagaaatgagtgaatgtgggtgatctgcttttatctaaatgcaaataaggatgtgttctctgagacccatgatcaggggatgtggcggggggtggctagagggagaaaaaggaaatgtcttgtgttgttttgttcccctgccctcctttctcagcagctttttgttattgttgttgttgttcttagacaagtgcctcctggtgcctgcggcatccttctgcctgtttctgtaagcaaatgccacaggccacctatagctacatactcctggcattgcactttttaaccttgctgacatccaaatagaagataggactatctaagccctaggtttctttttaaattaagaaataataacaattaaagggcaaaaaaacactgtatcagcatagcctttctgtatttaagaaacttaagcagccgggcatggtggctcacgcctgtaatcccagcactttgggaggccgaggcggatcataaggtcaggagatcaagaccatcctggctaacacggtgaaaccccgtctctactaaaagtacaaaaaattagctgggtgtgggtggtgggcgcctgtagtcccagctactcgggaggctgaggcaggagaatcgcttgaacctgagagcggaggttgcagtgagccaaaattgcaccactgcacactgcacttcatnctgggcgacagtctgagactctgtctcaaaaaaaaaaaaaaaaaaagaaactcagttacagcctccttggtgctttagcattcagctcccttcagctggnatttatataatcctgaaacggctttagtccaacccttaa

SEQ ID NO: 52325 - DNA, 715 bp, Homo Sapiens
tgatgtcagcaaagggacatgatgggaaggaacctgtgaaatttgtagatttgcttggtgaccatgggaaacatgtcagtcctctgtgggagttgatcaaatggtgcctgggtctgtcagtgtacaccatcccttccattggactggctttgttggaagaaaagctcagatatagcaatgagaaataccaaaagtttaaggcagtggaagaaagcctgcgtaaagagctggtggatatgctaggtgatgatggtgtgttcttatatccctcacatcccacagtggcacctaagcatcatgtccctctaacacggcccttcaactttgcttacacaggtgtcttcagtgccctgggtttgcctgtgacccaatgcccactgggactgaatgccaaaggactccctttaggcatccaggttgtggctggaccctttaatgatcatctgaccctggctgtggcccagtacttggagaaaacttttgggggctgggtctgtccaggaaagttttaggaggaccttctgcaaggttaatgtgtgtgtgtgtttgtgttcgtgtggtggtgtttctattaattgggtgaaaccaagcaccagcagacaagcagagaaacaactggggaatttattgactcatttagttattctttctacttttatttccttctctaactgttggtcttactaaaatgggaatatttgcttcttgcttttat

SEQ ID NO: 52326 - DNA, 767 bp, Homo Sapiens
cacaaatacacactcatgcacacacacactcacacacatgcatacacttaggtttcatgcccattttctatcacactgggctccatgatattctgttccctaagaactgcttctgtgtgccctgttttcatcccaagatttctcacttcatcctctcctacctggctcttttgtcccagggaggggtcctgttcggaagcagtggctgaatttatcccctgaaagtggttttggaggaaccgggatggaggaggccttcccctgtgggaatagaatcgtccactcctagccctggttgcttctgatacacagccactgcacacacacactcacactcacactcccttgtctgatgccccaaagccaattcctggggcaccctaccctctcttatttggagtttccgttggtttacctgagttttctctggggtctgcacagaggcagcagcatggacatcatggcctctcaggtcccttttggttctcagtttcattggttcctctttctgttcccccattgacttctgtgccccaccctagccttttccataaccttaggtattcagtttggaggggttttttgtatttttgaggattcctgtattctgtatcctctcctcgcatctcctcacatggaaagaaataatgtatttgtgccttctgtgaggaatggggggaacaagtggtcccaggtmyccccatttccaaggcccccctccctctccaggtccccccacagcaataaaagcttccccctgatatcca

SEQ ID NO: 52327 - DNA, 646 bp, Homo Sapiens
tttgtttacattaggctattttttaatataggatttagaaaccaagggtatgtgtttaaaatacactttttcttaacctgtctagctgtcggaaaaggtaacagaagatggaactcgaaatcccaatgaaaaacctacccagcaaagaagcatagcttttagctctaataattctgtagcaaagccaatacaaaaatcagctaaagctgccacagaagaggcatcttcaagatcaccaaaaatagatcagaaaaaaagtccatatggactgtggatacctatctaaaagaagaaaactgatggctaagtttgcatgaaaactgcactttattgcaagttagtgtttctagcattatcccatccctttgagccattcaggggtacttgtgcatttaaaaaccaacacaaaaagatgtaaatacttaacactcaaatattaacattttaggtttctcttgcagatatgagagatagcacagatggaccaaaggttatgcacaggtgggagtcttttgtatatagttgtaaatattgtcttggttatgtaaaaatgaaattttttagacacagtaattgaactgtattcctgttttgtatatttaataaatttctggttttcattcttaaaaaaaaaaaaaaaaaaaaa

SEQ ID NO: 52328 - DNA, 578 bp, Homo Sapiens
cagtgtgggacccaaaaacttaattcgaaagggtcgagaacggcatctcttccttttgaaatgtccttagtatttagtaaagaagtgaaagattccagtgggagaagcaagtacctttataaaagcaaatgtttacctcagagttgggtgtcacagaacatgttgaaggagacccttgcaaattgcactgtgggtggggagaacaccaacttcagataataaaatgtccttaaggcttccagcatagagaacaagcaggactggataaagcatatccgcgaagtcatccaggagcggacgatccacctgaagggagccctgaaggagcccattcacatccctaagaccgctcccgccacaagacagaagggaaggagggatggagaggatctggacagccaaggagacggcagcagccagcctgatacgatttccatcgcctcacggacgtctcagaacacgctggacagcgataagctctctggtggctgtgagctgacagtggtgatccatgacttcaccgcttgcaacagcaacgagctgaccatccgacggggccagaccgtggaagttctgga

SEQ ID NO: 52329 - DNA, 712 bp, Homo Sapiens
gacgagtgcccaacagcaaccccccggagtatgagttcctctggggcctccgttcctaccatgagactagcaagatgaaagtgctgagattcattgcagaggttcagaaaagagaccctcgtgactggactgcacagttcatggaggctgcagatgaggccttggatgctctggatgctgctgcagctgaggccgaagcccgggctgaagcaagaacccgcatgggaattggagatgaggctgtgtctgggccctggagctgggatgacattgagtttgagctgctgacctgggatgaggaaggagattttggagatccctggtccagaattccatttaccttctgggccagataccaccagaatgcccgctccagattccctcagacctttgccggtcccattattggtcctggtggtacagccagtgccaacttcgctgccaactttggtgccattggtttcttctgggttgagtgagatgttggatattgctatcaatcgcagtagtctttcccctgtgtgaggctgaagcctcagattccttctaaacacagctatctagagagccacatcctgttgactgaaagtggcatgcaagataaatttatttgctgttccttgtctactgctttttttccccttgtgtgctgtcaagttttggtatcagaaataaacattgaaattgcaaagtgaaaaaaaaaaaaaaaaaa

SEQ ID NO: 52330 - DNA, 629 bp, Homo Sapiens
cagaggactctctagagctcgaccgtgcatgcgtgggtacgcagcacgggtcgtgtcgtacaacgtcgctgattgggcctgtgatgaacttgtcctccaaaagggtgcaggctgagatcgagaacatcaagaaccagcgtgccaagttggaggccgccattgccgaggctgaggagcgtggggagctggcgctcaaggatgctcgtgccaagcaggaggagctggaagccgccctgcagcgggccaagcaggatatggcacggcagctgcgtgagtaccaggaactcatgagcgtgaagctggccctggacatcgagatcgccacctaccgcaagctgctggagggcgaggagagccggttggctggagatggagtgggagccgtgaatatctctgtgatgaattccactggtggcagtagcagtggcggtggcattgggctgaccctcgggggaaccatgggcagcaatgccctgagcttctccagcagtgcgggtcctgggctcctgaaggcttattccatccggaccgcatccgccagtcgcaggagtgcccgcgactgagccgctcttcaccactccactcctccagccaccacccacaatcacaagaaaattcccacccctgtc

SEQ ID NO: 52331 - DNA, 591 bp, Homo Sapiens
  misc_feature (402)..(402): n is a, c, g, or t
ctaacagctctgtgagacacttcatgaagaacttgaggttccaggtaattctgtaatttgcccaagagcacataatttatgggaccaggatttgaagcgaggcagcctgacctcaaagttcatcggtctttttgtttgtttgttttcctaagagacggggtttcactctgtcacccaggctggagtgcagtgacggatcatagctcactgctgccttgagctcctgagctgaaggaatcctcccgcctcagcctgcgagtagctgggactacgggcatgtgccactgcatccagctaattgttaagattttttgtagcgatgaggtctcactatgttgcccagactggtcttgatctcctggcctcaagcagtcttcccgctttgatctctgaaagtgctgngattacagatgtgagccaccatgcccagctaaagttcatgttttaaccataaaaataggtaatgctttagtacacatgtatgtaaataaaaatttagatattgccaaaatgaaattaagaatcttaaacaaggaccagctaagacctgcggggacatggtttcgcaaataattgggaacattaagtcat

SEQ ID NO: 52332 - DNA, 802 bp, Homo Sapiens
ccccagggcataagcagcctcccatgcatcagctgctcccacccctcatcctgctctgagccaggtggaagggaggctggcttctcccatggggacccagaagtccctactcttggacctcctggagactccgtggcggcagtcaagcccagtgcccagttggagaagactcacgtgctggccttggagatgggaagaaccttcgtacgaaaaagccctcagcagggccatctgtgtgccctgcccatcaccaactgcttcccaagggtgtcatcctgttcctcctgctgccggcctcctgcctgggcctgccttgcagctggccccttccctgcctgctgtcaccatccactgtttgacattccagctggtggccaagagattggtgtggaggcagaaagaggaaggagacagtgccaggaggaagaaggaaggagtcccttagctctcttcattgtcccctttacttcctgctatcttcttctcctcttcttctctctcttgcctctatgcctgtatttctggcaatatgacaggcctgcctacccaagatcagaactccaaaaccactcccacccctgaaggtcgggagggtctgagcagccctggtggctgcctgtgctcaggtcctcagctccatgggaaataaaaatggcaccctgaatctctaggattttgtcacttggagtcacagcaaagttctcttcctcttgtccccccgttgctgctccttggttatagaacatggtaaatatttattactttcagagaaaccagatattttatagaggaaatatgtttg

SEQ ID NO: 52333 - DNA, 706 bp, Homo Sapiens
aattcccgggattaaaaaggtcagaatttcttttttagaaacggggtcttactctgttgcccagtctggagtgcaatggmacagtcatggctcagtgtagcctcggactcctgggctcaagcgatcctcccacgtgagcctcccaagactacaggtgcacaccatcatacacgggamagggtctcgctatattgctcagactggaaagttcagatttttaaatcaggtcttgggactcccgattctgtttttccacagagtcaccatctatcctgacaatgctccatttcatgctgtttttcctcaccttcaatactgctcccccatccccccacctctaggtgtgaaggttaccaggagagacctgagctcgctggctctgactccaaggtggcctcagtggaaagtttcaaaaggcaaccggtttggtttcactggcagggcagcggcaggcgtttgggttctggaggcccaggaatgtagaagcctccagctaacagactccacgcgcctatcctcccaaacgctctcggagataagctcccagctccctccccttttccaccttcatgcacttcctgctgtattctgtccattccagcactggccctttctgtgggtgggtgggcagaggatacaatttcctgcatgactacttgctcatgattcatacttctaaatgaaagtacaactgatataaaaaaaa

SEQ ID NO: 52334 - DNA, 757 bp, Homo Sapiens
  misc_feature (757)..(757): n is a, c, g, or t
tggtggccgggacgctctgcttcgcttggtggagcgaaggggatgcaaccgcccagcctggccagctggccccacccacggagtatccggtgcctgagggccccagccccctgctcaggtccgtcagcttcgtctgctgcggtgcaggtggcctgctgctgctcattggcctgctgtggtccgtcaaggccagcatcccagggccacctcgatgggacccctatcacctctccagagacctgtactacctcactgtggagtcctcagagaaggagagctgcaggacccccaaagtggttgacatccccacttacgaggaagccgtgagcttcccagtggccgaggggcccccaacaccacctgcataccctacggaggaagccctggagccaagtggatcgagggatgccctgctcagcacccagcccgcctggcctccacccagctatgagagcatcagccttgctcttgatgccgtttctgcagagacgacaccgagtgccacacgctcctgctcaggcctggttcagactgcacggggaggaagttaaaggctcctagcaggtcctgaatccagagacaaaaatgctgtgccttctccagagtcttatgcagtgcctgggacacagtaggcactcagcaaacgttcgttgttgaaggctgttctatttatctattgctgtataacaaaccaccccagaatttagtggcttaaaataaatcccatttttattatgtctcaaaaaaaaaaaaaaan

SEQ ID NO: 52335 - DNA, 934 bp, Homo Sapiens
  misc_feature (874)..(874): n is a, c, g, or t
  misc_feature (899)..(899): n is a, c, g, or t
  misc_feature (934)..(934): n is a, c, g, or t
ggtggccctctgacttgacagccttctgttctgcccggccttcccaccaggaatctccgaggctccccagggccccgcttctccgtacaccccagctcctaggtctcagagaactcccccacctgtggttttacctgcagccagcagagcttagcttcaaggacacctgccttcaaagccactgaggggaggaagggcagggcagactgcaggtggccttgttgctggcatcccggccaggtgggcggggactaacaaagacagctgtttagggtcttctcccctcacccatgctttcatcatcccctccgcacagcctccccgtccaggccttctaaccacacctacccagggctgccgcattcctgcactcagaagtctgcagcggtgcctcacaaacttgattgtgcataaaaatcactggggatcttgttaatacagcttctaactcaatagatctgggagatcctgcatttctaacaagctcccaggtaaggcggaggctgctggtgtgaggaccatgctgtgagcagcagggcgagagtgcccagggctgatatatattggaaatatcacccctgaagccatcgctggcccccacctcctgtggactgatgccccagggattcccaccccacttctgcaaccccaggtatccttcattatccaccccatcccagactcccaccccagggattgcccgtgaagactttggcctagcaaattgtgttggttatgtgagtgttgttttaatcagagatgtacatgattgccaatctgcattttctaccagtgtgaccacactgttacgatgcaattctagccaaaaaaaaaaaaaaaaaaaaaaaaatttttttttttaccttttcctagncttaggaaagcaatatacatgattntcagtaggcttctggatagaacagtggtttgagan

SEQ ID NO: 52336 - DNA, 716 bp, Homo Sapiens
  misc_feature (684)..(686): n is a, c, g, or t
  misc_feature (691)..(691): n is a, c, g, or t
  misc_feature (693)..(695): n is a, c, g, or t
  misc_feature (700)..(700): n is a, c, g, or t
  misc_feature (707)..(707): n is a, c, g, or t
ctgcctccctcctgtctggctcctggggcccatgcttagagcccaggctccagccctgagtgcttccgagctggcggactgcccaggggccatcagaggatggtggtgctgctgctgatccggggaccgctgtcttccctcccatacgcctttcatccctccttctagggcctatggcagttctcccaggatgtgtggcgagagcctgggccagcccacagcgttcctagtcaggcagccacaccttggtcctcatcttggtcccttccaatctgaaacctcgtgcctggctcgtctgccacctacatttctctttccagctgctgttttgtaaaaagaaaaagaaaaaagaagcccaaactagtgagagtaatatctaattatctcattttttgtaggtctgtgataaagaacttagtcatcccttccacctcctactgtgaagaacagaccctgggtcccacactgaaatcccctctagtcacccattcccaccccccagggagctgcctcccaggcagggggtgcagaaaatgattgatgggctggggaaccctggagagcctcgactccggaagtctcaaggtgcctcctcctctccttagctggcccgttggttttctgagcagggggctgaactgtgaacaagtccgacaaataaagcaagggtctgcaccatcaaannnaaaanannnaaaanaaaaaanaaaaaaaaa

SEQ ID NO: 52337 - DNA, 524 bp, Homo Sapiens
cagccgtgcccatcgtcaacctcaaggacgagctgctgtttcccagctgggaggctctgttctcaggctctgagggtccgctgaagcccggggcacgcatcttctcctttgacggcaaggacgtcctgaggcaccccacctggccccagaagagcgtgtggcatggctcggaccccaacgggcgcaggctgaccgagagctactgtgagacgtggcggacggaggctccctcggccacgggccaggcctcctcgctgctggggggcaggctcctggggcagagtgccgcgagctgccatcacgcctacatcgtgctctgcattgagaacagcttcatgactgcctccaagtagccaccgcctggatgcagatggccggagaggaccggcggctcggaggaagcccccaccgtgggcagggagcagccggccagcccctggccccaggacctggctgccatactttcctgtatagttcacgtttcatgtaatcctcaagaaataaaaggaagccaaagagtgtat

SEQ ID NO: 52338 - DNA, 736 bp, Homo Sapiens
  misc_feature (530)..(530): n is a, c, g, or t
  misc_feature (571)..(571): n is a, c, g, or t
  misc_feature (583)..(583): n is a, c, g, or t
  misc_feature (613)..(613): n is a, c, g, or t
  misc_feature (632)..(632): n is a, c, g, or t
  misc_feature (647)..(647): n is a, c, g, or t
  misc_feature (675)..(675): n is a, c, g, or t
  misc_feature (683)..(683): n is a, c, g, or t
gactagagagaagcctcctgctcccctcgcctgcacaccccctttcagagggccactgggttaggacctgaggacctcacttggccctgcaaggcccgcttttcagggaccagtccaccaccatctccacgttgagtgaagctcatcccaagcaaggagccccagtctcccgagcgggtaggagagtttcttgcagaacgtgttttttctttacacacattatggctgtaaatacctggctcctgccagcagctgagctgggtagcctctctgagctggtttcctgccccaaaggctggcttccaccatccaggtgcaccactgaagtgaggacacaccggagccaggcgcctgctcatgttgaagtgcgctgttcacacccgctccggagagcaccccagcagcatccagaagcagctgcagtgttgctgccaccaccctcctgtctgcctcttcaaagtctcctgtgacattttttctttggtcagaagccaggaactggtgtcattccttaaaagatacgtgccggngccaggtgtggtggctcacgcctgtaatcccagcactttgngaggccgaggcnggcggatcacaaagtcaggacgagaccatnctggctaaacacgtgaaancctgtctctactaanaaaaaaaaaaaaactcgaggggggccangtaccaantcgcctataggagtcgattacaatcactggccgcgtttacacgtgtgactgga

SEQ ID NO: 52339 - DNA, 607 bp, Homo Sapiens
  misc_feature (581)..(581): n is a, c, g, or t
  misc_feature (591)..(591): n is a, c, g, or t
  misc_feature (602)..(602): n is a, c, g, or t
  misc_feature (607)..(607): n is a, c, g, or t
ggcatagtgggaagtattgcttagaatgccagtacttgtttgctgtggaaggtttctaggaatggattgcttagtctaaagtaagcactaccaccatccacgttttcactcaacacagtgccttttaattggtgactaacatcaaaacaccttgacaaaccgttaaaacagtatcagaaaccatgtgtacatccctgtgcctcttagattgctaagttctgctctcattcttacttcaaaggacactttttaaagaattgttaatgcttttttataatacaagtcatagccctgttggcaaaaagaaaaaagattcagtgagaaagaaaaatcactgataattccatcatccagggagaaccactgttatttaagtatatggccttccagacttttctgtgcatttatagatatttttaatgggatcaaagtgtacatactgttttgtaactttttttcactcaacaataccatgactgtcttgctgtgtcaagtatatttctacatctcttaatggctgcatgatattccatcatatgtgccacattttattaaactactgttcaatttttaggtttccnactttcattnataagtgcttnaagan

SEQ ID NO: 52340 - DNA, 577 bp, Homo Sapiens
cgagctgacattttggacggtgctctgatgaggccaggccgactggaccggcacgtcttcattgatctccccacgctgcaggagaggcgggagatttttgagcagcacctgaagagcctgaagctgacccagtccagcaccttttactcccagcgtgtggcagagctgacaccaggattcagtggggctgacatcgccaacatctgcaatgaggctgcgctgcacgcggcgcgggagggacacacttccgtgcacactctcaacttcgagtacgccgtggagcgcgtcctcgcagggactgccaaaaagagcaagatcctgtccaaggaagaacagaaagtggttgcgtttcatgagtcgggccacgccttggtgggctggatgctggagcacacggaggccgtgatgaaggtctccataacccctcggacaaacgccgccctgggctttgctcagatgctccccagagaccagcacctcttcaccaaggagcagctgtttgagccggatgtgcatggccctgggaggacgggcctcggaagcactgtccttcaacgaggtcacttctggggcacag

SEQ ID NO: 52341 - DNA, 510 bp, Homo Sapiens
  misc_feature (474)..(474): n is a, c, g, or t
  misc_feature (510)..(510): n is a, c, g, or t
ggatttagttaaaggatgatatagagaaaatacattatttagcattatttcttcagctataatgaattgctatagaaatcaggcagatctttctaatgtgtattgattggtcttttcagctactctgaacagattactaaggccatctcctcatctctaagggagaaaaatagtctgtagatgaataatgtaaggtaaagagttgcatgtcagtctttgtaattatttacactttaactttctccagaactcagacatgatttcaacatggtgttagatttgtgcattttattttcctgaccacctcattccagccaatgtatggttatccactctgtgtgccaaaaccaatcatgcctttcacggccctttagttcagagaagttctgcactgatttttagtctcttgatgtctcaatcttacatgtataccaatcacaatggaataaagtgttgagttgtactgtgaaaaanaaaaaaaaaaaaaaaaaaaaaaaaaaggaaaaaaan

SEQ ID NO: 52342 - DNA, 513 bp, Homo Sapiens
ccccgcgtccgcttaaaccgaatggagtacatcgtatagcagaccgcgggcactgccgccgctaggtagagtctgagggcttgtagttctttaaactgtcgtgtcatactcgagtctgaggccgttgctgacttaaaatccctgtgttaatttaagttttgacaagctggcttacactggcaatggtagtttctgtggttggctgggaaatcgagtgccgcatctcacagctatgcaaaaagctagtcaacagtaccctggttgtgtgtccccttgcagccgacacggtctcggatcaggctcccaggagcctgcccagccccctggtctttgagctcccacttctgccagatgtcctaatggtgatgcagtcttagatcatagttttatttatatttattgactcttgagttgtttttgtatattggttttatgatgacgtacaagtagttctgtatttgaaagtgcctttgcagctcagaaccacagcaacgatcacaaatgactttatta

SEQ ID NO: 52343 - DNA, 722 bp, Homo Sapiens
  misc_feature (580)..(580): n is a, c, g, or t
  misc_feature (653)..(653): n is a, c, g, or t
  misc_feature (719)..(719): n is a, c, g, or t
ctggtttgaagaatgttatgacctgacagtggaactacattagtacacagcaccagaatgtatattaaggtgtggctttaggagcagtgggagggtaccagcagaaaggttagtatcatcagatagcatcttatacgagtaatatgcctgctatttgaagtgtaattgagaaggaaaattttagcgtgctcactgacctgcctgtagccccagtgacagctaggatgtgcattctccagccatcaagagactgagtcaagttgttccttaagtcagaacagcagactcagctctgacattctgattcgaatgacactgttcaggaatcggaatcctgtcgattagactggacagcttgtggcaagtgaatttgcctgtaacaagccagattttttaaaatttatattgtaaatattgtgtgtgtgtgtgtgtgtgtatatatatatatatgtacagttatctaagttaatttaaagttgtttgtgcctttttatttttgtttttaatgctttgatatttcaatgttagcctcaatttctgaacaccataggtagaatgtaaagcttgtctgatcgttcanagcatgaaatggatacttatatggaaattctgctcagatagaatgacagtccgtcaaaacagattgtttgcanaggggaggcatcagtgtccttggcaggctgatttctaggtaggaaatgtggtagcctcacttttantga

SEQ ID NO: 52344 - DNA, 784 bp, Homo Sapiens
  misc_feature (4)..(4): n is a, c, g, or t
  misc_feature (8)..(8): n is a, c, g, or t
  misc_feature (749)..(749): n is a, c, g, or t
  misc_feature (759)..(759): n is a, c, g, or t
tagnccgncccggctcggaattcccgggtcgacccacgcgtccgttccctttgtgtcttgtgactctgccacatcccatctcatcctggcctctgagtcaagaacccagtgaactgactttctagttctagaagttccgctgcaaggccaggaaagcttgagaaaggtattgtggaagaagcaaaggtagacccccatcactcacctttgtctgcatccctgggcctgtgaatgatgacagcacctgacattctgcaccagctacctctgcctccatggcagagaaaaggccataagaacagtggaagaggagcatggactcagacttcaaggaagaagccatttccccaggtccttccttctgcatctcaccacccctagttacaaataactccattgaacagcatctattcagaaactatgccgaataaaaagattggtggaagggctcatgtggttagcaactatgaaacagaaataggacactcagttacaaacattatctcctttagtttttcagaaaatgcatccctgatttcattcatttccagcttgaaagccagccatattactctagtccctaccaaactgctctagaaggtcatttccattttgtttgtgatatttagacgcgcagacttcaggaagttcacctttaacttcagcattccagatgaagtttcctgactcagtgcttttgcataaggaactagaaaaaaaaagtaaggaaaattggagatgctaacatncttccccatnccaactgcaccttaaaatatgcatg

SEQ ID NO: 52345 - DNA, 663 bp, Homo Sapiens
ggagaagaagatcaagaaagaagactcgagctctgggctcatgaacactctcctgaatggacacaagggtggggactgcgatggcttctccaccttcgatgttcccatcttcactgaagagttcttggaccaaaacaaagcgcgtgaggcggagcttcggcgcttgcggaagatgaatgtggccttcgaggagcagaacgcggtactgcagaggcacacgcagagcatgagcagcgcgcgcgagcgtctggagcaggagctggcgctggaggagcggaggacgctggcgctgcagcagcagctccaggccgtgcgccaggcgctcaccgccagcttcgcctcactgccggtgccgggcacgggcgaaacgcccacgctgggcactctggacttctacatggcccggcttcacggagccatcgagcgcgaccccgcccagcacgagaagctcatcgtccgcatcaaggaaatcctggcccaggtcgccagcgagcacctgtgaggagtgggcgggcccacgatgcagaggagaagctgtgggcgcggccctgccacaccccaccccgtggacgagaggctgggggtccaccctttggggcctggtcccatcctgcacctttgggggctccagcccccctaaaattaaatttctgcagcatccct

SEQ ID NO: 52346 - DNA, 568 bp, Homo Sapiens
cactgctacactcagcctcatgagccacttcagaccagccaggtgtcttcccgggccctgccagaccctgctcacattccctctgctggtctgtgctggtctcagaaggccaccgcgcccgcattccactcagccagggtccagctgcagcccccgccacccttccttcccttccctgtcctgggtcatgttgttgccaccctgtgtgacttttgaagctgtaaaatgagcttccagggcttgggtggcgtcggggcagggccgccgaggctgggaggaagcccttctgccttttgctggtgtttctggaatttgctttccctcacctctcacttccttctagaaggagcttcctgactggaaccagagaatgcatgtctgtccacttggtggctgctgggtggggccgggaacaagggcccctgaccctgtgtgctggccgggacctgccaccagccccccagcctgcttcttccccttaagctttgtgcccctggatgcgctaacattcactcttgtttgtccctggactggccatgaagtgaggagatggttatttaaagagaat

SEQ ID NO: 52347 - DNA, 527 bp, Homo Sapiens
ggaaccacatataacacttaacttcccctaccctgcccctccccaaaagaaaccatgacaaacctagcttttaaaaaatattttaagaaagagaatgaactgtggaatttattggcagccaaggaatgtgtccaagacacatgctgaggttttgaataaaaagtgaacttttgtaatttgaattgggtcccgcttagttcttgaattgttatgaaaatcctatatctgtttgtatatttgcaaaccctttgtattataattgttgatattttccctttttaaaaaataccattgaaatcagcatgacaaaaataacactgttggcacttataggtaacgtgattgattcagtatcttagagtttacagtttgtgttttaaaaaaactgaaggtttttttttaagtgcaacatttctgtatactgtaaaagttataataactgaactgtttggtcgagtctttgtgtgttatattccaaggaaaattgaaagtattcagaaattaaaatattatttgatatctgaaaa

SEQ ID NO: 52348 - DNA, 574 bp, Homo Sapiens
gagtaatgaggcttggggctggagaggacaagatgggtaaaccctcacatcagagtgacatccaggaggaataagctcccagggcctgtctcaagctcttccttactcccaggcactgtcttaaggcatctgacatgcatcatctcatttaatcctcccttcctccctattaacctagagattgtttttgttttttattctcctcctccctccccgccctcacccgccccactccctcctaacctagagattgttacagaagctgaaattgcgttctaagaggtgaagtgattttttttctgaaactcacacaactaggaagtggctgagtcaggacttgaacccaggtctccctggatcagaacaggagctcttaactacagtggctgaatagcttctccaaaggctccctgtgttctcaccgtgatcaagttgaggggcttccggctcccttctacagcctcagaaaccagactcgttcttctgggaaccctgcccactcccaggaccaagattggcctgaggctgcactaaaattcacttagggtcgagcatcctgtttgctgataaatat

SEQ ID NO: 52349 - DNA, 871 bp, Homo Sapiens
  misc_feature (830)..(830): n is a, c, g, or t
  misc_feature (845)..(846): n is a, c, g, or t
gcctgggtggcgattccagcacgaggggagtgcaggctgaatggcgaaggcgttggacaagtcaacatctctgtggtgcagtccaccgtctccagtggctatggcggtgccagtggtgtcggcagtggcttaggcctgggtggaggaagcagctactcctatggcagtggtcttggcgttggaggtggcttcagttccagcagtggcagagccattgggggtggcctcagctctgttggaggcggcagttccaccatcaagtacagcaccacctcctcctccagcaggaagagctataagcactaaagtgcgtctgctagctctcggtcccacagtcctcaggcccctctctggctgcagagccctctcctcaggttgcctgtcctctcctggcctccagtctcccctgctgtcccaggtagagctggggatgaatgcttagtgccttcacttcttctctctctctctataccatctgagcacccattgctcaccatcagatcaacctctgattttacatcatgatgtaatcaccactggagcttcactttgttactaaattattaatttcttgcctccagtgttctatctctgaggctgagcattataagaaaatgacctctgctccttttcattgcagaaaattgccaggggcttatttcagaacaacttccacttactttccactggctctcaaactctctaacttataagtgttgtgaacccccacccaggcagtatccatgaaagcacaagtgactagtcctatgatgtacaaagcctgtatctctgtgatgatttctgtgctcttcgctctttgcaattgctanataaagcagatttanntatacataaaaaaaaaaaaaaaaaa

SEQ ID NO: 52350 - DNA, 602 bp, Homo Sapiens
tcaagagcctttcagtgctccctcatattgagggcagtggcagaaaagtgaccactctgcaggctgggcccaggatgtggtgtcctgagatagttttgtatcttaaagactgaggcacagaagcgaaacgagaacacactgtttttgagacacagttgtccaaatgtttctggccagctccggcccctttttgtatgacacttctcttccaccctgcacagcacatgtgcccgtcattcttttaattttaaaagatgaaatggcagatgctagtaattcacagaatggcctcttgtgggggtgggtctgagggaagtcagctataaaacatttgctggagttttgttcaatggggctgtgcatttttatattatgtgtttgtaaatgacatgtcagccattgtttcagtgtttcctaaaagcagaatatttgcaacatttgttttgtataggaattatttgtgccacctgctgtggactgttttctttgcctagtgactagtgacctgtgttgtctaaacatgagtttcagccctttggttttgtttaataccatgtcaaatgcaaacttcaattctcccccatttagctttattaactgac

SEQ ID NO: 52351 - DNA, 594 bp, Homo Sapiens
attttcctcagaaaatccacacagcacagaatatttataaaatgtcatgttttaagaattcatgagctgagtttttatagttatctgaattccattgaagaaaacctatttttgtatgaatatgaccagtttcaagcagagcccaaaatgtcacagttgtcaagagaacacacaacagagaaaccctataaagaatgatacaatatgtttcaatcagaaccttcacatccaataagcaatatgcaggagtgaagccttcaaaatgataagtaaggtcagaatttagcaaaagtataatgagggacatgacaaaatctgtgtccactagaatctaagctccatgcaggaacattgtttactgctgcatgatcgtgaccttgaacaagtacctaagaaatagtggcttccctggaattgtttaacttgataggaaaaatctatcatatataggacatatatttgaatattttagtgagctcagccccaattcgtcattataattgtactgggaaaaggattcttgcaagaagccttaaaatgaattcaaggaaatgacatttaattaaaacacataaaaccaaaaaaaaaaaaaaa

SEQ ID NO: 52352 - DNA, 582 bp, Homo Sapiens
cccgggccctggcttcttggcgcgatgaggttccggttctgtggtgatctggactgtcccgactgggtcctggcagaaatcagcacgctggccaagatgtcctctgtgaagttgcggctgctctgcagccaggtactaaaggagctgctgggacaggggattgattatgagaagatcctgaagctcacggctgacgccaagtttgagtcaggcgatgtgaaggccacagtggcagtgctgagtttcatcctctccagtgcggccaagcacagtgtcgatggcgaatccttgtccagtgaactgcagcagctggggctgcccaaagagcacgcggccagcctgtgccgctgttatgaggagaagcaaagccccttgcagaagcacttgcgggtctgcagcctacgcatgaataggttggcaggtgtgggctggcgggtggactacaccctgagctccagcctgctgcaatccgtggaagagcccatggtgcacctgcggctggaggtggcagctgccccagggaccccagcccagcctgttgccatgtccctctcagcagacaagttccaggtcctcctggca

SEQ ID NO: 52353 - DNA, 782 bp, Homo Sapiens
aagatggcggcggcgggggaagcagcgtgagcagccggaggatcgcggagtcccaatgaaacgggcagccatggccctccacagcccgcagtatatttttggagattttagccctgatgaattcaatcaattctttgtgactcctcgatcttcagttgagcttcctccatacagtggaacagttctgtgtggcacacaggctgtggataaactacctgatggacaagaatatcagagaattgagtttggtgtcgatgaagtcattgaacccagtgacactttgccgagaacccccagctacagtatttcaagcacactgaaccctcaggcccctgaatttattctcggttgtacagcttccaaaataacccctgatggtatcactaaagaagcaagctatggctccatcgactgccagtacccaggctctgccctcgctttggatggaagttctaatgtggaggcggaagttttggaaaatgatggtgtctcaggtggtcttggacaaagggagcgtaaaaagaagaaaaagcggccacctggatattacagctatttgaaagatggtggcgatgatagtatctccacagaagccctggtcaatggccatgccaattcagcagtcccgaacagtgtcagtgcagaggatgcagaatttatgggtgacatgcccccgtcagttacgcccaggacttgtaacagcccccagaaactcacagactctgtcagtgacattgtgcctgatagtcctttcccggagcactcggcagtgacacagggat

SEQ ID NO: 52354 - DNA, 705 bp, Homo Sapiens
  misc_feature (621)..(621): n is a, c, g, or t
  misc_feature (624)..(624): n is a, c, g, or t
  misc_feature (654)..(654): n is a, c, g, or t
  misc_feature (660)..(660): n is a, c, g, or t
  misc_feature (670)..(670): n is a, c, g, or t
  misc_feature (677)..(678): n is a, c, g, or t
  misc_feature (684)..(684): n is a, c, g, or t
  misc_feature (693)..(693): n is a, c, g, or t
  misc_feature (705)..(705): n is a, c, g, or t
atttttgtagagatggggtttcacgatgttggccaggctggtctcaaacttctgacctcaagtgatctgcccaccttggcctcccaaagtgctgggattacaggtgtaagccactgcgcccggcctttttaactttaaacatgttttagaattcacctaaagatcaaaatatcatggattgaacctcatcaattgatagcagtgagtgactgaagcttccaaatcaagaaaagccggcaccaagaacttccattctaatctagagctgaccagtttgagctgattctctctttgaagagtccttcttgattgcagtgcagtactggcatttctgaatggatgtaagtggagtattttagtctaaaggcttttcaaattacttgaatttttttaaaaattgaggagctttatttctatttacccttccatttttgtatatcaaatttccattgtcattaaaaactgtatcttgaaactttgtgaactgacttgctgtatttgcactttgagctcttgaaataaatgtgatttttgtgtgattatctggtttccagctttaaacattaactgtcaccttttattcttaaacttgaaagtacagaaatcattaaattattaagntgnacaataaaaaaaaaaaaaaaaaattcctgnggccgnaagcttattncctttanngagggntaattttancttggcactggn

SEQ ID NO: 52355 - DNA, 596 bp, Homo Sapiens
ccacatcaaaaaaccgaattccaagctcaggtgagatcaccaaagttgcctgtgaggcttcgtggaacctgcaggtagaaaggacatctttatttcgagctgcagcccagttgcttctgcgtcttggagccccttgaaaggaccctctcccttcaacagtacatagggaggccatttctggggagaaatgtagactgtccttagactcctgaggtttttacacttgcttgctgactctgtggactttgacttcatcattaaacatcttataatgatgtaatttgctttgactgtaagtgtagaacaggacgctgttcctgaatcaggaaacaagggactggtgacctgaactgccaccaccctccctggtgctcagatgcaatgaaatcgtgaggcaacaaatctatggctaggtaaagggtcaactccatttcagcaaatgtttcagatgttccttcctgcctagtaatgttccagctttaccccagccttaatcttttaaaatgtatattttccttagcgttgattttaaagtaattcgtatgtatttattacactgggtttgttgcagtaagccacctcgaatgttgctgtag

SEQ ID NO: 52356 - DNA, 390 bp, Homo Sapiens
tctcggtggcttcccctgcgccctgggagtttgatctcttaagggaacttgcctctccctcttgttttgctcctggccctgcccctaggtctgggtgggcagtggccccatagcctctggaactgtgcgttctgcatagaattcaaacgagattcacccagcgcgaggaggaagaaacagcagttcctgggaaccacaattatggggggtggggggtgtgatctgagtgcctcaagatggttttcaaaaaattttttttaaagaaaataattgtatacgtgtcaacacagctggctggatgattgggactttaaaacgaccctctttcaggtggattcagagacctgtcctgtatataacagcactgtagcaataaacgtgacattttat

SEQ ID NO: 52357 - DNA, 825 bp, Homo Sapiens
ccccaggagtggaacccggagacattgttcttttgctacaggagaaagaacatgaggtatttcagagagatgggaatgatttgcacatgacatataaaataggacttgttgaagctctatgtggatttcagttcacatttaagcaccttgatggacgtcagattgtggtgaaatacccccctggcaaagtaattgaaccagggtgtgttcgtgtagttcgaggtgaagggatgccgcagtatcgtaatccctttgaaaaaggtgatctttacataaagtttgatgtgcagtttcctgaaaacaactggatcaacccagacaagctttctgaactagaagatcttctgccatctagaccggaagttcctaacataattggagaaacagaggaggtagagcttcaggaatttgatagcactcgaggctcaggaggtggtcagaggcgtgaagcctataatgatagctctgatgaagaaagcagcagccatcatggacctggagtgcagtgtgcccatcagtaaactctgcaaacaaattgcacaggtggattttctttccacatttgcctgatttgttctcagcaatccagctggagtgtcttatcaatccagatgaactgagggacatctgttggtctatgtataacttttaaaattggtatagtatctacagagtgtataatttaaactaaccacaaagctttacatcttcattttgactgttccatagcagaataaagcacttgaaaggaaacaagactccctttcacacatggattattataagtttcaatcctggtatctgtgcttgatttttatcagtttt

SEQ ID NO: 52358 - DNA, 911 bp, Homo Sapiens
atggctctttggctggcactgggggactggatgcatttggtcgagtttgggacctacgcacaggacgttgtatcatgttcttagaaggccacctgaaagaaatctatggaataaatttctcccccaatggctatcacattgcaaccggcagtggtgacaacacctgcaaagtgtgggacctccgacagcggcgttgcgtctacaccatccctgctcatcagaacttagtgactggtgtcaagtttgagcctatccatgggaacttcttgcttactggtgcctatgataacacagccaagatctggacgcacccaggctggtccccgctgaagactctggctggccacgaaggcaaagtgatgggcctagatatttcttccgatgggcagctcatagccacttgctcatatgacaggaccttcaagctgtggatggctgaatagatgacaatgggaaaaggacttgaacctcaagctctctctaaggagctgttttcctcaaacgagaagaattgaagtgtttagttctatcatgttttctgccaattaccatgcatagaccctcagtagaattggatttccatgtcagccccactccaggaaggcagccaatcctaggtgatggggaacccctctcacggttgaaatttattacctttttacgcctgcacgaactgtgtagacctcgttttattaatcttttgtggcggcgtggtggtcaggctgtatcctaacactttggaggcgaagttggtaaacgtgactccggttcagacgagctgggaatggaaggcgttgaagaaaataaatacggccgggtcccggacggcatgggacaggggagataccggaaggtgcaaacctctctgtgagctcaaaattgtcccttcacaggtgtttgtcctgctcacg

SEQ ID NO: 52359 - DNA, 578 bp, Homo Sapiens
  misc_feature (421)..(421): n is a, c, g, or t
  misc_feature (574)..(574): n is a, c, g, or t
gcccctcacctcccctacctgaagcagatgaagcttcgagtgatgaattcccaggagcaggatgagacttctgtgagcagcgaggattttgatatgagcgactccacatggatgtcagctgacccgcacctggcctccagcctgagccccagccaggacgagaggatgcggagcccgcagaacctccacagtcaagaggacgggccccaccgcttgagccacctggcccagaggcctgaacatcatctgcagcttggacacctctctacgggccaggaaccccagggtctctgcagagagaaatgatttcagttttaggggaagatctaggtgtgtgacgtctaattcattagccaaggacggctactgagccttggaaaaggctagtgcagacaggtgtgcaatacacgctgcgtctcancggctccgtaggaaagaagaaggtgaaatatctcagctctgataacacggtatcaattatttgttgaaatggtactattttggatatattgggttaaataaagtagattattaaaattgaaaaaaaaaaacctttaaacccaatggggatttnaccc

SEQ ID NO: 52360 - DNA, 613 bp, Homo Sapiens
agcggttagagcccacaaaattggtaaccttaaattgtgtgttttggtaagtaataactaactgtttcctcatagctagttctcaagctgcatgtaagattttaacgggaagagaaaataggcctggacctgaaggtctcaaatatgttgagaagaaagtatgaactataaggaacttgagatgtagatttattttgcaggaaatacgaggaaaataggaaagaagtgtttgccgcatcaagtgtaaagaatgatactgaggatttttacattttatgaaatgaaataatggcatttacaaaatgaaaaatgtagtttcacaactaagttttgttaacagagactgcatgctttgcttatagttcttaattttggttttgacattcatttaattttttccatgttaaatatgtagtttaattatttactcaaaataaacattgttcatgcttttaggcctttgggggaattgatttttatccacaggtagaaaatggtctttgcacacactacacttatttcaaatatacaatgtgctcccgaactttcgcattagtctttaaaattactctcaaaatggtattgaaaaaaaaaaaaaaaattctccagggct

SEQ ID NO: 52361 - DNA, 792 bp, Homo Sapiens
gggctggtccggtccggattcccgggataaactctgcaacacaaacgagttctacatgtcctatcttctgttcattgtggcctgtgcaggagctggtgccaccgtctattgccctgctgatctacatgatggctactacatataactatgcggttttgaagtttaagagtcgggaagattgctgcactaaattctaaattgcataaggagttttagagagctatgctctgtagcatgaaatatcactgacactccagactaaagcagagtctaggtttctgcaattttgttacagtaatttgtaaatagctttagtaaactcaccttgcatggtagattaataagatgacttactgtacatgaattacacaataatgagatctggtggctatttccacattttgaaaaggattcagttatttactgacagtggtgagcatcctttttaaaataatgttctcatacttaaacattagagagcagtatctttaaatgaattattaacactttggaatacttacattttctgttatttttgattgcctgataaccagtttcaatgatgaaaatgaaaacaagtgctgaagatgaaatggaagagaaccgttttaatctggattttgttttgtcacacctggaaaatactttgcaaatatgttctaaattgaaaacaatttttttatgatcacatggttcactaccaaatgaccctcaaataagccagatgaaaatttgaagaaaaaggtcacccagttctctggaaaaaaaaaaaaaaaaaaaaaaaagggattt

SEQ ID NO: 52362 - DNA, 607 bp, Homo Sapiens
tgtagttacgaagcctttcaggctgcttctgtttaaaatataaaagaaaactttgccccctttgcatcttcataaacctgctgcggcagactcctcagccgatggtggctctgggtttccttgagtgtcatatgtcctagaaagttgctggctgactcttttttgtctggggcctggggaaagggcttggactgtgaaaagaaatgtggcccctttccatcttcaagagagatggaattaatgatggatggaccctggagggaatctccccagccgacttccactgggctgacagactttgctgaccacaggggaacgatgttcttttctttcttcatgatcagacataaacttagcatcttaatggaagaaaaatgaggggaacttcaattatgatttattaaagacaatttctattacaccctcctttatgacaagtgacattttagatgtaaaagtaaaaactttaccatgccttttttttttttgttggcctaacattgaggccttaaaacctgaggctcctgtgcctgatggaattcttgtaacatacacttgtgtatcatataaagataccactctgtttctcttatgtattcttactcta

SEQ ID NO: 52363 - DNA, 786 bp, Homo Sapiens
  misc_feature (19)..(19): n is a, c, g, or t
  misc_feature (23)..(23): n is a, c, g, or t
  misc_feature (712)..(712): n is a, c, g, or t
aaaacttcccgtattgttncttncccacactttttaatagtctcaaattctttctggggaagcaacgtcagtgtctacctccacagtaactatgatataggaaattgtcctttcagtggtttctaggtataacaaacaagccgttaaaaatgagtgaccattttgtaggttacagcctcagcaatctgtgtcatttgaaagcaaatatcctgatatttttaaataaggtgagcagggcaggcaggaaaccaatatttagtacttttgtgattaaacattctagaccaggcttgttgatatgtatgccaatagcctagaatttttggcttagtgtaaaataaaaatgtcttttctattgtggtctgatatccgtttctgtaataagatcagtttgttgtcctctgtgcaccagtggttttgcccttaattttttttggctagcatcaccaagatctgtcatccagagctgctgagaaaaatacatgttgccaaacttttcttaaaattgtgctgccagtggtattttcccagatgtgaaaaataataatctaataaaggattaatatctaataacaataccattgttgaacatgctcatggaatgtccaccttcttctgattccttttttgtatttgaaaatgcaatggtgtgttccaaattattgttggtgttgttaatgtcatgactctcctttgaatagaataaaataancccttttgttttgtgttttctactgaaatagattttcctctagtcctatgtgaataaaaagctttttgaaaaaa

SEQ ID NO: 52364 - DNA, 663 bp, Homo Sapiens
atctggtatttactggcttacactcaaaacgaccacagtcctacctcagttcaaggtaaagccggatttccgtggcgggggtcccacaggacctcctgtagtagcccctgcgctgtgtgtctggagcgcggtcctcggccttatttaaatggtccaagtagacagctgcttgttggattccagtgcaggtacctgcgatgtttacgtccacaccgagcccagtgtgggactgacatttctcaatggaagtgaaatttgggattggactttgaagacggattactaaataataattattatatgtaactgaagcaacctacttttgaaaatcaactgtattgggtagtgggaggtgggagggaagggctttgggaaggggatgaatatctctttttacctttaacagacttgtttaatcttctcgatgtagatgtttatgtaggtacttcacattgcaaacgccttttattctatttacaagctcagatgtctctgctctcctgaatcttgggcatgcctttctgtaaccaaaaatccctgtaggcgtgctagcaattccagggtggtccgggtttggcagatttgatttttaaaaaacgtattatctttaataaaatgttattatgtcaaccagtgaggctgcctgaacaaaaaaacaaaaaa

SEQ ID NO: 52365 - DNA, 771 bp, Homo Sapiens
gcctcagtttctctgtctgtacctatttaagccaaaggcactagcctgaatttgcttgaagatcacttgtcttggaaatgactagagaggcagaggagaagggtttccagagttgctaggtttgggagtggaaggggcaggcagtgcacttgcccctcctcatgccccttctgacaccagctccctgtggaggcctggtttctgggtaatgcctcccttgggcatcttcatgcatcaaccaaatgggccatcaggtacttcattagtcatggcagaaggaggggaaaagacttgttttccagacagaaaatctactcccctgtccccagccatatccctggataggaagggataggaagagactacttggtgccatggggtaggggtgagggtataagtagatcacagtgggaagacctcagccttgggtggcttgtctctgcttcttgccaggtgggagggcctgtccacaccctggatccccgtaccacagtgccagcatgcccttcccctgggctaccattgtccctttcctcacccagttggtagaggagtcagagaggcgggaggccgcagggccactggcttcataatgtacaccactgtaggggggtgggccgaggatggcgaacccctgtacttcagtggaaactattcaagatatttcaaatatccatcaaatccaactctttgtacacaccacaaaacacgccgccgccaaaacacccccaggggccaaacttaccgtaccactctcacaagggccacagg

SEQ ID NO: 52366 - DNA, 524 bp, Homo Sapiens
accaaaacacataaaactttgctagatagacagtgaggtggaaaggaactaaaatgtatctctcttgaatagcatttggggttcaattgaatttgttgtgtttacaacagcaaagcaccgttagcctggacagttgcttatggcatcgatagggttggataatattctgggatttgttgcagcagaattcctctatctgatgatcagcagttgaacataaacttcataattatagtaaaatttaggaaaaactatgagtgtgaagagtatgaactgattgggtagattaggcagagtgcattatgggcaagacaaaggttttcgatattaacttcttttaaaataaactttttattttcaaacagtttcagttttacagaaaaaatgtgaagctagtacagagaggtctcatttaccccacacccagtttctcctgttattagcatctcacattaatatgtggtatatttgttacaattaataaaacacattgatatgttaatattattaaaaaaaaaaaaaaa

SEQ ID NO: 52367 - DNA, 798 bp, Homo Sapiens
cttttcaaatagcattccccaggtttttaatgggaggaaaaaaagctttaatgttgagcatgctgcgagctgctgcgtggaaaggcctctgtatgggccgaagacccttcttccctggctgccaggctcgccaggagcccactggaaacgcccaccacgggggctccttgttacacatgttctttttttatccgatcaacctgtgcacttttgatattttgatattatatttgcttccttaattcctcgcgtagagacggtctcaggtgccgtggtctatgctcgtggtcctgtagctgtccgcctcagctcccaccgtgtttgtctggtgtcagcacgaggcagagctgtgtgctccatagcgtgtagctttagactcggagatgagtgctttgacccagcgaggagctcagctaagtgtatccacgctgtggttcagcagcctttagatcatacggcattgtggttcatgtttgaaattacagattttaaatgccatgttcattaagaaatccagggtattcagattctggggtttttcatattgtattattattattcttaggaatagttcaatgtaacaagaagaaaacttgacctttgctctggttaaaacagtaataggcacttgaaaaaaaaagataaattattgaatgagtagtattacctacaaattccagaattttctgggttttaggacgttgtgaagcatgactgattaacagaattttatacaactgtaccaataaaattccaaattggaattgttttgttactctggttgttgtgccaaattgt

SEQ ID NO: 52368 - DNA, 478 bp, Homo Sapiens
ttaaaacacagctcacaagaataactaacttgctcaaatatggagaaaactcaatagggttcagggaggttctggcagtgtgcagtgtgaaataatcctgagtccttgctgaacacaactgtaggcttgagttataaagcacattccaaattttaaataaaagcatttactcaattattataaaacaacatatttaaaaagatgaaccacaccaaaggtcatcaaaacacctttttataaattagataattctacctgttttacaatatgggtttaagccttcaatggtgttcagttcaggtgtgagtcagctcctggtggtgtcagaagtttacatgattgcggatatcattgatttgcttcaccatttcccttatatgttcacccctgtaaaattgtaaagtcactcacttttggaattataataaaccatttatatggattcttaagaatttaaaaaaaaaaaaaaaaaataggt

SEQ ID NO: 52369 - DNA, 957 bp, Homo Sapiens
aattcccggagacaggtcccccctgggatacagcagctccagaggtgaacaatattttcatcaaacaagaacttcctacaccagatcttcatctttctgtccctacccagcagggccacctgtaccagctactgaatacaccggatctagatatgcccagttctacaaatcagacagcagcaatggacactcttaatgtttctatgtcagctgccatggcaggccttaacacacacacctctgctgttccgcagactgcagtgaaacaattccagggcatgcccccttgcacatacacaatgccaagtcagtttcttccacaacaggccacttactttcccccgtcaccaccaagctcagagcctggaagtccagatagacaagcagagatgctccagaatttaaccccacctccatcctatgctgctacaattgcttctaaactggcaattcacaatccaaatttacccaccaccctgccagttaactcacaaaacatccaacctgtcagatacaatagaaggagtaaccccgatttggagaaacgacgcatccactactgcgattaccctggttgcacaaaagtttataccaagtcttctcatttaaaagctcacctgaggactcacactggtgaaaagccatacaagtgtacctgggaaggctgcgactggaggttcgcgcgatcggatgagctgacccgccactaccggaagcacacaggcgccaagcccttccagtgcggggtgtgcaaccgcagcttctcgcgctctgaccatctggccctgcatatgaagaggcaccagaactgagcactgcccgtgtgacccgttccaggtcccctgggcttcctccaatgaccagactaactattcctgtgtaacaacaacgaaatcaaagaaaaccacggaaaaccacgattaaaactggcacacgttcctccggatattggagaaa

SEQ ID NO: 52370 - DNA, 561 bp, Homo Sapiens
agatgatcattctggcccagcccttttatctctttatctccaatggtgtgcgttttaagtttctctgacttggtttttctgtccctgtctcccacagttgttcccgctctgcacctgtgtttcagttactctctctctctgtcttagatctttttgtttctgcctagtctctgtgccctgtctttgtgtgtttctttctctgcctgaaaccctccctcttttcccttcaggcatatgtctctaaaccaatgttatgtatcaaagactgttgaaagagacagggctactctaggaatggatgggtggggatattttccccatggatcaagatccagtttagggttgggaaataaaggatagggataaaagaggcaccccattcagtcagcagatacttattcagcacctactatgtgtttgatactgtatacaaaagacatgaatgggctgggtcctgaacagagaataaagggtttgactccattctggaaattcttttgtttgcaaacaggtgttgttaatttgttcaaaggcaggcaaacaatctctctggcaacacaa

SEQ ID NO: 52371 - DNA, 825 bp, Homo Sapiens
cgggaatcgtcttcattaaggtttcaacagggaaattcttcacggcgcccttttatgtggcagaaatcagctggggcttgtttagcttccagcacactctcagtcatagcatgtgtagctaaaggaagtaatgggaaggggttcatgttctctttataatgcagtggcaaaaggttctgaaaaccttttaaactcgaaccagtgggggaaagatggatcttgaagctaatcctgcagagagttttatagaggccagggattgccttctaaattatgataaaacagaagtgaagagtttcagagcatcagattgagtgaaaagttgtcagattctgtattttttaacaatcttcaataatgtaaagattacttttaaaatatttaagttaaaactacttgaatagtattttgctgaagagcaagatatgcattaatcaccggttttatactgtccaaaatgaagcatccccgtgacaaaccagagtgggcagaagcatcgagagcgtgacaggaaatcccaagactgcttccgcctcagaggcgtcccggctgcgattcgctgccctgttgtcagtgaggcctggctgtcaccgcacaccgcgtccgtgtctccagggggttcctttcttctcacacgtcgcgtgtacccatagcactcttgtgtttctgtttttcccagtatgcatgtttaaaatagaagtgacaagaatcacatccggttgtgtcctgtgggagggtcagaggcagaatctacttacagtggtgtaattaaagttatttaaccaaaaataggtatgtgtccatctcagcattcacctttatcaa

SEQ ID NO: 52372 - DNA, 478 bp, Homo Sapiens
taagtgagataccgttttaatgcatttcaataattatcttcaggacctcggcaaaacctgagtcctgtcctctcgctttcctccccgtgcacagcgagcttcaccacttgctccgcaccttctccatcaactactacctgtccctgggatctgtccagtcgcccagctaaagtgctcagcaggtcagcagcgcggcgagcttctatgcaggcgtggggtctggggctcctggatctctgtgtcccatttcacagagattgccacctactgccgcctgttagaagatggggaggacttcaatcttggtggtattctggacagcagcaaatacctgtaaagcatccaaaagaccaacacccacaggatagtggacggcaaagtggtgtctgagaccaacatcacagacgtcttgaggtgctaaaccagcagaagcaaggtccctttgcggagcaggagggcaataaaaacttctgtggtc

SEQ ID NO: 52373 - DNA, 691 bp, Homo Sapiens
ggactcttctcaggggagctcccggagtgcactcaggagctgatgattgacgtcaccaagagctactaccagaagtttttgcccctgacgcaagtctagcatctctgcctcatgtcttgaatctgcttgagctctaagatgaacctggggacaaagtgagccagtcagcacctacaaagagcttttgtgtctttgacatctaccaccctcctccttttaaaaaatttctttagaatttctcaatcttcaaggctctaagtgcttaagaattcactaacagacagaccatctggaggagctgtcttcaaatgctgtgcttacaccttatctatgaacagtcactttgtaccattatctgtggaacacagaatcatctgttcccaacactccagccccttggtcctgtggatggctggatcccgcctgaaacggacctgcagagcagcagcacccttccggtgtggaggctatgtagctggtgcgctgctcacggccattcactgcccatgctgagcgcctctcacacaggtaatgcccagcttttctgctgctaacacatttggccagttgttgcagttgctcatcatcttgggaaaggtgtttgtgacttttcagagcccagattcctgttgtctattaaaacttgaagggaggggggaatagtgtttctctcttcttcccaaaatgacct

SEQ ID NO: 52374 - DNA, 538 bp, Homo Sapiens
  misc_feature (428)..(428): n is a, c, g, or t
  misc_feature (501)..(501): n is a, c, g, or t
  misc_feature (508)..(508): n is a, c, g, or t
tgcttttggtcttaaaattttactttaacgcacttaggatttgtcgtcagtaatttgttatgcactatctagactaagaataggtattaatttactagaattgtcaaatgaaatatttcaagcaaagtttgcataatgaatgcaagtttaaaccaattaaatgtgttcactttttagcaagctaagctgctccttatttctcctgtagtagacacaatcacagttaatctttgcacaatgcatcgcattctccatcaacctaacagagcggtctgggatagagcctgaactttgggtcccttggggcccaacaggcaaggttcagatctgggctctaccacaaaccatctgtgtaacctgaacctccctagtcttcagtttcctcatctgctttaaaaaattgctagaacatagttctatgtaaatgntcggtgttaaaatttatttggtatctactgtatgtaagatatggcctctgctctcaaaaatatgtagtcccanaagtganataatatgttcacggagatgcactattaaa

SEQ ID NO: 52375 - DNA, 907 bp, Homo Sapiens
acacctgggccagttccctgggcataatgagttcttccgggccaacagcacctcggactctgtgttcacagaaacgccctccccggtgctcaaaaatgccatctccctcccgaccattggaggatcccaagctctcatgttgcccttattgtcaccagtgacatttaattccaaacaggagtccttcgggccagcaaagctgcccaggcttagctgcgagcccgtcatggaggaaaaagctcaggagaaaagcagtctgttggagaatgggacagtccaccagggagacacctcgtggggctccagcggttctgcatctcagtccagccaaggcagagacagccactcctccagcctgtccgaacagtaccccgactggccagccgaggacatgtttgaccatcccaccccatgcgagctcatcaagggaaagactaagtcagaggagtccctctctgaccttacaggttccctcctctccctgcagcttgatcttgggccctcacttttggatgaggtgctgaatgtaatggataaaaataagtaacaagatgccaacttttttcctttggggtaaaaggtacaaaaacaaactaaccacagttgaagagaagggcttccggagctgtatttgcagttttgtgttgggttttctaaaataatattcttacaaagtatttttttacctgttatgccctgttttgcaaaaacaattttgaaaaaaaacaacaaaagccaaaccttattcttggcaaaaaaaaggaaagtgaagtccagagccccatttttccagggaggccatttgggtgaatagtttccgcgctccacaataattgggttttggccgaaaccccccccaaggaaaaaattttggggcctttggggcccccgggaaatttgggccacc

SEQ ID NO: 52376 - DNA, 613 bp, Homo Sapiens
ccgggactgtgaacctcaaaacaaatgggtatttttgggttttgaggatagatgttactccttaaagtttgtatttggggcatgaaaaactactgaaagaagaaaagtgctacagatactacatttcaaagagttggcattttccctttggccactcaagcagcatttgatgtatctaaagaaacaaagtcattgtttattttttaaaaaattatatgcagttgtataagatactacattccattgaaatgttggctatgtcctaaccaggcaaccagataacaaaaacattttgagtcttttatctaggtagttctaattattcagctacttagtttaacaaaggaaaatatcctgacttctctcatttcatttgtagacttttcattgtataggcacaaccaaagagtcagactggtttaaaactccagaaggaaaaaaagtatcccacacagtggatgttgtttctaagaatgctacaaaatcctgacatctcagacatctcaatgttaaaggaagaaaaaaaataccttttcatttcaaagaactaatatactttgatattgtgtaaaccttactcaagtttattgtcaagctttaactgcctttttag

SEQ ID NO: 52377 - DNA, 460 bp, Homo Sapiens
ccggagtagctgggattgcaggcacccgccaccacgcctggctaatttttgtatttttagtagagacggggtttcaccatgttggtcaggctggtctcgaactcctgacctcaggtgatccaccttggcctccgaaagtgctgggattacaggcgtgagccaccagccaggccaagctattcttttaaagtaagcttcctgacgacatgaaataattgggggttttgttgtttagttacattaggctttgctatatccccaggccaaatagcatgtgacacaggacagccatagtatagtgtgtcactcgtggttggtgtcctttcatgcttctgccctgtcaaaggtccctatttgaaatgtgttataatacaaacaaggaagcacattgtgtacaaaatacttatgtatttatgaatccatgaccaaattaaatatgaaaccttatataaaaaaaaaa

SEQ ID NO: 52378 - DNA, 540 bp, Homo Sapiens
cacagtgaccttgtagccacatgagaaagcactctgtgtttttgttcggtctcagatttatctggttgagttggtgttttgtttggggtttttaattttgcgtgtttgcatagcataaaatcagtagacaacaccactgaggtttttacgatcaacgatatccacagtctctttttagtctctgttacatgaagttttattccagttacttttcatggaatgacctattttgaacaagtaattttcttgacaagaaagaatgtatagaagtctccctgcaattaatttccaatgtttacattttttaactagactgtggaatttctacagattaatatgaaatggagctcatggtccgtttgtgtgttagatatgctgtagctgaagccctgtttgtcttttaaacactagttggaagctctcaataaaaatgcctgctgctcacagcacagaaaatggggcagggggagcctcaagcacaatctagctgtcctcctaaagactctgtaatgctcactcccctcgcgttctcccggcgct

SEQ ID NO: 52379 - DNA, 566 bp, Homo Sapiens
ggcacgaggtggagagtcacagctttactgtgacaggttttgcccaaggctttgatacctgtcacccagggtatcttaaaagcaagttgttctcccactactttcctttccctctgccctgccattcctattacaatgctgtgaaaaaagttctgcttcttaggtgaatgggtactttctattttgtttctaaacgagcaattttgaggatgaaatgggaagatatcattgcttcctttttgcacctattgggtatgtacactctggccgaagggagtccttatgtttagtttcaaaatatattactttcctggattctcttcttcactttttctgactttgggtccattttcttttcattgcctccttttccaggcagctctattcttgcagagccatagcaggacatgttaaaattccaatagaaaacactaaaaggaaagtctgtggaatcactagtgactaaatactgggaacctattttctcaatcttgctccatgttgagttctttgtattcttgagatgataatatattatgtatttgaattcctgaaaaatggaaaat

SEQ ID NO: 52380 - DNA, 684 bp, Homo Sapiens
  misc_feature (663)..(663): n is a, c, g, or t
aggaagttgactgtatgtctgctagttagattcaaaacatcataaagatgatagcatgtcaatatattagcctagccattatgttagcctttgttaggtgggcagcttttctgctttttcccttcctctgtggtgacaacggaggaaatatccaacagaaatacgtctaacagggaaattgggatcatagtttatatgcatctgatttgaaaggagtattgaggaaggttttcatatatgatctatctttggattaaaaagaacatttatgaaatcaagccttctaacactagttataattgagaagcaacagtaactccgtggacagcaatcaagcttaaaattgtaaataaatatggggataattcagttgttgcaaaaaaagggcagaattcagtagaataaagtccttttctcttacaggtattaaatgaggacagagaacctcaggtgttcttatgctagtgcttgctgagtgcatactaagaaagcaattccaaatagatgtatacatctagagagagtggtattagagattcagtgtatgtatttatttacatgagaggaaactggaatataatccataaattattggaatataatcccataaattatcaccttttatgactggaaaatatttgccaatgaagaaatggtctgtangtatttgtcttaagatttttg

SEQ ID NO: 52381 - DNA, 721 bp, Homo Sapiens
cgtccgccgggacctttagccaagaggagctgcagggaccatggccaggttaccaaaatgccctgctctgaagccttgacacctgggtggaaagagaggctgttttctgaaagggtaaagggcttggtctggattcccagaagcatagcttagatgggaccacagtgggcaattttgacctgtcctgcccttcttagcttgaagggaaaccccagagactcttctgtcagggaaaactagggactctcttctagagccatatagttccttgggattagctcttggccaagaaggctgagtatggttcccaatttttaaatccatttcattttttaaaaaataagggaaataaatgtaattgccatttttcaaagattaagtaggaggagaggggtttcttgctctccagagcccaaagggacaaatagggactttgtttaggccaaggaaggagcggaagtagggcaactcggtcctgcgattattaatcccactccccacttattctagggcacacaaacactattttacttttttaaaatcataaaacggcagaacagatttggttagtttagaagaaaagaaagctctataaatataaatctatattcctgtatttttatttaataatttataaataccaagttcatttgacttttatttttgtgtaatatgtaatgatcgtattaaaaacaataaataaagcccagaagtttaatga

SEQ ID NO: 52382 - DNA, 835 bp, Homo Sapiens
gggaccgactactggcaatgcctcctaatgaaacttgtaccgtgaaaggaatcactctgcatgatgaacctgtcgactgggcggcagcaggcgatcatgttagtcttactttggttgggatggatatcatcaaaatcaatgttggctgcatattttgtggccccaaagtacccattaaagcttgcactcgtttcagagcccgaatcctcatctttaatattgaaattcctatcactaaaggatttcctgtgctgttacactaccaaactgtcagtgaacccgccgttattaaacgattgattagtgtcttaaacaaaagcacgggtgaagtcacaaagaaaaagcctaagtttttgactaaaggccagaatgcattggtagagctacagacacaaagaccaatagctcttgagctatataaagacttcaaagagctggggaggttcatgctacgttacggtggttctacaatagctgctggtgttgtcactgagataaaagaatgatgggtcagaatttctaccacgtttctggatacagtgaaatagctaacctctgtttcaagaatgcagttataaagtcaaaggaaccatgtgcaattgatatgtttttagatgagagagaaaaattaaagctaaaattacctgcaaagaagaattaataatcacctctgccaaaaattctaagttgcccaactggcaaagaaaagtcctaatggttaaaaaaacaacttttgcccttttgaaaacggtaaataaaaatgggaattttacctttggcctaagaaaatttaatcgcggaagaggggtcacaaaaaaataaatatttccttgac

SEQ ID NO: 52383 - DNA, 1006 bp, Homo Sapiens
tctctcctcccttaccaccgctctggatcatgttactagttccgtcttttgtgtggccttgggccagcttccttgataccttgaagatgggcttcttgtgagtccccagggagaaagggacaagagctaagatttttgcatcagcccttctggcagaaggtgtggtaggggccatttgttttttttagtggacttgggatttgtggtgtaatcatatcattaatgatccagggtgtgggaaaaatggaggtccttgaagtggctgaatctcattgtatttaagacactgtcagttgccagatgtaggcttatttttggagatgtctaggagaggaaaaagctaccaatcatactcttgatatccgtctggctgtgtgaggcacccctacctcatgggggtgtcttgggattgatgaactgtggaacctgcctcctgcgctccccaaagcttattaaccccttaactgtatcggggcggggtgtgtgtgtgcatggaagatgcctgggctgtctttgctatatgtaaatagagccattggatctttatttttgattaatttgttctgattttttggtttgttttttaaggaactgtaatgaacaaatgtcaggatatccaatgccaaataaagatgttgtatttatttagtccacgtgtagctttctgaccaggtgggcaccattactaaccccaggactaccagcctcaccaccgccgccctcacttgctcaggaaacccgcctgccagcctagcccagctttgtgtttttctttcctccccattcccaccacaggttgctcaccaaggtgaagggttcctagccgctgggattgaagacattggcctggcctcgttctctcttcttgcccttggcccagctgggacaaactctgatcagtattaggggkagagtgaggtagmmctggacycctgkbccaacaccctgvcccaccargggcaaawgaawaagtttttaagaaccactmactmacccccarccctgc

SEQ ID NO: 52384 - DNA, 573 bp, Homo Sapiens
tgtattgagggccagtgatgatgttttgatatttatttcctgctacttaaatttgaatctgagtgaattgtacctatttctgatgatgtcggtcttgcaaagcgacagattcataaagtaatgatgaaatctttctttcttcccgtgtgtatttctaagaaatagagccaactgattttgtatgtaaataccaagagcaatttacctggtactaaacccgcaccccagtgcggacccttcccagccctcatcccacttcctttcctactgtcctggaacctgtctccattgtgtgatccagccctggttctggctgtggtcagcagatgccagtgaagggttttgtgtgtttaggcctcatttctttgtctttttcctactccgttcctggcatttgctgatttctagtgtatactctgtagtctcagttcgtgtttgattccattccatggaaataaaaagtatgttgtacatactgccgaagaattgtcttgcaagttaaggcttccccctttactataagactataaataaaaacttattttatccttaaaaaaaaaaaaaaaaaaaaaa

SEQ ID NO: 52385 - DNA, 674 bp, Homo Sapiens
cacgaggcacagctgcctggagcaggcctcatgatgtggggggactcgaccccctgacatggggcagcccatagcaggccttgtgcggtggggggactcgaccccctgacatggggctgcctggagcaggccgcgtgacgtggggctgcctggccgcggctctcacatggtggttcctgctgcactgatggcccaggggtctctggtatccagatggagctctcgcttcctcagcagctgtgactttcacccaggacccaggacgcagccctccgtgggcactgccggcgccttgtctgcacactggaggtcctccattacagaggcccagcgcacatcgctggccccacaaacgttcaggggtacagccatggcagctccttcctctgccgtgagaaaagtgcttggagtacggtttgccacacacgtgactggacagtgtccaattcaaatctttcagggcagagtccgagcagcgcttggtgacagcctgtcctctcctgctctccaaaggccctgctccctgtcctctctcactttacagcttgtgtttcttctggattcagcttctcctaaacagacagtttaattatagttgcggcctggccccatcctcacttcctctttttatttcactgctgctaaaattgtgtttttacctactactttggggg

SEQ ID NO: 52386 - DNA, 477 bp, Homo Sapiens
agcccgctggcccctctcctgcagcccatctggcggagcggcggcggcggcggcggcggcaggagaatggcatcagaactggcaatgagcaactccgacctgcccaccagtcccctggccatggaatatgttaatgacttcgatctgatgaagtttgaagtgaaaaaggaaccggtggagaccgaccgcatcatcagccagtgcggccgtctcatcgccgggggctcgctgtcctccacccccatgagcacgccgtgcagctcggtgcccccttcccccagcttctcggcgcccagcccgggctcgggcagcgagcagaaggcgcacctggaagactactactggatgaccggctacccgcagcagctgaaccccgaggcgctgggcttcagccccgaggacgcggtcgaggcgctcatcagcaacagccaccagctccagggcggcttcgatggctacgcgcgcggggcgcagcag

SEQ ID NO: 52387 - DNA, 790 bp, Homo Sapiens
ccgggatgcggtaggaacatggcggatcggctcacgcagcttcaggacgctgtgaattcgcttgcagatcagttttgtaatgccattggagtattgcagcaatgtggtcctcctgcctctttcaataatattcagacagcaattaacaaagaccagccagctaaccctacagaagagtatgcccagctttttgcagcactgattgcacgaacagcaaaagacattgatgttttgatagattccttacccagtgaagaatctacagctgctttacaggctgctagcttgtataagctagaagaagaaaaccatgaagctgctacatgtctggaggatgttgtttatcgaggagacatgcttctggagaagatacaaagcgcacttgctgatattgcacagtcacagctgaagacaagaagtggtacccatagccagtctcttccagactcatagcatcagtggataccatgtggctgagaaaagaactgtttgagtgccattaagaattctgcatcagacttagatacaagccttaccaacaattacagaaacattaaacactatgacacattacctttttagctatttttaatagtcttctattttcactcttgataagcttataaaatcatgattgaatcagctttaaagcatcataccatcattttttaactgagtgaaattattaaggcatgtaatacattaatgaacataatataaggaaacatatgtaaaattctgttatgacataatttatgtctccattttgttgtattggccagtactttta

SEQ ID NO: 52388 - DNA, 828 bp, Homo Sapiens
gtctagctatggacatgaaaggctatggagagtcatctgctcctcccgaaatagaagaatattgcatggaagtgttatgtaaggagatggtaaccttcctggataaactgggcctctctcaagcagtgttcattggccatgactggggtggcatgctggtgtggtacatggctctcttctaccccgagagagtgagggcggtggccagtttgaatactcccttcataccagcaaatcccaacatgtcccctttggagagtatcaaagccaacccagtatttgattaccagctctacttccaagaaccaggagtggctgaggctgaactggaacagaacctgagtcggactttcaaaagcctcttcagagcaagcgatgagagtgttttatccatgcataaagtctgtgaagcgggaggacttttgtaaatagcccagaagagcccagcctcagcaggatggtcactgaggaggaaatccagttctatgtgcagcagttcaagaagtctggtttcagaggtcctctaaactggtaccgaaacatggaaaggaactggaagtgggcttgcaaaagcttgggacggaagatcctgattccggccctgatggtcacggcggagaaggacttcgtgctcgttcctcagatgtcccagcacatggaggactggattccccacctgaaaaggggacacattgaggactgtgggcactggacacagatggacaagccaaccgaggtgaaatcagatcctcattaagtggctggattctgatgcccggaacccaccggtggtctcaaagatgtagaacgcagcgtgtgcccacgctc

SEQ ID NO: 52389 - DNA, 887 bp, Homo Sapiens
  misc_feature (643)..(643): n is a, c, g, or t
  misc_feature (695)..(695): n is a, c, g, or t
  misc_feature (825)..(825): n is a, c, g, or t
  misc_feature (843)..(843): n is a, c, g, or t
tttttagctcatcagctatagttagtggtagtgtattttatgcgtgacccgagacagttcttccggtatggtccatggaagccaaaagattggacatgcctgctgtagatggacagttggtttgtttctagtttggggtaactacacacaatgctgctagcaacagttttgtccatgtctctgatgcacgtgtgttttttgcaaatggtgcacaaatttttctagggtttgtactcaggagtctgactcctgggttctagggtatgaagatctttctaaatattgttctagtttacgtgcccaccagcagtaaaacagaattcccttgccttcccatccttggcagacatttcacttttgccagtctggtggggtgtatagttatggccttaatttgcatttagctaattaccaaggagattgagcatatttttatgtttttattaaccattttgattttgtctcctgtgaagtgtctatcatcttttgcccattttttaacttgttgtctttttctttttcttttcttttttttttttctgagacagggtctcactctgttgccctggctggagtgcagtggtgcaatctcagctcactgcagccttgagtcaggctcaggtgattctctcacctcagcctnccaagtagctgggaccacaggcccacaccaccaagcccagctaattttttgnatttttaagtagagacgggtttcatcatgttatgcaggctgctctcaaactcttgactcaacgatctgctggccttagccttccaaagttgggattataggcgtgagctaccagaattttcttataaacnaataattctttggatagncttgaaattatccataaggggattgcaaaatcttctctactctg

SEQ ID NO: 52390 - DNA, 997 bp, Homo Sapiens
  misc_feature (841)..(841): n is a, c, g, or t
tggtcccgagttccctgggaggctgacagggtcaagccaccctgcccaccaccctcccacttcccctcccctttcctctccagcattaggattcaagggaaatctgcatgaagccaattttgagggtagacgtgtggggaaaataaatcattatacagtaagacctggggcttgaggggtggggaatggggagggaagggcatagcctgctcctccatgagtctgacatctcggaaactgagcagctgccggacgcctgggtcaggaatccaagaccccacctcttaaggactggttcctcagaaagcaccctcagggaaaaaggtgaaaacattacatccgtggattctcctgccacaaccgcattggaagaaaaggctgccgcaacatctcagcgaggagtgaaggacccatgtcccaggaaccgcgctgcgccacctgcactcacccccctcacattctcttaagcacccggtggccctccgaggcctggcggaatggtggtgcccacggggttgggcaagggctcaccaggacctcaacgggcaaagttgtgcacactaaaatatcaaatcaaggtgcttggttttaaagtaaatgtttttctaaagaaagctgtgttcttctgttgacccagacgaatagggcacagccctgtaactgcacgtgccttctgtcattgggaatgaaataaattattacgagaaagggacttgtcctaactgggttgaggcctttacggtttgtatctacatttctccccccccgggggtttggcggggacagggacagaactaccgggagtcatgggaaaaaaaaattctggggttcactactggtncactgctcactttcctgatccctccggaaacctttttttttttttcttctttttcgcaccctgggataccttgaaaaagttcccaaggggggcccccccctttgggatgcccggcgagcctggcctaagggatgacccccctggtgtacccatatc

SEQ ID NO: 52391 - DNA, 977 bp, Homo Sapiens
gttgcctaaaacacacattgaacagattcagaagcattttagtgaggacaacaatgaaatgatacctatggagtgtgattcattttgcagtgaccaaaatgaatttgaagttgaaccatctgtaaatgctgatcttaaacaatatgaatgaaaattctgtgacacactgttctgaaaataatatgccgtcttctgatcttgcggatgaaaaggttgaaactgtttctcaaccatctgaaagcccaaaagataccatagataaaaccaaaaagcctcgtactcgaagatctagatttcattctccatctacaacttggtcacccaacaaagacactccacaagaaaagaagcggccccagtctccatctcccagaagagaaactgggaaagaaagcaggaagtctcaatcaccatctcctaagaatgagtcagccagaggccggaaaaaatcccgttctcagtccccaaaaaaggatattgcaagagaaaggaggcaatctcagtctcggtctccaaaaagggatactactagggaaagcagaagatctgaatcactgtccccaagaagagaaacttctagagagaacaaaagatctcagccaagagtgaaagattcttccccaggagaaaaatccaggtcccagagcagagaacgagaaagtgatagagatgggcagaggagagagagagaaaggagaaccagaaagtggtctaggtccagatctcattctaggtccccctcaagatgtagaacaaaaagtaagagttcatcatttggtagaattgacagagatagttactctccccggtggaagggaagatgggcaaatgatggttggagatgtccacgaggaaatgatcggtacagaaagaatgacccagagaaacagaatgaaaatacaagaaaagaaaaaaatgacatccatctagatgctgatgatccaaattctgctgacaaacatagaaatgactgkccc

SEQ ID NO: 52392 - DNA, 903 bp, Homo Sapiens
atagtgggccctccgacagccccctctgccgcctccccacagccgctccaggggtggctggagacgggtgggcggctggagaccatgcagagcgccgtgagttctcagggctcctgccttctgtcctggtgtcacttactgtttctgtcaggagagcagcggggcgaagcccaggccccttttcactccctccatcaagaatggggatcacagagacattcctccgagccggggagtttctttcctgccttcttctttttgctgttgtttctaaacaagaatcagtctatccacagagagtcccactgcctcaggttcctatggctggccactgcacagagctctccagctccaagacctgttggttccaagccctggagccaactgctgctttttgaggtggcactttttcatttgcctattcccacacctccacagttcagtggcagggctcaggatttcgtgggtctgttttcctttctcaccgcagtcgtcgcacagtctctctctctctctcccctcaaagtctgcaactttaagcagctcttgctaatcagtgtctcacactggcgtagaagtttttgtactgtaaagagacctacctcaggttgctggttgctgtgtggtttggtgtgttcccgcaaaccccctttgtgctggggggctggtagctcaggtgggcgtggtcactgctgtcatcaattgaatggtcagcgttgcatgtcgtgaccaactagaaattctgtcgccttagcatggttggctgaacccctggggaacccaaaatctgaaaatgggaataaaaatttttttggaattctggtcaacacacacaaccaacctcggaggccatctatggtccggacgcggagcacaaagggaacggaaatggcccaacggctc

SEQ ID NO: 52393 - DNA, 807 bp, Homo Sapiens
atatgatcttcagatccctacctgttggctataacatctctaagcaagtgcttgatcagtatctcactctgctggcagatgatccactagagtttgttggaaagtctggcgacagtggtggaggaatgtatgtmatcaacctccataaggcattagcatccctagccacagccactctggagtccgtcgtacaggagagatttgggtctcgctgtgctagaatattccgtctagttttgcagaagaaacacatagagcagaagcaagtggaagactttgcaatgattcctgcaaaggaggcaaaggatatgctatataagawgctctcagaaaatttcatgtcactccaggaaattcccaaaacaccagaccatgccccatccaggaccttctatttatatactgtgaacatcctgtcagctgcccgaatgttgttgcacaggtgctacaagagcatagccaacttgatagaaaggaggcaatttgaaaccaaagagaataagcgtctactagaaaaatctcagagggtagaagccatcattgcatctatgcaggctactggtgcagaggaagcacagttacaagaaatagaggagatgatcacagctcctgaacgtcagcagctagagaccctgaaacgtaatgtcaacaagttggatgccagtgagatccaggtggacgaaaccatcttcctgctggagtcttacattgagtgcaccatgaagagacagtgatccagaagaagcatcttcctcagaagatctggggggatggaaagcaaamtaaaggaggtgcctggatgcatta

SEQ ID NO: 52394 - DNA, 660 bp, Homo Sapiens
  misc_feature (604)..(604): n is a, c, g, or t
  misc_feature (613)..(613): n is a, c, g, or t
  misc_feature (633)..(633): n is a, c, g, or t
ggtttttctccttgtatggactgctcgctccaagggcaggcagagctcatgaatgcctcttatcttcctaagcggagttttaggtgacacaggatgaagcagaagagatctacccatctcacctgctctgcacccagcttctaagtggacaaagccaagcccaggcatgagctctggcaaagcaagaccccagattctccatttttgcctgtggaaaggagggtccctttacaggcttttttttcctttttttcccccaaaatctcttaaaatgaggaatctcttagcagactttggagctccccattctgccacattctgaccatgagacgcggcttgcagtgggggtgaacgcacataaaaagggaccactgacgtcctgctctactctctgctttctatttatttattttgggggtgggttggggagtcagaagaacctggaggacggaggaaaccaggggcaatgtttacaagactggtggacaagtgtaaatatggaataagaacaaacagttctaattaattccttcttctgcagtatggaaacctattacgatgcccttgagtcaagcactgagatacgttacccaattagggaaantaatttgtntataaaattgctgaggtcanaaaaaaaaaaaaaaaaaaaaaaaggac

SEQ ID NO: 52395 - DNA, 888 bp, Homo Sapiens
ggatgcgaatactctctgcacggcttcatcatgcacaataatgacctcacatggaacctctttacatacctggagtttgccatccgagagggaacaaaccagcaccacagggcgttggggaagaaggcggaagatctgttccaggatgcgtactaccagagcccggagacgcggctgaggttcatgcgggccatgcacggcatgacgaagctgactgcgtgccaggtggccacggccttcaatctgtcccgcttctcctccgtctgcgacgtgggaggctgcaccggtgcactggcccgagagctggcccgtgagtaccctcgtatgcaggtgactgtgtttgacctcccagacattatcgagctggccgcccacttccaaccccccggaccgcagcagtgcagatccacttcgcagcaggtgactttttcagggaccccctccccagcgctgagctgtacgtcctgtgccggatcctgcatgactggccagacgacaaagtccacaagttactcagcagggtcgccgagagctgcaagccaggggccggcctgctgctggtggagacgctcctggatgaggagaagagggtggcgcacgcgccctggatgcagtcactgaacatgctggtgcagactgaaggcaaggagcggacctgggcgagtatcagtgcttgctggagctgcacggcttccaccaggtgcaggtggtgcacttgggggggtgtcctggatgccatcttggccaccaaagtggccccctgaagcccaggcagcatgttcattatagggatgtcctcccccaggctgcaggtggacgsccggtccccaagtaccataagacagtyacataagagcgtgtagtcgtgactgaataaagaaagaaaag

SEQ ID NO: 52396 - DNA, 639 bp, Homo Sapiens
  misc_feature (493)..(493): n is a, c, g, or t
  misc_feature (523)..(523): n is a, c, g, or t
  misc_feature (614)..(615): n is a, c, g, or t
  misc_feature (617)..(618): n is a, c, g, or t
  misc_feature (620)..(620): n is a, c, g, or t
  misc_feature (630)..(631): n is a, c, g, or t
ggacaagaagagataatgtcttcagttttatggtgttttctgtgttttgttctccctgaccactttggttgatgtattttttccatgcgtctccacatctgttggggtagacgtgttgattgattgcattgcccaccagcaccctacaatcagatagttgtgatgctttaattctaacatacagcccgtaccacatccaggagatgtaaaaagtgtgtttgtgaatgtcttcacttgtactctaattcagacttgccaaagtatttgctatttactattatgggtaatactcttctctggcctagttcttacagagctactaaaatagaaatttacttttatggatagaagtacagaattttgagaagaaactaaattttcaccaaattttaaggaaaaattgtcattatctaaaaatgttcttatatatctgcttcatcttaccttcatactctgaaattccctatagcagacagagctagggaaatattanaaatttaccctatttattttctggaactanatcaagccttaactataacattatgagagtaatgggaactagtgctggctttaagtaataaaagtcattgttttcaacagtgaaaaaaaannannanaaaaaaaaannaaacatgt

SEQ ID NO: 52397 - DNA, 673 bp, Homo Sapiens
ccgggatgaatcctgtcgggtagcttttgtatactaagaacattattattattattatttttgagacggagtctcactctgtcacccaggctggagtgcagtggtgccatctcggctcactgcaagctccgcctcccgggttcacgccattctcctgcctcagcctcccgagtggctgggactgcaggtgcccaccaccacacccagctaatttctttttttgtatttttagtagagacggggtttcaccgcgttagccaggatggtttcgatctcctgtcctcgtgatctgcccgccttggcctcccgaagtgctgggattacaggcgtgagccagcgcacccggccaagaacattatttttaaagaagtgttaactttgaggacatatctgttccctggagatatttgggcttgaatcaggagtttgtcctacaggtgtcgcccttgatctcaggatgctaccagggctttgttctcgggatcctcgcacctggagagtgaagacgggcatgacggcaggtgaaggggtttgctgtgaaggaagaggagataaggcatttccaggaaatgggaaactgcctcctcctacacatggggcctgtgctcagaatgggcttagttcttataggatggatgctcagtattccttaataaagtagagttccattctt

SEQ ID NO: 52398 - DNA, 810 bp, Homo Sapiens
gccatttatgcaccccgcaacctgggatctcaaggagctttaaagtcttaatgggaacttggcattttcctgatgatctttaaaatgtggtcactaaactcaggattggcgtgtgcttttagaacactggagtagcccttgttttagaggctgtgcattgagtatcgaccgtattttgtaaaaggcaagatatcctcccttccaggctggtaacgggtttcaaggggactcttgaggaagtgccccctaaaatagaacacagcaataactgggcttcctgtccccacccccaccccagcagtgctctctggcactgggaactctgctagggagtggtggaagtaggaaggatttgtgtgcaaaggaaaatcgtggttgagtttcactgcagcaggctgacgttgcctgatgtgagagcaagtggccgactggggtgcgggtgcacaggtcgggggagcacaggccacagagcgcagcctctgggggtcccccaaggcacagcatatacagcatggtcgccccttgccctggagtctgggaacaaagagaggagccagcctccccgcactgcttcagatggaaaagggaggcagggtgggcttccgttctccagatctgtttgctcttaacaggcagaacatgggagaatccttattcctggttaatcactatgcatatttgaaataaaagaaagcgtaagcctctgcaattttaacttctcaaaggatgtctctgaaaagaatcactttaaaaccatgccctataaaaagcaagtctaccaaaataaactaagacttttcttatgtgaat

SEQ ID NO: 52399 - DNA, 860 bp, Homo Sapiens
  misc_feature (809)..(809): n is a, c, g, or t
  misc_feature (849)..(849): n is a, c, g, or t
cccaggaacagtgagggcgacgagaactacatggagttcctcgaggtgctgaccgagggccttgagcgggtgctgttggtgcgcggtggtggccgtgaagtcatcaccatctactcctgagcccagtgtcatcttgtggcctggagtcgaggtcttggccaggacataacaagctgtggtctggggtaacagcctcttcccagcacccacctgccagccctgcttgcctggccctgtcctggacccagctttgctaggtctccttggaaaccaggcctgggcctcaaaatggagatggatcccaggtcttgtgggaccctgggatgtttggggactttactatctagcaccccagtaggcctgtcctggccagagaagactggtaggggccgagtggggtttgaaggcagccggcccggcccagcccaggagcgctatttattgcatatttattgtttggatgtcaccatcagagacgaagggaagggtagccagggagggagtccagcccagctgcctgcaggaagatctggctcagtctactatgggcagggccccccaccaagctgagccgaatggagacagctgagctgaggcctgactttttcaataaaacattgtgtagttctgggcctcctgctgccccggctctgtttcccctggcgccaagagaagaaggcggaactgaacccaggcccagagccggctccctgaggctgtgcccctttccggcaatctctggccacaacccccactggccaggccgtccctcccactggccctagggccccctcccactcccacaccangataaaggacagccccagtggccgcttttctctgggcagntagggcaccat

SEQ ID NO: 52400 - DNA, 579 bp, Homo Sapiens
atgtaaaggggacagctcagggttgttttggagcctgttgactttgtatctctgcctgtgattttcttttctaaatgaaactccatgtagcaaccaggacgaagttgagaaggaaaacgccaaatgctttggttattagagtttaataggtaagctctgttacactaggtgttagagttccagaatgttcttttgtttgctaaaccttgaagaaacatgtgcctcagcctagatgttttgtcttctcttttctgcacttaatacctgacagtatgaccgatctctgcgcctttctgggggcgggcaagctggcggtagatttgtgatgtcacagtgcaaactgcagtgactgtaaattggcctggcgtgtataaacgttttcagggaatgcagaaggtattaatgaagagacaaaacctttattccatgtgctttgcttcattctgtacatagctctttggctcgtgaacctaattgtaaactttcaggtatttttgtacaaataagggactgatgttctgtttcttgtaattagaaataaacattaatacagtgttcttcaaaaaaaaaaaaaaaaag

SEQ ID NO: 52401 - DNA, 361 bp, Homo Sapiens
ctgcaagactccatctcaaaaaaaataaaaataaaagaaaagaaagaaatatgtgcactacctaagttttgtctttagaaaaactatccacctataaaaaattaccttgacaaaaatagttccggtttgactaatcattttgtttctttaagtggtaagtgtatgcaaggtggatccttgatgagccaacattgcactgtggatacatatctatgtttacgcgctattagaacagaaggcgctgtatatagaaatgttgctttgaagcaatatttgcaaaacacgcagacttctgtatctgtatttggaaaaaataaaacaggttcttgttgctaaaaaaaaaaaaaaaaaaaaaaaggac

SEQ ID NO: 52402 - DNA, 1008 bp, Homo Sapiens
agcggttagccatattctatatgcatatttattatgcatcattgtaatttaagatatatttggatgtaggctgtataaatgcttttaattgttctgtgaatagatccttagctttagtttcacctgaatcttgtgcaaaacacagctaaataattgaattgtattatagacattatgaggtaattgatcttttaaatgtaaggagtaagattgatctataataatgtgctggggaaaacatttatagatatgtacatcatggttactttttgtcctttcaaatggactttttatttctatttatggagagactgtaactactgcttttaatgtctttttaaagcagctatttaccagcttgaaaatatcatgcatttaaaatagaaactatctggggagtctaattactattgttcctatttgagccagttgtctttcagtaaagctatagaatctctcaaagaagtaaatagaaatactacttcttaaatgtcataggaagcatatccactttgtttctattagtactttaagatctataagaccttattactaaaaagtagaggaatataaagaattcatcaatttctgtatatgggctttaacctaattttccaggttatgcgacttataaagcactgtgaccaaacttccagagacagtaaaaaaaaaggaacaagttttaccccccttcagaaggtattgtcatgctacctggtgacttattttccaaaatctctctcttcaatctgctataaatccctcctttatcttgctttcctttaaaggctttaatatatttaaattccttcccttgggtttccctctcgtttagaacaggttactactggagccctatttgttcgaaaagttccactcgcgagaggtatacctgtgcctgttctttccggcaaccttacggtggaggccgttgagaaagggtttgaaggtatggcgtttgacccgggaaagtaccttatgcattttaaccctggtccccagataatt

SEQ ID NO: 52403 - DNA, 858 bp, Homo Sapiens
aagagtggtcattgtacagcttgtctcactggaaaatatcctgtagaattagaatggtagctggtagggttggatgtgtgtagtttcaagatagaaagttggtcaagaagttatagtggtcacacctcatctatttactgttactcagttggtacaatgtaaaatgccatgcttatgtttataagttttgagattttttttttttctgaaaaggataccaaagtgcgataactgaacatttccaattgcatataatacaacaatatgtggtgttcttttttttacacaagcattggctagcctttttaacctggtcagagaaggcaggtggtcactgacatttcccaagtccatgctttaaagggtttgcaagaagttagggttaaggagaggtgatgccaacaagacaggtgagttaaatataccatttcacacaaagtttgaatagaatacattatacctcataggtgtctagcctctacagttctggctgtagttatgaccttggcttccctgtctaactgtagacaaatctttaaaaaaaaataataataatctggtgcctcagtttccccacatgtgcaatgggatacttattaaataattaataagaatgtgaataagtgtcatacttttgtgatttgagccatcatttcacttctgattttaagacaactcatgattgttagctttcagaaagctaatgattgttaactttttgaaattagtttacaattaattaagatttcattatgatgggaggagacataattggcagatctttgccatctctctttgagatgtccctaaaaagggttgtaaaaatctggtgaaaaagtttttccctactttttgact

SEQ ID NO: 52404 - DNA, 907 bp, Homo Sapiens
  misc_feature (714)..(714): n is a, c, g, or t
  misc_feature (750)..(753): n is a, c, g, or t
  misc_feature (757)..(758): n is a, c, g, or t
  misc_feature (760)..(767): n is a, c, g, or t
  misc_feature (770)..(770): n is a, c, g, or t
  misc_feature (773)..(773): n is a, c, g, or t
  misc_feature (792)..(795): n is a, c, g, or t
  misc_feature (808)..(808): n is a, c, g, or t
atatttccaaatacaacatagtatagtcctgaatatgtacttttaacacaagagagactattcaataaaaactcactgggtctttcatgtctttaagctaagtaagtgttcagaaggttcttttttatattgtcctccacctccatcattttcaataaaagatagggcttttgctcccttgttcttggagggaccattattacatctctgaactacctttgtatccaacatgttttaaatccttaaatgaattgctttctcccaaaaaaagcacaatataaagaaacacaagatttaattatttttctacttggggggaaaaaaagtcctcatgtagaagcacccacttttgcaatgttgttctaagctatctatctatctctcagcccatgataaagttccttaagctggtgattcctaatcaaggacaagccaccctagtgtctcatgtttgtatttggtcccagttgggtacattttaaaatcctgattttggagacttaaaaccaggttaatggctaagaatgggtaacatgactcttgttggattgttattttttgtttgcaatggggaatttataagaagcatcaagtctctttcttaccaaagtcttgttaggtggtttatagttcttttggctaacaaatcattttggaaataaagattttttactacaaaatgaaatttgtttggacttccacttgagacagtanagagagtattagacacccagtaaaaactgccatatnnnngaannannnnnnnnaanaanaaaaaaaaaaaaaaaaaannnnaaaaaaaaaaaanaaaaaagggccggccgcctctagaggtatcccctcggaggggccccaaggttaacggggtaccccacctttctttggaacaagggggggccccatatac

SEQ ID NO: 52405 - DNA, 732 bp, Homo Sapiens
ttttttttttttttttttacaagtaacgttttattttatattctatcttccatttggcataagcctttcgatgtttgttttttaaaccagtgaaatatacaaatcacgcaagacagaaatatgtacattaaaagtacagaataaaggctagaagatatacataatatctgaatgacatgtagaatattttacattaaatagtttcttttaaaagctaggattgttaaactcaactctcttcataaacatgagtcactaaaaaggaacaatctgatttagcaaataaaaaaagtacttcatggtttttgtataataaaaaccaaaaaagtgacattttaaactaattagtgctttttgctttcaagatcttttgctcacaattcactgcaactgaggggatgtgaatatcattatgcaataaattaagagccacagttggctgaggtgatatgaaagccaacctgcctaaggggggtatgaaagatgtgtatctttccaaacttttaaaacaacgtaagtctgagataagaacatatttgatggcactgtttggaaagaggtgtccttattaaaaaaaaaaaaaaaaaaaaagctatctatgtagtgggctgaatattccttagggactcaattaataagtactgtcatttctaataggcatgggtttccattctgcagaatgaactaagaaaagagaaacattgctgatgcttctgagttttgaatatctct

SEQ ID NO: 52406 - DNA, 844 bp, Homo Sapiens
gccgaactggggaaagacggattgagattaactgctgggacctcctacctgcattatctcattctggcttccttgataattctgtgggccttgcagctttaactatagctcagctgctgcaagatttcagacttttgaggatgttgtgtgagggtgtttgactgtgactggggaagctcagactactttgtatgtgaatgcttcagggttttctttgttgagaacaactagcaacaaaggcaacccatgtgtgaccagttctccccaaggtctatgctaaattatagcaagagccctgggcaaccccaaacctagtcctggtagctgagcaccctgtaaggcaggagcaggcagctcagcttgagcagacattgggtggggggtggggggtggttgaggggggaggcagcacagtgcagcaaatgtttcttgggaggaagaagcctgatccatcaccatctgcttgactatgtagcttggattctcctttgtacctatccctttcgatttggctttaccttcatctatcttgatcctttcctggccaaatatcctcttgggcccaaatgaacattgtaccatagtcttctggaaagcaaacatgcttcctgctatgtaattgctaacattcatattagatgatgtgctgtagcttgatcttccttagcctactgccactgaggcagtaggttaaggtggtatcgtagtgccttttgattaatttaagtatttaattttcatcttccttcttcggatctatttggcctctcaaatgaactgagattcctgttaaacaacgactgatgtcatcgtctcttgtagaggaaactaataaagtgtgtga

SEQ ID NO: 52407 - DNA, 705 bp, Homo Sapiens
ctcgtcatgctctttgtagcgtggtgcttctgttgctcacaggacaacttgcctttgatgattttcaagagagttgtgctatgatgtggcaaaagtatgcaggaagcaggcggtcaatgcctctgggagcaaggatccttttccacggtgtgttctatgccgggggctttgccattgtgtattacctcattcaaaagtttcattccagggctttatattacaagttggcagtggagcagctgcagagccatcccgaggcacaggaagctctgggccctcctctcaacatccattatctcaagctcatcgacagggaaaacttcgtggacattgttgatgccaagttgaagattcctgtctctggatccaaatcagagggccttctctacgtccactcatccagaggtggcccctttcagaggtggcaccttgacgaggtctttttagagctcaaggatggtcagcagattcctgtgttcaagctcagtggggaaaacggtgatgaagtgaaaaaggagtagagacgacccagaagacccagcttgcttctagtccatccttccctcatctctaccatatggccactggggtggtggcccatctcagtgacagacactcctgcaacccagttttccagccaccagtgggatgatggtatgtgccagcacatggtaattttggtgtaattctaacttgggcacaacg

SEQ ID NO: 52408 - DNA, 634 bp, Homo Sapiens
gttagaacaaagctaaggcaattcctattgcttccttgcgcaacttctcaaaacgatgaaagtcagaaggctgtcaaactcaaatatctttgcaaacactgtttgaatactgtgaattcattacgaagaatgttcgagagaaagcaggggtctaatccaaaagaaatgtcattaaccaatactccaagtccttgagttttgttatatctgaactagttgaactgtgactgacaggtaatcctaatatatccaaatccaactgaataccaaattgagatggcaaatttttgtttgatataagttagcttgttagcatatgccctagagggcctccatccctgtattctaatgtttttactcaaagctctagcctttaggataggtgaatatgtaaatcttttatcactttctcaaattcaaactaaaggggaaagatcaaaccccttcccttcctacctgttttctgagctggctgacttgccagccacaagctgctcttgcagagttcttaccattcctgtaaatgttttgacttgttgcagaaattcctatctactttattaagcagtattgatctgactgtggaaacatcctctcacttgcattcttttaacttaaaactatttaagaactg

SEQ ID NO: 52409 - DNA, 456 bp, Homo Sapiens
cctttttcttaactccatttgaaccagctcacatcgatgggcacaagcgtcgccaggaaattcagtgtggtaagcttggcacctactcatggccaccgtgtcctgaactccctttcctgtgctcaggccccagcccacgcagcaggaggacacactgccgaagggaccagttggacggccttctggctttagcgcctgtgcctttcaggaccttaaatacagaaaggaaccgagtgctctgtgcagcccctccaagacggtcgctacagcgccagcaccacctgcgccgggccatcatgccgtgaccggacttggtttacgaatacagtgtacgaggttaagatatgataaagtgtaaaaatatatgttatagccacggtggttagtttaacatgttttgtatatatgatttttataaatctattaaaatgtgccttaaattaaaaaaaaacggca

SEQ ID NO: 52410 - DNA, 565 bp, Homo Sapiens
tttgcttctcacttccactctatattgttgtgccattaagcaatttagctaatcctgacatttcttagattcataatgttaggagcatttaatctgtattttacaagttaggaagcagaggatcagagatgggaaaggactagcccaaggccaacattaacaagccctctaacaaaaactttacaatacatttatgttgaatggaactccaagatctcacctctccatccaggaatggagtccatgtaatcaaagtgaacttaaaaataggacagtttcaacaagtcaggagattcacagcaactgatcaaagggagtccagtcaacgtgagcaagcgtgattatgatgaggaagccccctctgctttaatccacacaaggaacgtaacctgaagtaacctgatgttaaccaatctgctgtgtctactatgctgtttccttgttcctgctagtgctgctttacaaatgcagaccattctatcatacctggcagggcttctgttttattttgtaggctggatgctacccagttcatgaatcgctaataaaagccaattagatcttt

SEQ ID NO: 52411 - DNA, 616 bp, Homo Sapiens
ggccaagctctgagcccctaggactcaggcctgccaatgccacagccaagcccaccctgggatgggccacccaccagggctcagctccttggttccctcttccttggttccctcttccctggtccccccaaatctactgagccacggaccgcatcctccagggggcctgcaggcccagccaagtgccttccgtgggtcatcccagcacctgccagggacccgacctggggctgagtgcagaggctgagcaggacgttaggcccgggcccctggcacgtcctccaccggtgcctcctctggggaagggaaccagccctccagagcaggagactggcaagagctctttgtctcaccagctcagccccggccactccctgccaactccatgaccaggccaccatctgtaccctgcttcccaaactcccaggacctggagacaggattgtctggggccgaggggccagggtgtgaggtttcacctccgttgcggctgtgctcctgtggataacattgctagcgagccgcctctggttccactcagcttggttcctgcccccgccctgctgtatgatattaatgtggaaggtcatcaataaaggggaattgtgttggtgaa

SEQ ID NO: 52412 - DNA, 646 bp, Homo Sapiens
ccatctcaaaaaaaataaataaaagtaaaatgaatagtaatgtattatttaaggatacataaaggcgataaagtttttaagaagaaatgataaatataaaattaaacagaatggtttcatctgggtaggaggccagagaaggaaggaattcacacggcaaatacagtgatataggtaatgctctagttcagcagtgtccagtagatctttttgcaacaatggaaatgttccatatcggtgctgttcagtatagtagctaccagctttctgtggctattgagcactccagagagtggcttgtgtgactgaggaactgaatttttaattctctttaagtttaagcgggcacatatggctagtaactcatattggatagtgcaattctagttctagtggcaaatagacctatgtttattgttaggcatgaaaatttacacgtatgttaaaatagtcttaggtatatctaaaatgcagcataatcttaaaaagccatttaaaacaaaaagtaagcttcagaactcactttggtaactatagttctgctgcttccgtaggatctcagcatgacccagttagtccccaggccagcacagcaggtgataattaacccttctttacatttagcctcagaaaataccaggcatca

SEQ ID NO: 52413 - DNA, 911 bp, Homo Sapiens
ctgtggatctgccatccattctgcagtctccagcagagcaggcagtcaggccccagcgtgcctccatcccagtgccccgatgaccatctggtcagccctcccaacctcccttccagggggcttaccagcaaagccatattcggctaggaatttggaattcacaacctttattaacccctggcaaaacttcccgtttgcatgtcaaatcacattgaagcctgaagattagcttttcttactggtttttccaataagtaatagcaaagcccacttatcatacttaaactacagtaaagaaaagaggtggttctctgcagtgatcgtttagtgtggccctcaaacattaaatatccccaggtctccttggtgggtggcaggatttaaattcaatcaaatcctgtcctagtgtgtgcagtgtcttcggccctgtggacacaggtgaatgagggaccagccctgccctgggctgttgagaagagatcagtccacccagagttagacattgtctctgtagaaaacaggcatttattatgtctagggtcttggttatgacattttccttacaggataaaacgcctttatacagaaaccaacatggaacctttcatataaaacctttcctttcaaggctgtcgtggtccgtactcatgaatgcccatcacgaggcaggattcgggcacaatacttgtacttactgctcccaaattgtgcgctccccaaatcccctgcagtaaccttctcgggaacggcatggtcagaccaccgtgctgtcagcggtgagaggtgccttcccctctgggggcaccagattggggaacgaaaggagactttccttgacaaatgttccgtgcacattcccagaacatcgcatacctggatgtgccgttacaggtaattcatgcagacaacgc

SEQ ID NO: 52414 - DNA, 759 bp, Homo Sapiens
attgatgcaaaccctggaagtcagttgattactatatactacagcagaatgactcagatttcatagaaaggagcaaccaaaatgtcacaacccaaaactttacaagctttgcttcagaattagattgctttataattcttgaatgaggcaatttcaagatatttgtaaaaraacagtaaacattggtaagaatgagctttcaactcataggcttatttccaatttaattgaccatactggatacttaggtcaaatttctgttcccccttccccaaataatattaaagtattatttgaaccttttaagatgaggcagttcccctgaaaaagttaatgcagctctccatcagaatccactcttctagggatatgaaaatctcttaacacccaccctacatacacagacacacacacacacacacacacacacacacacacacacattcaccctaaggatccaatggaatactgaaaagaaatcacttccttgaaaattttattaaaaaacaaacaaacaaacaaaaagcctgtkcacccttgagaatccytcctctccttggaacgtcaatgtttgtgtagatgaaaccatctcatgctctgtggctccagggtttctgtkactattttatgcacttgggagaaggcttakaataaaagatgtagcacattttgctttcccatttattgtttggccagctatgccaatgtggtgctattgtttctttaagaaagtacttgactaaaaaaaaaaaaaaaaaa

SEQ ID NO: 52415 - DNA, 883 bp, Homo Sapiens
  misc_feature (672)..(672): n is a, c, g, or t
tgtaaatcatggtccacaagaggaatcatgtggatcctctcagctccatgaaaatagtggttctcctgaaacttcaaggtccctgccagctcctcaagacaatgattttttatctagaaaagctcaagactgttattttatgaagctgcatcactgtcctggaaatcacagttgggatagcaccatttctggatctcaaagggctgcattctgtgatcacaagaccactccatgctcttcagcaataataaatccactctcaactgcaggaaactcagaacgtctgcagcctggtatagcccagcagtggatccagagcaaaagggaagacattgtgaaccaaatgacagaagcctgccttaaccagtcgctagatgcccttctgtccagggacttgatcatgaaagaggactatgaacttgttagtaccaagcctacaaggacctcaaaagtcagacaattactagacactactgacatccaaggagaagaatttgccaaagttatagtacaaaaattgaaagataacaaacaaatgggtcttcagccttacccggaaatacttgtggtttctagatcaccatctttaaatttacttcaaaataaaagcatgtaagtgactgtttttcaagaagaaatgtgtttcataacaaggatatttatatctctgtngctttgacttttttatattaaatccgtgagtattaagctttattgaacgtcttgggtaactattagtctcctccatgacactgcagtatttttttactgatccagtacacgttgatttggtacaaaaaaaaacacacaccccacaaaccacaagcgcaaccacaacaaaacagggcggcgttaaaccgggggcacacatacaaggccaaga

SEQ ID NO: 52416 - DNA, 734 bp, Homo Sapiens
cgaggtcgcgttgggcggatctgtctacagatgatctgctggccatgccagctaggagtggctgtcgttattactccgtcgtggcctgggcggaggctctggctgtcctctttctccactccatttgcttggctctttctacacctccctcttgggcatgggctgagggctggagcgagtccctcagaaattccaccaggctgtcagctgacctcttttgcctgctgctgtgaaggtatagcaccaccccaggtcctcctgcagtgcggcatccccttggcagctgccgtcagccaggccagccccagggagcttaaaacagacattccacagggcctgggcccctgggaggtgaggtgtggtgtgcggcttcacccagggcagaacaaggcagaatcgcaggaaacccgcttccccttcctgacagctcctgccaagccaaatgtgcttcctgcagctcacgcccaccagctactgaagggacccaaggcaccccctgaagccagcgatagagggtccctctctgctccccagcagctcctgcccccaaggcctgactgtatatactgtaaatgaaactttgtttggctcaagcttccttctttctaaccccagactttggctctgagtgaatgtctcttttgcctgtggggctctctcctgatgctcttctttttaaagacactgcatggcaggggggtctctaagcgctgagctgagctgacgcgtcgccg

SEQ ID NO: 52417 - DNA, 698 bp, Homo Sapiens
tggccgcttctacgtagtcatgtggaagcagaccgagcagacctactggcaggctacacccttccgggcggttgcccagcccgggctgcagctcaaggcagtgacatcagtgtctggcccaggtgagcacctccgaaatgccctgtggcatactggccacacccctgatcaggtacgactgctgtggacagacccacgaaatgtgggctggcgggacaagacctcctatcgctggcagcttctgcaccggcctcaagttggctacattcgggtgaagctctatgagggaccccagcttgtggcggattctggggtgatcattgacacatccatgcgaggggggcgtcttggtgtattctgcttctcccaagaaaacataatttggtccaatctccagtatcgatgcaatgacacagtgcctgaggactttgagccattccggaggcagctgctccagggaagggtgtgaggaggaggccaccagattcagaattcagaattttagaccctttggccttggggtccatcctggagaccctgaggtctaagctacagcccctcagccaaccacagacccttctctggctcccaaaaggagttcagtcccagaggggtggtcaccccacccttcaggggatgagaagttttcaaggggtattactcaggcactaaccccaggaaagatgacagcacattgc

SEQ ID NO: 52418 - DNA, 1150 bp, Homo Sapiens
  misc_feature (605)..(605): n is a, c, g, or t
  misc_feature (672)..(672): n is a, c, g, or t
  misc_feature (701)..(701): n is a, c, g, or t
  misc_feature (736)..(736): n is a, c, g, or t
  misc_feature (747)..(747): n is a, c, g, or t
  misc_feature (933)..(933): n is a, c, g, or t
  misc_feature (984)..(984): n is a, c, g, or t
agacagggaaaagaaggatgaaaagagaggcgactcctagcagcggccgagcttacagagagaagggtggaggtgtgtggtggaaggggaaagccggccggctggcaaagcgctgcggagaaagacacgaggctcctgagcagggaaagccgaggttgccaccgcaggcctggcacgaccagggccgtgatgccccgcccggcccgacccccgcgcgcagaggtacctggagacgatttcaactgaagtaatgaaggcagtgtcgtgctgtcgagagaaaggtggatcccaacaacaggaaactacctaaatcaccgaccagttctggtgctgcccgcgaagggctgcctcgcccgccgccgccgccgcctccgccgctgccgccgccgccaaggagagaaccctgccatcgcgcctggcccggcccagcccagcccctaggcaacctgcgcccgccagtgcaacagagtgccccaggcggccgcaaatgcgtcaaggaaggggaagccacaggccccagtaagccaaagtcaagcccgtttgccaacctgcatgtccatgcctgtaagcccttctcttggccaaggaagaaaggaagaaagaanaaagaaacccaggggcctgtatcccctgattaaacacagcacagcactccaggcagacatgcccggntggcggctcctttgcaccattgacctcangccagacacctcagcgccaacaatgggacctcggncttccggctangtttgcccccagctgggcaggaaacccagctcggcgaagacaggggccatttcgagcagtgggaccccagacagcaaacccagcccagtcaggacttgacacttaggacatatctatctctatagattttagcatgatatggctttttcccccagaaaacaacaattaacagcacccagccaaccncaagaaaccaaaagttcgaacaaacaggccctgcacagatgtacggcccanaaaataggccaaagtgggaaaaggaaggaaacggggctcccgcaacaggtggccaagttcctgggccgagcccgtaaaaacagagggagggggacccccgccttcgggaaaggggaaaaacccccctccccctgggaaattctccccggggaaaaattttaaagtg

SEQ ID NO: 52419 - DNA, 768 bp, Homo Sapiens
tcccgggatcacagatagaaagaaggaaaacaagcctgtatttttccagcaaatataacaaagaagctcttagccccccacgacgtaaagcctttaagaaatggacacctcctcggtcaccttttaatctcgttcaagaaacactttttcatgatccatggaagcttctcatcgctactatatttctcaatcggacctcaggcaaaatggcaatacctgtgctttggaagtttctggagaagtatccttcagctgaggtagcaagaaccgcagactggagagatgtgtcagaacttcttaaacctcttggtctctacgatcttcgggcaaaaaccattgtcaagttctcagatgaatacctgacaaagcagtggaagtatccaattgagcttcatgggattggtaaatatggcaacgactcttaccgaattttttgtgtcaatgagtggaagcaggtgcaccctgaagaccacaaattaaataaatatcatgactggctttgggaaaatcatgaaaaattaagtctatcttaaactctgcagctttcaagctcatctgtkatgcatagctttgcacttcaaaaaagcttaattaagtacaaccaaccacctttccagccatagagattttaattagcccaactagaagcctagtgtgtgtgctttcttaatgtgtgtgccaatggtggatctttgctactgaatgtgtttgaacatgttttgagatttttttaaaataaattattatttgacaacaaaaaaaaaaaaa

SEQ ID NO: 52420 - DNA, 500 bp, Homo Sapiens
ttagacaatagctcacattttttgagaagcatgccctccctgtccatttgtcttataacatgacccagccctattttacgtcattctaaattcagcctcatataatgaaaatacattatgaaaacagatgtttaggagatttcctgtatagcagtcagccaattcatatgctttgtctctgctggcttctttttccatgcgttaacttttcccaatagcagaggaggcaaatatgagcatacaatccctttgttctaaagatattgttccagctagtggaatgatgttgaatctttaataaccataattagttgctttttcagtatcttctgctttgtctgtgtctatccagtggcctaggaattaaaggtgtaagttgttttcgctgttaaattggatatttatatatatatatatagcaagattttcatgtgttatttaattctgtattgtttcttatatttgtagtaaaatattgaacaattaaaagtgttgactcc

SEQ ID NO: 52421 - DNA, 576 bp, Homo Sapiens
cctgccttgccttggctggtgagtcccataaatagtatgcactcagcctccggccacaaacacaaggcctcggggagggctagactgtctgcaaacgttttctgcatctgtaaagaaaacaaggtgatcgaaaactgtggccatgtggaacccggtcttgtgggggactgtttctccatcttgactcagacagttcctggaaacaccggggctctgttttttttttctttgatgtttttcttctttagtagcttgggctgcagcctccactctctagtcactgggggagagtattttttgttatgtttggtttcatttgctggcagagctggggctttttgtgtgatccctcttggtgtgagttttctgacccaaccagcctctggttagcatcatttgtacatttaaacctgtaaatagttgttacaaagcaaagagattatttatttccatccaaagctcttttgaacaccccccccctttaatccctcgttcaggacgatgagcttgctttccttcaacctgtttgttttcttatttaagactatttattaatggttggaccaatgtactcac

SEQ ID NO: 52422 - DNA, 1108 bp, Homo Sapiens
  misc_feature (907)..(907): n is a, c, g, or t
  misc_feature (936)..(936): n is a, c, g, or t
  misc_feature (1012)..(1012): n is a, c, g, or t
ttagtgaatctcgtgtctggccacgtgaagacccagctgatcgcccatgacaaagaggtctatgatattgcatttagccgggccgggggtggcagggacatgtttgcctctgtgggtgctgatggctcggtgcggatgtttgacctccgccatctagaacacagcaccatcatttacgaagacccacagcatcacccactgcttcgcctctgctggaacaagcaggaccctaactacctggccaccatggccatggatggaatggaggtggtgattctagatgtccgggttccctgcacacctgtcgccaggttaaacaaccatcgagcatgtgtcaatggcattgcttgggccccacattcatcctgccacatctgcactgcagcggatgaccaccaggctctcatctgggacatccagcaaatgccccgagccattgaggaccctatcctggcctacacagctgaaggagagatcaacaatgtgcagtgggcatcaactcagcccgactggatcgccatctgctacaacaactgcctggagatactcagagtgtagtgttggtggcgctgtgcccacgaggcaggggcttttgtatttcctgcctctgccccacccccaaagtaagaagaaacatgtttccagtggccagtatgtctttcattgctttgcacccactgttaccagaagctgctctaggagttcctggccagtcaccccatcgccctctgtggcagactcagtgctgtgtggcgcctcctcagcccagggctgagttttaagattttctctcctttccctctctcctttggttccctcattaaaaaatggtgtgtatattttgtttgtcaggcgttgttgttgaggagcagttcacgcactggctgtgtctattcctctgcccagntgtctctggttgctgccccaagcagcagntcatgtctcgtccaatgtccatggtcgggttaccacttacgtggggaacaaataccaatttggcttttcccctaanaacaaggtggtttaacaattttaacctttggaaaatttggtaaaccattcaggttaatttttttttatgaaaaaaaatttttactctccccggccc

SEQ ID NO: 52423 - DNA, 647 bp, Homo Sapiens
gcacgagggtatctgaagacctatcaggaggaaggagagaaggtctcagcctatgtgttacggctagaaaccctgctccggagagcggtggagaaacgcgccatccctcggcgtattgcggaccaggtccgcctggagcaggtcatggctggggccactcttaaccagatgctgtggtgccggcttagggagctgaaggatcagggcccgccccccagcttccttgagctaatgaaggtaatacgggaagaagaggaggaagaggcctcctttgagaatgagagtatcgaagagccagaggaacgagatggctatggccgctggaatcatgagggagacgactgaaaaccacctgggggcaggacccacagccagtgggctaagacctttaaaaaatttttttctttaatgtatgggactgaaatcaaaccatgaaagccaattattgaccttccttccttccttccttccctcccttcctccttctctccttctctcctcctctctcctctcctctcctctctttccttccttccttcctttttttctttttctctttcttctttatttcttgggtctcactctcatcacccaggctagagtgcagtggcacaaaaatctcggctcactgcagccttgacttccca

SEQ ID NO: 52424 - DNA, 592 bp, Homo Sapiens
ccacgccgatgcacccgccatccagcctgtcctttggaccacaccacccctccagcatggtcaccgccatgggttagagccctgctcgatgctcacagggcccccagcgagagtccctgcagtccctttcgacttgcatttttgcaggagcagtatcatgaagcctaaacgcgatggatatatgtttttgaaggcagaaagcaaaattatgtttgccactttgcaaaggagctcactgtggtgtctgtgttccaaccactgaatctggaccccatctgtgaataagccattctgactcatatcccctatttaacagggtctctagtgctgtgaaaaaaaaaaatgctgaacattgcatataacttatattgtaagaaatactgtacaatgactttattgcatctgggtagctgtaaggcatgaaggatgccaagaagtttaaggaatatgggagaaatagtgtggaaattaagaagaaactaggtctgatattcaaatggacaaactgccagttttgtttcctttcactggccacagttgtttgatgcattaaaagaaaataaaaaaaagaaaaaaaaaaaaaaaaaaaaaa

SEQ ID NO: 52425 - DNA, 742 bp, Homo Sapiens
  misc_feature (725)..(729): n is a, c, g, or t
  misc_feature (731)..(741): n is a, c, g, or t
tgatccaggggaaccctcagggctggagactctgaaagacacaccgcccccacggctcatcaagtcacacctgcccctggctctgctccctcagactctgttggatcagaaggtcaaggtggtctatgttgcccgaaacccaaaggacgtggcggtctcctactaccatttccaccgtatggaaaaggcgcaccctgagcctgggacctgggacagcttcctggaaaagttcatggctggagaagtgtcctacgggtcctggtaccagcacgtgcaggagtggtgggagctgagccgcacccaccctgttctctacctcttctatgaagacatgaaggagaaccccaaaagggagattcaaaagatcctggagtttgtggggcgctccctgccagaggagaccatggacttcatggttcagcacacgtcgttcaaggagatgaagaagaaccctatgaccaactacaccaccgtcccccaggagctcatggaccacagcatctcccccttcatgaggaaaggcatggctggggactggaagaccaccttcaccgtggcgcagaatgagcgcttcgatgcggactatgcggagaagatggcaggctgcagcctcagcttccgctctgagctgtgagaggggctcctggagtcactgcagagggagtgtgcgaatctaccctgaccaatgggctcaagaataaagtatgatttttgagtccgaaaannnnnannnnnnnnnnna

SEQ ID NO: 52426 - DNA, 582 bp, Homo Sapiens
aagtgcattgaagagaacaatggtgtggacaagaggatcagcaggtttattctccccatcggggccaccgtgaacatggacggagcagccatcttccagtgtgtggccgcggtgttcattgcgcaactcaacaacgtagagctcaacgcaggacagattttcaccattctagtgactgccacagcgtccagtgttggagcagcaggcgtgccagctggaggggtcctcaccattgccattatcctggaggccattgggctgcctactcatgacctgcctctgatcctggctgtggactggattgtggaccggaccaccacggtggtgaatgtggaaggggatgccctgggtgcaggcattctccaccacctgaatcagaaggcaacaaagaaaggcgagcaggaacttgctgaggtgaaagtggaagccatccccaactgcaagtctgaggaggagacatcgcccctggtgacacaccagaaccccgctggccccgtggccagtgccccagaactggaatccaaggagtcggttctgtgatggggctgggctttgggcttgcctgccagcagtgatgtccca

SEQ ID NO: 52427 - DNA, 521 bp, Homo Sapiens
ttcggcaccaagaagagcccggtgacgaaagccatggcggttcaggcgggcacagaggatgccgctctgtgacaaatgtgggagtggcatagttggtgctgtggtgaaggcgcgggataagtaccggcaccctgagtgcttcgtgtgtgccgactgcaacctcaacctcaagcaaaagggctacttcttcatagaaggggagcttgtactgcgaaacccacgcaagagcccgcacaaagcccccagaggctatgacacggtcactctgtatcccaaagcttaagtctctgcaggcgtggaccacgcacgcacccacccacgcgcacttacacgagaagacattcatggctttgggcagaaggattgtgcagattgtcaactccaaatctaaagtcaaggctttagacctttatcctattgtttattgaggaaaaggaatgggaggcaaatgcctgctatgtgaaaaaaacatacacttagctatgttttgcaactctttttggggctagcaataatgatat

SEQ ID NO: 52428 - DNA, 778 bp, Homo Sapiens
gcgtccgatcattgggggctcctatggagccggaaactatgggatgtgtggcagagcgtatagcccaagatttctctacatttggccaaatgctcgtatctcagtgatgggaggagagcaggcagccaatgtgttggccacgataacaaaggaccaaagagcccgggaaggaaagcagttctccagtgctgatgaagcggctttaaaagagcccatcattaagaagtttgaagaggaaggaaacccttactattccagcgcaagggtatgggatgatgggatcattgatccagcagacaccagactggtcttgggtctcagttttagtgcagccctcaacgcaccaatagagaagactgacttcggtatcttcaggatgtaactggaataaaggatgttttctgttggacatgtactgaaaattaacacatgtagtagccttaaaattttagacttctcgaacatgaggctgttacagtaatttttttaacactgtgcattgtacttttctaccttaaaaaaatcagtgaggatatttatttaatgaacatcaattccttttaaattttcttagagaaatttctctgtggctcagttttaccacccataaagcggagacagtaatttatggttatcctttctgacccacaaagtatgaaaagttctgtaatctgtaaactcagttctgtaatctgtattattgagatgattaatataaagttgtattttcactgacaatgattgttttgctggttatgcttggtgatattttagcggg

SEQ ID NO: 52429 - DNA, 641 bp, Homo Sapiens
ttaggatgtatcagtgtttctgtctttcctggaacagttcagtgtttaaatttagtaattcaatcctgaccagtgtaaacccacttaattattgcagcctaaagaattcagctacttctactcttcataaatgtgcccaagtaaatatgtgtttttaatattcaaccctggaaaattagtaattcagatgataaaagctcatgttttggtgtctttgtactcagattgtgaacaggcatatttcactgatttagacttagtatacttgatgagaatgctcaggttgaagagatagttctgtcagcaatccaacatctatagcaatgtggaaaaagtaatcaactcatatttcacgaatttgatgtatgttgtgatttagagggcatgagataaagtttatatttgaactgtgtggggtagggggaagaagaggttgcttaagcaaatagtggggtgattgtggaacaagatgtctctaagatgagaagttattttcttgcatcatagaagcactctttttacccgtgagtgattgtgttaactataaatcatttatatctgtacattaaagcagattccctcaattaggcaaatttggttagccaagcccaagttattgtctgtacttgaaagtaataaag

SEQ ID NO: 52430 - DNA, 931 bp, Homo Sapiens
  misc_feature (840)..(840): n is a, c, g, or t
ctgaaggttttagaagctaggaggcaggaaaatgtgacccagatgggggtgctatttggcttttattccctgcctttgcagaactgatgtcacctcagatgtccttccctccctaataactgtaaatatataaatatgtcaggttaaagggaaaaggtgttcagggcacttcttgtcctctctgtcccataacctacctccacctccaccctccccctagccagccaggcagcttctctgcctgggaggggagcctggacccccctctttctccttggctgcagtggggcctttatccagtgccaggaggaacaacatagttaatttttttctaaccttgccactttgagggaaggaagggttgggggaagggcaagctttatgggaccctggtcctggccctggcctttcactccagttctgggtgaggcaggagctgggaggggtggggagggggagggggaagtgtctgcctttatgtcctttcttctgaaataaaaggaaaagcatttctggaaaaaaaaaaaaaaaaaaaaaaaaaaaaaaaaaaaaaaaggggggggggcaaaaaatttcccccggggggcccacttagctcacccatttttgttaaaagggggccccaatggagggtataaaaaaaaggcagggcgtttaacaccgtggggtgtgggaacaccggcagttgggactcttgggaagagaccctactcgtgcggggcaacatgttggcccaccctcagagattaacgtcgggaaaaaacttaagtgtaaggggtaacacagcgcttccggcggaaagtgtacggtcgtttgaagtcggcgcgcataacatcaacngcacacgcgaaatcataaacacagagcaacaacaacttatacagcaagaaacacagacagaacatacacacgtaagaacaagcaagatagc

SEQ ID NO: 52431 - DNA, 755 bp, Homo Sapiens
  misc_feature (1)..(2): n is a, c, g, or t
  misc_feature (740)..(740): n is a, c, g, or t
  misc_feature (747)..(748): n is a, c, g, or t
  misc_feature (755)..(755): n is a, c, g, or t
nnttgaacggcggtcggtccggattcccgggatgaatccgcattgatggcctcaatgtggcagacatcggcctccatgacctgcgctctcagctgaccatcatcccgcaggaccccatcctgttctcggggaccctgcgcatgaacctggaccccttcggcagctactcagaggaggacatttggtgggctttggagctgtcccacctgcacacgtttgtgagctcccagccggcaggcctggacttccagtgctcagagggcggggagaatctcagcgtgggccagaggcagctcgtgtgcctggcccgagccctgctccgcaagagccgcatcctggttttagacgaggccacagctgccatcgacctggagactgacaacctcatccaggctaccatccgcacccagtttgatacctgcactgtcctgaccatcgcacaccggcttaacactatcatggactacaccagggtcctggtcctggacaaaggagtagtagctgaatttgattctccagccaacctcattgcagctagaggcatcttctacgggatggccagagatgctggacttgcctaaaatatattcctgagatttcctcctggcctttcctggttttcatcaggaaggaaatgacaccaaatatgtccgcagaatggacttgatagcaaacactgggggcaccttaagattttgcacctgtaaagtgccttacagggtaactgtgctgaatgcttnagatganngaatgan

SEQ ID NO: 52432 - DNA, 584 bp, Homo Sapiens
ttgcttttgccgacgcccccaatcactacaagaaatgagcccaggcccacccgcagctggcctcactgtcccgggtggcgcgccccacctgcctggctggtggtaggcccctgtgagctggtcccgggctgctaaaaggccttgtgaggtggccccaccctccaggggagctggtgaagatgggccacagacctggtctagggctgacaaagacagggacagcctttgttttctgagataccaaagagagccaggggagggccccgggttcggcggccagaggcaggtcaggggtcccctctccctctccccgcaatgtccttgccaaatgactgcctcctgctgcccctagtccggggcagcctaggaggccgaccctctttggagtcctgctgtctgggtgccagggccggaacgaggtagtggccatctcatacctactctgaaatgcaaaacttctattctgttgagtgaaagaataaaatgtagacaaaatctagaccgagacgttgcgctgacccggggtctctgtgccgcgaggtcccctcacagctgtatttcactgctgctggccctttccctcc

SEQ ID NO: 52433 - DNA, 601 bp, Homo Sapiens
gaaaggaatagcgatagatttatataaatatctaaatgtctcagtagaggagtagaattcatctggttatcacctggtcctctgaagttaactgatgggctaaccgatttgtgcacacacttaggatggatttatgttaagggaattacttactgactgttcaatggaaggaagtattaataatagggaataagtttgcaactaatctcatgctgcaaacttgtgttaattctgtttaatatacaaatttggatagcttaattataaacatatttttatatcaaatatacagttctaatataaaagttataaataattatttttgttaacaaagacactaaaacagtatgttctggttttggccctcttgcagaaagaagcattagaaaaattactttaaaagtagctatatgttactgtattgcaaaatctgttaagagcaggaccacatcgatagtatttaataatttgttttacctcccaaaacacagttcttctttcagcttgtcttaagaatggttgccaaaaacaacagccaaaaaaaaaaaacctattttattatccaaatgctagaaaacacacatgaattttctataaaatc

SEQ ID NO: 52434 - DNA, 1110 bp, Homo Sapiens
  misc_feature (761)..(763): n is a, c, g, or t
  misc_feature (786)..(786): n is a, c, g, or t
  misc_feature (790)..(791): n is a, c, g, or t
  misc_feature (802)..(807): n is a, c, g, or t
  misc_feature (811)..(811): n is a, c, g, or t
  misc_feature (814)..(815): n is a, c, g, or t
  misc_feature (827)..(827): n is a, c, g, or t
  misc_feature (837)..(842): n is a, c, g, or t
  misc_feature (847)..(851): n is a, c, g, or t
  misc_feature (853)..(853): n is a, c, g, or t
  misc_feature (855)..(855): n is a, c, g, or t
  misc_feature (860)..(860): n is a, c, g, or t
  misc_feature (862)..(866): n is a, c, g, or t
  misc_feature (873)..(873): n is a, c, g, or t
  misc_feature (875)..(875): n is a, c, g, or t
  misc_feature (877)..(881): n is a, c, g, or t
  misc_feature (888)..(890): n is a, c, g, or t
  misc_feature (894)..(898): n is a, c, g, or t
  misc_feature (902)..(903): n is a, c, g, or t
  misc_feature (911)..(912): n is a, c, g, or t
  misc_feature (916)..(924): n is a, c, g, or t
  misc_feature (933)..(937): n is a, c, g, or t
  misc_feature (946)..(947): n is a, c, g, or t
  misc_feature (969)..(971): n is a, c, g, or t
  misc_feature (973)..(976): n is a, c, g, or t
  misc_feature (1005)..(1005): n is a, c, g, or t
  misc_feature (1029)..(1029): n is a, c, g, or t
  misc_feature (1041)..(1041): n is a, c, g, or t
  misc_feature (1051)..(1052): n is a, c, g, or t
  misc_feature (1086)..(1086): n is a, c, g, or t
acaacttggggcatgtctgcagaaaacttaaaaagatgctgaggccttggattaccaccgtcaggcactggtgttgattcctcagaacgcatccacctactctgctattggatatatccacagtctgatgggcaactttgaaaatgctgtggactacttccacacagcccttggtcttaggcgagatgatacattttctgttacaatgcttggtcattgcatcgaaatgtacattggtgattctgaagcttatattggagcagacattaaagacaaattaaaatgttatgactttgatgtgcatacaatgaagacactaaaaaacattatttcacctccgtgggatttcagggaatttgaagtagaaaaacagactgcagaagaaacggggcttacgccattggaaacctcaaggaaaactccagattccagaccttccttggaagaaacctttgaaattgaaatgaatgaaagtgacatgatgttagagacatctatgtcagaccacagcacgtgactccagtcagtggtcctggtcccactgtcccagtgtaggttagtattccttcacatcctctccatggcttaagaatgtcccacttcctaacgtgactccaaactgcatctctacatttaggaacagagacccgccttaagagactggatcgcacacctttccaacagatgtgttctgattctctgaacctacaaaatagttatacatagtggaataaagaaggtaaacccatcaaaaaaaaaannnaaaaaaaaaaaaaaaaaaaaaanaaannaaaaaaaaaannnnnnaaanaannaaaaaaaaaaanaaaaaaaaannnnnnaaaannnnnananaaaanannnnnaaaaaananannnnnaaaaaannnaaannnnnaaannaaaaaaannaaannnnnnnnnaaaaaaaannnnnaaaaaggannaaaaggtaaaaaggaaaaaaannnannnnaaaagagagaaaagaggggggggagaaanaagaaaagagagggaagaagggangaaaaggaaagnagaaaaggannagggggagggagagaagggagaaggaaaaggaanaaggggagggggaataaagggaaa

SEQ ID NO: 52435 - DNA, 608 bp, Homo Sapiens
  misc_feature (483)..(483): n is a, c, g, or t
  misc_feature (530)..(530): n is a, c, g, or t
  misc_feature (598)..(598): n is a, c, g, or t
acaggctggccacaaagtggaggccctccaggcattggaagctgaggcctggcaacgagcgacagggctgccagttgcccctgggttcctttgtgctgctgtgtgcctcctctcctgccgccctttgtcctccgctaagagaccctgccctacctggccgctgggccccgtgactttcccttcctgcccaggaaagtgagggtcggctggccccaccttccctgtcctgatgccgacagcttagggaagggcagtgaacttgcatatggggcttagccttctagtcacagcctctatatttgatgctagaaaacacatatttttaaatggaagaaaaataaaaaggcattcccccttcatccccctaccttaaacatataatattttaaaggtcaaaaaagcaatccaacccactgcagaagctctttttgagcacttggtggcatcagagcaggaggagccccagagccacctctggtgtcnccccaggctacctgctcaggaaccccttctgttctctgagaagtcangagaggacattggctcacgcactgtgagattttgtttttatacttggaagtggtgaattattttatantaagtcattt

SEQ ID NO: 52436 - DNA, 673 bp, Homo Sapiens
ttaaaggaaagtggaatgaaccgtttgacgaaacatacacaagggaaatgccctttaaaataaaccaggaggagcaaaggccagtgcagatgatgtatcaggaggccacgtttaagctcgcccacgtgggcgaggtgcgcgcgcagctgctggagctgccctacgccaggaaggagctgagcctgctggtgctgctgcctgacgacggcgtggagctcagcacggtggaaaaaagtctcacttttgagaaactcacagcctggaccaagccagactgtatgaagagtactgaggttgaagttctccttccaaaatttaaactacaagaggattatgacatggaatctgtgcttcggcatttgggaattgttgatgccttccaacagggcaaggctgacttgtcggcaatgtcagcggagagagacctgtgtctgtccaagttcgtgcacaagagttttgtggaggtgaatgaagaaggcaccgaggcagcggcagcgtcgagctgctttgtagttgcagagtgctgcatggaatctggccccaggttctgtgctgaccaccctttccttttcttcatcaggcacaacagagccaacagcattctgttctgtggcaggttctcatcgccataaagggtgcacttaccgtgcactcggccatttccctcttcctg

SEQ ID NO: 52437 - DNA, 1130 bp, Homo Sapiens
  misc_feature (709)..(774): n is a, c, g, or t
  misc_feature (776)..(776): n is a, c, g, or t
  misc_feature (778)..(805): n is a, c, g, or t
  misc_feature (807)..(807): n is a, c, g, or t
  misc_feature (809)..(811): n is a, c, g, or t
  misc_feature (813)..(815): n is a, c, g, or t
  misc_feature (819)..(820): n is a, c, g, or t
  misc_feature (822)..(824): n is a, c, g, or t
  misc_feature (828)..(828): n is a, c, g, or t
  misc_feature (830)..(830): n is a, c, g, or t
  misc_feature (835)..(835): n is a, c, g, or t
gtggtaccggtccggaatttttcagatagggggagctcgcgacggagcttgcctacaaataatctgatcaaccaccagggcttctctgctgaggtgcagctcattttcttcaaccaggaactctacgggaatttcagcgctgcctcccgcggccccaatggcctggccattctcagcctctttgtcaacgttgccagtacctctaacccattcctcagtcgcctccttaaccgcgacaccatcactcgcatctcctacaagaatgatgcctactttcttcaagacctgagcctggagctcctgttccctgaatccttcggcttcatcacctatcagggctctctcagcaccccgccctgctccgagactgtcacctggatcctcattgaccgggccctcaatatcacctcccttcagatgcactccctgagactcctgagccagaatcctccatctcagatcttccagagcctcagcggtaacagccggcccctgcagcccttggcccacagggcactgaggggcaacagggacccccggcaccccgagaggcgctgccgaggccccaactaccgcctgcatgtggatggtgtcccccatggtcgctgagactccccttcgaggattgcacccgcccgtcctaagcctccccacaaggcgaggggagttacccctaaaacaaagctattaaagggacagaatacttaannnnnnnnnnnnnnnnnnnnnnnnnnnnnnnnnnnnnnnnnnnnnnnnnnnnnnnnnnnnnnnnnncnannnnnnnnnnnnnnnnnnnnnnnnnnnncncnnncnnncccnncnnncccncnccccnggggggggggccccctaataatattccccgggggggggccccacttttttcgccgcccccccttttttttggaaaaaagggcgccccctttagggggccgtctttataaaaaaagagggcgggggcggcgttttttataagcaccgcgggggagagaaaacacccgcgcccggggggtatttttggagaaacacctcctctccttcgggggggggcccctatttgggggaaactcccccccccaagaaattattcccccccccgggagaaaaaaaaaaattttgtccggggggag

SEQ ID NO: 52438 - DNA, 502 bp, Homo Sapiens
ggggggccactagatgcacctgggagccccctggcttgcactgaaccctcgaggacctgggcacggggtcggatggacacacagccagaccgtaaaccctcacgtatccccacgcctcggggcccccgccgcccctccggacccgcagagctggggacatggcatgccctgcactcagtcaccccgagggctgagccagattcctggatgtgatggaccagctcagctgtccccagaccccatcccttctccttttcctttgtggccttaacccttctgcatcagggagccccctctgcctcttgagtaccagacctcatgggaccagaccccttgggaccacatggcacaatgggacctctgttgtacattccggttgggggatgagcgttgctatttaattactaatattattgaatgccttagaggaggccgggcgagcccggtgttctgaagacctgtggcccagcagagcctctgacagtaaagttttgctccagcc

SEQ ID NO: 52439 - DNA, 697 bp, Homo Sapiens
  misc_feature (587)..(587): n is a, c, g, or t
  misc_feature (630)..(630): n is a, c, g, or t
aaaggtacgcaggtaccaggtgctgctgtcactgatgctctccagccaaaccaaagaccaggtgacggcgggcgccatgcagcgactgcgggcgcggggcctgacggtggacagcatcctgcagacagatgatgccacgctgggcaagctcatctaccccgtcggtttctggaggagcaaggtgaaatacatcaagcagaccagcgccatcctgcagcagcactacggtggggacatcccagcctctgtggccgagctggtggcgctgccgggtgttgggcccaagatggcacacctggctatggctgtggcctggggcactgtgtcaggcattgcagtggacacgcatgtgcacagaatcgccaacaggctgaggtggaccaagaaggcaaccaagtccccagaggagacccgcgccgccctggaggagtggctgcctagggagctgtggcacgagatcaatggactcttggtgggcttcggccagcagacctgtctgcctgtgcaccctcgctgccacgcctgcctcaaccaagccctctgcccggccgcccagggtctctgatggccgcatggctctggccgangtgccgctgtggccaccgtctgtgaagtggctttacgcttcangaagccacgcctgttgaataaagctttggtgtgtttgcaaaaaaaaaaaaaaaaaaaaaaaaaaaaa

SEQ ID NO: 52440 - DNA, 1063 bp, Homo Sapiens
tggttacaacaacaatattcattgcttgaccaaagccatcatccaggtgtctgctgccctcttcacgctctacaacaagaacattgaaactcacctcaaggaatttctggtggtggcctctgtcagcctcttgcagctgggccaggagactgacaagcttaaaaccagaaatcgagaatccatttctctgctcatgcgcttggtggtggaggagtcatccttcctgaccctggacatgctggagtcctgtttcccttatgtcctgcttcgaaatgcctatcgggaggtgtctcgggccttccacctaaactgaatgcctgccagtacccactgaagagccctttggaccttcctaaacccttgccatagtggaagctgtggtcactttcgcagggggtgggaatggggtggggtcactaaggagagagggtcaggagccagagttgatgagcagatctgtggaagaacaatccagggctgagaaatcgtagagcagtgaggcaggctgggagcatggaggacagcttatggaaaaagttagggcgtggggccacatgtgtgaattttacaatgaaaaaaggagtaacgtacaagtatattttctatcttctggtgacttgagcttgagctctgacaggcatgggcctctccgaccttcatcactattcttaggataatgctggcggccagagatgatcaatcatcatattaaatcataatgagcttataaaacccaacaccaaaccccaatccctcccccatcccccatccaccctcacccccttactatcctaggggcggccccctctaaagttaccccctgaggggcccccagcttaagccgtttccccacctttcctggtacaaagggggcccccaaacagggagccgacttataacactagggcccggggtcccccctttttaccacacttccgactggccaaaaaccggcttacctttcggaacccttggggaaggagacacctactcctctcggggcgcggaacctacattggtacaaaattcccctttccagaacttttaaggcccttaaaagcaa

SEQ ID NO: 52441 - DNA, 745 bp, Homo Sapiens
  misc_feature (395)..(395): n is a, c, g, or t
cagccttcctgacctcctcctgccctccccttcactccctccctggctctgccagtcggttcccacggagccatttttagctctgatcagcatgggaatgtgcctcggcctccaaggggctttgtcctggtgcccccgcccctggtcccaacctgatcccacgagggagttgggacaggaggattgatggtgctccccttcctgccagcgtcagaggccctggagaggggctgtccatggcagctggtctttattcctccctcatgagcacagggtcgggggggtccccattcttggaagaggttgagaagactcctgggcttcagcctctcccacccagccctgcccctcacctgcctgccctcccctcccccactctatactagggactggcntctcagcctctgatcagtttcacaaagtttgttccctaaggaaatcaaatcccattgtcacctaactctgaagatctaaatagcccttggatcagtatgggaaccccaaatcccacagggccagatgtggagtctgtgtctgcccccgtcttctctccatcctcaaagcccccacttctctccaggctgtttctttttttatgactgtaaacatagatagtgctttattttgttaataataagataatgatgagtaacttaaccagcacatttctcctgtttacactcgggggatttttttgttttctgatgacataataaagacagatcatttcaaaaaaaaaaaaaaa

SEQ ID NO: 52442 - DNA, 880 bp, Homo Sapiens
  misc_feature (841)..(878): n is a, c, g, or t
ataggaagcgaagcacggaagtgtcccggggctgcattgtgctacagctagaatgaagcacatcaacctatcatttgcagcgtgtggatttctgggcatttaccacttgggggcagcatctgcactttgcagacatggcaaaaaacttgtgaaggatgtcaaagccttcgctggggcgtctgcgggatcgttggttgcttctgttctgctaacagcaccagaaaaaatagaggaatgtaaccaatttacctacaagtttgccgaagaaatcagaaggcagtctttcggggcagtaacgcccggttatgacttcatggcccgactaagaagtgggatggagtcgattcttcctcccagcgctcacgagctggcccagaaccgactgcacgtatccatcaccaacgccaaaaccagagaaaatcacttagtctccactttttcctccagggaggacctcattaaggtcctcctagccagcagttttgtgcccatttatgcaggactgaagctagtggaatacaaagggcagaagtgggtggacggaggcctcaccaacgctcttcccatcctgcccgtcggccggacagtaaccatctcccccttcagtggacgactggacatctccccgcaggacaaagggcagctagatctgtatgttaatatcgccaagcaggatatcatgttgtccctggcaaacctggtgagactcaaccaagccctttttcccccaagcaagaggaaaatggaatctttgtatcagtgtggttttgatgacactgttaagtttttacttaaagaaaattggtttgaataaaatgcataaaagtttataatgcaaaannnnnnnnnnnnnnnnnnnnnnnnnnnnnnnnnnnnnnaa

SEQ ID NO: 52443 - DNA, 582 bp, Homo Sapiens
agcaactggccatgccacagcacataaagattacagtaacaagaaaaacattgtttgaggattcctttcaacagataatgagcttcagtccccaagatctgcgaagacgtttgtgggtgatttttccaggagaagaaggtttagattatggaggtgtagcaagagaatggttctttcttttgtcacatgaagtgttgaacccaatgtattgcctgtttgaatatgcagggaaggataactactgcttgcagataaaccccgcttcttacatcaatccagatcacctgaaatattttcgttttattggcagatttattgccatggctctgttccatgggaaattcatagacacgggtttttctttaccattctataagcgtatcttgaacaaaccagttggactcaaggatttagaatctattgatccagaattttacaattctctcatctgggttaaggaaaacaatattgaggaatgtgatttggaaatgtacttctccgttgacaaagaaattctaggtgaaattaagagtcatgatctgaaacctaatggtggcaatattcttgtaacagaagaaaata

SEQ ID NO: 52444 - DNA, 668 bp, Homo Sapiens
gcggccgctccaacatcagaatggtttggtctttttcaataaagatagaagttgctgaagttttctgaattaataatgacttagattgtgaccttttagattcggtgttgagctctgtgttgtattacttcctaaaagataatgcttaaacattaagcattagtgtgctcttcatgttaatatggcagagttttgtaaactaaattaaaacttactgatatattggactttgagccaagggaaagaatgagtactatctttccagatatcttaagggtaaaagcttattctaagacagtctgtccattgagaatattagatttctgacttgcaaatatgtttgtactccagaagaattagaggaaaagcagatactagaattctaatttaattacatatacagccgtctttgtttatagtgtagaattctttatattttgtacaaaaactaattcttttggtaaaatgaaccatttacagttcggttttggactctgagtcaaaggattttcctttaaatgcttgtctcaattttagtctggtcttttgtacttttcttcagaagaaatgaattaaagggtacagttgcataaagtgggtttttatcctaatgtattggaaataaatgataaactttaaaaaaaaaaaaaaaaaaaaacctccgtgcc

SEQ ID NO: 52445 - DNA, 903 bp, Homo Sapiens
aaatcttattactaccacaagactatttgatctggtaattggagacttcgggatttaggagatctccatgtctgtatttactctaccactgctaaagtgtgtggtcctgggtagtttacttgcttgcggaaaatgagaattgatggtgtccccaatgccccacctcacagagttactaaaaaatgtctgtaaagcatatttacctcttgggagataggcactatgtaaataaggtaaaatttctgttattacaattattcataataatattcttttcttatttctaagcctttctgggaaatcatttcagtccacaccaaccatattattcagggttcctgccatatgtgtggggtatcctactgatacacacgtattcaaagtttatgggtacaacaaagacatagtacatgtacataatatgtatgtgaatatagttaaatatatttcttcacaatattttaaactgtgaagaactttatcatacaggaaacttaaaacaagaggtgtcaaaagacccaaattaggtgcattttacttgtttatgatggcataaccattgctttaaaatgtttagacagtagaatattgaatttatgctctatttttgtttatttaagcaacacttaatgtaaaagtgcaacaggcaattgaatccaaatttcaacgacaaaaaaaaaaaacatgtattttagagttcatctttggcaaaatctttggttcagggtactagttgtttaaaagttgattcatattcttaccttgtgctgaaaaaggttgcattgctgccccttatacacatgctgcaccttgatggttaaaaaatttttaatctttctgaaaaactaattaatgtttaaaagcaactgttttaatatgatggcaatgtgtgtgtgtccccta

SEQ ID NO: 52446 - DNA, 668 bp, Homo Sapiens
tccagtaatttcgagagtactcccatagctgaaactataatggcttcaagcaacgaatccttagttgtcaatagggtgactggaaatttcaagcatgcatctcctattctgccaatcactgaattctcagacatacccagaagagcaccaaagaaaccattgacaagagctgaagtgggagaaaaaacagaggaaagaagagtagaaagggatattcttaaggaaatgttcccctatgaagcatctacaccaacaggaattagtgctagttgccgcagaccaatcaaaggggctgcaggccggccattagaactcagtgatttcaggatggaggagtctttttcatctaaatatgttcctaagtatgttcccttggcagatgtcaagtcagaaaagacaaaaaagggacgctccattcccgtatggataaaaattttgctgtttgttgttgtggcagtttttttgtttttggtctatcaagctatggaaaccaaccaagtaaatcccttctctaattttcttcatgttgaccctagaaaatccaactgaatggtatctctttggcacgttcaacttggtctcctattttcaataactgttgaaaaacatttgtgtacacttgttgactccaagaactaaaaataatgtgatttcgcctcaataaatgg

SEQ ID NO: 52447 - DNA, 541 bp, Homo Sapiens
gggtttgccatttgatacccctggggaacatttctgtaaataccattgacacatccgccttttgtatacatcctgggtaatgagaggtggcttttgcggccagtattagactggaagttcatacctaagtactgtaataatacctcaatgtttgaggagcatgttttgtatacaaatatattgttaatctctgttatgtactgtactaattcttacactgcctgtatactttagtatgacgctgatacataactaaatttgatacttatattttcgtatgaaaatgagttgtgaaagttttgagtagatattactttatcactttttgaactaagaaacttttgtaaagaaatttactatatatatatgcctttttcctagcctgtttcttcctgttaatgtatttgttcatgtttggtgcatagaactgggtaaatgcaaagttctgtgtttaatttcttcaaaatgtatatatttagtgctgcatcttatagcactttgaaatacctcatgtttatgaaaataaatagcttaaaattaa

SEQ ID NO: 52448 - DNA, 672 bp, Homo Sapiens
ttttttttttttttttaagggccttggagccatctctaaaacaaacctcaagggatttagtgccctgtctccctgtctctagaagccttagcctgggcacctggctcaatcttgtaactgcctgctagccatagattcctttcagccttgctgacttctccctataaaagtaaggcctttttctgccccagctctgggacacttgcagatcttaaggtctgagacttgctgattttctggttggagtgtttttttgtattgccatagtcccttccccctgaagcaatagcccctccccacctcctgcaatacgcctttccaatctttattggaagtctctccctgcctacttcctaatttattcttatttgacagagggtatggaagacttgcaatttgaaaactggggaccagttccaaagtcagtaattgtgttaaccacgtgtataacagctctgctggacacccaagaaagccatgggaacaccaactggaaaggtccccttccccaggggagcctgcgaaggagaggttctgtagaatccaagcccacatttccaaagtcacccccaacgcgtcctctcacaccgtccactgtgcgtttgtatgtgtctgggatccagggcaatgtgaattttctttttatttgggagattgttcacggaaaacaga

SEQ ID NO: 52449 - DNA, 638 bp, Homo Sapiens
gtctaatgttgaggttgtttttaggaattatgttttataaactttttcaatataaggtacatgcctatacagaacttaacattttgcacagaatatatcaaatatattttgagaaaaaaagtacggcatgagttctgttaggaataaaagatgaaactattgtatctcacaaaaaatcttatttcagaatggaaatatttttgagaaaagtagctgagtatactggtttaagaaaatgcttgttttagattgaggttaacttagagttgggagttgatttattaagtacagtatacctctcaacagtttataaataatatgttgaattatgtcagtgtgggcagcagtagaatactaaaaggaaaatgtcatgttaagcaatttcagaacattaactgaactattttcaaagcagaaaaattgacattgctgcctttaagaataccatgaatgtaagaaattgaaagaaattgtaaaatatcacataatatagaaatggcagttcaaagagaattgtggcagatgttgtgtgtgaactgttgtttctttgccacatgtgttgtatttgaaagttttacagtaagtttaaaataaaacattctgtgatgaaaaaaaaaaaagacaaaaaaaaaaaacag

SEQ ID NO: 52450 - DNA, 875 bp, Homo Sapiens
tcctttcgagaccatccgggctaccactgactactgccgccgccacaagatcccctttccccaagtagaagaggctgagctggatttgtggtccaaggcccccgcmagctgctacatcctgaaaggagaaactggaccagtggtgatgcattttcccctgttcaacatagatgcctgtggaggtgatattgaggcatggagtgacacatacgamacattcaagcttgctgacacctacactctagatgtggtggtgctactcttggcattagccaagaagaatgtyagggaaaacaagaagaagatccttagagagttgatgaacgtggccgggctctactacccgaagatagtgcccgaagttgctgcttggcatagatgagcctcagcttccagggcactgtgggcctgttggtctactagggccctgaagtccacctggccttcctgttcttcactcccttcagccacacgcttcatggccttgagttcaccttggctgtcctaacagggccaatmaccagtgaccagctagactgtgattttgatagcgtcattcagaagaaggtgtccaaggagctgaaggtggtgaaatttgtcctgcaggtccctcgggagatcctggagctggagcatgagtgtctgacaatcagaagcatcatgtccaatgtccagatggccagaatgaatgtgatagttcagaccaatgccttccactgctcctttatgactgcacttctagccagtagctctgcacaagttagctctgtagaagtaagaacttgggcttaaatcatgggctatctctccacagccaagtggagctctgagaatacaacaagtgctcaataaatgcttgctgattgactgatgga

SEQ ID NO: 52451 - DNA, 705 bp, Homo Sapiens
  misc_feature (613)..(613): n is a, c, g, or t
gggaatgtaaacaaaggaattatggctggtaacataggtttttagtctaattgaatcccttaaactcagggagcatttataaatggacaaatgcttatgaaactaagatttgtaatatttctctctttttagagaaatttgccaatttactttgttatttttccccaaaaagaatgggatgatcatgtatttatttttttacttcctcagctgtagacaggtccttttcgatggtacatatttctttgcctttataatcttttatacagtgtcttacagagaaaagacataagcaaagactatgaggaatatttgcaagacatagaatagtgttggaaaatgtgcaatatgtgatgtggcaaatctctattaggaaatattctgtaatcttcagacctagaataatactagtcttataataggtttgtgactttcctaaatcaattctattacgtgcaatacttcaatacttcatttaaaatatttttatgtgcaataaaatgtatttgtttgtattttgtgttcagtacaattataagctgtttttatatatgtgaaataaaagtagaataaaccccaaaaaaaaaaaaaaaaaaaaaaaaaaaaaaacccnaaaaaaaaaaaaaaaaaaaaacttgtcgccccctggcttaaaacttctaaactttttgccccggccatagaagaactgccaccttctaaaat

SEQ ID NO: 52452 - DNA, 797 bp, Homo Sapiens
  misc_feature (5)..(5): n is a, c, g, or t
  misc_feature (37)..(37): n is a, c, g, or t
gttancgtcaggggagctgggtcaggcggtcgccggngacaccccgtgtgtggcaggcggcgaacgctctggagaatcccggacagccctgctccctgcagccaggtgtagtttcgggagccactggggccaaagtgagagtccagcggtcttccagcgcttgggccacggcggcggccctgggagcagaggtggagcgaccccattacgctaaaratgaaaggctggggttggctggccctgcttctgggggccctgctgggaaccgcctgggctcggaggagccaggatctccactgtggagcatgcagggctctggtggatgaactagaatgggaaattgcccaggtggaccccaagaagaccattcagatgggatctttccggatcaatccagatggcagccagtcagtggtggaggtaactgttactgttcccccaaacaaagtagctcactctggctttggatgaaattcgactgcttaaaaaggaccttggtttaatagaaatgaagaaaacagactcagaaaaaagatttggctctgtctcatttggaagaagctgcaggcttattccccatgcacttgcttcctggctgcaaaccttaatactttgtttctgctgtagaatttgttagcaaacagggagtcctgatcagcacccttctccacatccacatgactggtttttaatgtagcactgtggtatacatgcaaacatccgttcaaaatctgagtcggagctaaaaataaaaaatgaaaaaacagaaataagaataaaaggtcttatcctcataa

SEQ ID NO: 52453 - DNA, 728 bp, Homo Sapiens
ggattcccgggagtaaacgatgtttgcagaaatggaaatcattggtcagtttaacctgggatttataataaccaaactgaatgaggatatcttcatagtggaccagcatgccacggacgagaagtataacttcgagatgctgcagcagcacaccgtgctccaggggcagaggctcatagcacctcagactctcaacttaactgctgttaatgaagctgttctgatagaaaatctggaaatatttagaaagaatggctttgattttgttatcgatgaaaatgctccagtcactgaaagggctaaactgatttccttgccaactagtaaaaactggaccttcggaccccaggacgtcgatgaactgatcttcatgctgagcgacagccctggggtcatgtgccggccttcccgagtcaagcagatgtttgcctccagagcctgccggaagtcggtgatgattgggactgctctcaacacaagcgagatgaagaaactgatcacccacatgggggagatggaccacccctggaactgtccccatggaaggccaaccatgagacacatcgccaccctgggtgtcatttctcagaactgaccgtagtcactgtatggaataattggttttatcgcagatttttatgttttgaaagacagagtcttcactaacctcttttgttttaagatgaaacctgcttcttaaaaaaaatacacatcacacccatttaaaa

SEQ ID NO: 52454 - DNA, 1071 bp, Homo Sapiens
  misc_feature (747)..(747): n is a, c, g, or t
  misc_feature (896)..(896): n is a, c, g, or t
  misc_feature (910)..(910): n is a, c, g, or t
  misc_feature (1027)..(1028): n is a, c, g, or t
  misc_feature (1049)..(1050): n is a, c, g, or t
gattctcgggatatcgcgaccacgcgtccgaggaaatgcaagagaaactgcagaattttgcacagttacctgcacaccgagtcacggactcctgcatcgtggcactcctctcgcatggtgtggagggcgccatctatggtgtggatgggaaactgctccagctccaagaggtttttcagctctttgacaacgccaactgcccaagcctacagaacaaaccaaaaatgttcttcatccaggcctgccgtggagatgagactgatcgtggggttgaccaacaagatggaaagaaccacgcaggatcccctgggtgcgaggagagtgatgccggtaaagaaaagttgccgaagatgagactgcccacgcgctcagacatgatatgcggctatgcctgcctcaaagggactgccgccatgcggaacaccaaacgaggttcctggtacatcgaggctcttgctcaagtgttttctgagcgggcttgtgatatgcacgtggccgacatgctggttaaggtgaacgcacttatcaaggatcgggaaggttatgctcctggcacagaattccaccggtgcaaggagatgtctgaatactgcagcactctgtgccgccacctctacctgttcccaggacaccctcccacatgatgtcacctccccatcatccacgccaagtggaagccactggaccacaggaggtgtgatagagcctttgatcttcaggatgcacggtttctgttctgccccctcnaggatgtgggaatctcccagacttgtttcctgtgcccatcatctctgcctttgagtgtgggactccaggccagctccttttctgtgaagccctttgcctgtagagccagccttggttggacctattggcaggaatgtttcagctgcagntgaaaaagctgacnagtgaaagtgtaaacccagggtggtttatggggaagaggcatataattcccccttatttgtgttcagttccagcctttgtagatgggacctttaaggaatgcctttataaccttaanntaagaaggcttgagaaaaaannaaaaaaaaacccaaaaaaggg

SEQ ID NO: 52455 - DNA, 655 bp, Homo Sapiens
  misc_feature (632)..(632): n is a, c, g, or t
  misc_feature (653)..(653): n is a, c, g, or t
aggactcatggtaggttttagggtaaggagtttaaaggaaataaatattcaaactgggtctcattgccaattttggtggaaatgagtttgtgtcatttcaattacaaagataaaagtatgccatataatttatttatatgaagatttatttttgtagtgtacatagtagtcatcaagttttttgacagaagtatatttttaaagaatttatatgtgatgaatccataatgtctggaactttgctgagacatgagtgggcacagttttcattgtaaattacagcaaggaaagaaaatgtttaacagtgttaagagagtcagagcagagtggatattcatgcgattatgaagtgtttattagttaccattggcgacctagcatgcttctcatttcaaaccttggaaggtgaaaatgtacaaactctctaaataattaatgttcaaacactgatagaaattctaacatgaataaaaaataatataacttgttggttatatctttgtttgtagaatgctttttttctttaaaatacttgggagagacagttagtgttggagccatcagaaactgttgtttcatcttgctgaccttgtgacactcttcttttttgctctatctgatggagagagttntaggttttcctccttttttgntt

SEQ ID NO: 52456 - DNA, 1036 bp, Homo Sapiens
  misc_feature (45)..(45): n is a, c, g, or t
tacagatgatgatctagcttgacttctgtgacaaatggttgaccntttgaggtctaaacaaataatacccccgtcggaatggtaaccgagccagcagctgaagtctctttttcttcctctcggctggaagaacatcaagatacctttgcgtggatcaagcttgtgtacttgaccgtttttatattacttttgtaaatattcttgtccacattctacttcagctttggatgtggttaccgagtatctgtaacccttgaatttctagacagtattgccacctctggccaaatatgcactttccctagaaagccatattccagcagtgaaacttgtgctatagtgtataccacctgtacatacattgtataggccatctgtaaatatcccagagaacaatcactattcttaagcactttgaaaatatttctatgtaaattattgtaaactttttcaatggttgggacaatggcaataggacaaaacgggttactaagatgaaattgccaaaaaaatttataaactaattttgtacgtatgaatgatatctttgacctcaatggaggtttgcaaagactgagtgttcaaactactgtacattttttttcaagtgctaaaaaattaaaccaagcagcttaaccatggtttgtgcctgttcctctaggatgaactcctatcctgagtagtaccaagtgttctaactaaatgtgtgagctgtagttcttgatgttgtataactaagcctgtaattgggctggtttctcttacaccctagccacagttaaaaatgaagtactgtttaacatttgctcccgaaatattttcttactggtgtaaaagaagctagctttagtctgaacctagaatccctctttggttaaaggaatgaatttcctttttttcccattaacttggtttcctggatcgaaaaaaaaccgggctaaaaatttcataggaattccgcctccctttaataggtaaagactcctgggtttcccagggtccgggccctttatattacggccgacggcgcagcggg

SEQ ID NO: 52457 - DNA, 1473 bp, Homo Sapiens
accagggaaagtttgtttttgtagaccagagggcaacagctattttggcatatttaccacaagaacttctaggcacatcgtgttatgaatattttcaccaagatgacataggacatcttgcagaatgtcataggcaagttttacagacgagagaaaaaattacaactaattgctataaatttaaaatcaaagatggttcttttatcacactacggagtcgatggttcagtttcatgaacccttggaccaaggaagtagaatatattgtctcaactaacactgttgttttgtccagagtggacaccggacaccttggccaagttgaaaggtgcacagttctgagcaggcctgactcacgtttccttattgcctgggatgttcacagagccaacgtcctggaaggcggggacccaaccttcccacagctcacagcatccccccacagcatggacagcatgctgccctctggagaaggtggcccaaagaggacccaccccactgttccagggattccagggggaacccgggctggggcaggaaaaataggccgaatgattgctgaggaaatcatggaaatccacaggataagagggtcatcgccttctagctgtggctccagcccattgaacatcacgagtacgcctccccctgatgcctcttctccaggaggcaagaagattttaaatggagggactccagacattccttccagtggcctactatcaggccaggctcaggagaacccaggttatccatattctgatagttcttctattcttggtgagaacccccacataggtatagacatgattgacaacgaccaaggatcaagtagtcccagtaatgatgaggcagcaatggctgtcatcatgagcctcttggaagcagatgctggactgggtggccctgttgactttagtgacttgccatggccgctgtaaacactacatgttgctttggcaacagctatagtatcaaagtgcattactggtggagttttacagtctgtgaagcttactggataaggagagaatagcttttatgtactgacttcataaaagccatctcagagccattgatacaagtcaatcttactatatgtaacttcagacaaagtggaactaagcctgctccagtgtttcctcatcattgattattgggctagctgtggatagcttgcattaattgtatattttggattctgtttgtgttgaattttttaatcattgtgcacagaagcatcattggtagcttttatatgcaaatggtcatttcagatgtatggtgtttttacactacaaagaagtcccccatgtggatatttcttatactaattgtatcataaagccgtttattcttccttgtaagaatcctttactataaatatgggttaaagtataatgtactagacagttaaatatttttaataaatgtttcccttgttctataaaaaaaaaaaaaaaaaaaaaaaaa

SEQ ID NO: 52458 - DNA, 967 bp, Homo Sapiens
gattccagaggccatgcccgacctcaactcctccactgactctgcagcctcagcctctgcagccagtgatgtttctgtagaatctacagaggccacagtctgcacggtgacactggagaagatgtcggcagggctgggcttcagcctggaaggagggaagggctccctacacggagacaagcctctcaccattaacaggattttcaaaggagcagcctcagaacaaagtgagacagtccagcctggagatgaaatcttgcagctgggtggcactgccatgcagggcctcacacggtttgaagcctggaacatcatcaaggcactgcctgatggacctgtcacgattgtcatcaggagaaaaagcctccagtccaaggaaaccacagctgctggagactcctaggcaggacatgctgaagccaaagccaataacacacagctaacacacagctcccataaccgctgattctcagggtctctgctgccgccccacccagatgggggaaagcacaggtgggcttcccagtggctgctgcccaggcccagaccttctaggacgccacccagcaaaaggttgttcctaaagtaagggcagagtcacacgggggcagctgatacaaattgcagactgtgtaaaaagagagcttaatgataatattgtggtgccacaaataaaatggatttattagaatttcatatgacattcatgcctggcttcgcaaaatgtttcaagtactgtaactgtgtcatgattcacccccaaacagtgacatttatttttctcatgaatctgcaatgtgggcagagattggaatgggcagctcatctctgtcccacttggcatcagctggcgtcatgcaaagtcatgcaaaggctgggaccacgtgagatcattcactcatacatctggccgttgadgttggckgggwactcacctkgggcsgytktytttaatgcmtwwagktgg

SEQ ID NO: 52459 - DNA, 704 bp, Homo Sapiens
gccggcccaagcttcaacagcacagaggaccactccaaatggtgcgtgtccccaaaagggccctggacctgcgtgggtgacatgaatcggaaccagggagaggagcaacggggtgggggcacactgtgtgcccagctgccagccctctggaaagccttccagccgctggtgaagaactaccagccctgtaatggcatggccaggaagcccagcagagcttataagatctaacccttatggccaggtgcagtggctcacgtatgtaatcccagcactttgggaagccaaggagggaggatcacttgaactcaggaattcgagaccagcctgggctacatagtgagaccacatctctactagaacttaaaaaaagttagccaggcacggtgataaatgcctgtagtcccagccactgaagccagaggatcgattgaaccagggagatcatggtcacagtgaactatgattacgccaacctgggtcacatagcaagactctgtttcaaaaaaaaagggggggcgggggacgggtgggtgcagtggctcacatctgtaaccccagcactttgggaggctgagatgggcagatcacttgaggtcaggagttcgagaccagcctggccaacatggtgaaaccccatatccattaaaaatatttaaaattagccagacatggtggcacgcgtctgtggtcctagctcctcg

SEQ ID NO: 52460 - DNA, 1143 bp, Homo Sapiens
  misc_feature (1143)..(1143): n is a, c, g, or t
gggagaagctgaagaaggcaagggaagaggccatgaccgacctgcctgcaggtgacagattgactgggatcccctcgcacatcctcaacagctccccatcagaccggcagattaaccagctggcccagaggctgggccctgagtgggagcccatggtgctgtctctgggactgtcccagacggatatctaccgctgtaaggccaaccacccccacaacgtgcagtcgcaggtggtggaggccttcatccgttggcggcagcgcttcgggaagcaggccaccttccagagcctgcacaacgggctgcgggctgtggaggtggacccctcgctgctcctgcacatgttggagtgatggtgcctccagcaaccgctggggagtgtgtccctgagtcatgtgggctgaatcctgactttcactcagagcaggtggttttttgtgtaggtttgttttttatttttgatgatcttcagatggaaggagaaaacagggtttccactagacattacttgaaaggccagattactcagcagatctcccatgttggctcaacaattctttgtttttaattgcttgaagattgcattgttgtaattgttcagtttttaaatgtgtaatggcattttaatagactagtaaatcacagtggttcaaaatatatatccatatatatatatatccatatatatatctcatgtcatcacattacagggcaggtgtctcatatgtaacacatttactgaatgttgtctgaggactgaactggtggacctttctaattcactatgataattcatcacaaggcgccatttaccgtttgcacaaaacagagaagaaacaaaaaacaaagaggggcgggcccaaagaccccccagaggagcagccatatcggagacacgcgttcgtgacaaaggggggcccaaagggagggcgcataataagcaggagagggcgcggcgtataacaagcggggtgggaacacacgcgtggcctctctagaggacacaccattgggggaggatagggcagcaccacgagtatcgcggcaacaaaacacgtcgggtgacagtcggtgatgttgagatactacgaagagccaagacgaggagcagctagccagcagcaagcaggctcgactgcacgn

SEQ ID NO: 52461 - DNA, 442 bp, Homo Sapiens
  misc_feature (407)..(414): n is a, c, g, or t
  misc_feature (417)..(425): n is a, c, g, or t
gggttttccagcggaagtggctcctgtaaggcagcaaggtagcgtggccggcgcccgagctggggttgtgtccctgctgggctgccgttccagctggactgccgccatggaactcagcgccgaatacctccgcgagaagctgcagcgggacctggaggcggagcatgtggaggtggaggacacgaccctcaaccgttgctcctgtagcttccgagtcctggtggtgtcggccaagttcgaggggaaaccgctgcttcagagacacaggctggtgaacgcgtgcctagcagaagagctcccgcacatccatgcctttgaacagaaaaccctgaccccagaccagtgggcacgtgagcgacagaaatgagggactgggatctgcacagccattaaattataaatctacnnnnnnnnaannnnnnnnnaaaaaaaaaaccttgtc

SEQ ID NO: 52462 - DNA, 773 bp, Homo Sapiens
  misc_feature (765)..(765): n is a, c, g, or t
ttatccaaataaaaatgatgagtttttgtgcctgtattcaaatatgtatgcatgtgataacccttgaaagctaaagcccttcttaacttttgagttgatggaattagaattcaaagatttgaatgaaatgatttaacctttatcctccaattcttacagtgcccagttctcctgtgctatctttgctttgtacaatagtgcatcttccactttctagagagaaagcatgcacttgttatttggaaaactgggctaaatatataacagtatccaaagttataccataataatttattgtaattgtgtattacatagctttgtttacccagatataggtgcgttcttttttttctgttagtcatctgtgacttttgttctggaatacaggtttttaaatatatcttaacagtctgactaacttaaaataatttattcttcccttaaaacatttttctgtgtttttgtgcatcaaatattgtagagttgaaatcttagagattgcttatcgaaatataaatttaggggaagttaaaaatcgattggcaaatttgtagcatttattcactgattaaatcttttccacttttgtgaaaaccataccagtggtttacatcatattgtaatgtgttcatctcattcttctttttatccctaaacctagctaaaagttactgcaaagaaatctttggctgccacaagtagatgctctctactaccagagctggatttccattactcactcttgctcttacattaaaaggtggntgattaaa

SEQ ID NO: 52463 - DNA, 634 bp, Homo Sapiens
ggaaaagaaaaaagtacattactgaaagtaaaagcaactgttataggtttaccaacaaatatgtcctaaaaaccaccaaggaaacctactccaaaaatgaacaaaaaaaaaaaaaagcgaaagactgcagttgtgctaaaaacaaaacaaaacaaacaaacaaacaaaaaagtaaaaaaagattactttcgagagagaagtttaagcttcaccaatgctgctcctgaccaatggaaatatgtacaacttcagcattttaagtaactgggcttcaaggggtactgtggcaaccaaataaaataactccattttctaaaactttcatgtaacttttatgtctggactacagttcaagtggacaaaaacatttctgtattttttttaagtaaataagagtagttgaactgagcaatacctcctcctgtgttggtattacacatattagccacgagttttggcagtgaccagataaacttgaatgacccgtggtgtaataacactggccaattctgtgagtagacccgtgagtatgtggacctcttttataaggaaaactaccttcggttaacaatcaatgcttctctcttgttggtatctaataacgaataatttctgcgaaaaaacaaaacaaggg

SEQ ID NO: 52464 - DNA, 572 bp, Homo Sapiens
cgtgcatatacacatttgtgtatgtggaaatgtgctgggcaagtcaaaactatagaagagttgcctcctgtctctcgaatcttccagagatatcacttaattgttaacagcttttgtgttaatccccttcagcccctagctcttttattctaccacggctggagagttgatacctgcagtcagcctgccagtgactcttagtgtctgtttctgacttatttttcctgtctctgtcttccaacccccaataatatttccaccggggatgcatcatttttactcccaatattctgtagagagggagtcaggatgctgtcttcccacgaatagtactcagtaacaaaccaattgcattttagttgggcagtgctcccacccaccctccagatcccttccagctaaaacccttcccccttccctccatgtgtttctcagtttcccgtttcgtttgttggactgttccactgcccctcctcctcaccctatcacccatggatcgtaatgtaaaattcttttaccatgtcaagaaattattaaaaatacaggtactttgacctctttctaaagccgca

SEQ ID NO: 52465 - DNA, 605 bp, Homo Sapiens
  misc_feature (54)..(54): n is a, c, g, or t
  misc_feature (270)..(270): n is a, c, g, or t
  misc_feature (571)..(571): n is a, c, g, or t
ggttacccttgaaattcattagtttgtcataaagttttaggaaaggtaggaccncggaaagaagttctaattagttgtctaaatatttttcagtgagccaagaaattcaccatgaaaaaacaagaataacaaatagaagggaagagataggatgggaaagctaacaaattaaagttttggcaaaaaggaatatatgtaaatagctaattatttacttttgtgcttactttatttagattatttctatcagttacaatctttttctagttnagtgtacctaatttatggaatgggtgctatcctgtttatgtgtgtcttggtttttcttggctacagaaaaactgttgcagggcaacactagtttgatatttgatttactctccaatgagactcaatggctgggccgtggtagactcatagttcctcttgttctttattaaattcatcctgctaattagatttctagtgacttgtaacatgtagtttacactgaattgcaattacagatgcatacaactactatactagaaaaaattgtcatttctgatgtgccaataaatgatttttatgnagagaaaaaaaaaaaaaaaaaaaaaaaacgcggg

SEQ ID NO: 52466 - DNA, 704 bp, Homo Sapiens
aatgtgtgtactcctaaatctttatgctgtcctctaaagacaaacacaaactctcagacttttttttttttaatgggatttttaggtcagcccaggggagaaagataactgctaaaattcccctgtaccccatcctttcttgtcctttccccttcagatggagacttcattatgttaatgaacaagatatgaagaaaatggcactcattgtggccttgttgaattatgttgtgtatgttttaacatctctgatgctgtgttactaaaattacaaggacctgctttttaaaaggccagaacaattgtctgaaattagtaacaatgctgcatctagattggagtgctgcacaaacaaacataagagcaaagcaaaactgtatcacatagggtttttggtcactcacaacctgaattcaccacagctggaatagctgtggaaaacaaaataaaacaacaaaattaataatgaaatggaggggaattctagaattatatgctaaatgcatattttatgatttgctgtattaactgatgataaaactaatggcagaaaaagaagttgagcaatttctatgtaatgtacagatactagcattgcacatatagtctgctttctgttcctccagaatttgagtcctgttaatgtagtagaaaaaaaaaaaagaaattttctttttcttttgtgctggtcttgcaagtttgtc

SEQ ID NO: 52467 - DNA, 670 bp, Homo Sapiens
aatttaatgtttaactgtacccctttccctcaggaagatttaacatttgcttgggaatgtgattttgctcccaccctaaggaatttttatcaccaaaatgaatgttaatgaatttaaaacccatggtttatcattggcaagaggcaagttgacttcatcctgtcattccagcctggggtctgccagccagccctcctccccgacccagcgcctaagctcacagagtgtcgtcgcccacctccctggtccttgctcttgttaacccaagatgctgctacacagatgccaaatggaaatcttccacagggctttttcagtaaacacgtgatgtggagtgcaagctcctccccttcccactagaacatactttaacagaaaacgagtcggaccttctagctgcactctgtactgtgtgccgagaaggcatttctagacccgtgtttttaaaggagggaactttggggattgccagcccctgctcctcctcccagggagccaactgtccctcctcccctgtccctgggcccatggggcccggcagtggctgtgtcccctgcctgagggctctgtgcctcctgcctcagatgcggcctgtgccagagaggctgcctgtacagccagggtcagtttggccccaaacagggattcagaaaccaaaaaaaaaaaaaaa

SEQ ID NO: 52468 - DNA, 895 bp, Homo Sapiens
  misc_feature (769)..(769): n is a, c, g, or t
  misc_feature (779)..(780): n is a, c, g, or t
  misc_feature (880)..(880): n is a, c, g, or t
tgtaccagtaggcaagatggcaacactgcactgccaggagagtgagggccacccccggcctcactacagctggtatcgcaatgatgtaccactgcccacggattccagagccaatcccagatttcgcaattcttctttccacttaaactctgaaacaggcactttggtgttcactgctgttcacaaggacgactctgggcagtactactgcattgcttccaatgacgcaggctcagccaggtgtgaggagcaggagatggaagtctatgacctgaacattggcggaattattgggggggttctggttgtccttgctgtactggccctgatcacgttgggcatctgctgtgcatacagacgtggctacttcatcaacaataaacaggatggagaaagttacaagaacccagggaaaccagatggagttaactacatccgcactgacgaggagggcgacttcagacacaagtcatcgtttgtgatctgagacccgcggtgtggctgagagcgcacagagcgcacgtgcacatacctctgctagaaactcctgtcaaggcagcgagagctgatgcactcggacagagctagacactcattcagaagcttttcgttttggccaaagttgaccactactcttcttactctaacaagccacatgaatagaagaattttcctcaagatggacccggtaaatataaccacaaggaagcgaaactgggtgcgttcactgagttgggttcctaatctgtttctggcctgattcccgcantgaatattannggtgatcttaaagagtttggctcacggtaaacgccccgtgctgggccctgttgaagccagcatggtccacccactgggtcgtttcagcagccacgacagncaccctggtggaaga

SEQ ID NO: 52469 - DNA, 586 bp, Homo Sapiens
cacgcgtccgcggacgcgtgggtcatttcataccatagataccatcctagtaaatccagaacatatacaaggttcatgtgagtctgctttcttgacatgatagcattgtttgatgcagtggatatgtcagaatgactaacctaggagtttgaaactcctaagaaactaaaacctgtaagacatttaaaagtctccacaattttaatgtatacaaagctatgttactgtgtaacacattacagttcaaattcactccagaaataaaaggccagtaggattagggactcactggtagtttggagtctcccagcacacatccctcctagtgggatgatctattcacatatctcccagcttttttatttttgcttctgtatatcacagtgagtggatggcccttcagctttttctctcctggccagacatgcagtcttgcctttagatatcgcagagacaaaattcacagcatgtcttaaatcttccaggatttgcaagaaccaaattgctcaacagtatgtatgtttagaggggttagactcctttttaaaatctggatatctaaccacctacttaaatctgtttgata

SEQ ID NO: 52470 - DNA, 805 bp, Homo Sapiens
  misc_feature (805)..(805): n is a, c, g, or t
cttttaggaaatacctttcatactttgttcaaccaaataaagaagttgtcagaagcctacaatgaaagactgttgcatacacctcagatcgcgtgtctttagctatgacacttaaaacactagatgaacaccgtgacaaagctgtcactcagcttggctcgatgctttttaccagacaggtttctggagccagggttgtgcctcttgggtccatgcaaactgtgagtggctatactttggggggctttatgtcacatacaaataattacccttgtgcttacctcaatgctgcatcagccatcggaatgaagatgcaggatgtggacctgttcataaagagacttgacaggtgtttaaaggcagtaagaaaagaacgaagtaaagagagtgatgacaattatgacaaaactgaagatgtggatattgaagaaatggctttaaaactagataatgtacttcttgacacataccaggatgcctcttcatgacatgcgaagggtttcttcttgatcatttgaaagaaatgataaggctgtagtacaagcaagcagtttaaagataagacttgagatttttgaattgagaatttcatgggaatattcagtcaaggagcagactttggtctgaactagccattgatgattgttaagtttccattcttagactgcataaatccttgtgatccttaacaggtataatatacaataagcatttttctaattgtagaatatctggcaattaagcatcatgactcagataatttttactagtggaaggcaagaaaattacctcattctctttgaan

SEQ ID NO: 52471 - DNA, 928 bp, Homo Sapiens
agcggggtttaccagatgctccaaaagtgggtgatgagggaaggcataaagggagccacggtggggaagctggcccaggcgctccaccagtgttccaggatcgaccttctgagcagcttgatttacgtcagccagaactaaccctggatgggctacggcagctgaagtggacgcctcacttagtggataaccccagaaagttggctgcctcagagcattcagaattctgtcctcactgataggggttctgtgtctgcagaaattttgtttcctgtacttcatagctggagaatggggaaagaaatctgcagcaaaggggtctcactctgttgccaggctggtctcaaacttctggactcaagtgatcctcccgcctcggccttccaaagtgctgggatatcaggcactgagccactgcgcccagccaacaatccgctctgaggaaagcgtaagcaggaagacctcttaatggcatagcaccaataaaaaaatgactcctagttgtgtttggaaagggagagaagagatgtctgaggaaggtcatgttctttcagcttatggcatttcctagagtttgttgaagcaagaagaaaaactcagagaatataaaatcaacttttaaacattgttgtgctctcttcttcacgtaggctcctgtttagaaacaaagtgcagtcagattctaagccctgttcaggagacttcgtggatcaccagtgcagctcacccgcacatcacaggatccgtttaacgttaataccccaattactctggtcagccactggtgggctctaagaacaacgtgcagcttcagccccattaattatccgataattttcaatgaacttgcactttatatttggagtctcttcaatttactgaatgcgcttcaacgggttccagtgaggggggaaacatccgatttcca

SEQ ID NO: 52472 - DNA, 501 bp, Homo Sapiens
tcccactgcaaatttctgggatagaccaaaagtgaatttgattatgtgttggctgaagttcttcattctgactgttgaggggaggttttcctttgaagagttttcatcccagactcagctgtcttttcacatggatgaaataattcctgctaccaacaacagagcttcaccaggaagttgagttttcaagatgccttgttgctttgaagaagggagtgatgtcaattctcttgttacattctccctttagcaacctgagtaagagactctctgccactgggctgcaaaaaaataaattacttgaatctccccttggcccaggctgaggtactatcttgtcctatacacttctacttggtcactttgctttcttcgttaatggaacatacagtagcatgttaagagggatttcatgtttttgtttttttaaagttaaaaattacatgatgcagagattcaggttttcctttaaataaacaaaacagcccagtcagaaaaaaa

SEQ ID NO: 52473 - DNA, 479 bp, Homo Sapiens
atttgatgaaaacacatgccagtgtgtatgtaaaagaacctgccccagaaatcaacccctaaatcctggaaaatgtgcctgtgaatgtacagaaagtccacagaaatgcttgttaaaaggaaagaagttccaccaccaaacatgcagctgttacagacggccatgtacgaaccgccagaaggcttgtgagccaggattttcatatagtgaagaagtgtgtcgttgtgtcccttcatattggaaaagaccacaaatgagctaagattgtactgttttccagttcatcgattttctattatggaaaactgtgttgccacagtagaactgtctgtgaacagagagacccttgtgggtccatgctaacaaagacaaaagtctgtctttcctgaaccatgtggataactttacagaaatggactggagctcatctgcaaaaggcctcttgtaaagactggttttctgccaatgaccaaacagcc

SEQ ID NO: 52474 - DNA, 755 bp, Homo Sapiens
atttcacttattcctgtgaatatttcttgttggtaccaatggtactgtacaaagtgaatgttatagccacaacattctcttgaaaagaacactgtcaagaagtgggaaattgctgtcaggcatttcattgttgtttttaaacttttttaaaagaaatactggtttgcaatatagagatcatgtggtaaagaattttaataagatcttatactaaaaagccttaaatcaatttattgagattcaaaaaatactattataattaattacatcccatacatataggcaaactcatttaaaaaataaaactaattttggtaaaagtacatggcctttgtttttaaaatacataattttaaaataaatcacttgtcatgataaagtccaaaaagaagttatcattcaacattcaactaaggttggagctaagaatttactaatacaaaaaaagttaaaattttttggaccatatatatcttgacagtgtaacttttaagtaggttcatttccattggcacagaaagtttctgtctttaggaaactgaaaatgaaatactgtggatgctatgactgtttgtcttgtatgtaaataggaaaataataagctgcctattgagtggtatagctgtatgcttacccaaaaaagggaacacttgtggttatgactggtattataaactttctgtagttaataaagttgtgatgtggataaccatgattatattatgattattaataagcatatttatcaaaattga

SEQ ID NO: 52475 - DNA, 851 bp, Homo Sapiens
  misc_feature (609)..(609): n is a, c, g, or t
  misc_feature (705)..(705): n is a, c, g, or t
aggcttggccttgatgatgcagctggcccgagagctgaagaccctggcccgggaccttggcatggcagtggtggtgaccaaccacataactcgagacagggacagcgggaggctcaaacctgccctcggacgctcctggagctttgtgcccagcactcggattctcctggacaccatcgagggagcaggagcatcaggcggccggcgcatggcgtgtctggccaaatcttcccgacagccaacaggtttccaggagatggtagacattgggacctgggggacctcagagcagagtgccacattacagggtgatcagacatgacctgtgctgttgtttgggaaacagggaagcattggggacccctcccaacttttcttcccagtaacgcctgctgtttactgccacctggcactggtgactacagacgttctcaggctggccagaagagacatcttgggttccttggcctcactctctgtaagcatataaaccacaggcgaaagaggatgctgcattgcgaggacccagaaattcatactggtgccacgtttccttcccttatttctaacgtgtatgtttctggtggaaaccaagttcaccctggctgngagcatctctgatgaggcatgctggcgactggatggataatcctgtgcatcaccattgtgtcctgtgctccctcctagcgcagtggccaagccggngaaagcctctaacttgcctttgctgctgctgccttttttttcttttggctctgccttttcatttgttagatgggggcccactctttcttagctctgcctctgagtactgggtggaaataagcttataatgaatactcttttcatct

SEQ ID NO: 52476 - DNA, 1000 bp, Homo Sapiens
  misc_feature (33)..(33): n is a, c, g, or t
gtcaagtgtcaataaacatcatgtaatttatgngttttcattttatttaaaattcagcaaaatcatacgccatctaccgtgatgactgccaactccatggcagaccctttctgggattcaaaaaccaattcatcagatcgctgcctctgagggatgtacagattggctggggagctgagtgctacaataaaggaggaagtaccggggaacagtgcagggcaaaggcaggaaagagatctgagctgcctggagatcatctggggtgcggagtacaaagctttgcaagggtgtggttttggaatgacgctaaactgaaggtggagagaacagataaaaaggttggaagttgcacactgtacactgttaagaagttgagcttttatcttagaggcagcagaaggtttggagccaaggaatgaaatgatgaggcgtccttcaggtaatgaacttcagctgcagtgtgaaaggggcaggaagactggcagctgtcaaaactggaacagtccagtgagtatgtgcaggcccgggcttgggcagtgacgagggcagggagcacacatcaatttctgcggtagaaccttctagaggaagaccagacagagggtcaacagagttgaaaggagaaaataattgaggatgaggtccaagtttttagtttcagagactaggcatatggttaatatttaggtaggaaattcaggaaaaggagcttgtggggcaggaagggaaggaacggcagcttggggcactctgacatctttaacaagtcttgtaaaggcttactaaatacaacgaagcattgtaccaactataccctaataaagattaaaaatttacattccagttaactaccttaaaagttaagtccactttcatcccacgcccccatcctttccgtcatccctcacccctttgtctttgagaaaggaggtttagctgcttctttagtkctgcaatttctttttcttgctctaatatcttcatctgtagggtgaggtta

SEQ ID NO: 52477 - DNA, 613 bp, Homo Sapiens
  misc_feature (596)..(596): n is a, c, g, or t
gaaagggtgaaggagcaccatcaatctctggaccccaactgtccccgggacctcaccgactgcctgctcgtggaaatggagaaggaaaagcacagtgcagagcgcttgtacacaatggacggtatcaccgtgactgtggccgacctgttctttgcggggacagagaccaccagcacaactctgagatatgggctcctgattctcatgaaataccctgagatcgaagagaagctccatgaagaaattgacagggtgattgggccaagccgaatccctgccatcaaggataggcaagagatgccctacatggatgctgtggtgcatgagattcagcggttcatcaccctcgtgccctccaacctgccccatgaagcaacccgagacaccattttcagaggatacctcatccccaagggcacagtcgtagtgccaactctggactctgttttgtatgacaaccaagaatttcctgatccagaaaagtttaagccagaacacttcctgaatgaaaatggaaagttcaagtacagtgactatttcaagccattttccacagggtgtgccattttgcagcattttaatttgaagcctctcgntgacccaaaggatatcg

SEQ ID NO: 52478 - DNA, 669 bp, Homo Sapiens
tggaaagtgaacgggatcgccaacattttgataaagaagttatgaaagcctatattgaagaccttaaagaaagagaatctgttcccagctataccaccaaagtgtcttttagccttcaactttgatatccatcagaagactgcaaatctcactattctctggagctatatataaatctttgttatgatcatgtcatataggaagaatggcttgtgcttaaggacaaagtctagaaaccactatcatagttgctaaaaaaaatggttttcaaatgtcaaatacatgagtatctccctccatggactggagaattgaaaaattggtttgtatattgatatttccaggttcatttgcatatacttttttccaaataatgcacatttaatatgttttaaaatgtcttatttttaagaattataactaaaagaccaaatactgaagttaagtgcattgttttcaggaatcaaaagataaaggggccgggtgtggtggctcacacctgtaatcccagcactttgggaggccgaagtgggtggatcacctgaggtccggagttcgaggctggtttggccagcatggcgaaaccccatctctactaaaaatacaaaaaattagctgggcatggtggcagttgcctgtaatcctagctactcaggaggctgaggcagg

SEQ ID NO: 52479 - DNA, 612 bp, Homo Sapiens
gctttccccataggtttttcaacagactgtgaagcagtctgtcggatcctgtggggatagacgggcatttccctcgttgcccccctttttattgtggtgtggtgatggttttcagtgtcttgtacaggtaaggcactcaatgttgttaacatgccctttttcattgcctcagtattttgatattttcattggctgttaaacgtggaaactttttaacatgctttgtcgcatttatatgctacaggttacaaagtgagagccttgtatacacttcaatacttaaaaagtacccgtactcagtactcagccggcagcataatgaaaagtgggactagacacggtgtccatatggagaggaaaaatatacatagaatatttttaacaaaatgtattcattgtataaatggaatccttctgtaactttggtaactgcatacttgttgtttggtaatgaaccagaggaggtataatactctagaattgtgtaacattaaagtgtaaacttttgtgtttaaagagagagaacattttatggtgtgtacttttaaaaaggaaacaaagctgcatgcaacagcttgaaattgtatattcaggtattaaaggtgcaatact

SEQ ID NO: 52480 - DNA, 786 bp, Homo Sapiens
ctggccccggagccagagcttcttgtactacacagaattgcccctgccacttccaccctccaggtcatttctctatgagactgaagcaggaaggcagagcatcatcttgttcagcctcagctgggaacatgtgtactgggtgactcaaatttttcacccatttacacatatccacaaatgactgcaaaagtgccacggatatcaatttgagggttataaattttagcaagtggtaaattcacaaatacataaccttgaataatgaggatcaactgtaccatatttaataaagcacaaaacccacacagattgtcttattacagcatttgataaaatccaaaactctttcataaaaacactcaacaaacttaggaataaaaggaatcttcctagatatgataaatataacatctatgaaaagcccacacctaacattatacttcatggtgatagactgaaggctgaatgttttccccttaagattgggaagaaggacaaggatgttcactcggcactacttctattcagcattgtacttgaagttctagccacagcagttaggttaggaattcaaggtttgttcaacatctaaaaatcaaataagctaataaagaaaagaggtttatacctgcaaaaaaaaaaaaaaacacacaaaactacaaaacacaacaacaccacacacacaacaaaaaaagggggggggggccccaaaaaattaccccgagggggcccaattccgccccccctttttgcgcaaaggggggccacaaaagaggcggcttaaac

SEQ ID NO: 52481 - DNA, 764 bp, Homo Sapiens
gctgcttggggtcacctccttgctcatcgcttgcaaacaggtggaggtgcacccgccgggcggtgaagcagcttctggccctctgctgcggcgccttctcccggcagcagctctgcaacctcgagtgcatcgtgctgcacaagctgcacttcaccctgggtgcgcccaccattagcttcttcctggagcatttcacgcacgctcgcgtggaggcggggcaggctgaggcctccgaagctctggaagcgcaagccctggcgcggggggtggcagagctgagtctggccgactatgccttcaccagctactccccttccctcctggcgatctgctgcctggcgctggcggaccgcatgctgcgggtctcgcggcccgtggacttgcgactgggagaccacccggaggcggcgctggaggactgtatgggcaagttgcagctgctggtggccataaacagtacttccttgactcacatgctgcccgttcagatctgcgagaagtgcagcctgcccccgagctcgaaataaaacagatccttcgtttccttttagtccctggcccggctgctggacctctcccgtagcctcagaagagtgcagtactggtccacagagaaggcttcaggacctgcttggtcagctgcaggttgtaaatagtgtacgatactagcatctggtattttatttattttgcagcgagcacatgaggaagctgagtctttcaccaataaacagttgtggttgtctaaaaacacataaacacca

SEQ ID NO: 52482 - DNA, 655 bp, Homo Sapiens
  misc_feature (557)..(557): n is a, c, g, or t
  misc_feature (587)..(587): n is a, c, g, or t
caatccttactattatctcaagaatgaagcactgaaaagcgaagaaggctgcattccgaatatcgccccagacatctgcatagcatacaaactgcacctagagtgtagcaggctcatcaacctcgtggactggtcagaggcttttgcaacagttgtgacagctgctgaaaaaatggatgcaaattctgcaacctcagaagaaatgaatgaaattatccatgctcggtttattagagctgtttctgaactagaacttttaggatttataaaacctaccaaacagaagactgaccatgtggcaagactaacatggggaggctgctagaaagcaaataagcaaagccagaactatcacatttagcttaagagaaaaaggtgaccagtcatatttacatatattagaggagcctgttttgttgagaagataaatgtgtaacccccattgatgtttaaccagaaaagtacattgctaaccccaaacaggcatgtatcaaaacacctgtggagtactttagactccaacaaataataacgtaactaaaactgctcacacattntactgtactttccaaagtcattactaaatngtgagtaaatcattcttgaactagagtatgtaaatgtaaataaatccgttatccaggagtaaaaaaaa

SEQ ID NO: 52483 - DNA, 940 bp, Homo Sapiens
ctggtaccggggtccggaattcttccggatcatcaacatagtgagaccccatctctattaaaaaaataaataggcagagctaaactaaccccagtgagcacaaaactcaactggtcatataaatgagtgaaacaggcctctcacacaagcgatgtaaaacagctgggagcagtgggagctgtggcaaactaaagtgcccaagccgcatttaaaaagggcatctgttcagctccatctgcttgctgcggtgcaagaatgctaaaccaggattaccagttcttcacattttttgaaatccaaattttcatgagaaacattctcatttttaaatatcaagaagtgattttaaaatgtttaaatggtgctggttaaacaaacacgtctgcagctggatttagcttgcaagctgccaagttgcaacctctttcattctagaaacttctgtcattttcatcatagcaagtctatgcggacaaaagcctccaaactttccaactgtgtaggccagtacagctggcaaggttcatagaatataatggctatccccctctgccaaataagactatccacaacccagctcagacacagtggttatatgattttgtgtccatacaggagaggccttggtgtcttcacatacattctctgagccaacatctatccagcagccctgacctcctgctataatttaaagtctatttccctttttaatctaataagaggttgatagtaaaaaaggccgggggatggaaaatcaggtgtaataaatcaccaatgggaaatataattgtggccacctccccacaggctttaaaaagtttttgaataaaaggggcaaaattacctatggaaaaaaattaaaaaaaatggctttacctataaatgggcccccccaaagggggtggtcctctatttcacaaaaaagtggatgtggtgaggt

SEQ ID NO: 52484 - DNA, 652 bp, Homo Sapiens
gcgggcactggactggaaatgccctctgcagcctcaagaggtgcgagccttctgaatatgcagtcactggggctgtggacctgggactgcctgcagggtcactgggctcctttaattcacctaaactcaggccctccaagcggggccatggagaggagccccacgtggggtgaggctgctgaactctggggttcccacattctccttcccttcaggatccgccacaaacagacactttttgcttccttaaagtaggatcaaatctagatcctctagcctgggcagtagaggaagaaatgctagcctggaagctcggcatttggtttcactaagggccatgtggttccctgcagcctcatgcctggccccttgacacatccaaagcaaagggagtcctgccccctccccccacttcctttctaccctgcctgtgcacagtgggtgggttggtgtgtctggacactgaggacttcctccccctttgcctgtccttccctcggccctgtgtgcctcagggcagatatagcaagctctttcgaccatagttgatggtaggacattttagactttgtttctcagctctgtacaaacacaaatacacacccccacaaaactaaaatcaaagtttcactacataacactgggccttact

SEQ ID NO: 52485 - DNA, 434 bp, Homo Sapiens
taaatggctggggggcagcctggataggtttttatgggaattctttacaataaacatagcttgtaacttgagatctacaaatccattcatcctgattgggcatgaaatccatggtcaagaggacaagtggaaagtgagagggaaggtttgctagacaccttcgcttgttatcttgtcaagatagaaaagatagtatcatttcacccttgccagtaaaaacctttccatccacccattctcagcagactccagtattggcacagtcactcactgccattctcacactataacaagaaaagaaatgaagtgcataagtctcctgggaaaagaaccttaaccccttctcgtgccatgactggtgatttcatgactcataagcccctccgtaggcatcattcaagatcaatggcccatgcatgctgtttgcagcagtc

SEQ ID NO: 52486 - DNA, 557 bp, Homo Sapiens
ttcaaatacagatgacatttaaaaattcttaactacaagagattagaaatataaaccttgcctggctcttgccaggagataacaaaatgggttgctgatgaactgcacccttttacatgtgggtagaatataagctcacatggcagtgagatgttgaaaagtcaaaagagacctgtctctctcctttcttttctatctttaaaccagaaaacctcatactcagtcctcagtgaaagaaagtaaagtattaaggactttagacagaagagcattgtgtaacttgactgaagatcatccattaatagttattaggcatttaggtaaaattttctaatacctaaaaattgtcaaaaacagtcaatagggctactgctggcccaaagaccatttaggtccacctcctcttttttgctctttttttttttctgtgacagtttcactgtgtcgcccaggctggcgttcagtggtgcaatctcagctcactgcaaactctgtctcctgggctcaagtgattctcgtgcctcagcctcccgaatagctggaattacgggcatgca

SEQ ID NO: 52487 - DNA, 915 bp, Homo Sapiens
aaagtttctatattttgtatttgtctttgttcttctcatgcacacaatttactgttggtgtttaataatttggagctcataaaattaaaagttgtaattttgaccatttgggctaaaaattatatgagggattacatatgcaatggattagtatttcttgatttgcaaaagaagggaaaatgatggtaatttagctcaaattgcctttctttgaagaaaatttctgaatgactgaaaaccaaatatctatattatcactttcaacctcatgtttctgcaaagtacagaaaaactcctcactgacagtgcacccagcccctgactgggttttcaggattatgtccatgtgcataactgcttggatttcttcttttaaagtccctaaaacatgaatctgttctttgagatcctggtttccttagcagagttgtaggttgcgggtttcattcacgtggaaattctaagtagaacttttgctgccccattttactgttggtgaagggccgttgttaatggaagtttacgttttaaaactcagatgactcagaaaccagactgtgatcattttttgcagcagcaaaatgacttattctgacagcatctcggtttggggcttctgaagaaaaagatgaagctgatctgttgaaacaactactttcccaactcggaggcaaaaggggctgatagaagataccattcacctaccatttcatcttgggacccccagaaatcacgtttgcgtgttctggctgagttttttatattgggtggttttaatgggtaaataataccccattaaatgtcagggataccatctcttgcaaaggtgaccagtgccaccaaaattggcctttctaacccaaatttaaggcttaaagaaaacattttcccatggtccctaagttccttaaaagc

SEQ ID NO: 52488 - DNA, 637 bp, Homo Sapiens
tccagccctcagctctgcagcaggattctgaggagtaaagcaggcctgtaaagtactctaaagtacttcagagaggtaatgccacaaagcgaagaacacctcttggaggcagagcccctcagccctatccaggccagcagtgtccacttgaaatctgaaagcagcctccctcaccaaaccagcaagatggaaaacctccctgggttggcaagtggccctgggaagtacatgccccatctctgtcaggatagcagtggagaggtttcgtgccagtgccagctccacccacccagatggtactcaagactccaagcctgtcaatggggtggaaactttctggcattttctgtcagaagggtgagttagcactgaaccatctcatgtgtcttttcactgagtaacagcccatatccattccatgaaatgagtgactgctttgttgaatcagatagtaacaaacatttatttgtagtctggttgtgtcatatcatggttgaattgcaaacaggttggatagaagagtcagcaaaaatcaacaaaagcattctgtaaaaaacttttctagaattacaataaatggcattgtatattttatttataaattatgtgctgcacatcatttttatcaatgaaattt

SEQ ID NO: 52489 - DNA, 582 bp, Homo Sapiens
  misc_feature (500)..(505): n is a, c, g, or t
  misc_feature (508)..(508): n is a, c, g, or t
  misc_feature (510)..(513): n is a, c, g, or t
  misc_feature (515)..(520): n is a, c, g, or t
  misc_feature (522)..(523): n is a, c, g, or t
  misc_feature (525)..(528): n is a, c, g, or t
caaaaaattccaacccttttcctcccagtcattgaaacaccaaaactattataccggagggtgtaatagttttgctgcccagttgtggtaggccagtagtggcctcccaagatgcccatgtcctaatcccaggaacctgtcaaaattaccttgtatggccaaaggggctttgcagatgtaatgaagttaaggatctttcgccaggaagattatcccagcttgttcaggagggcttgatgtcctcacccgggtctgtataacagaagagcaggtgacgggagaggaggttggaggtgtagcgatggagcaggaaactggagttgaggagggcagctcaagccacagagtccaggccacctcagagccaggaaatgcatcctcccacagagccctggaaggccccagccctgctcccacctggactggctcagtgaggctaattttataattctggctgattttagaactctaaagggataaatttgtgttgttttaagtcnnnnnnaanannnnannnnnnannannnngggcctttttgtcttaacttgaagggcgggcccttatattattttaaaaaaccc

SEQ ID NO: 52490 - DNA, 623 bp, Homo Sapiens
gcgtccgctcccttttgcttatagtgtgcattttttttggaggtcattccaattttccctcttctgtgatagctgtagtttctttcatagaaagtagctaatccagtgtaatcttttacctttttaaaaaccaagatagagtatctattagagttttacattgttgatgatagattaacaataaagtgatgttctggtggaggtagactgaaatttttttaattcatgtttttcatttgatacttttaatttacacttagtaaattaaaagttgtttaatttacttggcattttaggacatgtacatgaaacagtgaaaatgagatccaccaacatcttttattaagttcagttattagtctgtgaagtgctttactttttgcacaattttaatagcttgctattcagtaatacattatagtgaattcatgatcaaggtttccttaaatttagcattgcatttcagtactgactgtgtaagctaaattgctgatccaaaataaaaacccagactagaatagggttcttaaaatcaagtatcaatacaaaatagaacacaattaaaatcttaattgttggctgggcacagtggctcacgcctgtaatcccagcactttgggagg

SEQ ID NO: 52491 - DNA, 1100 bp, Homo Sapiens
  misc_feature (937)..(970): n is a, c, g, or t
  misc_feature (1040)..(1040): n is a, c, g, or t
  misc_feature (1047)..(1047): n is a, c, g, or t
ctctcactctttttgatagtgtgttagggtgaaaaatcagttatttaacccaatttacttgtgaaagaagttttatctttatggactatgatgacttttgacatcaccatttcttgaagaccttggtattaaatgcatgagaaaccttttgccatctagaaatttctaagtttgtttatgttataagactgtaattaattgatagggaatttgggatctcaatccggggctttttgaaatcagatcattaaatatctcgtcactttggggacttgttatttttaactatgatgtggatatcctgttttaattatgaagtctagaattggtacatatgttgtatgctttgtaaagaatttcacttggtctaatttattgcatatactagcttctgttggaaaatgactgacagctagaaagtttaaggtaatttctaagtatactacctataagtaactgataagaattaggcatcattcagtgatatagcagatgactaatgggtttttcaggccctgcacttctctttcccattttcctgttgcattcagcctcttcaatgcttagtcacacctccactatagtacaaacaaacaaacaaacagaagaaaggaaagatggtgaattttgcaacagagctgcaaaaagtcagtcagtcaaagcaggaagaggttgaaggaactaaaacaaacaaacaaaggtgtctggactacagcacagtggacatgccatccatactggcctgtgccccgttatcaatcactgggcacaacagtgaagaagtgcaaatcaagtgggtttttgtttgtttgttagtagtaaggaccgtaacccaccccttcctccccccaaactatactggtatttttctatgtaagcaaattgtttgaaatgcttttgaaatgaaaatcttatatttaaaggcatatgcctggtnnnnnnnnnnnnnnnnnnnnnnnnnnnnnnnnnnaaaaggcggcccgctctaaagaatccctccgaggggccccaagcttaacgcgtaccccagcttttcttgnaacaagngggcccccctattaggggagtcgcaattataagcctagggccactgcccggcc

SEQ ID NO: 52492 - DNA, 746 bp, Homo Sapiens
ccccgcgtccgcggacgcgtggggcagaggtgtcaagtgacggtccccttggaggaatggtctttgcatctgactacttccttctgcaactgtgttcttccattagcttccatgacactctcctgctttatttttttctacatctctagcctttgctgtttcctctcctaccccacctttagattttactcagagttcagtctccagccctacaatctgagggacacctttaccaggtccccttcctaaccctccagtcccaaatccaagattctttaaccacactctaaaagttcttcagactcaggacttaaacatagccacgccaccttggccttcaatgacagggatctagcaatgctgcatcatcagccttccaataccaggtttaagggtattttaaacacagctcctcttaaatcctccaatctcagtacccagtgttttagccatgctcgggtggctaaattacatccaggaatggtgccagggcctttagccatttgtctctcctcacactccagggcccatatggcccaggttctgacagtttgccttactcccttggcctggggctagccctacctgataccctgtgtcaatgagtgtaccttggagagctatccactcaggccccagtgcctctatttgctaagggactctgccacagaaaagaaggggagagatgttcatgtaacctcaaaatacttaggcttggttttgatgctagagaggaagaaggactt

SEQ ID NO: 52493 - DNA, 713 bp, Homo Sapiens
cacgcgttcggttaactaccttagaggttaagaggaaggcagtgttctgacttctttaggtgatctgaaaaaaacacccttatcatccagtgtaccatctagagatcaccacagaatccatttttttcccagttccacaaaacactctgtttgccttcagtttttactcactagacaataattcaagtttagaaacaggtaatcagctatttgatcttaaaaggcaatgaattgttgggatatcagtgaactatgttgtatacttttgaatttttacattttataaatggaattgaaagttggataactgctttttttaaattttccaacagaagtaacaccacagttgctttgtttctttttatagcttacctgaggttcagttcttctttgtgaacctgtgagtactccacagtttactgggggaaaaggcttcagtaaagcagaggctagaattacagtatttatacatagcaacttttcataaagtagaaaaattcaaaggaagctgtctcaatttgagaataccagctgggcacggtggctcacgcctgtaatcccagcacttactttgggaggccaaggtgggcagataacctgcggtcaggagtttgagaccaggctggacaacatggtgaaacctcgtctctactaaaaatacaaaaattagccaggtgtggtaggatgcacctgtaatcccagctacttaggag

SEQ ID NO: 52494 - DNA, 654 bp, Homo Sapiens
acgcgtccgctgcgagatctcttccagaaggctgctaagaagcaccagaatatgtaccgcctggccatgaccggggcagggatcgacaggcacctcttctgcctttacttggtctccaagtacctaggagtcagctctcctttccttgctgaggtgctctcggaaccctggcgtctctccaccagccagatcccccaatcccagatccgcatgttcgacccagagcagcaccccaatcacctgggcgctggaggtggctttggccctgtagcagatgatggctatggagtttcctacatgattgcaggcgagaacacgatcttcttccacatctccagcaagttctcaagctcagagacgaacgcccagcgctttggaaaccacatccgcaaagccctgctggacattgctgatcttttccaagttcccaaggcctacagctgaaggttggagaaatgccagctgccctttcgtccccacactgtggaggaagggacctgtggcagctcacaggcatgaggggtggccgtgcacaggtgcccaggctccaaggacagctccggcagcaggtcctcgctgggcagatgctgctccctgagggcccaggtggtggaagtggggttggagcaggaagggaattttgatttttttttt

SEQ ID NO: 52495 - DNA, 563 bp, Homo Sapiens
gtattgcaaactgaaagtggacaaagacttaaggtaaacctgctcctcatggtggaatgcttccaaatgctggaaggaggactttagggcagagttcactaaggaggcttgtgcttatagatcagtgggcctgaaagaagtttctctaggttctggttgtgtgctgtacgaggtgtaggtagtaataatactcttgtcagccacagtgaagccccaagctagccgggataggggactgaccttgtacaggcagcatggagaaactaagacagagtgtcctgcccaagtgatggcactggggagcagtcactcaggtttatttccaccagggcccaagaaaaaaagaaatgaggcaacctaaaattccatcaagatagataccaatatccaaggtgcttggtcttagcggtgtgggacccacgttaaggctcttggtgggaaggtgggaggtgttttcagcatgagatagggttcaggctgtgaatcagagtctagagcctaagataaaagaagataccagggctgggccacggtggctttcgcctgtaatcctagcactttgg

SEQ ID NO: 52496 - DNA, 645 bp, Homo Sapiens
acccacgcgtccgcgccctgcagcctcacacagatcctgcacacacccagacagctggcgctcacacattcaccgttggcctgcctctgttcaccctccatggccctgctactggccctcagcctgctggttctctggacttccccagccccaactctgagtggcaccaatgatgctgaagactgctgcctgtctgtgacccagaaacccatccctgggtacatcgtgaggaacttccactaccttctcatcaaggatggctgcagggtgcctgctgtagtgttcaccacactgaggggccgccagctctgtgcacccccagaccagccctgggtagaacgcatcatccagagactgcagaggacctcagccaagatgaagcgccgcagcagttaacctatgaccgtgcagagggagcccggagtccgagtcaagcattgtgaatkattacctaacctggggaaccgaggaccagaaggaaggaccaggcttccagctcctctgcaccagacctgaccagccaggacagggcctggggtgtgtgtgagtgtgagtktgagcgagagggtgagtgtggtcagagtaaagctgctccacccccagattgcaatgctaccaataaagccgcctggtgtttacaactaa

SEQ ID NO: 52497 - DNA, 557 bp, Homo Sapiens
ccgggaggcggacagccccgagggcccccagcattctccactggcagctggactcctgaagaaggtggcagaggagacaccagtatgaatgctgggctctccggaccctgcagcagagaggccagaggtagctggtgataccctgtcctgtggaaggacttccacttcaacacttccacttcaacagttcccgcacggcctgaacgcttcttaggccaagagacaccatgcggagcctagtctgtgatcctgtgtgaagatattttcagggtttttttttttttttttttgcatatggaggacaggtggacatggtcctgagctctggacggagcaggcaccctgatctcattctgaggtccacatggcaccttctgggccagcagctgtggccggtgtatcaagggcgcccttaaagctggaacattccagcaagcttcttgcgcttctctgcacccggcaggcccactttcctggcaccctcgactttatataaaagttgcactgcgtttcaaaaacccacccctgaatgaataaaaggagccctggctggacaa

SEQ ID NO: 52498 - DNA, 463 bp, Homo Sapiens
  misc_feature (4)..(4): n is a, c, g, or t
  misc_feature (10)..(10): n is a, c, g, or t
  misc_feature (41)..(41): n is a, c, g, or t
  misc_feature (408)..(408): n is a, c, g, or t
ccantttgtnctgttaatataaaatggttagatatattaanctgcaagtagtatcagcttcaccataagcttgggccttcctccatcttgttttatttaagtctctttaaatgaaattttgttgtcattgtttcagcattcatgaactttcttactatcacaggttctactttaattttccttgccatatgtgtttccattttgtgggacattagccaccacaggaacacaagagttgtcagaagactcctgggtgtacagagcaaatcaagctgcatcagtattataggataccaaacagaatcctttctattaggaaataagaaatcagttaagtgttggctgggcgcggtggcttatgcctgtaaatcccagcattttgggatgccaaggtgggcagaccatttnaggccaggagttctaaaccagtttggccaacatggcaaaaccccatctctactaa

SEQ ID NO: 52499 - DNA, 882 bp, Homo Sapiens
cgtagacgagttaagtcctggtctgcgtggaggtcgacgactccgtcgcagactacggacctgtctgggtctcagccgccaaagaccccgtccggtaggaagtactagccggacatcatgagtggctgtcgggtattcatcgggagactaaatccagcggccagggagaaggacgtggaaagattcttcaagggatatggacggataagagatattgatctgaaaagaggctttggttttgtggaatttgaggatccaagggatgcagatgatgctgtgtatgagcttgatggaaaagaactctgtagtgaaagggttactattgaacatgctagggctcggtcacgaggtggaagaggtagaggacgatactctgaccgttttagtagtcgcagacctcgaaatgatagacggtatgtgaagggtggatggctgcattgaacaattattgtaggggtagcatttaagattcaggagtcattagcagtgatgattttgggtcctgccgtataatctgttcttctattcccacgttagccagttgttcttgatgaatctatatgagtcatagaacacaaatctattgacggaagtcattagaatggcttgtgatatctgatggcttgaacttgcccacagttgaacacaagtgctgtcattgcatttcttccattgtgaatacgaattttcttcctcagaaatgctccacctgtaagaacagaaaatcgtcttatagttgagaatttatcctcaagagtcagctggcaggtttgttgaaatacagttttgagttattttgatgtggctttttaaaaaagttaatgggtagctaatgttgtattgttttattaaaagtagttttaaattaatggatttaatgga

SEQ ID NO: 52500 - DNA, 604 bp, Homo Sapiens
gatggctctgctgcagcccacagcccagtttgacgcccaggaattgaggacagctctgaaggcctcagattctgctgtggacgtggccattgaaattcttgccactcgaaccccaccccagctgcaggagtgcctggcagtctacaaacacaatttccaggtggaggctgtggatgacatcacatctgagaccagtggcatcttgcaggacctgctgttggccctggccaaggggggccgtgacagctactctggaatcattgactataatctggcagaacaagatgtccaggcactgcagcgggcagaaggacctagcagagaggaaacatgggtcccagtcttcacccagcgaaatcctgaacacctcatccgagtgtttgatcagtaccagcggagcactgggcaagagctggaggaggctgtccagaaccgtttccatggagatgctcaggtggctctgctcggcctagcttcggtgatcaagaacacaccgctgtactttgctgacaaacttcatcaagccctccaggaaactgagcccaattaccaagtcctgattcgcatccttatctctcgatgtgagactgaccttctgagtatc

SEQ ID NO: 52501 - DNA, 779 bp, Homo Sapiens
tggctgctgccaccaccgccgctgctatatagtttaggtttctgaggtttgtgagcctgtcctgctttgcattcttcaaaaccattcctgatagagtagccgagggagagtcttggggccaagaagggcccagggtgggtcaggcgtgtgcactgtggaacagagctgagaccccggccccccttggactggcacagggtcctacagagtcagaggaggcctgagatttcgaatgggcagtgaatggcctcttctgccagccacaggcaggatgctccttgatcacggcatcccccggcggtagtacagggtgagcttgcaggagggtctgcaagtgcagacagcagctggggccaaagaggtgttaggttcaaaggctgcgaagagaataggctactggaaaaccaaacccaacagaattcacgtccaaaaatccacattctccatcgcttctcagccttttggctaagattaagtattaaaaaaaaaccaggctctgccaggcgcagtggctcatgcctataatcccggcactttgggagtctgtggcaggaggattgcttgaggccaggagtttgagaccagcctgggcaacatagcgagaccccatctctacaaaagattaaaaattagctgcgtgtagtagcatatgcctttcaacgtagctactcaggaggctgaggtgggaggatcccttgagccgaggagtttgagtctgcagtgagctatgatcgcaccactgcattccagaccccatctcgaaaaaaaaaaaaaaaaaa

SEQ ID NO: 52502 - DNA, 650 bp, Homo Sapiens
tctgtgatgtcaaaaccctcctgacatcgttgtccagcctggacacattaggctctatgtcgtagaaaaagagaatttgcctgtgtttccagtttgggtagtggtgggcatagttactgctgtggtcctaggtctcactctgctcatcagcatgattctggctgtcctctatagaaggaaaaactctaaacgggattacactggctgcagtacatcagagagtttgtcaccagttaagcaggctcctcggaagtccccctccgacactgagggtcttgtaaagagtctgccttctggatctcaccagggcccagtcatatatgcacagttagaccactccggcggacatcacagtgacaagattaacaagtcagagtctgtggtgtatgcggatatccgaaagaattaagagaatacctagaacatatcctcagcaagaaacaaaaccaaactggactctcgtgcagaaaatgtagcccattaccacatgtagccttggagacccaggcaaggacaagtacacgtgtactcacagagggagagaaagatgtgtacaaaggatatgtataaatattctatttagtcatcctgatatgaggagccagtgttgcatgatgaaaagatggtatgattctacatatgtacccatt

SEQ ID NO: 52503 - DNA, 583 bp, Homo Sapiens
  misc_feature (436)..(436): n is a, c, g, or t
agtgtcgggcgcagacggcggcagtgcggcttgctcttggaagttcaggctcggttgtcttttgggagccatggagagtgacttttatctgcgttactacgtggggcacaagggcaagttcggccacgagttcctggagtttgagtttcgaccggacgggaagttaagatatgccaacaacagcaattacaagaatgatgtcatgatcagaaaagaggcttatgtacataaaagcgtgatggaggaactgaagagaataattgacgacagtgaaattaccaaagaggatgatgcattgtggcctcctcctgaccgagtgggccggcaggagcttgaaatcgtcattggagatgaacacatttcttttacaacatcaaaaattggttcccttattgatgtcaatcaatccaaggatccagaaggcttacgagtattntattatcttgtccaggacctgaagtgtttggtcttcagtcttattggattacacttcaagattaaaccaatctagactgaatattggtgtggacatgggggtggtggggaattagaaaaattttttgggttattaggggcagtattt

SEQ ID NO: 52504 - DNA, 1140 bp, Homo Sapiens
tccaagtgtttcagatgaataacaaaacgctgttcattgagagctttcgccacctttcttaaagcagcgtatgttccaagggaaaaaggcattgaaaagcaatcgtttgtttttatgaagaataggtgttcagattccttcagtttttttgaaattagaaatttcttaccttatgtgaaatattcacaaacgtgcacacttctgcagagacaaagcatttcactgcacgtgtaccaggttattgattttatcttttcctttcagggttttgtcctcccaaaccagagtcatatgctgctagtagaattttttatttgatcctgcgaacttttcttataggaaaaataaggcaaaggatgtgtagtgcaaccatctgataaactagtgtgattgtatttatcctctgttctgtgtatttctgtaatggaatctttacaattcccaaaacggtattttagacctactggaaatctgtatcgaaacagctatgtgattctgccactgagaacccacacatttttaattcgtttacttatgctggttgtttctttaatgaagacattgatctcatatggcatcatagatgctaacataaataaaagcatcatacttctctagttgcctgcattcagtgggctaacattatgcagcattgtgtaagataaccaatggtcagtatcaatgtcacatgttaggagccatgattacttcctatgtacaattggaacttacatgtcgaaagacgactagacattaaacagacaaacaaacaacaagaaaaacaaagacaaagaaaacaaaagggggcgcacacaaacctctcaggatcacaacaggacacactgtgcaaacggccaaagggacgtaaaaagagagaggggcgcataaaacgcaggagcagaacacccacacgcacagcgaaacccctctggggggcacaacagacaccccacaaaagaacagcagacaaagcagcgcgtccacaccatcaggcgaacgggttcaaacaaaacgatcagacaaaacaaaaccagacaaaggaccaccaatcaacaggtacacaccacccaagaaaagacagcgcaaccaacgaagacaaaaaaagcacacacgaacgcgcgcgaaagacacacggcggca

SEQ ID NO: 52505 - DNA, 611 bp, Homo Sapiens
  misc_feature (23)..(23): n is a, c, g, or t
taggtgataaaagaagccatggnttgaaagcattgaatatagaagacagaatccatctcgttgctctgtttcccttagtaatgttgaggcaagaagatttttcaacaaggagtttctaagtaaacccaaagcatagttcatgtactggaaatggcagcagtttctgatgctgaggcagtttgcaatcccatgacaactggatttaaaagtacagtacagatagtcgtactgatcatgagagactggctgatactcaaagttgcagttacttagctgcatgagaataatactattataagttaggttgacaaatgatgttgattatgtaaggatatacttagctacattttcagtcagtatgaacttcctgatacaaatgtagggatatatactgtatttttaaacatttctcaccaactttcttatgtgtgttctttttaaaaattttttttcttttaaaatatttaacagttcaatttcaataagacctcgcattatgtatgaatgttattcactgactagatttattcataccatgagacaacactatttttatttatatatgcatatatatacatacatgaaataaatacatcaatataaaaataaaa

SEQ ID NO: 52506 - DNA, 593 bp, Homo Sapiens
ttctccacgtcagtgacccgcccctcagtgctgtgtgatggccagtggcaccggctagcggtgatgaaaagcgggaatgtgctccggctggaggtggacgcgcagagcaaccacaccgtgggccccttgctggcggctgcagctggtgccccagcccctctgtacctcgggggcctgcctgagcccatggccgtgcagccctggccccccgcctactgcggctgcatgaggaggctggcggtgaaccggtcccccgtcgccatgactcgctctgtggaggtccacggggcagtgggggccagtggctgcccagccgcctaggacacagccaaccccggcccctggtcaggcccctgcagctgcctcacaccgccccttgtgctcgcctcataggtgtctatttggactctaagctctacgggtgacagatcttgtttctgaagatggtttaagttatagcttcttaaacgaaagaataaaatactgcaaaatgtttttatatttggcccttccacccatttttaattgtgagagatttgtcaccaatcatcactggttcctccttaaaaattaaaaagtaacttctgtgtaaa

SEQ ID NO: 52507 - DNA, 569 bp, Homo Sapiens
gcacgagcttccttcaatggcgtaagtttattttttacttaagtggcatctatgtaagttagacaaactatatattaaaattggtaaactttgaatgtttctcctgttttgattcttagattatgaggaggatcagacagaataagactccacacttttgaaatttgataagtcaaaacgttttattttgacatttttaacattgtgaattattcgatatttgtaatctctgtatgtatatgaaactctgccatgtttttcaactttgcctatgtgccactgtatataagaaaggacagctattttgatcttcatcagcattgccttcagctgaaaacttgggaacagttcacagtaaacctctcagtagtttgcaaactgaggtacctgcagaaaccatagctactcaccaaaatacacagattaggtgcatggtatcgtggaaattatttggtaaaaaaacacacacacaaatctatgtgtactgtattttaaggaatatctacaggtgcagctttgattttgaacagaattccaaataatttactgttgtacccaccagaatctag

SEQ ID NO: 52508 - DNA, 652 bp, Homo Sapiens
attttcattctttaaggctactttcctactaactgaaataacacatttacttttaccacaattcctcaaaataaatttattctaacattgaaaataacattacaagttaatcattagcttgatgcatgctaaaatgtagcttttaaaaagcattctgcattagtactaaaataagccatcaatgccagtccaccctctctattcatggctaaatatttaaaggttatttatagcttctttaatgaattcttcttaaacaaagtgaaattatgtcctagaaaagtagaagctattcgtaactagagcagtgcaactttaaagttttatgaatatgtattttaatgacaagggggcgagcttgcatccccactagttaatggataattcaaaccgaggactgattttgaaagatcacctaaaaatgtagatttgttctttagtaaatttagatcaactatgcatatattttgtaggtaaatctttcagtccatgccccaaccctcaccaaaaccaaagcagaaatacacacacaaagatgctcccgttaggaattgctattcacatgaggctttctgtgctagatttttttctcagaaacaaaacttactgtagggactattgggggtgttcttaacaagattgaaatttcaag

SEQ ID NO: 52509 - DNA, 529 bp, Homo Sapiens
gataaccagccccgttcacgtcagtttctacgtctgcaacgggaagagaaagcgaagccagtaccagcgtttcacctaccttcccgccaacggtaacgccatctttctaaccgtaagccgtgaacatgagcgcgtggggtgctttttctaaagacgcagaaacgacgtcgccgtaaagcagcgtggcgtgttgcacatttaactgtgtgatgtcccgttagtgagaccgagccatcgatgccctgaaaaggaaaggaaaagggaagcttcggatgcattttccttgatccctgttgggggtggggggcgggggttgcatactcagatagtcacggttattttgcttcttgcgaatgtataacagccaaggggaaaacatggctcttctgctccaaaaaactgagggggtcctggtgtgcatttgcaccctaaagctgcttacggtgaaaaggcaaataggtatagctattttgcaggcacctttaggaataaactttgcttttaagcctgtaaaaaaaaaaaaaaaaaa

SEQ ID NO: 52510 - DNA, 720 bp, Homo Sapiens
aagttaaaggatatgatattttactgttgaatatatacaacttcccaaagaagcatagtaaaattaatcacttgcattcttttcaggttagtgtgactgagtccacccacacaagctctggggcttcagaaggcttgaataaagtgatacgttagagtaacacatatcctgcctttactaaaaacctataacatttaattttataaaaagtcaggaaagtcagagaatcctaggtatataatcaccttttaaaaaaatttttcattttaacttaaacatagggataatggcaagccactcataatgttgtcatttgaagatcacaccttttaatgtagctgaatttggaagagagaaggagagaaacagaaatgagaaggtttgcttaaaaaacagatgccagtgcacaaatcttaaagaattataaggcctggtgcgatggctcacacctgtaatcccagcactttgggagacagaggtgggcgaatcacaaggtcaggagttcgagacatcctggccaacatggtgtaaccccatgtctaccaaaaatacaaaaaattagctgggcatggtggcgggcacctgtaatcccagctactggggaggctgaggccaggagaatcgcctgagcctgggaggcggagttgtagtgagctgagaatcatgccaactgcaacaagcgtgagactccatctccaaaaaaaaaacaaaacaaagggg

SEQ ID NO: 52511 - DNA, 744 bp, Homo Sapiens
cttaaaacattagctggtcatctggtaagcccgggacagtaagccgagtggctgttggagtcggtattgttggtaatggtggaggaagagaggccttcccagccgccgcgtaaggaccagcagccgggcccggccggcggcggaggagacttcccaagtaagaagcggaagaggagccgctggaaccaagacacaatggaacagaagacagtgattccaggaatgcctacagttattccccctggacttactcgagaacaagaaagagcttatataggtaaatatacgttctgcatccaaatgcactttgagattgttacgatttattctgagcaagatctgcattttttgaaagtttgagattgtagttatcttttttgagatgagatactttcacgactttggtatcatctgtcagtttttgcccagtgagttctgcatttgcagctccttgttttggtctgttcgtaactgcagtgttctccatgagtatcaggaaggtagggtttcacttaggagtaagaacagtccccagtccagcagccacccttttcagctgctgttcattgccagttgatgaggtgagtgtcatctgcctctctggacaggccccagtggagaacaccgcaggtactgtaaaccaagtacttttcacagcgtggcctttcaccataattttatatttctccccctaaaatgtggtcttttactttttataggtactttctgaaaaaaaaaaaaaaa

SEQ ID NO: 52512 - DNA, 571 bp, Homo Sapiens
ctctgagcggctgggcgaccggcgcgtcgtgcggggctgcggcggagcctccttaaggaaggtgcaagaggttggcagcttcgattgaagcacatcgaccggcgacagcagccaggagtcatgagcgacagcggcgagcagaactacggcgagcgggtctagatccagaagaagctcccgaaggcattatacccggtcacggtctcgctcccgctcccatagacgatcacgtagcaggtcttacagtcgagattatcgtagacggcacagccacagccattctcccatgtctactcgcaggcgtcatgttgggaatcgggcaaatcctgatcctaactgttgtcttggagtatttgggctgagcttgtacaccacagaaagagatctaagagaagtgttctctaaatatggtcccattgccgatgtgtctattgtatatgaccagcagtctaggcgttcaagaggatttgcctttgtatattttgaaaatgtagatgatgccaaggaagctaaagaacgtgccaatggaatggagcttgatgggcgtaggatcagagttgatttctctata

SEQ ID NO: 52513 - DNA, 582 bp, Homo Sapiens
gcgtccggttttgttttgaatttggggggttgtggattgttgggggtagggagattttttttttttaaagctgcttcctcaactgtttcaagctgcaaatgtttaagagaataacagcccccactcccacaggaaccgctgtaattaaatcagacagtaggaagactgggctgctgccctcaaagccacagcccttggatgttccttttccgagagcagaaggtctaggctacagggagggggagattggctcccgtgagtcaggctgtgtttggggcttgggccctgggattgggaaaaggggatggggcagactttgtaagcatatgctaggtatccgatagtcctgtagaatttagtgaagaaaccttatacagtttttaatttttatataaactataactcagacccaagctacaaggttggaattttggttggttttttttttaagtaccctgcctgtataattgcatcagaatcccccaccccaccccccgcccccgtgtttgtattttgggttggtttacactcgcacatactcagttttcagttttcccctttacagtcttctcccctcacctc

SEQ ID NO: 52514 - DNA, 694 bp, Homo Sapiens
gccgtggaaccgccgccaggtcgctgttggtccacgccgcccgtcgcgccgcccgcccgctcagcgtccgccgccgccatgggagtgcaggtggaaaccatctccccaggagacgggcgcaccttccccaagcgcggccagacctgcgtggtgcactacaccgatgagtgtgggtcagagagccaaactgactatatctccagattatgcctatggtgccactgggcacccaggcatcatcccaccacatgccactctcgtcttcgatgtggagcttctaaaactggaatgacaggaatggcctcctcccttagctccctgttcttgggtaaggaaatggaatactgaagggcccttcactgcctttgctcctcccatgttatgcccagcgtttgatgggtagcagagagaacaaaaaacaccacaaggctatttttccccctgcattctttctgtattgagtatcctttcagtgttattagtgtatgctttgaatgtaaaaattggtcaccctaaggaaaggaattggcatgtgtatgttcccagttcaactcatggagatggcagctgtttaaatgtttttctatgtagtttataaattaaaactgaattgaggactatggaaatgtaggccaaatttgtagtgccaacattttagtttctttggaaaataagactcttaatgaatgacttt

SEQ ID NO: 52515 - DNA, 574 bp, Homo Sapiens
gcacgagctcgtgccgcaaaatctcaagacccaggagcagttgtacttggaaaaagcctgaccgagagggcgcaactgctcaagaacgtctttaagaagaaccacgtgaacttgtaccgctctgaatccttgcaacaaaatctgctccatgggtatgcgttctctcaagatgaaaatggaatcgtttcacagtctgaagtgataagagcatatgataccacgaaacagaggcccgacgaatggtgatggggagagcctgaaaggcaggctctgttacctctctaaggagagctaccaggttgtcaccgcagtctgctaaccaattccagtctggtccatgaagaggaaaggtagatctgagctcatctcgctgatggacattcagattcatgtatattatagacataagcactgtgcaactgtactgtaacaccatctcttttggatttttttaaggtatttgctaagtctttgtaaacggaaattgaaaatgacctggtatcttgccagagggctttcttaaacggagaataagtcagtattcttatgccattactgtggggctgtaactgac

SEQ ID NO: 52516 - DNA, 582 bp, Homo Sapiens
ttttctgttaattagttgtgtactctggcctctgtcatatcttcacaatggtgctcatttcatggggtattatccattcagtcatcgtaggtgatttgaaggtcttgatttgttttagaatgatgcacatttcatgtattccagtttgtttattacttatttggggttgcatcagaaatgtctggagaataattctttgattatgactgttttttaaactaggaaaattggacattaagcatcacaaatgatattaaaaattggctagttgaatctattgggattttctacaagtattctgcctttgcagaaacagatttggtgaatttgaatctcaatttgagtaatctgatcgttctttctagctaatggaaaatgattttacttagcaatgttatcttggtgtgttaagagttaggtttaacataaaggttattttctcctgatatagatcacataacagaatgcaccagtcatcagctattcagttggtaagcttccaggaaaaaggacaggcagaaagagtttgagacctgaatagctcccagatttcagtcttttcctgtttttgttaactttggg

SEQ ID NO: 52517 - DNA, 547 bp, Homo Sapiens
agtaccagtagcacttccctcaacctgaaagctgacttcaactatataaaatcattaagcagctttgagtctggaaaatttgtcgaatgtaccgagcaattagaattgttaccaggagaaaatatcaatctacttgctggaggatcaaaagaaaaaatagacatgaaaaaactgcttcgtaacatgtgaagtccagatccaagggaacctcagaaatccattgaagttccattgttaagaagttctgtttgtttggcaactgctttaaacccgatagaacaagatcagaagtggcagtctataactgaaaatgtggtaaagtacttgaagcaaacatcccgcatcgctattggacctctgagactttctactttaacagtttcacagtctttgccagttctaagtaccttgcagctgtattgctcgtctgctttggagaccacagtttctaacagactttcaacagaggactgtcttattccactcttcggcgaagctttacgttcatgtaaacagcatgacgtgaggccgtggatgcaggcattaa

SEQ ID NO: 52518 - DNA, 899 bp, Homo Sapiens
agcccttcgcccccagatggctcccctgccgccacccccgagatcagagtcaaccacgagccagagccggccggcggggccacgcccggggccaccctccccaagtccccatctcagccagcagaggcctcggaggtggcgggtgggacccaacctgcggctggagcccaggagccaggggagacggcggcaagtgaagcagcctccagctctcttcctgctgtcgtggtggagaccttcccagcaactgtgaatggcaccgtggagggcggcagtggggccgggcgcttggacctgcccccaggtttcatgttcaaggtacaggcccagcacgactacacggccactgacacagacgagctgcagctcaaggctggtgatgtggtgctggtgatccccttccagaaccctgaagagcaggatgaaggctggctcatgggcgtgaaggagagcgactggaaccagcacaaggagctggagaagtgccgtggcgtcttccccgagaacttcactgagagggtcccatgacggcggggcccaggcagccctcgggcgtgtgaaagacacctccctccgaaaaatgtgtggttctttttttttgttttgttttccgttttcatcctttgaagagcaaggggaaaatcagaggagacccccaggcagaggggcgttctcccaaagattaggtcgttttccaaagagccgcgttcccgcaagtccgggcgaatttcaccagtttccctgaagctgctgtggtcctctagttggagtttctggcgccccctggcctgtgcccgcaatgtgttcccttggcccccagggccggggcctggggggctttcccaaaaccaaccatgccttggccctgaaaacttttcggccgccgccacccccgggga

SEQ ID NO: 52519 - DNA, 574 bp, Homo Sapiens
  misc_feature (402)..(402): n is a, c, g, or t
  misc_feature (519)..(519): n is a, c, g, or t
  misc_feature (540)..(540): n is a, c, g, or t
  misc_feature (573)..(573): n is a, c, g, or t
caacacgagatacacatttacataaatctcagtcatttacaaaaataaatcttgtcttaatttaaaccaataaacagacttgcaggggaaaaagaaaccagcaagtagggctaattatcagtaacaaatagatgggggtgtttgctctgtgtgtgtgtgtgtgtgtgtgtgtgtgtgtgtatatgtgtgtgtttgtgtgaagtgaagtgttgctgctgtaagtagtgtccataagcccatttgactgtattacaagttagttaattactcatatagttggccacatattatgggatctatgttttctgaaaataattggttaatggaagttatctaatatattttaactgttcctgttaaaaacaataggcttcaagatgacataacaccaaatcaaaaatnaccaaaggaatcattttgtttgttagatttgtaatttagcatcattggcaataaatctactcaaacgttctgctaactttttatttattcaagtagaatcccaatatgaaaaatggnaataagcataaaccaaccagntaaatttccactaaccctttaatcagctaagcng

SEQ ID NO: 52520 - DNA, 722 bp, Homo Sapiens
cttggcacaccagaggtatcctctggcacatgcaggcctgatgtttcagaatctcctgaattacgtcagaagtcaccattgtttcagtttgccgagatatcttcaagtacgtcccactctgatgcttctacaaagcagtgtcaaacatctgccttgtttcagtttgcagagatttcttcaaacacttcgcagttgggtggtgctgagcctgtaaaacgctgtggaaagtctgcactctttcaactggcagagatgtgcctggcatcagaagggatgaaaatggaagaatcaaagctaataaaagcaaaagaatccgatggtggaagaattaaagaattagagaagggaaaggaagaaaaagaaattaaaatggagaaaacagatgaaactaggttacagaaggaagcagaatttgaaaaatcggctaaggaaaatttaagagattctaaggaattgagaaattttgaggcattgcaaatagatgacataatggctataaaaatggaagatcccaaagaaattagaaaggaagagttagaagatcacaaatgtagtcattttcctgatttttcttattctgccagtagcaagataataattagtgatgtcccagtagaaaggatcatatgtgccatcctcatgaattatgtcattgaggatccgcagcattaacaagcagaaagctaaaaaaaaaaaaaaatcggctttttcgtgcgaaaagt

SEQ ID NO: 52521 - DNA, 589 bp, Homo Sapiens
tttaactctgaataacaaagtccaaaagaaaagatggcaacaaagaggaagaaaagccaacactagacctttgaaaagaagaagaaaaagaggtccaagaattcccaaagatgaaaatattaattttaaacaatctgaacttcctgtgacctgtggtgaggtgaagggcactctatataaggagcgattcaaacaaggaacctcaaagaagtgtatacagagtgaggataaaaagtggttcactcccagggaatttgaaattgaaggagaccgcggagcatccaagaactggaagctaagtatacgctgcggtggatataccctgaaagtcctgatggagaacaaatttctgccagaaccaccaagcacaagaaaaaagagaatactggaatctcacaacaataccttagttgacccttgtccggaaaactcaaatatatgtgaggtgtgcaacaaatggggacggctgttctgctgcgacacttgtccaagatcctttcatgagcactgccacatcccatccgtggaagctaacaagaacccgtggagttgcatcttctgcaggataaagactattcaggaaagatgc

SEQ ID NO: 52522 - DNA, 911 bp, Homo Sapiens
  misc_feature (637)..(637): n is a, c, g, or t
gctgtggtttaatgtttactctacctgtagtgtatgttaagcaccaggcacagattgaccaatatctgggacttgtgaggactcacataaatgctgttgtggcaaagattcaggctaaaatcccaggcgctaagaggcacgctgagtaaactgatttcccaccggggactggacacaaacaggaatgtctggagtggtaacagctctcttcttactcattactgcaaattgattgtctttcccccctccctccagtaccataatcttagagacaaaccttaaaacagctgtttttaggctgttccttgtactcttaggatatttgagtcacttgtgtcaaccactaaagtatagagaaaagtgtattagatgtggtttttaattttgtgttgctaaaaaaagtgcatgatggtgagagcccaagttatctttccctcttcggtgttcttcttctcttctctgcaatgcttctgtagcttctaatgttccccgtggctaggcctttcctgccgagtgctctgatgcaatagtggaaatcgcttatatgtccttgggttgctggttggattaatctttaataacaatatatagaattgtagactgatgttttagcatttttccaacacacacaacgtanaaataaaagcagtcgaccgcacttatggtaatcagttttgtataacttaaaataattaaataaatgaataaatccaaaacaaacatgcagtacttttgttgtatgggattggtggggctgatttacatggtatggtaactaaaaaggaccagcatggtaacctttattacatttgggattacctttcttttgaagttcctaaatggatttcaattaccggacctttggaatatttggcaccttattggcttgggaacctgaaagcctataaaaa

SEQ ID NO: 52523 - DNA, 793 bp, Homo Sapiens
atagcagaatccatactggtaagaagccctatgagtgtaaggagtgtggcaaggccttcagttctggctcataccttgttcagcatcaaagaattcatactggggagaaaccctatgaatgtaacaaatgtgggaaagcctttactgtttcatggacaacttattggacatcagagtgttcacactggtgagaaaccttttgaatgtcaggaatgcgggaaggcctttagacttaattcattccttactgaacatcagcgggtacacactggtgagaaaccctttaaatgcaaaaaatgtgggacagaccttatagatacagttcagacccttacagtgcatctgagaaaacatatgagtgttataccctaagagtctgaggagtgtgggaagtgcttcgtgtgtggtcaaacatggttgaacatcggggaatttatgctggtcaggaaactttcaaatgtgcaagaatatgggcaggtctattctgcatcttataattcataatataagtcagaaaaatcagaatatacctttgtcataataggtaagcaataccaatattatactgggtggaccattcagacacaagtgggacaccgtatcacttaactggttacagactgacaagatgaactaacatatgatgcattcatacatacatgtgatgggactgaaccagtgaatcaaacaaccttgggagcatcctaaacacctgctgcacgtccaaaacatcagacatataaaaccagtaaacatggaactaaagacataagcaggcacccagctactacaa

SEQ ID NO: 52524 - DNA, 487 bp, Homo Sapiens
  misc_feature (404)..(404): n is a, c, g, or t
gggcaggcaggtggacttcagaagagcttgaggggtcagcactccgcacacccatgccctcaggtgcgatggataaacagaatggctttaggtgccgtctgtccaaattaccagcggaaccttccttcccatgcagtattgttgtatgtacttgtaacctttgattaggtttctctctgtactcttagatgtccttgcttttcttccccatcctgcctttaacctttctaatcttgccaaagctcttgagtgtttccccatcagtttccttctctcttatatttcagttttttaattgagttcatgatcaaaccttcatctgatcacatcacatgtactgtgcatccactgtgattagatagcttatgggatccttgaaatcacattgacaggcactgtaaagncacagccaagttagcaattattagttgcacctcagagaatgttggaataatgatctttgaagatgggattgttcatatatttg

SEQ ID NO: 52525 - DNA, 461 bp, Homo Sapiens
tgaggaggagcggggatttggacgagagacacaggatgagtaccggggggcagccccgtgatcaacaactgctgcaagaggggccgtttgttcgactcgctagtcttctgcggctctatgcggtactaaagagcagaagacagaagatacaaaaaccacaaaaagtagccgggcgtggtgctgcccgtcaataatcccagctactcgggaggctgagacaggagaatcgcttgaacccgggaggcggaagtttcagcgagccgagatcacgccgttgcagtccaacctgagcgtccgagcgagactctatctcagaaaataaagacagaatgaaagagcccggcgcggtggcttacgcctgtaatcccagcgctttgggaggccgaggcgggcggatcgcctgaggtcaggagctcgagaccagcctggccgacatggcgaaaccccctaaaaatacaaaa

SEQ ID NO: 52526 - DNA, 949 bp, Homo Sapiens
  misc_feature (898)..(898): n is a, c, g, or t
  misc_feature (911)..(911): n is a, c, g, or t
tggaccggtccggattcccgggaatcgtcgaccacgcgtccggtagaaaagaacttgggaaacctttaaatatatatattgtgatttatgctttaagaaaatgcatacttttttctaatgaagagtagttcataatatataaggggtttaaggccctgaaataacattagtgcttactcattgctctctcatcttgcctccagtcagatgttattggtatagtgaaaagaagaccagattttgaactagatctggattctctttttagtaactcaggcatgttatttaaccttctctgtgccttaggtttttaagtacaatcagtgtacccttcaaacctcacaagatgaaactcagaagagataatggatttggaagcattttgcgtggcttatattatgccacgccagtgttactgttgaagttctgttttgttcgttgttttctgtacagagcgttcagtttactcaggctgaatgttttctgacatatatctccagtatgaatttgtttatgtaaggaagagtttttcaggaagagaaagtagagaagaaaagaatgatgtaactaaatcaaaaaagaaggaaaagagaggaagtgagaaaaggggtgaggaaagagaaaggagtaagaatggggatggcaaagggcagagtaagagaaaagatggaatgagtgtatggaaaattgagaagtagagatggagagaaatggtgtggaaacatttactttttgagttgtagccctcacactacatcagtttgcttgcctgggctctctggggtcaggaaaggtgctgacttccatggaatggggcagcagggcctgctgtatttggtttgttagtactagagttgtttccccatcaccctactcactgatcatttagtgccaattncacattttatgtnctttttttttttagtggatcccagtttgtggagctagg

SEQ ID NO: 52527 - DNA, 760 bp, Homo Sapiens
  misc_feature (731)..(731): n is a, c, g, or t
ttgagggatcctggtggatgggagaaaaatggtgatcactataccaagtgggttgtacaggcctaatacagaggtctaaatgtggacctgtgggatcagatgaaagagtaaaggaattcaaacagagccttataaagtacatggaaactcaaagaagttacacagccttggctgaagcaaactgcctaaaaggagccttaatcaaaacacaactgtgtgttttattttgtattcagttgtttctcagattgataattctgtggctttgcatactgcacagcatgtgcaatttgttttgttgcttactctttagtatgtgcaatttattctgcagtttgctgtttattatacccaaaaagttaatgatatttttgagaacagttattagactagaacgcaagactcctaggttatagttacagatcccagttattatttactcactatcatttagtgggtgaatcacagtaatttccctgtaaaatgtggtacctgaagtcatatttgagattctatgaaatgtttaaatctgaacatcactccaattattaatgaaccaaatcatacgataagttactgtttgcattgaaatataatatcaaagccttttgaaatctgtaaacataaaattcctctcattttcaaatatctaaagccagttttatgttcctaaaatctcattttcttctttctaggactactatttctactgaatataatgaaaatggcantaaaataatattacataaactgtaaggtt

SEQ ID NO: 52528 - DNA, 621 bp, Homo Sapiens
  misc_feature (600)..(600): n is a, c, g, or t
gcacgaggaaagtcagagtgaaataaaagacgtgcttgtttggagcaatgatcgagtgattcgctggatcctgtcaattggccttaaagaatatgcaaacaatcttatagagagtggtgttcacggagcacttctggccttagatgaaaccttcgacttcagtgcactggcactgctgttacagatcccgacgcagaacacacaggctcgtgctgtcttggaaagagaatttaacaaccttttggtcatggggactgatagaaggtttgatgaagatgatgataaaagctttaggagagcaccttcatggagaaaaaagtttagaccaaaggacattcgtggcttagctgctgggtcagcagagactctccctgcaaacttccgggtgacttcttctatgtcttccccctctatgcagccaaagaagatgcagatggacggcaatgtatcaggaacacagaggttggattctgctacagtcaggacttactcctgctaaagtctcctgttgtttacccacactacttctacagatgattatgcagcatttgaatccaacaaagactacattttggaatccagtggaatctttaatcttgntaatacttgttatatggaccc

SEQ ID NO: 52529 - DNA, 619 bp, Homo Sapiens
gaggaaagttcctacatactggaatccaatcggaagggtcccaagcaagacagaactgcagaagggcaagcactaagtgaagcaagaaagcatttaaaagaagagacacaattacgattggatgttgagaaagaactggagatgcagatcagcatgaggcaggagatggaattggctatgaagatgctggagaaggatgtctgtgagaagcaggatgccctggtatctcttcggcagcagctggatgacctcagagctctcaagcatgaacttgcctttaagctgcagagttcagacttaggagtaaaacagaaaagtgaactaaacagtcgcttggaagagaagactaatcagatggctgctaccattaaacaacttgaacaaaggtaaaagtcctgtttctttaatgaaacactttggattgtcagtgctgaagtgaaaagaatgtgctgtacattcggcaaatagaaaatacatgaaattcttccaaattagcatcagacattctggtagaaaaaagccagttgaatgttatgtgtgttttctaaggtatgactgaaatgtttttaggaaatgtcaatcacttgactagcctttaaaaaaaaaaaaaaaaaaggac

SEQ ID NO: 52530 - DNA, 909 bp, Homo Sapiens
  misc_feature (14)..(14): n is a, c, g, or t
  misc_feature (712)..(712): n is a, c, g, or t
gagagtagcttgancaccacctctctcaaccaacctgcatctagaaagtgaattggatgcattggcaagcctggaaaaccatgtgaaaactgaacctgcagatatgaatgaaagctgcaaacagtcagggctcagcagccttgttaatggaaagtccccaattcgaagcctcatgcacaggtcggcaaggattggaggagatggcaacaataaagatgatgacccaaatgaagactggtgtgctgtctgccaaaacggaggagatctcttgtgctgcgaaaaatgtccaaaggtctttcatctaacttgtcatgttccaacactacttagctttccaagtggggactggatatgcacattttgtagagatattggaaagccagaagttgaatatgattgtgataatttgcaacatagtaagaaggggaaaactgcgcaggggttaagccccgtggaccaaaggaaatgtgaacgtcttctgctttacctctattgccatgaattaagtattgaattccaggagcctgttcctgcttcgataccaaactactataaaattataaagaaaccaatggatttatccaccgtgaaaaagaagcttcagaaaaaacattcccaacactaccaaatcccggatgactttgtggccgatgtccgtttgatcttcaagaactgtgaaaggtttaatgaagctgattcagaagtagctcangcagggaaagcagttgcattgtactttgaaataaactcacagagatctactcagacaggaccttcgcacctttgccagagtttgagcaggaaaaaaggatgatgtggaggaactgaaggacttctgaggaagacttttatacagcccccccaaaaaaccccctaaaggccgaaagacagaacccgtgacctttaaag

SEQ ID NO: 52531 - DNA, 888 bp, Homo Sapiens
ctgcattcctgacaacaaccaacagcccaagggcatccctgcctgcgagcagaatgtctccagaaaggacacccggtcagaacaggacaagtgcaaccgggagcccagcaagggccggggccgggccaccggagacgggcttgctgaccggcacaagcgggagaggagccgggccaggcgggccagcagcagggaggacgggaggccacgcaaggagcggcggccccacaagaagcacgcctacaaggatgacagcccccgccggcgcagcacgagcccggaccacacccggtcccggaggtcccacagcaaagacaggcaccggagggagcggagccgggagcggaggggcagcgccagcaggaagcacagccgccaccgccgccgaagcgagcggtcgcgctcccggtccccgagcaggcaccgcagtacctggaacaggtaatgacgggcacggcctccccacggcctgtccgggaaagaccaggacctgctcgagcctcctggccgctccttggccgctctccgtccacccctgcaaagccaagacccttctgcagccacgaatgtccacggagcccgccggcaggaaggaagacaccatgctttagagatccatctttctccactcaccgcagcgtacttggcacttcagtttcaaacacgtagtcctttaaaacttgatccgatagctttaatgcggccggtcctctctcagtcaggaaaattgcacagaccgacaagtcgtgaggatggcaaaaccttgctgcatttccccccacatgggggaatttctgtggtctgctttggcgaacctcccctggcgggacacgggtctaaggaaggggttccaggggcccaacccaaaagtcgcacccttgaggcacc

SEQ ID NO: 52532 - DNA, 912 bp, Homo Sapiens
caaaccacaatttgtatatcatatgacaatcaattgttttccaagaatatttattattttaagtacacaatttcagtgaatcttgagtttttctaggagtcccttaaagggaaattagcattccatgagccagtaaaatacctactctggtaaaacattattatggttaaaaagtaaattcaagttagttttttataaagaactataacatttattttaaacattttataataactgaaaacattaaagtgagcaaatgaaatttcaaaaccacttgtaataatgtattttataatcgcactgtgatactatataacacagtctctttgtattaaaatagtatttttttcacaagctgaaaaatatattttcctttgttgacaatgtttgtaagatgactttattttcagatctttttctccttttttgcacaaaactatgcttatggttgtgtcacagaagtgaaaatatatctttgcatttttatatctggtctgtttttcttgtttccttgtttttaacttgatatagattttcttcaaatatataatggcattttcagatatctcaccttaccatatctttccttattttcactggcatgcatttaatcactgtattacttaatgtttgattgttattatgggcatctcaaataggcagcattgaatgtaatgaacaaaaggctattttatattaggatatatgcctttgtatttcacagacagagatgatattaacactgatattttatggtgctggttattaaaatgttctttaaaaaaaaaaggcggggggacaatacgaaggggcaaggtagcgtaccggtttggaaaagggccaagggaataaaaaaagggggtaaaggagaaaagagatggagacattggggaaggacaaaaaaggaaaaag

SEQ ID NO: 52533 - DNA, 722 bp, Homo Sapiens
gaagattttatctgctcccagctgttctgggttctaagggataaaattgtggcaggcagtaccgggaagtagaagttaaagacatgcctgaatggattcttggtgtctgtagtgactctcctcccagaaggaggaagagtcaaccaattttagtacaggatggattatggagaatttggtaatctagtcggaataattatattgtattgggccataaggaaattattctgctgccaaaagtaacacctagtaagattggcattttttttagactgtgaaatgaatgaggtttccttttataatttgaatgatagatctcttctctgtacttttaatgatgattttacaggagaactttggccttatttttatactggaactgactcaaaacctcttaaaatttctacaataacagattctgtattttctttcacctagtagacataactgagccagttaatctagttttggccattctgtattttgtccagtttttctcataaaaaaacaatatttttgtatctcaatttcagcaacttccaaacaaaatgtgattatgggacctatttataataaattatggggtcaatgacaaagtactttagaaattctagggaaaatacttggcaaatatatcactgacagggaacgaatatgtaggacaattctattacttctgtacttggcataaacagcccatcttttgctcacacaacacaaac

SEQ ID NO: 52534 - DNA, 645 bp, Homo Sapiens
ctgattcaggcctcttccgatgtagccctgactgggaagtgcactcgtgagtgtgatgagtatggccactcagactcctgctggatgccggtccgcacttctccggagaggaagaagagccagcctaaactgtccactttcatgcctgttgatgaacgaggaagccaggaaaagctggccaatggggaggccgccatcatgggtgaccgcaacagaaacctcctgaacaaaaagttgacctcatcctatgagaccttcagtgcagctagtttcagcaaaaatgaggaagccaaccctgaggatattccccttacaaaaacagggaaatataagccatctcctgtcaatactctcactagaagagaagtttacctgtaggctataaaggagcaacagcaaagttctttacatgtatgaaaaggagaataaggggcaaaaaccttacaaagcaaaacgtttaatcacaaagagggggctaccaaagagacaaagctttgcctgccacttctgcctccagatcaggcctttagtgatactgccagcctgattctactgtacaatgcacaaaccatccttgttacttggatgtctaaccccttcactgattcccaacactcactttctcttccccaccccactccacac

SEQ ID NO: 52535 - DNA, 760 bp, Homo Sapiens
gcctgggtggcgagctgctgcgccacaccaggagctgcatggccgcctgtcagaggagatagaccagctgcgcggcttcattgcctcgcagggcatgggcaatggctgcgggcgcagcaacgagcggagttcctgcgagctagaggtgctgcttcgcgtaaaagaaaacgaactccagtacctaaagaaggaggtgcagtgcctccgggacgagctccagatgatgcagaaggacaagcgcttcacctcgggaaagtaccaggacgtctatgtggagctgagccacatcaagacacggtctgagcgggagatcgagcagctgaaggagcacctgcgtcttgccatggccgccctccaggagaaggagtcgatgcgcaacagcctggctgagtagaggtcccgcccagctgcagaccctccaggctggaggaccagccgccctccttccctcctggatggaagtaaaaagccaagctttctccccaccctctgtgggccacacgtgcacttgcacccaccacacacacacacacacacacacacacacacagacacacagacacatacgcacacacgtgcacacatgtacacacggatacacacacacacacacacacacacacactgcatatctgagcacgcccctcgcactgggtctcaccttgcaccttcttcaggattttatatgtgaagagatttttatatagatttttttcctttttttcaaaacactttatactttaaaaaaaaaaaaaaaaaa

SEQ ID NO: 52536 - DNA, 655 bp, Homo Sapiens
cggacgcgtgggtcgcccacgcgtccgagggagcagaaaacagtttttccagaaccccagacacagattttactggacactcactctttgattcggatgtggacatggatgactatacagaccacgaacagtgcaagtgacgtccagcctcactgaccctcttccttgggacctgccactccctgggtcggtccattttcccaggtagcaatccatccgagctgggaggagatcttcgtgcttggcagagttttcacatgctaactggactatagcagccttatttcttttttgtacaaacaaaacacagaaccattcagatgactccattgaaaacaaacaggcaaaaaataatgtcagcatggttcctgaaatccatttttgttttcattagaaaactattaataatactgtgtggtagagcaggtgtaagagctggttgtcagctgatagttttatgatgatcctcttcaaccctgaggtcttaatcgtgagatggattcttgaacctccttcctccaccaggattcgaagtaatgagagatatcatcagaaaaatgtttacggtggctgcttgtactttatgtgtgtatatcgtactgtcgagacataagtcaataaaatccacagatattaaacgaaaaaaaaaaaaaaa

SEQ ID NO: 52537 - DNA, 1062 bp, Homo Sapiens
  misc_feature (118)..(118): n is a, c, g, or t
cacaaataaaggggagcgcaggggttgcggcgggactaggagcgcggcggggccggcggcagagctgtccggctgcgcggtggcccggggggcccgggcggcagggcaagcagcgcgncctcggcctatgcgaccggtggcgccggcgcggcttctgcctggagaggattcaagatgaccaacgaagaacctcttcccaagaaggttcgattgagtgaaacagacttcaaagttatggcaagagatgagttaattctaagatggaaacaatatgaagcatatgtacaagctttggagggcaagtacacagatcttaactctaatgatgtaactggcctaagagagtctgaagaaaaactaaagcaacaacagcaggagtctgcacgcagggaaaacatccttgtaatgcgactagcaaccaaggaacaagagatgcaagagtgtactactcaaatccagtacctcaagcaagtccagcagccgagcgttgcccaactgagatcaacaatggtagacccagcgatcaacttgtttttcctaaaaatgaaaggtgaactggaacagactaaagacaaactggaacaagcccaaaatgaactgagtgcctggaagtttacgcctgataggtaaacaaatcatactccccagtcaagacttccctgacagtcccactacgagaaagctgtggtgggacagccaagtactcgtttccacaccaagactcagactttttgagccaaaaaaaagccacattcttacactgtccagcttgtaatggttaatgtaaaacttaccagatgaaccttgtgtttcagcttttttcttttccccttccccttgcttcagaggcctgatggcgtcggactattccgaagaagtggccacctccgaaaaattccccttctagaacatgtagacacttgagaaatgtttctgtttgaagaaaatagarggggaacagaagtyttaagtctgtkggmmmtgtgtcttcaraagtttgarggatgaaamctagrgwtttaatcatgattgaactktaawtccmgtaaawgtaaaasggaa

SEQ ID NO: 52538 - DNA, 807 bp, Homo Sapiens
ctcactgatacatatcccttcacacttctataatttaactctctcaactgcatgtgaaagaatcttagctgaagatgactgacagtgttatttattccatgttagagttgcctacggcaacccaagcccagaatgactacggaccacagcaaaaatcttcctcttccaggccttcttgttcttgccttgtggcaatagcttggggcttctgactgcagttcttctgagtgtgctgctataccagtggatcctgtgccaggctccaactactccacttgtgccagctgtcctagctgcccagaccgctggatgaaatatggtaaccattgttattatttctcagtggaggaaaaggactggaattctagtctggaattctgcctagccagagactcacacctccttgtgataacggacaatcaggaaatgagcctgctccaagttttcctcagtgaggccttttgctggattggtctgaggaacaattctggctggaggtgggaagacggatcacctctaaacttctcaaggatttcttctaatagctttgtgcagacatgcggtgccatcaacaaaaatggtcttcaagcctcaagctgtgaagttcctttacactgggtgtgtaagaaggtcagactttgatagatgaccactctgtcctgaccctcagatctgtcatgtatccctaaaaggagggagctggccactgggctgttggggaaagccatgagtatatagttagcaaatactgaacttttctcagatatggcattagatgcaagacaactcctagggattgatggctac

SEQ ID NO: 52539 - DNA, 684 bp, Homo Sapiens
gacaaaatcaaccccatctatgatgctctgtcctatagcagcccctctgattcctaccagggcaaaggctttgtcatgtcccgggccatgtatgtgtgagctgccatgcgcctggcgtctcacatctcacctgttgatcccttagctttcttgccaaggatctagtgccccctgacctctggccaggccactgtcagttaacacatatgcattccatttgtgatgtctaccttggtggctccactatgacccctaacccatgagcccagagaaattcaccgtgataatggaatcctggcaaccttatctcatgaggcaggaggtggggaaggtgcttctgcacaacctctgatcccaaggactcctctcccagactgtgmccttcgmccmtacctctcaccccccamtacctcgmctcccccammmtcmmmmmgccamacctmammmtmtmmtttgtcttccagtmgtmccttcccmmtcggtctgctggmgtgggcgmtgmgggctccctgctgctmmgccctgacccctcccagcmgcmgggtcccccttcccccctccccmccckgakkccacmmmcgkgggmmcgcggggckkccccgcccmcgggcgggkttkccccgccccckcckggmcgmcgccgkckccgggkcccgccccggcccggcgccccccccccmcccc

SEQ ID NO: 52540 - DNA, 583 bp, Homo Sapiens
  misc_feature (571)..(571): n is a, c, g, or t
agagcagaaagtgctaatcatttagccacttagtgatgtaagcaagaagcataggagataaaacccccactgagatgcctctcatgcctcagctgggacccaccgtgtagacacacgacatgcaagagttgcagcggctgctccaactcactgctcaccctcttctgtgagcaggaaaagaaccctactgacatgcatggtttaacttcctcatcagaactctgcccttccttctgttcttttgtgctttcaaataactaacacgaacttccagaaaattaacatttgaacttagctgtaattctaaactgacctttccccgtactaacgtttggtttccccgtgtggcatgttttctgagcgttcctactttaaagcatggaacatgcaggtgatttgggaagtgtagaaagacctgagaaaacgagcctgtttcagaggaacatcgtcacaacgaatacttctggaagcttaacaaaactaaccctgctgtcctttttattgtttttaattaatatttttgttttaattgatagcaaaatagtttatggggtttggaaacttgcatganaatattttagcc

SEQ ID NO: 52541 - DNA, 588 bp, Homo Sapiens
tgctggggactgcttgaaaagcgacacaaacgggcgtgctctctcagacacacaactcagctataaacagcagaaactctggacacaaacttttatgtaagtcacctgaaataggaatccggcagaagaccttcattaattaagaagcaaacaaaaagagagcaacccaaccaaaacaaatcacattcttgcacaaaagtgatcgttttcttccaaacaatgtgaatttaaaaggtcacacaaaagaagcaatcgggctccgccaccacaaaatgaaacccaaggtacattttcaaatcaatgtatagtagttccccccccttttccttctttccccctatcctttttctctccaccccatcccccccccatttcgttttgcttttggttgcctgaatgttgtcaccaagtgaaaaaattatttaactatatgtaaaatttctcttttaaaaaaaagttttactgatgttaaacgttctcagtgccaatgtcagactgtgctcctccctctcctgaacctctaccctcaccctgagctgtcttgttgaaaacagtaataaaaacattactttacattgtaaaaaaaaa

SEQ ID NO: 52542 - DNA, 626 bp, Homo Sapiens
  misc_feature (460)..(460): n is a, c, g, or t
tcggcacgaggcaccccttggattgggggagagtcttacaatgaataactcagaaaaaagttttcaaaataatcctagattgtaagatatctacgaccattatccatagccatatctttaaaaaaaaaaaaagaaaagtagaaaacaagaaacaaagtgtttctttacccaggccaagtgagcactaaagcttcctgtcataatgaggaggcagtgggggccactttgcttttgagacttggagtcccagtattactgggagtgccctgacccctcaggtagggacttgtcagagctccagaagacctaaggtacagtcagagctgagccacgcctttgtccatgaagagaatggggttgaaagtggagactgaggccgaggcgggtggatcacgaggtcaggagatccagaccatcctatcctggctaatacagtgaaaccctgtctttaaaaaattanccgggcgtggtggctggcgcctgtagtcccagctactcgggaggctgaggcaggagaatggcctgaacccaggaggcagagcttgcagtgagctgagatcgcgccactggactccagcctgggcgacagagcgagactccgtctcaaaaaaaaaaaaaaaaaaaaa

SEQ ID NO: 52543 - DNA, 743 bp, Homo Sapiens
  misc_feature (666)..(666): n is a, c, g, or t
tagattggtttcttggatgggattttgaatatgcatttaagaagttgggaagaatttcacagatgatgattggaggaaaagtgatgaaaagaaagacctgtgttccaggagttttctccaacttcaaacctttacgtgaatcttaaccaaagtggacatctttacatttcatgatagcttgcttttgcaatatgagtttgaaaaatcagtataagcttatgatggtgaaaagtcaacatattgagagtgataattcaattaataggatatgaacttaacgacatataaaagcaaatgagggcaggagggaatcgtgacaaaaaatatttgtgcccaattatgattaatgttttagagatgttgtgtccctgtgggcttagcatggaactaaaagttcctaagtctcaattctagttatgtgtcatttagtaactcaggaatctgcttaattgttatttctaagcttttgatgacaaaggagtgatgcagctaagggcatccttggagtgtcataaaaaacaaatttgaggttgaatgattagctgcgcagttagagtgataaaaaaatccaggtaggccttctgattcaccatgaccaagtcaggatttcttaatatttcttttctggcagcatatacaaaggcaaaattaataaataacagttgntgaataacaaactttattacgtttttataaaataaaagaatctattttgtctgtattaaaataaaaaaaaaaaaaaa

SEQ ID NO: 52544 - DNA, 542 bp, Homo Sapiens
aaaaataacaaaacttagccgggcacgttggcaggtccctgtaatctcagctacttgctaggctgaggcacgataatcacttgaaccgggaggtgggggttgcagtgagccaaaattgaaaaaaaaaaaaaaaattagggccggttgcggtggctcacgcctgtaatcccagcactttgggaggccaaggtgggcggatcacaaggtcaggaattcaagaccagcctggccaacatgttgaaaccccgtctctagtaaaaatacaaaaattagccgggtgtggggttgcacacctgtagtcccagctactcaagaggctgaggcaggagaattgcttgaacctgggaggcggaggttgcagtgaactatgattgcaccaccatactccatcctgggccacagagcaagacttcgtctcaaaaaaaaaaaaaggatttacactgtactgtaggctgcgaagtgtctaaaacacaatgtatataccttaattaaaaatactttaggggccaggcacagtggctcacacctgtagtccaagtgct

SEQ ID NO: 52545 - DNA, 482 bp, Homo Sapiens
cgattctctcagacccggggcattttagccttggttgaatcctcctggaattcacagggaagtggctttgccctctgccctcgctgctggaaggcaaggggccgttctcgccttggttttctaggttgtgttgcggcaggagctgactgcccctaggcctagatctctgcacaacttcgctcagggacacctgcctctgtgcatgtctcatggtgtgaatgtgtttcctgctcacaggtaccgttttgtgtcatgcagttactggaatgtacaaaagcagctgtgatctttgtgagagctgcacagagcaggagtctgagagctgcacagagcaggagtctttatttggttcacttctggtctgcagcaaccacttgctactaaaagatggaaaagatgtacaaaaatgtcacagccctttagaaagcgacattatcagaaatgtatgaccttcagtcctccctccctctcctatgccccca

SEQ ID NO: 52546 - DNA, 655 bp, Homo Sapiens
  misc_feature (618)..(619): n is a, c, g, or t
  misc_feature (621)..(630): n is a, c, g, or t
  misc_feature (632)..(638): n is a, c, g, or t
  misc_feature (640)..(640): n is a, c, g, or t
  misc_feature (642)..(642): n is a, c, g, or t
  misc_feature (652)..(654): n is a, c, g, or t
tagcgaggcctgggtggcgttccagcacgaggaggagctgtaccgagaggctcgggagtgtctgaccctgctctctcagcgcctgggctctcaaaagttcttctttggagatgcccctgcctccttggacgccttcgtcttcagctacttggccctgctgctgcaggcaaagctgcccagtgggaagctgcaggtccacctgcgtgggctgcacaacctctgtgcctattgtacccacattctcagtctctacttcccctgggatggagctgaggtaccaccgcaacgccagacaccagcaggcccagagactgaggaggagccataccggcgccggaaccagatcctatctgtgctggcaggactggcagccatggtgggctacgccttgctcagcggcattgtctccatccagcgggcaacgcctgctcgggccccaggcacccggaccctgggcatggctgaggaggatgaagaggaatgatttgtcctcacgctcccaagactggtttttctactctcatgcattccagaggcccccgtgcctcctcgttgttggtacagccggacacggggtgctgccacccagaataaagccactcacactgactgggaaannannnnnnnnnnannnnnnnananaaaaaaaaannna

SEQ ID NO: 52547 - DNA, 682 bp, Homo Sapiens
  misc_feature (555)..(555): n is a, c, g, or t
  misc_feature (595)..(595): n is a, c, g, or t
tatgtgtctttgacagctagtgtctagtgtatgaaagtggaaaaggacatttctgtagtagctgttaagatgtatgcagttgtcctatcacagttatattagaaataacaactagtgtggaaagtaacccacattctgttcaggatacttttgttttaaaaggctaaaatgtttgtgtgctttaaaattcttaatgaattcactggcatgagtaattttatgccgggaaaatctgatttgtggtctatttaattacaaagagattgtgatggtgataatttgaataccatctttctatgaaaagctgtgtatattaattttaatctctagggccttttttcaataacttgaaaatcacagcctcatcattagcaactttatatacacagctttaaaaaatttgctttaaactgtttcagagcttcttccctaagccataaactgtctcacctaaacaagatagacctcaataaaagacataatatttctccacctggcagaaaagtaactgccaagtaagattaagaaataagttgagcatttctggagtatatntctcataattctgcagagacttccagtttattgcatatantgcagtaagtgtatatattatgcagtttctctaagtggaaaaacttgacatgactttaatagtgtaaaacatgaaatgccggtgagc

SEQ ID NO: 52548 - DNA, 605 bp, Homo Sapiens
ttcatgatcgacctcaaccaggtggcgaaagcagtgaacaatgccactgcacagtcgctggtccttattgatgaatttggaaagggaaccaacacggtggatgggctcgcgcttctggccgctgtgctccgacactggctggcacgtggacccacatgcccccacatctttgtggccaccaactttctgagccttgttcagctacaactgctgccacaagggcccctggtgcagtatttgaccatggagacctgtgaggatggcaacgatcttgtcttcttctatcaggtttgcgaaggtgttgcgaaggccagccatgcctcccacacagctgcccaggctgggcttcctgacaagcttgtggctcgtggcaaggaggtctcagacttgatccgcagtggaaaacccatcaagcctgtcaaggatttgctaaagaagaaccaaatggaaaattgccagacattagtggataagtttatgaaactggatttggaagatcctaacctggacttgaacgttttcatgagccaggaagtgctgcctgctgccaccagcatcctctgagagtccttccagtgtcctccccagcctcctgagactccggt

SEQ ID NO: 52549 - DNA, 550 bp, Homo Sapiens
  misc_feature (23)..(23): n is a, c, g, or t
cgcaccagtcgtcagaccccagnacctccccacctcccacctgcaccagcaccaacgggaacagcctgcaagcgatatctggcatgattgttcctcctatgtgaaagaattgccttgaagaattgtattaatgaagaggttggattctgctacagagagtaatctgatacaagtcccagagtggaacttttaactcaggcctttttaagaggaatcacaataactgcagatttttaaacaaacaaaatcaccgaccttgcaaatactgaaattggaagagggatctgcaagtgcagggtgttggttaaagttgtacctcccaagtatttgggggatatatttattctgtattgacaaaagcaaatccactttttctttttctttttttttttaagcttaattctgcaatcatttgtcttttataaaccgtaaagctctatacaagggacactataaataagactccatgttttaatttatgatgtttttaaagctgtgtaaaggaagaatgaagtggtgatatttacaaaaaagtaaaaaaaaaaaaaaa

SEQ ID NO: 52550 - DNA, 884 bp, Homo Sapiens
gctgattgccgctcggaaacacatggacaaggtggtgcagatcgtggagatcatgcagcaaggttctcagcttccttgcttccatggctccagcaccattcgaaacctcaaagagaggttccacatgagcatgactgaggagcagctgcagctgctggtggagcagatggtggatggcagtatgcggtctatcaccaccaaactctatgacggcttccagtacctcaccaacggcatcatgtgacacgctcctcagcccaggagtggtggggggtccagggcaccctccctagagggcccttgtctgagaaaccccaaaccaggaaaccccacctacccaaccatccacccaagggaaatggaaggcaagaaacacgaaggatcatgtggtaactgcgagagcttgctgaggggtgggagagccagctgtggggtccagacttgttggggcttccctgcccctcctggtctgtgtcagtattaccaccagactgactccaggactcactgccctccagaaaacagaggtgacaaatgtgagggacactggggcctttcttctccttgtaggggtctctcagaggttctttccacaggccatcctcttattccgttctggggcccaggaaatggggaagagtaggttctcggtacttaggacttgatcctggggttggccactgggcatgctgctgcccaactctacccctcccagggacctacccctcccagggaaccgaaccccgggccccagctcccccttgcctggcgggccccctccctggggcccctggcacttgcttgagggtcccccaatcatggggcaaggaaaggggaatttccccacaagccccttctatgtgtaactggaagggtcccctgtc

SEQ ID NO: 52551 - DNA, 769 bp, Homo Sapiens
gctttagggacctgctgtttcctagcgcagccatgtgattaccctctgggtctcagtgtcctcatctgtaaaatggagacaccaccacccttgccatggaggttaagcactttaacacagtgtctggcacttgggacaaaaacaaacaaacgaaaaacatttcaaaaggtatttattgagcacctgcaggcgtgacctgacagcccaagggtgggtggggtgagggcttgaggacttgggcgggacacaggctccaaactggagcttgaaatagtgtctgatgaatgttaaattatctatctatctatttatttatttatttgagacagggaaagggtctccctctgttgccaaggctggagtgcagtggcgcaatcttaactcattgcaacctccaccttctgggttcaagcgattctctttattcagccccgggagtggcgcgcgccaccacgcccagctaatttgtgtattttcagcagagacggggtttgccatgctggccaggctggtctcgaactgctggattcaagtgatccgcccatctccgtctcccaaagtgctgggaattacaggcgtgagccacaaacccggctgattaaagttaaataaatactagttcccttctcgtccaaaggagcagggaatgggaaccgggaaggcacgaagtctctaaagcatccagaagacccctacaccagggtctggtccgtcctattcgccgcagctttctgttccgctgcaacccatttttccagacagtaaaacg

SEQ ID NO: 52552 - DNA, 877 bp, Homo Sapiens
  misc_feature (58)..(58): n is a, c, g, or t
  misc_feature (94)..(94): n is a, c, g, or t
  misc_feature (96)..(96): n is a, c, g, or t
  misc_feature (319)..(319): n is a, c, g, or t
  misc_feature (502)..(502): n is a, c, g, or t
  misc_feature (529)..(529): n is a, c, g, or t
  misc_feature (593)..(593): n is a, c, g, or t
  misc_feature (600)..(600): n is a, c, g, or t
aggtggtggaagtaaacctcagattgattgaatctgaggagcttcgtacagtagctcnccccggagtgctcttgacattttgggtatgccactntntcattgttcagtactttcccacatactacaggacatttataggtccttcacccacaaaatgccatttgagcctgcaaatcctcgtaacagccaaaaaatgcacagcatattttcagatgccccttagactgctaatactacctctggttgaaaaccactatcagggaaaatatttctaatccctgcctctgtaataccatattctgtacttttcttcctattntactctgccatgccctcatgttttcattggtatctctctgtcatctttcatctctactaggcaataagaatcttagggatcacagattgactcttggctgcgtgcggtagctcacacctataatcccagcacttgagaggccaaggtgcgcggatcacttgagctcgggagttcgagaccagnctgggcaacatggtgacaactcatctncaccaaaaataccaaaaattagccaagcgtggtggcatgccccgacgcccagctctcgggaggntgagcangagatcacttgacctgggagcgaggtacaggagccaatagacactgactgcactagcacagacgagacttgctcaaaaaaaaaaataaaactgagggggccggaccaatcgcctatggagcgatacattaatggcgcgttacaacgtggatggaaaactgcgtaccaactaatcgctgagacatctcttctgcagtgccgatacggtaatcggtaacttgtaacagcctgttaacattgcgaatggaatccttttataaagatgaccggagggtcgg

SEQ ID NO: 52553 - DNA, 765 bp, Homo Sapiens
gaggtgaagctgttggagctgcaggagatggtgttgcggcttgtggcagctacagcgaggggcacggcaaattcctggccgctgcccggaaccctgctgctgaacccagtccaggagccccagccccccaggagctcggggctgccgacaagcatggtgatctttgtgaggcgagcctcaccaacagcgtggagcctgcacaaggagaagccagggagggttcttcccaggacaaccctactgcacagccagtcctgcagctccttggtgagacgcaggaccaccaggagcacccaggcttgggcagcaactgctgtgtgccatgcttttgctgggcttggctgccgagaagaaggagataaacaccaccatcatcaaagagctgctcaagaaatttttaaaaacgaaacaaagttatggggttaatctcctacacaattcatttacttcatttgaatgttagagctactcatgattatttgtgtttctaatttatagtttaagtttatttgtaaaaagttaaaagagagtgggtctctgtgcctctcactgatgttcactctggcatcctttagcatttttcttttttcatttcataattgtaggtcattagcatgcatatcgagtttgcccttacgtggtgggagttcaaacacacaaagacccactctttgcacaaaactgttctcgctggtttggaataggctcccgtgcttttttaatgttattgcagcatggatgttcattacagaattcagataaaat

SEQ ID NO: 52554 - DNA, 651 bp, Homo Sapiens
aaatggcggaaccgccgagccccgtgcactgtgtcgctgccgcggcccccaccgccaccgtctcggagaaagaaccgtttggcaagctgcaactctcctcccgggaccctccggtttctctgtccgccaagaaggtccggactgaggagaagaaggcaccgcggagagtgaacggagaagggggcagcggcgggaacagcaggcagctgcagccgccggcagcaccttcgcctcagagctatggcagccccgcgtcttggagctttgcccctctgtctgctgctccctccccgtcctcttctcggagcagtttctctttctccgctggcacggccgttccctcctcagcctccgcttccttgtctcagccggtgccgcgcaaactgctggtccctcctacgctgctgcacgctcagcctcaccatctcctcctgcccgccgccgccgccgctgcctcggctaacgccaagtcgcgcagacctaaggagaagcgggagaaggagaggaggaggcacggtctcggtggggcccgagaggccggcggggcctcccgggaggagaacggggaggtgaagccgctgccccgagataaaatcaaagacaaaattaaagagagagacaaagaaaaagaaagagaaaaaaaaaaaaaaa

SEQ ID NO: 52555 - DNA, 712 bp, Homo Sapiens
gcccatcggagaccccaggcccccgcccggcaggacctgcaggggacgagccagccgagagcccatcggagaccccaggccccagcccggcaggacctacaagggatgagccagccgagagcccatcggagaccccaggcccccgcccggcaggacctgcaggggacgagccagccgagagcccatcggagaccccaggcccccgcccggcaggacctgcaggggacgagccagccgagagcccatcggagaccccaggccccagcccggcaggacctacaagggatgagccagccaaggcgggggaggcagcagagttgcaggacgcagaggtggagtcttctgccaagtctgggaagccttaaggaaaggagtgcccgtcggcgtcttggtcctcctgtccctgctgcaggggctggggcctccggagctgctgcgggctcccctcaggctctgcttcgtgacccgtgacccatgacccacagtgctggcctcctgtggggccactatagcagccaccagaagccgcgaggccctcagggaagcccaaggcctgcagaagcctcctggcctggctgtgtcttccccacccagctctcccctgcgcccctgtctttgtaaattgacccttctggagtggggggcggcgggcagggctgcttttcttagtctgataccaagcaaggccttttctgaataaattcatttgact

SEQ ID NO: 52556 - DNA, 603 bp, Homo Sapiens
ccagccgtctagcacccagtgatcccatgcctttgggaatcccaggatgctgcccaacgggaaatttgtacattgggtgctatcaatgccacatcacagggaccagccatcacagagcaaagtgacctccacgtctgatgctggggtcatcaggacggacccatcatggctgtctttttgccccaccccctgccgtcagttcttcctttctccgtggctggcttcccgcactagggaacgggttgtaaatggggaacatgacttccttccggagtccttgagcacctcagctaaggaccgcagtgccctgtagagttcctagattacctcactgggaatagcattgtgcgtgtccggaaaagggctccatttggttccagcccactcccctctgcaagtgccgcagcttccctcagagcatactctccagtggatccaagtactctctctcctaaagacaccaccttcctgccagctgtttgcccttaggccagtacacagaattaaagtgggggagatggcagacgctttctgggacctgcccaagatatgtattctctgacactcttatttggtcataaaacaataaatggtgtcaatttc

SEQ ID NO: 52557 - DNA, 1041 bp, Homo Sapiens
  misc_feature (5)..(5): n is a, c, g, or t
  misc_feature (65)..(65): n is a, c, g, or t
  misc_feature (1035)..(1035): n is a, c, g, or t
ccggntccggaattcccgggatgcgccggcgacctgaggggagagggaacgcagctgaaagcgtngaactgtacctgtcatttactccatcctttatagtgatgctacaggacgaagaggaatggataaaaacattggcgagcaactcaataaagcgtatgaagccttccggcaggcatgcatggatagagattctgcagtaaaagaattacagcaaaagactgagaactatgagcagagaatacgtgaacaacaggaacagctgtcacttcaacagactattattgacaagctaaaatctcagttacttcttgtgaattccactcaagataacaattatggctgtgttcctctgcttgaagacagtgaaacaagaaagaataatttgactcttgatcagccacaagataaagtgatttcaggaatagcaagagaaaaactaccaaaggtaagaagacaagaggtttcttctcctagaaaagaaacttcagcaaggagtcttggcagtcctttgctccatgaaaggggtaatatagagaagactttctgggatctgaaagaagaatttcataaaatatgcatgctagcaaaagcacagaaagaccacttaagcaaacttaatataccagacactgcaactgaaacacagtgctctgtgcctatacagtgtacggataaaacagataaacaagaagcgctgtttaagcctcaggctaaagatgatataaatagaggtgcaccatccatcacatctgtcacaccaagaggactgtgcagagatgaggaagacacctcttttgaatcactttctaaattcaatgtcaagtttccacctatgggacaatgactcaactttcttacatagcactccagagagacccggcatccttagtcctgccacgtctgaggcagtgtgccaagagaaatttaatatggarktcagagacaaccagggaactttgttaaamagaagaaacttatttgaaatcagggattgacccmtagctymgyatacaaaccttaaamactgacaancaagcc

SEQ ID NO: 52558 - DNA, 610 bp, Homo Sapiens
tctatgttccgaaacacagagtagtgtccacatgtgagcttttcacattaccttatgtatacaacaggagctgcgttgttttcttctttttcttttcctttatctgttgtccaacaacagtgctgactgtccggataagagctggcaagtgcccttaggatgccgcatgggaaaaatcggttatcataatttcaaagtataaatatatttattaagtagcgctgcggctaagaaggaagagtgaggggtctgtccatggggtggcagtgatttcacacccgcctttcttgaatggcttcgtgttactcagccgtgccctggcaggaatggaactccatcagggaacagggcagctctgtttgaatggggtgaaaaacagcaaaattaattcttagcaagctccttgttctctactgttcaccgggacctggctggcaaatgacttagctattagtatatttaaaaactgttcaaaagcaaaagagaaggaacaggaatgaaaggaaaccttcccttaactctttctgcttcccatagcaggtctggttcctgctccccgcctaggacaggagctgtctggagctccacctttgcaaaaaaaaaaaaaaag

SEQ ID NO: 52559 - DNA, 761 bp, Homo Sapiens
aaagcatgttaagtatggcaaatttgattgtaatgatgtacttctttttttaaaaactacagatgggtgacgaacaatgacagttttgcaccagaggacccatgcttcttttgtgatgtttgcttccgaatgctgcactatgattcagaaggcaacaaactgggggcattccttgcttatccttatgttgatcctggaacctttaattaagaatagctacactcacaaaaataccccctcatgaaataactgttctcttggatggttaccttatttctaagaaacgccactgaggaacaggatccactttgaacagtccgctaaagctatcaaaaaaaagtccaaatcacagattttcttataatgatagtatttaaatgtttataacatagtttaattttatatttattccagatagtatttaatttagtgctttttacccattttgagttgagttgtagtactttatatattctgactttaaatcctttgtcagacacacatattctttctcccaatccatgccttccctattcattctctgtccagagttttttgctaaagatagaattattaatgatacatcaagtagtggaagtgttttgaaaattctttgaagaatgtgagagctacaccttctaccatgaggcttccaaggtaaagatccttcaaataactgtaatggaaactagggagaatgaattatttacaaataagacaaaattaatagctttgggattatttattttttgagacaaaat

SEQ ID NO: 52560 - DNA, 991 bp, Homo Sapiens
cgtgcacccactgcctcttcccttctcgcttgggaactctagtctcgcctcgggttgcaatggaccccaactgctcctgtgccgctggtaagggacgcccgggttctgtgccttgggatgccaaattcccagacaccatagagagtgtccctgggtttgaggaggtcgtattttgctatcagaggtaaaggggactcctttattggtccagtgctttcctgttggccaagctcctgagggcattttcctcctccctgttcctctatgtcagagttgagggtcctgaggctcaaggctgtcctgctccacgtcacctggttggtcacagggctgctggctgagccccaattctctaacctgactctgagctaccggattggataggagacattggataggaggggacattgcctcttccaggttcaggacagaaagtcgaagtcttcctgggccatgtctgcagcctgggactttcctttggagtagaaataggagggtgcttggttttcccagcatgaatggagaggacatggggcttctcttcctctgctctgagtgggaaaggagctctgagggctggctctgcacagagaagggggaagtggacactcattgacccactgctgtaccttctgcatctcactcaccgttcactggctttttctcttctagcaggtgtctccttgcaactgcgccaggtccttgcaagtgcaacagagtgcaaatgcacctcctgcacgaacgagtgagtgcggggcatctcaggaatctggggctgtgggttaggttgggacggaaaccaagtgtgccctgagtgcgttcttctggggaaaccggccttccctttgtcgctgtaaggatggaactgcctgtatagtcttctgactttccaaggcttatgttacgttggtgcctctttctcaatgtgagagccattcaatgtcacccagtatgctcctgacacaaccttgcctcatcaatagggtcccgt

SEQ ID NO: 52561 - DNA, 965 bp, Homo Sapiens
  misc_feature (691)..(691): n is a, c, g, or t
  misc_feature (744)..(744): n is a, c, g, or t
  misc_feature (830)..(830): n is a, c, g, or t
  misc_feature (836)..(836): n is a, c, g, or t
gaagtttcagttgagcactttgtttggaaagttgtccaaggctggagttgtgagagctgggaaagacttcacaagcttctctaattcaagtccttgtttcacatatgagaatgcagaggccctgagaagttgattcccaggcctgcatgctggcctggaactagagcctgggtctcctcttgctttttccagctgtctgcccaggtagctccccaaggcaggcatggaggcagagctgctttgggttccagggggcaggtttgggctggggcctgctgtgtgaccacagtctcccatcttggattgaagctacatcgctgtgtgcatctaactcttgattcacggtctgaccgacgccttggtttctggagaactgccctcgtttatggaagagtcactgtcatcaggagccatcccagggagaggctcagtgggaagtgtaaaggtggagcaagtaaaccggctccagaagagaaggcgaagaaggactatttctgtttagatttgcttaaccgcattttcactttcttgggaacccctgatggagttcaaggtcatagaagagaagaaatcagacactgctacaggactcttgctcttggttcagattattcaatgggaggggagaagagagtagtcgcaagtgattgttgtagattttgtctcagctttttgtttttctttgtatcanacctggttttgagatcatacactgttacagagaaagagaggaggcatattatnaacgtgtggacttcagtgttattccttctcttcaaaatgatgttccaggtgtctaagaggggtgaggtatgtcattttacatgaanggttangaaataaaacagaaaagtgccctcctataaaaaaaaaaaaaaaaaaactccagtttttttttttttttttttggttgagccccgggaaccttttattgatgggaacatgaccagggggcgggctcccct

SEQ ID NO: 52562 - DNA, 540 bp, Homo Sapiens
atgactggttgaagaagttttctgggaagacgcttgaagagaataaagaggaagaagggtcagagcctcccaaagcagagacccaggagggagagcccattgctaaaaaggcccgctcaaatcctcaggtgtacatggacatcaagattgggaacaagccggctggccgcatccagatgctcctgcgttctgatgtcgtgcccatgacagcagagaatttccgctgcctgtgcactcatgaaaagggctttggctttaagggaagcagcttccaccgcatcatcccccagttcatgtgccagggcggtgatttcacaaaccacaatggcactgggggcaagtccatctatgggaagaagttcgatgatgaaaactttatcctcaagcatacgggaccaggtctactatccatggccaactctggcccaaacaccaatggctctcagttcttcctgacatgtgacaagacagactggctggatggcaagcatgtggtgtttggagaggtcaccgaaggcctagatgtcttgcggcaaattg

SEQ ID NO: 52563 - DNA, 884 bp, Homo Sapiens
  misc_feature (535)..(535): n is a, c, g, or t
  misc_feature (668)..(668): n is a, c, g, or t
  misc_feature (700)..(700): n is a, c, g, or t
ggacgcgtgggtcgaagatcccacatttaaagtatactttgacactgagaacaaagagacagttatatctggaatgggagaattacacctggaaatctatgctcagaggctggaaagagagtatggctgtccttgtatcacaggaaagccaaaagttgcctttcgagagaccattactgcccctgtcccgtttgactttacacataaaaaacaatcaggtggtgcaggccagtatggaaaagtaataggtgtcctggagcctctggacccagaggactacactaaattggaattttcagatgaaacattcggatcaaatattccaaagcagtttgtgcctgctgtagaaaaggggtttttagatgcctgcgagaagggccctctttctggtcacaagctctctgggctccggtttgtcctgcaagatggagcacaccacatggttgattctaatgaaatctctttcatccgagcaggagaaggtgctcttaaacaagccttggcaaatgcaacattatgtattcttgaacctatntatggctgtggaagttgtagctccaaatgaatttcagggacaagtaattgcaggaattaaccgacgccatggggtaatcactgggcaagatggagttgaggactattttacacggtatgcagatgtccctctnaatgatatgtttggttattccactgaacttangtcatgcacagagggaaaagggagaatacacaatgggagtatagcaggtatcagccatggtttaccatccacacaagaagacgtcattaataagtatttgggaagctacaaggtcaacttccctgtttaaaaaagaaaaagccaaagaactaacttttgccttactggggaatttgactgaact

SEQ ID NO: 52564 - DNA, 929 bp, Homo Sapiens
  misc_feature (929)..(929): n is a, c, g, or t
ggtggcaattcggacgaggccaaacgtatctgagcatggaatacccctgccttgttttttggatgccgttgatatcccatgaaatcattttccatggaaaacctatttggaaaatgatgggctagagcatgggttggccaaattttctggaaagagccggataaatatttcaactctatgggccatacagcctctgtcacaaccactctgccattgcatcttgaaagcagtcgtagattgtacatacacaaatgagcatgactgtgttccagtaaaactttatttacaaaaataggccatagtttataaacacctggtctagactgtgctttccactaaccactagccacagggggctgtttaaatgaaaattcatttaagttaaataaaatgaagaattcacttcctcagttgcattagccacatttcaaatgctcagcggccacatgtaactagtagcaattgtgtgggacagcacagatatagaaaacttccagcatcacagaaagttctgttggacaaggctgacctagagcaggtctgtccgatggaaacacagttagagccacatttaaaaagccaaaagaggccaggcacggcggcccatgcctgtagtcccagcactttgggagactgaggtgggcagatcattttgagctcaggagttcaagaccagtctgggcaacatggccaaaccttgtctctacaaaaaataccaacattagcctgggcatggtgcccatgtgcctgggggttccagctactcaggaagtctggagtgggaggatcactggagccagggaaagtcaaaggctgcagccaagcccggaattgagcttctccagcccgggatgacagaagggataccctgggctccaaaaaaaaaaaaaaaaaaaacttccagggcatctaatggcccgggggcggan

SEQ ID NO: 52565 - DNA, 685 bp, Homo Sapiens
gtcttccctgtctccagcagcatccagcggttgctggaccagggcaagagctccctggacgttcggattgcctgtgagcagtgccaggagagtggcgccagcttggttctcctgggcaagaagaagaagaaagaagaggagggggaagggaaaaagaagggcggaggtgaaggtggggcaggagcagatgaggaaaaggagcagtcgcacagacctttcctcatgctgcaggcccggcagtctgaagaccaccctcatcgccggcgtcggcggggcttggagtgtgatggcaaggtcaacatctgctgtaagaaacagttctttgtcagtttcaaggacatcggctggaatgactggatcattgctccctctggctatcatgccaactactgcgagggtgagtgcccgagccatatagcaggcacgtccgggtcctcactgtccttccactcaacagtcatcaaccactaccgcatgcggggccatagcccctttgccaacctcaaatcgtgctgtgtgcccaccaagctgagacccatgtccatgttgtactatgatgatggtcaaaacatcatcaaaaaggacattcagaacatgatcgtggaggagtgtgggtgctcatagagttgcccagcccagggggaaagggagcaagagttgtccagaaaagacagtggcaaaatga

SEQ ID NO: 52566 - DNA, 530 bp, Homo Sapiens
ttcaaacctggcaaatcatcacagaatccatactggagagaaaccgtacagatgaaatgtgtgtggtaagatctttagtaataattcacaccttgcacagcatgagataattcattcatgagagagttcttacaaactgagtatggcaaactcttcatgctaagttctagcattaatcaacatcagagattccatactaaagagaaatcatagcaatgtatgtgaatcaggtctcttgaggcctgccaaatgactagatatcaaaacatacatcttggatgaaaccatacagatggattatgtatgctgaggctattattcaaggaccattactatggaacatgataagatttacacaagcgataattcagtctctagttctccaatatttatgatactgcatgctgcagaaaagtcacagctccaaatacgttgaatctcatgacgcgatgcatgtcgaaggtccaagggcatgtggaaatggtcagttatattcaggcaattaaaaaacctaattatatgggggtttt

SEQ ID NO: 52567 - DNA, 566 bp, Homo Sapiens
gcgtcgccagtgatggagcagatactcaaggaggcactgggctcagcctgggcattaaagggacagagtcagctcacacgctgtctgtgactaaagagggcacagcagggccagtgtgagcttacagcgacgtaagcccaggggcaatggtttgggtgactcactttcccctctaggtggtgccaggggctggaggcccctagaaaaagatcagtaagccccagtgtccccccagcccccatgcttatgtgaacatgcgctgtgtgctgcttgctttggaaactgggcctgggtccaggcctagggtgagctcactgtccgtacaaacacaagatcagggctgagggtaaggaaaagaagagactaggaaagctgggcccaaaactggagactgtttgtctttcctggagatgcagaactgggcccgtggagcagcagtgtcagcatcagggcggaagccttaaagcagcagcgggtgtgcccaggcacccagatgattcctatggcaccagccaggaaaaatggcagctcttaaaggagaaaatgtttgagcccaaaaaaaaaaa

SEQ ID NO: 52568 - DNA, 1147 bp, Homo Sapiens
  misc_feature (720)..(720): n is a, c, g, or t
  misc_feature (815)..(815): n is a, c, g, or t
  misc_feature (879)..(879): n is a, c, g, or t
  misc_feature (938)..(938): n is a, c, g, or t
  misc_feature (946)..(946): n is a, c, g, or t
ccacgcgtccgcctgaagatggcaccctctaccgaataaacagatttagctcgatcacagcacatccagagcgctgggatgtgtccttcttcacggggggaccgctctgggctctggactggtgcccagtgccagagggggcaggagcctcgcaatatgtggctcttttctccagccctgacatgaatgagacacacccactgagccagcttcattcgggtcctgggctgctccagctctggggccttgggaccttgcagcaagaaagctgtcctggcaacagggcccactttgtctatgggattgcttgtgacaacggctgcatctgggacctcaagttctgccccagtggagcatgggaacttccaggcacccctcggaaggctcctctcctgccccggttgggtctcttggctctggcctgctcagacgggaaagtactgctattcagtctaccccatccggaggccctgctggctcagcaacccccagatgcagtgaagcctgccatatataaggtacaatgtgtggcaactctgcaggtggggtctatgcaagctacagacccctctgagtgtggtcagtgccttagcctggcctggatgcctaccaggccccaccaacacctagctgctggatattataatggcatggtggttttctggaaccttcccactaactcacccctgcagcggatacggctctctgatggctccttanagctctacccccttcagtgtttcctagcccatgaccaggctgtgcgtacccttcaatggtgcaaagctaacagccatttccttgtcttctgcggngaagtgacccggaaaatcaaattctggggaccttcgacgtccttacgaacccataaactctatncagcgctttcttgagtacagaactggcctggctgctttccctacaatggtgtccactgntggctcanggacacctgctatgcctccttatgggactcctggggggaatcattaaaattgacgcctgggttaccctttgggttccaagggcctaccttcactgggtcttccaaaaagggccaccgttttgggaagacttttccaggaatcccgcatgtgggctttggggaacaataacttggcgggggggggaaaatatttcccggggc

SEQ ID NO: 52569 - DNA, 1001 bp, Homo Sapiens
cagcactggccagtttggagtctgtccatcctgcaggccacaagctctggatgaggaacttgaggcaagtcaccagcccctgatcatttcgcctaaaagagcaaggactagagttcctgacctccaggccagtccctgatccctgacctaatgttatcgcggaatgatgatatatgtatctacgggggcctggggctgggcgggctcctgcttctggcagtggtccttctgtccgcctgcctgtgttggctgcatcgaagagtaaagaggctggagaggagctgggcccaggctcctcagagcaggaactccactatgcatctctgcagaggctgccagtgcccagcagtgagggacctgacctcaggggcagagacaagagaggcaccaaggaggatccaagagctgactatgcctgcattgctgagaacaaaaccacctgagcaccccagacaccttcctcaacccaggcgggtggacagggtccccctgtggcccagccagtaaaaaccatggtccccccacttctgtgtctcagtcctctcagtccatctcgagcctccgttcaaattgatcatcatcaaaacttatgtggctatttgacctttgaatacgggaatttttacagtttttcaaaaacttaccacataaccaaaaaccacattggatcaccctttccacccaaaaaaacaagaaaaaagaacgacgacaactcgaaaacaaaaagggggggcacgaccaaaaagagcatccccacaagagaggccccacaagaaataaaggcgagtgcacgcaaaatatgcggtacaaaacaacgggcggccaccaaaaagagggcacgaaccatgatagcacaagagcaaggagcgtaggtgcgccaacctcataccaaaccagcgacgcagctggtggacaacacaattgaagagaaggcaaatagaggggaacaagacccacacaaagtacagggagaggagacaataaggagagcacgacatacg

SEQ ID NO: 52570 - DNA, 700 bp, Homo Sapiens
  misc_feature (679)..(679): n is a, c, g, or t
gggacaccgaggcccagcagaccacgctacacccacttgtgggccgtgtctttgtgcacaccttggaccatgagacgtttctgagccttcctgagcatgtcggtcacagcctacaatcgggacagctttgataccactcggcagaggctggtgctggagattggggacccagaaggccccctgctgccataccaagccgagttcctggtgcgcagccacgatgcggaggaggtgctgccctcaacacctgccagccgcttcctctcagccttggggggactctgggagcccggagagcttcagctgctcaacgtcacctctgccttggaccgtgggggccgtgtcccccttcccattgagggccgaaaagaagggctgaagagagacctggctacctccgacatccagatggtccaccactgcaccatccacgggaacacagaggagctgcggcagatggcggccagccgcgaggtgccccggccactctccaccctgcccatgttcaatgtgcacacaggtgagcggctgcctccccgcgtggacagcgcccaggtgcccctcattctggaccagcactgacagcccagccagtggttccaggtccagccctgacttcatcctcccttctctgtccacaccacgagtggcacatcccacctgctgattccagctcctnggcctcctggaacccaggctg

SEQ ID NO: 52571 - DNA, 991 bp, Homo Sapiens
cccgggatcaaggccacagtcaatggacttcctgagaaggacagagagacggacacctcggccctggctgcagggagttcccaggaggtgacgtatgctcagctggaccactgggccctcacacagaggacagcccgggctgtgtccccacagtccacaaagcccatggccgagtccatcacgtatgcagccgttgccagacactgaccccatacccacctggcctctgcacctgagggtagaaagtcactctaggaaaagcctgaagcagccatttggaaggcttcctgttggattcctcttcatctagaaagccagccaggcagctgtcctggagacaagagctggagactggaggtttctaaccagcatccagaaggttcgttagccaggtggtcccttctacaatcgagcagctccttggacagactgtttctcagttatttccagagacccagctacagttccctggctgtttctagagacccagctttattcacctgactgtttccagagacccagctaaagtcacctgcctgttctaaaggcccagctacagccaatcagccgatttcctgagcagtgatgccacctccaagcttgtcctaggtgtctgctgtgaacctccagtgaccccagagactttgctgtaattatctgccctgctgaccctaaagaccttcctagaagtcaagagctagccttgagactgtgctatacacacacagctgagagccaagcccagttctctgggttgtgctttactccacgcatcaataaataattttgaaggcctcacatctggcagccccaggcctggtcctgggtgcataggtctctcggacccactctctgccttcacagttgttcaaagctgagtgagggaaamaggacttacgaaaacgtgtcagcgttttctttttaaaatttaattgatcaggattgtacgtattcaaggtgtaaaatgtgataatttgtcgyacacgtacat

SEQ ID NO: 52572 - DNA, 723 bp, Homo Sapiens
  misc_feature (50)..(50): n is a, c, g, or t
  misc_feature (615)..(615): n is a, c, g, or t
ggccactcggggctgacagcggcgacccgttccaaagtaaaaaggggttnggggacccgtttagtggaaaagacccatttgtcccctcctctgcagctaaaccttctaaggcctctgcctcgggctttgcagacttcacctcttttggcaatgaggagcagcagctggcgtgggccaagcgggagagcgagaaggcggaacaggagaggctggcgcggctgcggcggcaggagcaggaggacctggaactggccatcgcgctcagcaaggctgacatgcctgccgcctaggcgagggccgtgtgtaggcgggacagggcacgggcgggttccagagagggggcagtgcagatgtctatatatacacacacacaccgtcgccaccgtactccaaggaccgggactcgggggcttgttcagggtgagcagactcggctgcaagacctggaaaggtcacatctcctggggaagcccttacagaggccttggccaccacttctgcaggtccgtctctccactgtgccatcccccccggggctgactgcctcccgctcttcctctggggacgaacacacagcggtcagtcgaggagaggaagcacccagggcttccccgnctcctccctactcatagcgggagacttccccggccggcctcccaagcatcagtcagacactcccccagtggtgtatgcactcggtgtataacatgaagtttgaatcga

SEQ ID NO: 52573 - DNA, 620 bp, Homo Sapiens
cctgggagggggcgggaaatacaaggaatattttttaaagaggattctcataaggaaagcaatgactgttcttgcgggggataaaaaagggcttgggagattcatgcgatgtgtccaatcggagacaaaagcagtttctctccaactccctctgggaaggtgacctggccagagccaagaaacactttcagaaaaacaaatgtgaaggggagagacaggggccgcccttggctcctgtccctgctgctcctctaggcctcactcaacaaccaagcgcctggaggacgggacagatggacagacagccaccctgagaacccctctgggaaaatctattcctgccaccactgggcaaacagaagaatttttctgtctttggagagtattttagaaactccaatgaaagacactgtttctcctgttggctcacagggctgaaaggggcttttgtcctcctgggtcagggagaacgcggggaccccagaaaggtcagccttcctgaggatgggcaacccccaggtctgcagctccaggtacatatcacgcgcacagcctggcagcctggccctcctggtgcccactccccgccagcccctgcctcgaggactgatactgcagtg

SEQ ID NO: 52574 - DNA, 699 bp, Homo Sapiens
  misc_feature (632)..(632): n is a, c, g, or t
  misc_feature (652)..(653): n is a, c, g, or t
  misc_feature (664)..(664): n is a, c, g, or t
atgatttacacaatgaagaaagtacatgcactttgggcttctgtatgcctgctgcttaatcttgcccctgcccctcttaatgctgattctgaggaagatgaagaacacacaattatcacagatacggagttgccaccactgaaacttatgcattcattttgtgcattcaaggcggatgatggcccatgtaaagcaatcatgaaaagatttttcttcaatattttcactcgacagtgcgaagaatttatatatgggggatgtgaaggaaatcagaatcgatttgaaagtctggaagagtgcaaaaaaatgtgtacaagagataatgcaaacaggattataaagacaacattgcaacaagaaaagccagatttctgctttttggaagaagatcctggaatatgtcgaggttatattaccaggtatttttataacaatcagacaaaacagtgtgaacgtttcaagtatggtggatgcctgggcaatatgaacaattttgagacactggaagaatgcaagaacatttgtgaagatggtccgaatggtttccaggtggataattatggaacccagctcaatgctgtgaataactccctgactccgcaatcaaccaaggttcccagcctttttgttancaaagaaagaacaatgatgnntggaagatgcngctcatatttaccagtctttctgaacgcctctgca

SEQ ID NO: 52575 - DNA, 968 bp, Homo Sapiens
  misc_feature (703)..(703): n is a, c, g, or t
cacctctccgtgccgcgccccgcggcaggtcgcgctggtgctgtctggatgcggagtctacgatgggaccgagatccacgaggcctcggcgatcctggtgcacctgagccgtggaggggctgaagtccagatctttgctcctgacgtccctcagatgcacgtgattgaccacaccaaggggcagccgtccgaaggcgagagcaggaatgttttgaccgagtctgcgaggatcgcccgtggcaaaatcacagacctggccaacctcagtgcagccaaccatgatgctgccatctttccaggaggctttggagcggctaaaaacctcttgtgctgcattgcacctgtcctcgcggccaaggtgctcagaggcgtcgaggtgactgtgggccacgagcaggaggaaggtggcaagtggccttatgccgggaccgcagaggccatcaaggccctgggtgccaagcactgcgtgaaggaagtggtcgaagctcacgtggaccagaaaaacaaggtggtcacgaccccagccttcatgtgcgagacggcactccactacatccatgatgggatcggagccatggtgaggaaggtgctggaactcactggaaagtgacgcgcatggacggggcccagctaggcgccaggacttggcctcaccctcttggtgaggagctgtcggtgctttcatccagctgggagtctgcangccttttttttttcttggcgaaactgcaggggtcctctctctagggggatgtgctgccagatgcgggaatactccggggggcggcgggtcccatacgaggcagggcacatgttcctgcaggatgctctgttccaacaactgccgtttcaaaaaaaatcggcgggtatacggaagttgcggagaatggcgctggaaacaactgcgacgggtcaggtatagatacacgcagctccccctccgggttcctcttcgcgcgctgtcacgg

SEQ ID NO: 52576 - DNA, 622 bp, Homo Sapiens
atagcaaagtcaaaaatctctctgcttcctttccaacggaagaatcttcaatcaactacacatttaaaacaccagaaaaggagcctccattatggcatgctgaatttaccaaagaagaattggttcagaagctccgttccaccacaaaaagtgcagatcacttaaacggcctgcttcgggaaatagaggcaaccaatgcagtccttatggagcaaattaagcttctcaaaagtgaaataagaagattggaaaggaatcaagagcgagagaagtctgcagctaacctggaatacttgaagaacgtcttgctgcagttcattttcttgaagccaggtagtgaaagagagagacttcttcctgttataaatacgatgttgcagctcagccctgaagaaaagggaaaacttgctgcggttgctcaagatgaggaagaaaatgcttcccgttcttctggatgagcatcctatcttcgtagttggtttggacttcgataggttgatggaaggaatacttctattaaccaaatagaatctgtttacaaaaatggttcgtgtgtgttccattattcttttgtcaaaaagtgtgtatatatgtttgcatttacatatattttgtacatctg

SEQ ID NO: 52577 - DNA, 572 bp, Homo Sapiens
ggcggccgcagcgaagctgccgttcatgtgttggaggccaaatgtggcaaaccaaccccaggcccacccagagcgagcaaacgctgagacctgaaaggacatggatgagaagaggagcccgcttcctgtacatatatttaagtgacaaacacggtcaaaagcttaagggacaggttttatggttgcttgtgtaataaagcatgtccttcgtatgtcacagtttggggcaacggaagtcttttagtgatggctaatgggtctgggcagcatcccttcatgaatttttttttaatccaatatccgttgatttgattgtgattagagaaccttggacattttgctgctaaagaatcttttttcccctctcccccttcctgaccctacttgcactgctgtggatttttttaagagaagcaaaaacaaaagtaaactcctttccctggccctccaaacatatattctgtgagataactgtgcctgctaccaagtgttaatcctgggatcgtatttttatatcatattcacatatttgtttttttaattggtgttagatgacatgattaataaaaaag

SEQ ID NO: 52578 - DNA, 955 bp, Homo Sapiens
aagcatcagcatatgtatcgcctcgccatgaccggctctgggatcgatcgtcacctcttctgcctttacgtggtgtctaaatatctcgctgtggagtcccctttccttaaggaagttttatctgagccttggagattatcaacaagccagacccctcagcagcaagtggagctgtttgacttggagaataacccagagtacgtgtccagcggagggggctttggaccggttgctgatgacggctatggtgtgtcgtacatccttgtgggagagaacctcatcaatttccacatttcttccaagttctcttgccctgagacggattctcatcgctttggaaggcacctgaaagaagcaatgactgacatcatcactttgtttggtctcagttctaattccaaaaagtaattccactggagctgctgggaaggaaaacgagctcttctgatgcaaaccaaatgaaaaataggcattaatcctgaccttagctcgggatgaaacactgctcttaaaaaaactcagttttccttccagaaaatgtgggtgttttttttcctagaaacagtatctctcccctgtgaagcataaacccactacttccagacttgccctcccttgggggacatctgataaagtctccccctgatgtctccgcatcggttggatttattacgggatgcaatcttgtgagttatgaagggaattactagggtgtggttcaccccacagtgcactgggaatggtgctttctcagtggcaccgaaggctatgctaagggcattagatcatcaagggaggtaacttcgtcgtaaacacaatgtgttcccgttgggccccgtgctacactcgatgcaccaagtcgttgggacgcttgaccggtacgccgggccactgtccctgaaaggcgccagctgttatccgtcagccaggagcatggggtgcgaataccgccgcg

SEQ ID NO: 52579 - DNA, 581 bp, Homo Sapiens
ttcattggcactctcaactccttgctgaccaacatggccggtggggacatggcacgagtcagcacctacacaaatgcctttgccttcactcagttcggagtgctgtgtgccccctggaatggcctgctcatggaccggcttaaacagaagtaccagaaggaagcaagaaagacaggttcctccactttggcggtggccctctgctcgacggtgccttcgctggccctgacatccctgctgtgcctgggcttcgccctctgtgcctcagtccccatcctccctctccagtacctcaccttcatcctgcaagtgatcagccgctccttcctctatgggagcaacgcggccttcctcacccttgctttcccttcagagcactttggcaagctctttgggctggtgatggccttgtcggctgtggtgtctctgctccagttccccatcttcaccctcatcaaaggctcccttcagaatgacccattttacgtgaatgtgatgttcatgcttgccattcttctgacattcttccacccctttctggtatatcgggaatgccgtacttggaaagaaagtccctctgc

SEQ ID NO: 52580 - DNA, 631 bp, Homo Sapiens
gggatgtcaggggtgttgggctcttcattggtgtggatctgatcaaagatgaggccacaaggacaccagcaactgaagaggctgcctacttggtatcaaggctgaaggagaactacgttttgctgagcactgatggccctgggaggaacatcctgaagtttaagcccccaatgtgcttcagcctggacaatgcacggcaggtggtggcaaagctggatgccattctgactgacatggaagagaaggtgagaagttgtgaaacgctgaggctccagccctaagccagccctgctctgcctaagtgtactccagaagaaactcatctcatccaaatacacgctattgagaaggcgagcctgacctccctcttacagataaagtcagctttcagaggctcagggtgggggggcctgcccgaggccataatgctacccaccccctcctcctaaccactggtctgttggaataacccagatgtctgcatcccctcaagtcagtcaatttcctttctgtccactgggggtggaatggggttagggtgggatactttaaagtgctcctgcttaaataaattagaccagaccagtgtatttctaaagaaaatcctgacatgcacacccattaaaaatag

SEQ ID NO: 52581 - DNA, 603 bp, Homo Sapiens
  misc_feature (518)..(518): n is a, c, g, or t
  misc_feature (556)..(556): n is a, c, g, or t
tcaacagcatcaaacaatttgtgttccttgtgctggtgcacttggacttggagctgatcaacgcagatgtggagatccctgagtttgacctcagcaggtacggcttcggtctgatgcagccggaacacgacgtgcccgtccgctaccgcatccgcccatgacacagggagcagatggatccacgtgctcgcctctgcccagcctgccccagcctgccccagcctcccagctttctgtgtgcacagttggcccgggtgcaggtgctagcattaccacttccctgcttttctcccagaaggctgggtccaggggagggaaaagctaagagggtgaacaaagaaaagacattgaaagctctatggattatccactgcaaagttttctttccaaaatcaggctttgtctgctcccaattcacctcgttactctcacctcgtgatatccacaaatgctattcagattaggcagaactaggagtcttcactgctctgcccccaaacttcccggagtgcaacctntctagtttttatgaactagcatggccccgggccttatncagtcaaaacggatgcttgccacaaaaggccacttcaggatgccctt

SEQ ID NO: 52582 - DNA, 762 bp, Homo Sapiens
ggacgcgtgggtcgggcactttcccagtccccgaggcggatccggtgttgcatccttggagagagctgagagctggagtacagaacctgctaaggccatcaaacctattgatcggaagtcagtccatcagatttgctctgggccggtagtactgagtctaagcactgcggtgaagaagatggtagaaaacagtctggatgctggtgccactaatattgatctaaagcttaaggactatggaatggatctcattgaagtttcaggcaatggatgtggggtagaagaagaaaacttcgaaggcttaatgatgtcaccatttctacctgccacgtatcggcgaaggttgggactcgactggtgtttgatcacgatgggaaaatcatccagaaaaccccctacccccaccccagagggaccacagtcagcgtgaagcagttattttctacgctacctgtgcgccataaggaatttcaaaggaatattaagaagaaacgtgcctgcttccccttcgccttctgccgtgattgtcagttccttgagggctccccagccatgcttcctgtacagcctgcaaaaactgactcctagaagtaccccaaccccaccctgctccttggaggacaaccgtgatcactgttatttcagttctgtcagaatggtccaggttcttctagatgatctgccaaatggttcctcttcctccttcctgatgtctgccattagcttggataaagttctgctgaaattccaaaaacaaaaagg

SEQ ID NO: 52583 - DNA, 578 bp, Homo Sapiens
gacggcacttagctgctgacaaacaacctgctccgtggagcgcctgaacaccagtctttggggccagtgcctcagtttcaatccaggtaacctttaaatgaaacttgcctaaaatcttaggtcatacacagaagagatcacctatgacacgcctttcaaaagagaaaagtcttttgagatcgtgattatggtgctgaaggacaaattccaggtggctgtaaatggaaaacatactctgctctatggccacaggatcggcccagagaaaatagacactctgggcatttatggcaaagtgaatattcactcaattggttttagcttcagctcggacttacaaagtacccaagcatctagtctggaactgacagagataagtagagaaaatgttccaaagtctggcacgccccagcttcctagtaatagaggaggagacatttctaaaatcgcacccagaactgtctacaccaagagcaaagattcgactgtcaatcacactttgacttgcaccaaaataccacctatgaactatgtgtcaaagaggctgccattcgctgcaaggttgaacacccccatgg

SEQ ID NO: 52584 - DNA, 781 bp, Homo Sapiens
ctccccgccgccgctgcagtggccgctccctgggccgtaggaaatgagcgataacgatgacatcgaggtggagagcgacgaagagcaaccgaggtttcaatctgcggctgacaaacgggctcatcataatgcactggaacgaaaacgtagggaccacatcaaagacagctttcacagtttgcgggactcagtcccatcactccaaggagagaaggcatcccgggcccaaatcctagacaaagccacagaatatatccagtatatgcgaaggaaaaaccacacacaccagcaagatattgacgacctcaagcggcagaatgctcttctggagcagcaagtccgtgcactggagaaggcgaggtcaagtgcccaactgcagaccaactacccctcctcagacaacagcctctacaccaacgccaagggcagcaccatctctgccttcgatgggggctcggactccagctcggagtctgagcctgaagagccccaaagcaggaagaagctccggatggaggccagctaagccactcggggcaggccagcaataaaaactgtctgtctccatcgtctcatcctcctttcagttcgttggtagagccctcagaaccatttaaaagactctttatttttctctttctcccttttttttttaaatttttatttttacgtagaagctcttggacaacagctctcgttctccttccccatttccactgtatattttttaatgtattcccttcagggattccctgtccccaacaggaatttttaaaccaaa

SEQ ID NO: 52585 - DNA, 466 bp, Homo Sapiens
gacacagacactcacagaccctgtcctttgcctctattaagcagaggatggaagtattaaggattttgtaacaccttttatgaaaatgttgaaggaacttaaaactttagctttggagctgtgcttactggcttgtctttgtctggtagaacaaaccttgacctccagacagagtcccttctcacttatagagctctccaggactggaaaaagtgctgctattttaacttgctcttgcttgtaaatcctaatcttagagttatcaaaagaagaaaaaactgaaggtactttactccctatagagaaaccattgccatcattgtagcaagtgctggaatgtcccttttttcctatgcaactttttttaaccctttaatgaacttatctgttgagtacattgaagaatatttttcttcctagattttgttgtttaaattatggggcctaacctgccacttattttttg

SEQ ID NO: 52586 - DNA, 864 bp, Homo Sapiens
gaaaactgcttatatttctggttagggcgaagccatttaggaagaagcatttcaccagaacaagtaaaagttaattgcagcaatgatgtcagttttggcccctagtttaataaaaggataggcaaatatcataggaaatcttcatggtttgtaggaaatcagtgtttgcaacgtaggaagtttcatgggatagggaaggtataaatcaagatagtaagggttttgttttatatgtcattgtcttaccatgctccccacctatttaatcttctgttttaagctaaatttatggatttgcacctacctttttgagtggcagaagttcttaacaaaccagtattgagaaataagaagggatgtagttaaaatggttttctgtttctctttaaagttgaagaatgatatatttaacaagagttgtgttttatttccagttttccagtagcatatatgtagatgcattgaggtcatactgtgagaaaatgtctttagggtatccctccaaaataggagccttaaactttttaacttaaaggaaggcatatctaaaaaccatagtggttgcttttaggtatagtttcctatataacctatagtcagacttatctataatatgaaaatttaattgttttaaaaatgcatacatcggccgggtgcagtggctcacgcctgtaatcccagcacttagggaggccgaggcgggcggatcacgagggtcagaagtttgagaccagtctggccaacatggtgaaaccccgtctctactaaaaatacaaaacaattagttgggcgtggtggcgtgcgctgtaatccagtacttgggaggctgagcaggggaattgttgaacccgggagacacaggtg

SEQ ID NO: 52587 - DNA, 796 bp, Homo Sapiens
gctccttcagcaaaaccctcagtttcttgttattttctataaatgcaaacatcttattaaagtagatgctaaggcattagaatttcctgctttatttttctaaatgaccatgaggaaacctggaatgtcaaagataaagtgcaacacattctgcatttaaaaattaaaatgatcctttttaaaagtagcaaccagatgtgaaaaattggactggagtccaggttatagttgatagctttaactttctccccaacagcaacagcacaattttccctaaaatgtgttatgaataagtaaaatgactacttcacatcctttaactcttcctacagaaatctaagagacgaaatgaaacaaaagtttgcacagttctagacacgataaatacatgtgaaatcacacaactcaggaaaatgtcccttaaattacttgagccattggtacttgtgaatttcaaaagagaccatctatgttctgatccactgttgaaagctgtacaatgtcacctatttatttgcaagacatccttggaaacaaataggtagatttgcacggactaaagagtgtgaggtacagctgctgaacattacccttggtatattcctgcctttatgttaaaccaagcaagaacacagaggaagaaaacacaaaggtcccggacgcgccggccccgtcgagaacagatgaaaaaaacacaagccagaggagcaggggacgcaccagggaagaagcaacagaggaacgaccggggatccaggagaaccgggagcaaaaaaaggcgggggaaatacacaac

SEQ ID NO: 52588 - DNA, 703 bp, Homo Sapiens
tgccggtttaacttaacattttgaaagaagtagatttgattgtacttaaaaggaatataagttgtcagaaaacctcaaactttaaaaaacataaatgaagatatagattgacttccagttattcagagtaatttaacattgaaacatagggaagttgcatgaaaatgaaatatatcaattttgattcttcatagtaaggtttaccagatgaagtcttgtggttttcctcctactggcgatttctcgatctcctttccaggactttaaatgttggtgttcttcagagttttattccacatgctccactgatactatatgctgctcccatggcctcattttctatctgctgagtcccgtatcagttatctccagcccagatctctaacaggtttaactcatatttctagttgcatcctagacatctttatttgaatgtcctctaccacaaatgaaaatcaccatgttcaaatctgtacataatcatctttcctagcccccaaccaccagtttcatcccttagtgattgactccgcatttcacctagctacctaagctagaaacttggacatcattcatggctctttttacctcacttctcacatccaggtagtcaggaagttctctaaacaccgtgtcccaaatatctgcattatagcactttctagtacaagcgactgcaaaacaattgaaattaacttaatct

SEQ ID NO: 52589 - DNA, 1047 bp, Homo Sapiens
  misc_feature (627)..(627): n is a, c, g, or t
ggaggcagccaagcatcacaaagatgttctgaggctgatatggaaaaccatgtggcaaagccaggacctgctggacctcgggctcgaggacctgaggatggagcagagagtccccgatgctctcgtcttcaccatccagaccagggggactgcggagcccatcacggtcaccattgtgcctgcctacagagccctggggccttctcttcccaactcccagccaccccctgaggtctatgtgagcctgatcaaggcctgcggtggtcctggaaatttctgcccatccttcagcgagctgcagagaaatttcgtgaaacatcggccaactaagctgaagagcctcctgcgcctggtgaaacactggtaccagcaggcccatcatcctggatccggccgaccccaccctcaacgtggcagaagggtacagatgggacatcgttgctcagagggcctcccagtgcctgaaacaggactgttgctatgacaacagggagaaccccatctccagctggaacgtgaagagggcacgagacatccacttgacagtggagcagaggggttacccagatttcaacctcatcgtgaacccttatgagcccataaggaaggttaaagagaaaatccggnagaccaggggctactctggcctgcagcgtctgtcctttcaggttcctggcagtgagaggcagcttctcagcagcaggtgctcctttagccaatatggggatcttctcccacactcacatctatctgctggagaccatcccctccgagatccaggtcttcgtgaagaatcctgatggtgggagctacgcctatgccatcaaccccaacagctttcatctgggtctgaagcaccagattgaagaccagcagggggcttccctaaaagcagcagccgctggaatttcaaggcgcagtcctggcaggaattgtttgtgggtctggggaatctatgggcattccaaaaccgtggaaccctcctcctcctcctccaagaaagaaaaggggaagccttctggtttccccccccaggttaatttttta

SEQ ID NO: 52590 - DNA, 453 bp, Homo Sapiens
aggactttctacactgtgctttcaaggttttgaacaggaaaatgatgtagactttctgttttttgtaagtttggaggatggcttgtgtcttaaaagaatatgtaacataaccatctaatttgtgagtagtggactaaggaaacaccactctaacctttttctctctgcgataatcccatcttcagcctctcaagcactgtgaaaaatcactttctcttgttgtattcttggagcccctgctaattcattattgaaaaatacctgctgcctgcatttggccttatgttgtcatttacttggtacttcctaagcgtggctactccaatgaagctttagtatatgtactgaaagaagatcctctcatactgccacagccaagagataaggttgtaaatctttattgggagaagccgtcaaggacagttctgtgaaatgaaaggatctctggatcac

SEQ ID NO: 52591 - DNA, 504 bp, Homo Sapiens
  misc_feature (36)..(36): n is a, c, g, or t
  misc_feature (481)..(481): n is a, c, g, or t
tgagcgtctctgggctccaatgctttgattatgtancagagtttggtggtgaatgtcccgctgacccccttccgtgtgaggagctgtgtgatggggatgcatcctgtccccaggggcataaatgctgcagcaccggctgtggccgcacctgcctcggagacattgagggagggcggggcggtgattgtccaaaagttctggtgggcctgtgcattgttggctgtgtgatggatgagaattgtcaagctggagaaaaatgttgcaagtcaggctgtggccgcttctgtgtcccaccagtcctgcccccaaaactgaccatgaaccccaactggactgtgaggtctgattccgaattagagatcccggtgccctagctgtgctgatttgtctggagcttctttggtaattctggaagcttttcctggcagtcaagagagggtgacatcctggggcttgtgacatttccaggggcactcatggncctctctgctctgcttctcctcc

SEQ ID NO: 52592 - DNA, 735 bp, Homo Sapiens
acgcgacctgaaggaaagattgcagaggaggtatatgactacatcatgcacatccttatgcacttccagggtcttttggtctctaccattttctgcttctttaatggagaggttcaagcaattctgagaagaaactggaatcaatacaaaatccaatttggaaacagcttttccaactcagaagctcttcgtagtgcgtcttacacagtgtcaacaatcagtgatggtccaggttatagtcatgactgtcctagtgaacacttaaatggaaaaagcatccatgatattgaaaatgttctcttaaaaccagaaaatttatataattgaaaatagaaggatggttgtctcactgttttgtgcttctcctaactcaaggacttggacccatgactctgtagccagaagacttcaatattaaatgactttttgaatgtcataaagaagagccttcacatgaaattagtagtgtgttgataagagtgtaacatccagctctatgtgggaaaaaagaaatcctggtttgtaatgtttgtcaagtaaatactcccactatgcctgatgtgacgctactaacctgacatcaccaagtgtggaattggagaaaagcacaatcaacttttctgactggtgtaagccagttccagcacaccattgcatgaattcacaaccaatggctggaaaaactaaacatacatgttgggcatgatcttcccttattgccccaagagacctacc

SEQ ID NO: 52593 - DNA, 895 bp, Homo Sapiens
  misc_feature (860)..(860): n is a, c, g, or t
agcatcttggcctgactgcaaagcatttagccagtcagcggtgtcaggtggcagttacagcccaggttcttgcctctggcctgggtgcttagggggttcagaatgagtcagtggaagtcaaaacaagagggatctaacctactacataataatctaaaaatacaaacttttaactattttaagactaacagattaccttatataaatcaccaatctctcagtatttacaagctaacaattctttcacctatttttataactgctatacattctgggaacaccacaattgacatatggaaaaagaaaagccctaccctctctttatgagttaaaggctaatttggtccccgacttcatgcttggaaggctagcgctcatctctacactagcctagatggctgtgttttgcccctatgattccttgcagcatatctatgggcagagggaagacaattgttgagtttttctcagcagcaatggtggtcagtgtctgcaggtatcggagctgaagggctgcaggagattcagtgatgaccatggaggcttctttcagagccctggatgcattcatttctccttcggctgcaataaccttggcgcgggcctcgcgggacgcttctgcttctgcagccatagctctctggagctgcacaggtagtttcacatccttaatttccacacgctccacctttattccccaggcatcagtggcatcatccagagtagactgcatgttgtgtgcaatttcttctctgtcagagaggatctgagaaagattcttggtgcccagaacattcctcagagtagtttgtgccaaaagacgggttgctgagtcacgcgtgggtgatatatggcacagncagggttgcattctgaacgcggtaatagaccaaac

SEQ ID NO: 52594 - DNA, 903 bp, Homo Sapiens
atattgtaaaagagcatctttaacagaattagactcacctcggttgccctctcatttatcagaatatgaacgggatacattacttgttgaacctgaggaggtagtagaaatgtcacacatgcctggagacttatttaatttatatcttcaccaaaactacatagatttcttcatggaaattgatgatattgtgagagccagtgaatttctgagttttgcagatatcctcagtggtgactggaatacacgctctttactcagggaatatagcacatctatagctacgagaggtgtgatgcattccaacaaagcccgaggatatgctcattgccaaggaggaggatcaagttttcgacccttgcacaaacctcagtggtttctaataaataaaaagtatcgggaaaattgcctggcagcaaaagcactttttcctgacttctgcctaccagctttatgcctccaaactcagctattgccataccttgctctactaaccattccaatgagaaatcaagctcagatttcttttatccaagatattggaaggctccctctgaagcgacactttggaagattgaaaatggaagccctgactgacagggaacatggaatgatagaccctgacagcggagatgaagcccagcttaatggaggacattctgcagaggaatctctgggtgaacccactcaagccactgtgccggaaacctggtctcttcctttgagtcagaatagtgccagtgaactgcctgctagccagccccagcccttttcagcccaaggagacatggaagaaaacataataatagaagactacgagagtgatgggacatagaagccagcctgctaatcagattgctacttcacagcttcatttttgtttcattcagtggtacttcagca

SEQ ID NO: 52595 - DNA, 505 bp, Homo Sapiens
  misc_feature (417)..(417): n is a, c, g, or t
  misc_feature (491)..(491): n is a, c, g, or t
gctgtgatgcactcacagggcagcgattacctggacatcggcaacaacccgagagtgggcaccaagcggtacatggcacccgaggtgctggacgagcagatccgcacggactgctttgagtcctacaagtggactgacatctgggcctttggcctggtgctgtgggagattgcccgccggaccatcgtgaatggcatcgtggaggactatagaccacccttctatgatgtggtgcccaatgaccccagctttgaggacatgaagaaggtggtgtgtgtggatcagcagacccccaccatccctaaccggctggctgcagacccggtcctctcaggcctagctcagatgatgcgggagtgctggtacccaaacccctctgcccgactcaccgcgctgcggatcaagaagacactacanaaaattagcaacagtccagagaagcctaaagtgattcaatagcccaggagcacctgattcctttctgcctgcanggggctgggggggt

SEQ ID NO: 52596 - DNA, 848 bp, Homo Sapiens
tggtgatgacaatggctggacccccaacttggattccaacaaggagtatctccaggtggacctgcgctttttaaccatgctcacggccatcgcaacacagggagcgatttccagggaaacacagaatggctactacgtcaaatcctacaagctggaagtcagcactaatggagaggactggatggtgtaccggcatggcaaaaaccacaaggtatttcaagccaacaacgatgcaactgaggtggttctgaacaagctccacgctccactgctgacaaggtttgttagaatccgccctcagacctggcactcaggtatcgccctccggctggagctcttcggctgccgggtcacagatgctccctgctccaacatgctggggatgctctcaggcctcattgcagactcccagatctccgcctcttccacccaggaatacctctggagccccagtgcagcccgcctggtcagcagccgctcgggctggttccctcgaatccctcaggcccagcccggtgaggagtggcttcaggtagatctgggaacacccaagacagtgaaaggtgtcatcatccagggagcccgcggaggagacagtatcactgctgtggaagccagagcatttgtgcgcaagttcaaagtctcctacagcctaaacggcaaggactgggaatacattcaggaccccaggacccagcagccaaagctgttcgaagggaacatgcactatgacaccccggacatccgaagttttgacccattccggcmaatatgtgcgggtataccsggagargtggtcgccggggggggttggggtgsggckgggggggstgggckgkgactkgaca

SEQ ID NO: 52597 - DNA, 643 bp, Homo Sapiens
gtccgaggagtggaagaaggcactgtgctcagtgttggtggacaagtgaatttgctcatacagcaggccatagaccccaaaaatctcagccgacttttcccaggatggaaagcttgggtgtgatcttcagtatatgaattaccctttcattcagcctttagaaattatattttagcctttatttttaacctgccaacatactttaagtagggattaatatttaagtgaactattgtgggtttttttgaatgttggttttaatacttgatttaatcaccactcaaaaatgttttgatggtcttaaggaacatctctgctttcactctttagaaataatggtcattcgggctgggcgcagcggctcacgcctgtaatcccagcactttgggaggccgaggtgagcggatcacaaggtcaggagttcgagaccagcctggccaagagaccagcctggccagtatggtgaaaccctgtctctactaaaaatacaaaaattagccgagcatggtggcgggcacctgtaatcccagctactcgagaggctgaggcaggagaatctcttgaacctgggaggtgaaagttgctgtgggcccaaatcatgccattgcactccagcctgggtgacaagagcgaaactccatct

SEQ ID NO: 52598 - DNA, 797 bp, Homo Sapiens
taggcaagatggcgtcgagcggcggggagctagggagtttatttgatcaccacgtccagagggcggtatgcgacacacgggccaaatatcgagagggacgacggcctcgtgctgtgaaggtatatacaatcaatttggaatctcagtacttattaatacaaggagttcctgctgtgggagtcatgaaggaattagttgagcgattcgctttatatggtgcaattgaacagtacaatgctctagatgaatacccagcagaagactttactgaagtttatcttattaaatttatgaacttacaaagtgcaaggacagccaagagaaaaatggatgaacagagtttcttcggtggattgcttcatgtgtgctatgctccagaatttgaaacagttgaagaaactagaaaaaaactacaaatgcggaaggcatatgtagtaaaaactactgaaaataaagaccattacgtgacaaagaagaaattggttacagagcataaagacacagaggattttagacaagacttccactcagagatgtctggattttgtaaagctgctttgaacacttctgcagggaactcaaatccttatcttccgtattcctgtgaattgcctttatgttatttctcctcaaaatgtatgtgttcatccgggggacctgtagacagagcaccagactcctctaaggatggtagaaaccatcataaaacaatggggcattataaccacaatgactctttgcggaaaacacagataaactcttttgaaaactcagtggcctgccctggtgcacaaaag

SEQ ID NO: 52599 - DNA, 443 bp, Homo Sapiens
ataaatccgggtgtgcctgaacctcagacctagtaatttttcatgcagttttcaaagttaggaacaagtttgtaacatgcagcagattagaaaaccttaatgactcagagagcaacaatacaagaggttaaaggaagctgattaattagatatgcatctggcattgttttatcttatcagtattatcactcttatgttggtttattcttaagttgtacaattgggagaaattttataattttttattggtaaacatatgctaaatccgcttcagtattttattatgttttttaaaatgtgagaacttctgcactacttataaattcagtctagaaggtagtaatttctaatatttagatgtcttagtagagcgtattatcatttaaagtgtattgttagccttaagaaagcagctgatagaagaactgaagtttcttactcac

SEQ ID NO: 52600 - DNA, 585 bp, Homo Sapiens
tttttgaaataccacagttgttttcctggattataaggaaaggcacattacatttagtcttcctttcgatataaaactctttgaagaaatatgatttttagaaatcagctacccattatagcacaaaatcagccaaagcagaatttttaaaaattggcttttttaggattctttttctccccctcccatcttagtcttaccttgagggaacagtcatatgagaaggaactttgtcacatctaagctgtggtgtgttccccatgtgtgtgtacaacactggtgactccaggaaccattttcacctattaccagtgttccctggggactcctcttaatgtttccaaatgggaaggacagttgatttccaacatgaggttttttgttttttatccagaaatattttcagcaaaactttccaactgagtggagtctgattaaggatttatttgaaaatggtgggattcattggcccataggtacattggaaaatgtatatctctccagctgtactgtagtgccctgcaggctgtttatatgttcacagttacttttttttttttttaaataaaagtcatttaatgtaga

SEQ ID NO: 52601 - DNA, 523 bp, Homo Sapiens
gagaaatatctgccccatttagatctctggggccactgatgggatgccctgggaagatccttggctgccgctttctctccccacagcctcaaggccaccctacggtcatatatatcactcaggcgtagaagaaaagacacatattttataaaatctttttaataaaaggaagttccaagaagaatttttaagaactacctctaggtgtgcctccacgctggccctagctttcccattgctgttccattgctgagacaaactggaaggctccctttctgtttgaagttttatgacttgtagtcaggctttgctgttcgtcacagtgtcattttccattcaggtaccatcacctggtcccatcaacaggtctagtatgtagctcactgataacagaggaagatgtgtctcctcccaccctcttcctaatggtcattatgcctttctccatctattgtctctttcaccccttcccctctcccttgggctctgatgaaaaattgttgactgcagtttcggaagtttg

SEQ ID NO: 52602 - DNA, 639 bp, Homo Sapiens
acagttcctatctgtatatttgactaaaccttttcctaagctatctctcatggttcctatgtttttttatcataattaaaagcaaaaccatctggatcacctaacagtcagaggtcagtatctcagcgtgtgaattatagaggaaatacagagagaacctcttccacttttacttttcgtccaaataaaatgcatggtgtaccagaagttgaagatcgggttgaggattggggctagctcgatgacactaaggccccaacatcgcgggacctgctgtggcgcggattcttaggaacgctgttctagccggccccctctccaggggtcgccgtggccggcattatttcctagttcttcttgtaaccctgaggtgccagcgcggggagtgaggaggggtcagggggctaaggatgcaacctctgacgttctgcgccttcctaggagagtcttacatgtgttgagatttcacaagcaatgcgagttgtaaaataccagctctacaagaagctaggctctgtgacggcatagttttcagtagctttatcacaatattcacaatggagaattatatgacatggtagcagaaataggcccttttatgtgttgcttctattttacctcaaattgtagatatagggt

SEQ ID NO: 52603 - DNA, 538 bp, Homo Sapiens
ccaaacagtgcgctacccaggcaggcaatgtgagcagccaggcatcctgcccacctggttgccttcaggaccacggtgttctcagaggagaagctgactttctctctgcgtctgatggaggagaactggaacgctgagaagaggtcccccaccttccacctgggagatgcagcccacctccaggcagaaatccacactggcagccacgtgccactgcggttgtttgtggaccactgcgtggccacaccgacaccagaccagaatgcctccccttatcacaccatcgtggacttccatggctgtcttgtcgacggtctcactgatgcctcttctgcatacaaagttcctcgacccgggccagatacactccagttcacagtggatgtcttccactttgctaatgactccagaaacatgtgacagaagaagcagatgtcaccgtggggccactgatcttcctggacaggaggggtgaccatgaagtagagcagtgggctttgctttctgacacctcagtggtgctgctgggcgtaggcct

SEQ ID NO: 52604 - DNA, 710 bp, Homo Sapiens
cagacaaacacatgaacatcgactttgacagtttcatctgctgcttcgttaggctggagggcatgttcagagcttttcatgcatttgacaaggatggagatggtatcatcaagctcaacgttctggagtggctgcagctcaccatgtatgcctgaaccaggctggcctcatccaaagccatgcaggatcactcaggatttcagtttcaccctctatttccaaagccatttacctcaaaggacccagcagctacacccctacaggcttccaggcacctcatcagtcatgttcctcctccattttaccccctacccatccttgatcggtcatgcctagcctgaccctttagtaaagcaatgaggtaggaagaacaaacccttgtccctttgccatgtggaggaaagtgcctgcctctggtccgagccgcctcggttctgaagcgagtgctcctgcttaccttgctctaggctgtctgcagaagcacctgccggtggcactcagcacctccttgtgctagagccctccatcaccttcacgctgtcccaccatgggccaggaaccaaaccagcactgggttctactgctgtggggtaaactaactcagtggaatagggctggttactttgggctgtccaactcataagtttggctgcattttgaaaaaagctgatctaaataaaggcatgtgtatggctaaaaaaaaaaaaaaa

SEQ ID NO: 52605 - DNA, 856 bp, Homo Sapiens
aaatacaaaaaattggccaagtagctgggactacaggtgcacaccactgcattcagctaatttttaaattttttgtagagatggggtctcactttgttgcccggggtggtctgaaactcctggcttcaagcagtcctcccaccttggcctcccaaagcgtaaggattataggcatgagccactgcgcccagtctagagtgggctttttttattgtcctccaaaggtacagaggttgcttcatgagtcatctggtgaaaaggtatagaataacatcacctagaataacatcactgtccgcctgtgtccaggttcaaggtcctgccctgaaggtgacagctctacctgtactgaccaaacctctgtctgacctgttagcagagagaccgtcattccaggggtggggcttgtttcttcacagagccaggctgcaacacaaaaggtgtgataccaagtaccgtgggggcttcatccagacgcagagaacttctttgggtttacatggcaaataagtcaacctttctgtttcctaaagggtttcacaaaaaaaggcatctttgaatggcctcagcagtgctctcacagaagaaagtaagggttttatcattccgagaggcactggtgggctcctctactttcagttaggtggaaatggggtctctgccactacctcttcaccagtgttgcacaagctgaccctctccgggtcagcatttccagcacacaccagccctggtgttagcttgaatctgtgcgacttatgccacacagttagaggagagggcctgcaagttctggagaggagagtggcattgaaagtgctggggcgacagagcgagactctgtctcaaaaaaaaa

SEQ ID NO: 52606 - DNA, 645 bp, Homo Sapiens
  misc_feature (619)..(619): n is a, c, g, or t
gagagcccagactcttggagcaggtgttccccctggggactctgtcagaggctccatggaggcctctcaagtccaagtgcctctggaagcctctccaattacattcccaccaccctgtgccccagaaaggccccccatcagcccagtcccaggcgcccgtcaagcaggcctctgagagtgctacccttctcttgtaaccttgcagccaacacccctgcccggcccctgagctgcctcctccagcccatgctcttacaggccctgcacagagtagcactcattaattcttggttaaggaatgaatcaacgaatgaatggctatgcatggacctctgggcagggagacctgggtcttctctggctgagaggggaaggctaaggcatggctgagattcaagccaccattccaggcctctttgcccaagaaagaaacttctgtcacccttgcactctcctgtattctgagtccctggccaatagcacagccttccatgccccgacccccaccccaagcctctccactaggcctctgccaggatctaagcccatgagcacagggactggctatcccaagacctggcagatgtggctgctcaataaacacttgttgaaccatcanaaaaaaaaaaaaaaaaatgcggcatt

SEQ ID NO: 52607 - DNA, 660 bp, Homo Sapiens
accaccccaagccaagaaggcaaaagtgaagaccagtactgtggacctgccaatcgagaatcagctattatggcagatagacagagagatgctcaacttgtacattgaaaatgagggtaagatgatcatgcaggataaactggagaaggagcggaatgatgctaagaacgcagtggaggaatatgtgtatgaaatgagagacaagcttagtggtgaatatgagaagtttgtgagtgaagatgatcgtaacagttttactttgaaactggaagatactgaaaattggttgtatgaggatggagaagaccagccaaagcaagtttatgttgataagttggctgaattaaaaaatctaggtcaacctattaagatacgtttccaggaatctgaagaacgaccaaaattatttgaagaactagggaaacagatccaacagtatatgaaaataatcagctctttcaaaaacaaggaggaccagtatgatcatttggatgctgctgacatgacaaaggtagaaaaaagcacaaatgaagcaatggagtggatgaataacaagctaaatctgcagaacaagcagagtttgaccatggatccagttgtcaagtcaaaagagattgaagctaaaattaaggagctgacaagtacttgtagccctataat

SEQ ID NO: 52608 - DNA, 758 bp, Homo Sapiens
cgggattgattgactaccctatgtggagtgcacctcagccgtgatgcaggcgcttaagtatttccacaagcgtttcccggagcacagggcagcggagatccgggagaccctcacgcagggcttagagttctgtcggcggcagcagagggccgatggctcctgggaaggctcctggggagtttgcttcacctacggcacctggtttggcctggaggccttcgcctgtatggggcagacctaccgagatgggactgcctgtgcagaggtctcccgggcctgtgacttcctgctgtcccggcagatggcagacggaggctggggggaggactttgagtcctgcgaggagcggcgttatttgcagagtgcccagtcccagatccataacacatgctgggccatgatggggctgatggccgttcggcatcctgacatcgaggcccaggagagaggagtccggtgtctacttgagaaacagctccccaatggcgactggccgcaggaaaacattgctggggtcttcaacaagtcctgtgccatctcctacacgagctacaggaacatcttccccatctgggccctcggccgcttctcccagctgtaccctgagagagcccttgctggccacccctgagaacatgcctacctgctgggtgccgtctgtgcgttccagtgaggccaaggggtcctggccgggttggggagccctcccataaccctgtcttgggctccaacccctcaacctctatctcatagatgtg

SEQ ID NO: 52609 - DNA, 872 bp, Homo Sapiens
  misc_feature (772)..(772): n is a, c, g, or t
tagcttagcaaccatagcccttcaaggcttttcatggctgtggcgggccccattaggtaccaaaagaagaagaaccccattgtcagtgaactgtaccacccagcccacccaccttcctaccctacaggcaccctctgggccaccctcccttgctgccctagcaagtctgacagccagagggccattgcctggccaggatcccttccttagcatccggggctgggacactagcaggcgtcgggagggggcctggctgagctgcatgtctgtcccccaccctcatcctccaccccccagtccggagaaggcggcttccttggagtatgactatgagaccatccgcaacatcgactgctacagcacagatttctgcgtgcgggtgcgcgatggcatgcggtactggaacatgacggtgcagtggtggctggcgcagtatatctacaagagcgcacctgcccgttcctatgtcctgcggtgagtgagcccgcccagtctcaggtgacactgcagaactacatctcccagcaggccccagggtagcctgcagcgtccctggctgggcccctgcccccggaggctcatgggaattgtagtttgtttagcctggttttgccctgcctctaattatagtggcagcatgccggtgtaaaatcgttccccctctcggggcctcagttgctacttctgtaaagtcagcctcactcagcagaagcaatgtactgagtcctgtggactcaatagctagccttcctggaatcttggccgtccaggntatggagaaaccttgaggagttagttgacctcttagttgcctcaagtgttgaatgggagtgaatgctattttattactgggtttcataagggtagataga

SEQ ID NO: 52610 - DNA, 1019 bp, Homo Sapiens
  misc_feature (634)..(634): n is a, c, g, or t
  misc_feature (711)..(711): n is a, c, g, or t
  misc_feature (764)..(764): n is a, c, g, or t
  misc_feature (779)..(779): n is a, c, g, or t
  misc_feature (805)..(805): n is a, c, g, or t
  misc_feature (868)..(868): n is a, c, g, or t
  misc_feature (878)..(878): n is a, c, g, or t
  misc_feature (886)..(886): n is a, c, g, or t
  misc_feature (938)..(938): n is a, c, g, or t
  misc_feature (972)..(972): n is a, c, g, or t
  misc_feature (974)..(974): n is a, c, g, or t
  misc_feature (981)..(981): n is a, c, g, or t
gctggtcgcatggcttaccttgtaaccctatacttgggaggctgaggtgggcggattacttgagcccaggagttcgggaccagcctgggaaatatagtgaaactcctgtccctacaaaaaatacaaaaattagccgggtgtggtagtgcatgcctgtagtcccagctacttgggaggctgaagtgggaggatggcctgagctcaaggagatgcaggctgcagtgggctgtgattgtgccactgcactccagcctgggcaccaatgtgagaacctgtcttggaaaaaaaaaaaaagaaacatgttttagtagaagttttatttgaaaaagaaaaataagcataaatatattcccagtgctggagagggtgggctgagggactggggccagcacggaccacccaaggcctctgcttcccgccgccaccctcctcgctgccattctctgggctggaatgtgaagcctcagtcactctaaatgaagaattttcttttgaatgttttgtatgtaaaatagcaagtggctatttttaaagttaagtttgtataaatagttagatattctagatttacattaaattgtaaaataaatggacttattgaagcatatcttgatttttaagcttatcttgattntcaaacatgcatagctatttttatcactctaatcagtaaggctactatctagactcgaatgctttcatacaagtgantttcaaaaattagtcaataaaaattgatgtcagtgcaggcccatgcccgcccncagatacactagttnctaggtctggggccagcctagtattngtactaggcacacagtgatgctgactcgatggcctgagacacacccttgaagaagagctgctnctgggagacnaggtttgnagtggatgaggatgggccaagaaggccggcctacctggcacctatgggatgncagcgtttgctggcagccttggaagaactctatncngcttctnaaggggccgacagttatggcatggcggactggatgcct

SEQ ID NO: 52611 - DNA, 654 bp, Homo Sapiens
acggaggaggaccacccctttgctgtgaagttgcttgcgctctgtaagaaagaaatcaagaattcaaaagatatccagaagctcctgtcaggcatcgcagtgttctgcgggatggtgcagttccccggcgacgtgaggaggcaggccctcctgcagctgtgtctgctcctctgccaccgtttcccgctgatccggaagaccacggccagccaggtgtacgagacattgctcacctacagtgacgtcgtgggcgcggatgtgctggacgaggtggtgactgtgctcagtgacactgcgtgggacgcagagcttgcagtggtgagagagcagcgcaaccgtctgtgtgaccttctgggcgtacccaggccccagctggtgccccagcctggtgcctgctgaagccagtcctggagcccatacctcacccctgcctggtgaggatgtcttgttcctgagggaggccggtgtggaaagcctcgcacagtggtgcctccagctgttgaagggtagcgctggcccttggaggctggcactagctgacagcttttcctctctgcacctgcgctctggtgacttggggtggacgcctctgccttcacttgaacacaaatgtgcttcctataaaatcatgtaccaagaaaaaaaaaaaaaaag

SEQ ID NO: 52612 - DNA, 798 bp, Homo Sapiens
aattggggtgcatcaatgctgagtatcccgactccttcggccattatagagaggccaaattctcccagaccaaacatcactggtggtggaagctgcattttgtgtgggaaagagtgaaaattcttcgagattatgctggccttatacttttcctagaagaggatcactacttagccccagacttttaccatgtcttcaaaaagatgtggaaactgaagcagcaagagtgccctgaatgtgatgttctctccctggggacctatagtgccagtcgcagtttctatggcatggctgacaaggtagatgtgaaaacttggaaatccacagagcacaatatgggtctagccttgacccggaatgcctatcagaagctgatcgagtgcacagacactttctgtacttatgatgattataactgggactggactcttcaatacttgactgtatcttgtcttccaaaattctggaaagtgctggttcctcaaattcctaggatctttcatgctggagactgtggtatgcatcacaagaaaacctgtagaccatccactcagagtgcccaaattgagtcactcttaaataataacaaacaatacatgtttccagaaactctaactatcagtgaaaagtttactgtggtagccatttccccacctagaaaaaatggagggtggggagatattagggaccatgaactctgtaaaagttatagaagactgcagtgaaaatcacagttacaaaagcgacagtcttctatttttgatatttgtccaaacaggacatacaattgaataaaag

SEQ ID NO: 52613 - DNA, 965 bp, Homo Sapiens
aatgagacaaaatccagtagtcagcaggatgtcatattaacaacacaagatatttttgaggatgatatatttgctacggaagcaattaaaccctctcagaaaaccagagagaaggagaaaacattggaatctaatttatttgatgataacattgatatctttgctgacttaactgtaaaaccaaaagaaaagtccaaaaagaaagtggaagccaagtctatatttgatgatgatatggatgacatcttctccactggtatccaggctaagacaaccaaaccaaaaagccgatctgcacaggccgcacctgaaccaagatttgaacacaaggtgtccaacatctttgatgatcccctgaatgcctttggaggccagtagagcacacagggtatccacatgttaccctgcagctacattgttgagttagtgatgatattgtatatgctcatggtcttaactggattacaaaaagcaaatactagaacagctagctcatcttttacccaatgtacttagtatttttctgcactggtttaatcatgcttaatactacaaaacaaaaataaatatttcacagtggttggtttgttttgtttttaaaccacagtttgatttagttagccttgctggggccataatatgcttcaggctgtgtaaaagaagaaatctctttgtggctttcatgggcaggggatctcagagatagcaaatgccacctgaccagaagtctttgttatatggatgggaaccctaacttagggcttggggcaggggaaagagaaagaaaatgagagattattactcctggagccttaccaatatggggaaccaggtttcccctgcaattcctgagggtgcctccggactggccctccaaggcacaacccttgccaacctgggcgccctccccacaggccaaatattttggtatacccaatcctctatttggaacacccttacacacc

SEQ ID NO: 52614 - DNA, 866 bp, Homo Sapiens
aagcgggcacacgcaagggatccgaaaggcagcagagagtatagcagacaacccaatgaacaccacacctggaatgggacttcgaggaaacccgacagcggggcatgccgacccaaggaccgggcgccggagggacggagggacgcgcaggccgagcgcgcggcagccgccaacggccccaagaggcggtccccagagaagcggagggagggcacccgcagcgccgacaacactttggagaggagggagaagcacgagaagagacgagacgtctctccggagcggaggcgagagcggtcacccacccgcaggagagacggctcccccagccggcggagacggtctctggagagactcctggagcagaggaggtcccccgagcgcaggagagggggctcgcccgagcgcagggccaagtccaccgaccggaggcgcgcacgctcccccgagcgcaggagagagcggtccctggacaaaaggaacagagaggacagagccagccaccgagaaagggaagaggcgaatctgaaacaggatgccggcagaagttccagacatcccccggagcagagaaggcgaccttacaaagaatgtagcaccgacctcagtatctgagacgctgagtcacattccaacctttaccgtgtcaaaggttctaagaggaaagtcacaaacctgaaattatttagtttcttacctaatgaagcatctgacacctgatgatcctatgaataacaacaaacattttatgcatttgaaatcttataagaaaaaatatatatgaaaagtattgtgcctgatgtatcatattaaagaaagtatttttaaatgcatacttttttggaaattatttgccaaatgctggc

SEQ ID NO: 52615 - DNA, 203 bp, Homo Sapiens
cccccgcgaagggggtcagcgcccgtcggcatgtattagctctagaattaccacagttatccaagtaggagaggagcgagcgaccaaaggaaccataactgatttaatgagccattcgcagtttcactgtaccggccgtgcgtacttagacatgcatggcttaatctttgagacaagcatatgctactggcaggatcaaccag

SEQ ID NO: 52616 - DNA, 742 bp, Homo Sapiens
cacgaggggaatgtatgtttgaaaccccagaacgagtctttgtagtaatggaaaagctgcatggagatatgttggaaatgattctatccagtgagaaaagtcggcttccagaacgaattactaaattcatggtcacacagatacttgttgctttgaggaatctgcattttaagaatattgtgcactgtgatttaaagccagaaaatgtgctgcttgcatcagcagagccatttcctcaggtgaagctgtgtgactttggatttgcacgcatcattggtgaaaagtcattcaggagatctgtggtaggaactccagcatacttagcccctgaagttctccggagcaaaggttacaaccgttccctagatatgtggtcagtgggagttatcatctatgtgagcctcagtggcacatttccttttaatgaggatgaagatataaatgaccaaatccaaaatgctgcatttatgtacccaccaaatccatggagagaaatttctggtgaagcaattgatctgataaacaatctgcttcaagtgaagatgagaaaacgttacagtgttgacaaatctcttagtcatccctggctacaggactatcagacttggcttgaccttagagaatttgaaactcgcattggagaacgttacattacacatgaaagtgatgatgctcgctgggaaatacatgcatacacacataacgttgtatacccaaagcacttcattatggctcctaatcc

SEQ ID NO: 52617 - DNA, 929 bp, Homo Sapiens
  misc_feature (650)..(650): n is a, c, g, or t
ggttactcggtggtggcggagtctacggaagccgttttcgcttcacttttcctggctgtagagcgctttccccctggcgggtgagagtgcagagacgaaggtgcgagatgagcactatgttcgcggacactctcctcatcgtttttatctctgtgtgcacggctctgctcgcagagggcataacctgggtcctggtttacaggacagacaagtacaagagactgaaggcagaagtggaaaaacagagtaaaaaattggaaaagaagaaggaaacaataacagagtcagctggtcgacaacagaaaaagaaaatagagagacaagaagagaaactgaagaataacaacagagatctatcaatggttcgaatgaaatccatgtttgctattggcttttgttttactgccctaatgggaatgttcaattccatatttgatggtagagtggtggcaaagcttccttttacccctctttcttacatccaaggactgtctcatcgaaatctgctgggagatgacaccacagactgttccttcattttcctgtatattctctgtactatgtcgattcgacagaacattcagaagattctcggccttgccccttcacgagccggcaccaagcaggcaggtggatttcttgggccaccnactccttctgggaagttctcttgaactcaagaactctttattttctatcattctttctagacacacacacatccagactggcaactgtttgtagcaagagccataggtagccttactactttgggcctctttctagttttgaattatttctaagcctttgggtatgatcagagtgaaaatggcagccagcaaaactgatagtgcttttggtcctagatgattttatcaaattaagtggatcgattagttaagttcaggttatggttatgctatgagaac

SEQ ID NO: 52618 - DNA, 522 bp, Homo Sapiens
gcgctgttgtgctggattcgtaggccttgctgggcactctgtacaattagttgcttattacgtatgattactcgcagcgatctattgttccatataaccaaaaagcatggtttattcattgaaacacggttgacctgaactcgtgccttaggaattaatgcccccttatggaacctgcctgaattgcacctgcgggtggaggctccggctgtgaagtcactgaacagaacgtcgctgatggagaaagggctcccgcagaaggaacggcctgtaccgtgcgctccggcacaatcgcgtctcttgtgtctcactcacggaaagaaacaacctgaaggccatcccgtcggtctgcacgtaaccgtgaagacgtgtggccgcgtcccacctgcggctgggtaccctgcacccggcactgtaggagtcacgtgcagcctttctcaggggactgtcattgaaaaggaaacgtttgatgtctgtgtcagctgtctttgtagttaggaaatagatccaataaagccgtat

SEQ ID NO: 52619 - DNA, 245 bp, Homo Sapiens
atgttttaaatgagattcaattaaggatgctacagaacatggcttcaattaagagtgaattcagttttttcttattaaagtcataacttacgtgccacttttatgttattctggactttgggcagtgtgatttattatgtctgtccctccattgaagtgtcactaactttgtcaaaaataccttacactaattagaggtgccagaatttttatactcgctactctggaaagcactctggaaagtg

SEQ ID NO: 52620 - DNA, 644 bp, Homo Sapiens
agtacatagaacagttatggagccatgtgaaaaaaaatagtagttatacaaatgtaaaatgctacacatgaagtatattgcattacctttttgtggcctatggaaagaagtctcagagcacagtaagattcaagtaccatctcccagaattggggtcagcaacaccattttatattttggcaaatgctacccactgtctcccaaacggcagatatctgcatatagttagtcatgtggacacacccttcctctgctacattgcattgccatattagtagtagaattttagtgttgatttaaaagacagtctgccttaaagcagattgcatagtttgcacactgtgaattgtaattaaagtgtaaggggggcttattatgtcaacaactggcatgagaacccccgagcagcagttgaccctgaccatgtgacgtttgtgacagctaggatccccttttcactggcttagcgatctgaaagtccaaattgaaagaagcccagaggctgtatatttcattagatcccaggggaagtacaggatacagcttccttctgttttcctgggaggtcgccagaaagtttgtagagctctgtttctgtcagagactcaaaaaaaaaaagaaaaaagatctttaattaagcggcc

SEQ ID NO: 52621 - DNA, 599 bp, Homo Sapiens
  misc_feature (501)..(501): n is a, c, g, or t
gttctgcatccagcgcttccagcttcctgccctgcagagcatcctgttggcgccggccaccgcagagctggagcccttggctgatggacaggtgtcccagaccgacgaggaagatatggggatgacatatgcggagctctcggtctatgggaaactcaggaaggtggccaagatggggccctacagcatgttctgcaaactcctcggcatgtggagacacatctgcaccccgagacaggtcgctgacaaagtgaagcggtttttctccaagtactccatgaacagacacaagatgaccacgctcacacccgcgtaccacgccgagaactacagccctgaggacaacaggtttgatctgcgaccatttctgtacaacacaagctggccttggcagtttcggtgcatagaaaatcaggtgctacagctcgagagggcagagccacagtccctggacggcgtggactgaggccggttccttcctggaggcctcctgtcctcggngaccccagcacctcatcatcagcattgctggagccaagggcctctgagcccaagctaagccatcatgtcctctgtaacctgcacgtacacatccagat

SEQ ID NO: 52622 - DNA, 892 bp, Homo Sapiens
cagatgttcctcatccgtgtcctacttccccttcacaaggtcaagtccctgagtgtctaccaccctcagctggcatactgtgtggtacaattcctggagaaggagagcagtctgactgagccggtaattgtgggacttctcaagttttggcccaagacccacagccccaaggaggtgatgttcttgaatgagctggaggagattctggacgtcattgaaccttctgagttcagcaaagtgatggaacccctcttccgccagctggccaagtgtgtctctagcccccatttccaggtggcagagcgtgctctctattactggaacaatgagtacatcatgagcctgataagtgacaatgctgcccgagtcctccccatcatgttccctgcactctacaggaactccaagagccactggaacaagacaatccatggactgatctataatgccctgaagttgtttatggaaatgaatcagaagctgtttgatgactgcacacaacaatacaaggcagagaagcagaagggccggttccgaatgaaggaaagggaagagatgtggcaaaaaatcgaggagctggcccggcttaatccccagtatcccatgttccgagcccctccaccactgccccctgtgtactcgatggagacagagacccccacagctgaggacatccagcttctgaagaggactgtggagactgaggctgttcagatgctaaaagacatcaagaaggagaaagtgctgctgcggaggaagtcggagctgccccaggacgtgtacaccatcaaggcactggaggcgcacaagcgggcggaagagttcctaactgccagccaggaggctctctgacccctcacgttcctaccacagggccacagcccacacagcc

SEQ ID NO: 52623 - DNA, 500 bp, Homo Sapiens
attttatacgttgataaaacttataaatttcattgattaatctcctggaagattggtttaaaaagaaaagtgtaatgcaagaatttaaagaaatatttttaaagccacaattattttaatattggatatcaactgcttgtaaaggtgctcctcttttttcttgtcattgctggtcaagattactaatatttgggaaggctttaaagacgcatgttatggtgctaatgtactttcacttttaaactctagatcagaattgttgacttgcattcagaacataaatgcacaaaatctgtacatgtctcccatcagaaagattcattggcatgccacaggggattctcctccttcatcctgtaaaggtcaacaataaaaaccaaattatggggctgcttttgtcacactagcatagagaatgtgttgaaatttaactttgtaagcttgtatgtggttgttgatcttttttttccttacagacacccataataaaatatcatatt

SEQ ID NO: 52624 - DNA, 745 bp, Homo Sapiens
cgcaatgtgctggtgactgaggacaatgtgatgaagattgctgactttgggctggcccgcggcgtccaccacattgactactataagaaaaccagcaacggccgcctgcctgtgaagtggatggcgcccgaggccttgtttgaccgggtgtacacacaccagagtgacgtgtggtcttttgggatcctgctatgggagatcttcaccctcgggggctccccgtatcctggcatcccggtggaggagctgttctcgctgctgcgggagggacatcggatggaccgacccccacactgccccccagagctgtacgggctgatgcgtgagtgctggcacgcagcgccctcccagaggcctaccttcaagcagctggtggaggcgctggacaaggtcctgctggccgtctctgaggagtacctcgacctccgcctgaccttcggaccctattccccctctggtggggacgccagcagcacctgctcctccagcgattctgtcttcagccacgaccccctgccattgggatccagctccttccccttcgggtctggggtgcagacatgagcaaggctcaaggctgtgcaggcacataggctggtggccttgggccttggggctcagccacagcctgacacagtgctcgaccttgatagcatggggcccctggcccagagttgctgtgccgtgtccaagggccgtgcccttgcccttggagctgccgtgcctgtgtcctgatggcccaaat

SEQ ID NO: 52625 - DNA, 954 bp, Homo Sapiens
  misc_feature (8)..(8): n is a, c, g, or t
  misc_feature (722)..(722): n is a, c, g, or t
gaagggangaggacaggccctctccgccgttctctcctggggtagggggctgcgggctcctgcgggctcctgagcggttcctcctcgcagggacaccgggtggggcgctgtggctgggggtcctgcggctgctgctcttcaagctgctgctgtttgacctgctcctgacctgcagctgcctgtgcgaccccgcgggcccgctgccttcccccgcaaccaccacccgcctgcgagccctcggctcccatcgactgcacccggccacggagactgggggacgagaggccaccagctcacccagaccccagcctcgggaccgccgctggggtgacacccctccgggtcggaagcccgggagcccagtatggggggaagggtcttacctcagcagttaccccacttgcccagcacaggcctggtgctcaagatctgccctcggggctccttcctccagtcttggagcattttttgcaggtgacctgcctcctcctctgcaggctggagctgcctgagggcagggctctacctcccctgcgtcacactgtggtgaggctgtgtctctgccatccaaaagggggccccttgagaatggtgatccacccagttacagggggcatttaggggagcagatgactggagaacattaaaaaagaacttaaatgacacagcaaatgaaaaatatttgaattcatgtctatcctggggaggaagggattttgccnaatttaaagtaggaaaaatcccggaaagctcccttgaagaaaaagggcttcctgaaaaagaacttgggaaattgcaaagggggactggggggtgggaaaaaggggttggcctcctccccccaaaggaaagcgggggaaggcccccttttcttcctccccggggcccaaccttctgggaaaaggccaggggcaaaaaacccccaaacccccggaaaggggggggggggggccc

SEQ ID NO: 52626 - DNA, 600 bp, Homo Sapiens
gaaaaagctgttgtgacagaaccagcaaaaggtgaagaggccttccagatgagtgaagttgatgaggaatctggattaaaggattcagaaccagagcgaaaacgcaagaagactgaagactcttcttcaggcaaatcagtggcgtctgatgtccctgaggaattagactttcttgtacctaaggctggattcttctgtccaatttgttccctcttctactcaggtgaaaaagcaatgacaaatcactgcaagagtacacgtcataagcaaaatactgagaaattcatggccaagcaaagaaaggaaaaggagcagaatgaggctgaagaaagaagctctaggtgattgggggaaaggaaagaattcactagaaatttgtttagggtccagttgatttgtgtatttttgttatcatttaatttgtaattttcgtttcagaagcaaatattcgtgttgtacaaatttctgattgccctaaatgtagagagactgatggggaaagtatgatgggtttgatttttatatcaaatcatcaggcatggagaaatatcttttagaagtgttaaaataaatgttcctactgtatatttaaaaaaaaaa

SEQ ID NO: 52627 - DNA, 969 bp, Homo Sapiens
gttttctctaagtaaacaaagtaaaaggaacaataaggatgcaggcgtagtaatagctgtggaaaagatgaaactacagccacagtgacctgtgggcagcctgcgtagagataagctgaggtgtcagtcagactgatcctggtaacgatactccatggctgcatgaagatgctggaggcatcaagtgggtggccttaactctagtggattcactaggcaatgtaaattggttagtgggttcccgtaagtgcctgtaacaataaaatttctttttcaatgtccccaattcaaactggcctccttaactatccagaatcagtgatgccgtgtcatctgttcatcttaaaataaacacttcttactttatgggatgtaaatatcaaagagaagatgaaatgaaaagcttttacatatataacgtgtttgttaattctaattgtcagtaaaaatgtgaatgttgaaagttgaaatgtgaatgttgaagttggcacctttgtagtaatcagaattcttgcagagaagagaaagagagtgaagagtatactttacaaagctcgaaggagacttgaggtgtcgtttgtgctggtgttcctctagccacaggggctgctgaacggatcctgtccagtggtccagcaacctcttgggggctgtatgtgctggcttggtttggctgctgggttccagaatgagctgggccttttcggtgcgggtgaactctgtatcccctgatgtgtctggcagaagaaagctggccgatggtgcttcagacgcctactacggggctcccaggatcagtgtacctgtgctgttcacaaggcgatctggcaacgccaacctttcccgcagtcgtgatctaaccacattaaatcgcccacgtagaccactcatcggccgggtatatagatactcacaccccagacgaccttcgaccaggaaaaagcgacaataatgaagtagtaacgattg

SEQ ID NO: 52628 - DNA, 829 bp, Homo Sapiens
  misc_feature (754)..(754): n is a, c, g, or t
  misc_feature (799)..(799): n is a, c, g, or t
agaggtaatccggaggacggtggctgacgagatccggcatggagcatctggagcgctgcgagtggttgttgcgggggacgctggtgcgggcggccgtgcggcgctacctgccctgggccctggtggcctccatgctggcgggctccctcctcaaggagttgtccccgttgcccgagggctacctcagcaacaagcgcaacgtcctcaacgtgtattttgtcaaagtggcctgggcctggacgttctgtctccttctgcctttcattgccctcaccaactaccatctgaccggcaaggctggcttggtcctgcggcggctgagcaccctgcttgtgggcacggccatctggtacatctgcacctccatcttctccaacatcgaacactacacgggcagctgctaccagtccccagccctggagggggtcagaaaggaacaccagagcaagcagcagtgccaccaggaagggggcttttggcatggctttgacatctcaggtcactccttcctgctgaccttctgcgccctcatgattgtagaagagatgtctgtgctgcatgaggtgaagacggaccgaagccactgcctccacaccgccatcaccaccctggttgtggccctgggcattctgactttcatctgggtgttgatgtttctgtgcacagctgtttatttccacaacttgtcccagaaagtgtttggcaccttgtttggtttgctgagctggtacgggacatacgggtttttgtatcngaaaagcttttcccaggacttcctcccagagctgtagtttgattngaagcagatagttacagaaaataaagataa

SEQ ID NO: 52629 - DNA, 499 bp, Homo Sapiens
aggaaagccaaaagaaaaaccaacaaggggctggctcagtacctcaagcaatataaggaagccatacatgatatgaatttcagcaatgaggacatgataagagaatttgacaacatggctagggtggaggataaaaggagaaaaagcaaacagaaattgggggcgtttttgtggatgcaaagaaatttacaggaccccttctatcctaggggtccaagggaattcaggggtggctgcagggccccacgaagggacactgaagacattccttatgtgtagtgtccctggcaggcatttgtcaggccatatgttttaaccttatggtaatactttgctttagtcgttcctcctgctaccagtagcgttttgacccacctgccagtgtttgcttgctctatgtttcagtagcagattttcacacatgtgcattgcagagacgtcatgattcgtggaaaaataaagcagcttataatatcaaaaaaaaaaaaaaaaaaaaaaa

SEQ ID NO: 52630 - DNA, 619 bp, Homo Sapiens
ctttagcccaaagccacaacttgcatagtaatgcctcaaaaaatgttaacatctttactgttattattattactactgcatctattacagtagcaattgagtaatgaatacatgaatgttataatgttaaattactaaccttttaaaaatattaagcattgcaatatattaatactttaaatcttttaggaagataagttaccctgcagaataatgaagtttcacaacctcagcactgttggtgtttggggctggtaattgtttattgtgggagactgtcctgtgcattgtaagatgtttagtagcatccctggcctctacccctacatgcaagtagtaccccaccaccaaaaccacaatcccacaaccaaaaatgtctgcagacattgtcaagtgtctcctggttagggaaaaggagacaaaagtaacccccaggtaagaccactgctatagagaaatactaccttatttaaaatcttccattaaggtaatatatgtaaggccaggtgcgtacacctgtaatcccagcaccttgggaagccaaggcaggaggatcgcttgagatcaggagtttgagaccagcctgggcaacatacagagccctatgtctacaaaaagt

SEQ ID NO: 52631 - DNA, 895 bp, Homo Sapiens
  misc_feature (654)..(654): n is a, c, g, or t
  misc_feature (830)..(830): n is a, c, g, or t
taagcgagccttcgagctgcaaaagtcagccttcagtgaggaggttaacatcaagacagctgaggcccagttggcctatgagctgcagggggcccgtgaacagcagaagatccggcaggaagagattgagattgaggttgtgcagcgcaagaaacagattgccgtggaggcacaggagatcctgcgtacggacaaggagctcatcgctacagtgcgccggcctgccgaggccgaggcccaccgcatccagcagattgccgagggtgaaaaggtgaagcaggtcctcttggcacaggcagaggctgagaagatccgcaaaatcggggaggcggaagcgacagtcatcgaggcgatgggcaaggcagaggctgagcggatgaagctcaaggcagaagcctaccagaaatacggggatgcagccaagatggccttggtgctagaggccctgccccagattgctgccaaaatcgctgccccacttaccaaggtcgatgagattgtggtcctcagtggagacaacagtaaggtcacatcagaagtgaaccgactgctggccgagctgcctgcctctgtgcatgccctcacaggcgtggacctgtctaagatacccctgatcaagaaggccactggtgtgcaggtgtgaggctcctgcangcccactctcttcagcagccacccggccctccctccagcacccgtttttaatcccacagaacaacggggaacgttactggactctgggtgccttatctcgaaaggggaccagaaagtgctgtgtggttcagggccatcctctgggctgtctttcctggtcctctccctgtgctggnccaaccttcctccctcttttcctctcccttttacccccaccttttcccctggccactttttcatc

SEQ ID NO: 52632 - DNA, 701 bp, Homo Sapiens
  misc_feature (469)..(469): n is a, c, g, or t
  misc_feature (483)..(483): n is a, c, g, or t
  misc_feature (491)..(491): n is a, c, g, or t
  misc_feature (524)..(524): n is a, c, g, or t
  misc_feature (531)..(531): n is a, c, g, or t
  misc_feature (566)..(566): n is a, c, g, or t
  misc_feature (571)..(571): n is a, c, g, or t
  misc_feature (579)..(579): n is a, c, g, or t
  misc_feature (595)..(595): n is a, c, g, or t
  misc_feature (605)..(605): n is a, c, g, or t
  misc_feature (609)..(609): n is a, c, g, or t
  misc_feature (680)..(680): n is a, c, g, or t
ctggaggacagcagcctcttggaggtggatgggccagcgatgaagaatgtggaattcaaggctcagaagcgagggctgtgcacagttcaccgagaagctgacttcttctggagcctgtgtactgcggacatgtccctgctggagcagtctcacagctcaccgtccctgtacctgcagtgcctctcccagaaactgagacaagaaagaaaacgcccactcctggatcttcacattgaactcaatggctacatgtatgattggaacagcagagtttctgccaaggagaaatattatgtctggctgcagcacactctgagaaagaaacttatcctctcctacacataagaaaccaaaaggctgggtgtagtggctcacacctgtaatcccagcactttgggaggccaaggagggcagatcacttcaggtcaggagttcgagaccagcctggccaacatggtaaacgctgtcnctagtaagaatacnaaaattanctgggtgtgggtgtgggtacctgtattccccanttacttnggaagctgaagtgggaagatctttgaacccagganttcanggtcatancatgctgtgattgttncctacaaatnaccnctgcataccaacctgggcaatataacaagatcccatctctttaaaaaaaaaaaaaaaaaggacaggaactntctttaaataaaaaaaaaaaa

SEQ ID NO: 52633 - DNA, 676 bp, Homo Sapiens
  misc_feature (483)..(483): n is a, c, g, or t
gaggatggcttgagcctgggaggcagaggttgcagtgtggttgagattgcactactgctctccagcctgggtgacaaagcgagaccctgtttcaaaaaaattaaaaacagcagatgagtttcttttttaaaactggattcaggatcagtgtaatgttactgatcttcaatagtaaccacaaacttaaaaaatctttacatattgccgtatgtattagatattctgatatttaatagctgagacagtcataccttatagtattattatcccaattttactagtgaggaaacaagcagttaataactgttagagctcagattcacattctgaaagttatagaaattaagaacatagagcctatgttcttaatttcaccaaaatatctcctcccaaattatacataccctttcaaacctaccttcctctcttagtaattaatgataccgtctttcaatttacatgaatcagtatcactattagtanatgtattttatgccattatataacagactaatttatttattctgtactctactgtgatattttcctctatcttctgcaagattttcatttttaaaaaatactgtcttggctggggtgcagtggctcatgcctgtaatcctggcctaggcaaccagagtgaaactccatctcaaaaaaaaaaaaaaaaagggcg

SEQ ID NO: 52634 - DNA, 540 bp, Homo Sapiens
gtggacagagcaagcacatactgttacggttctggccatcaattcaattggtgcttctgttgcaaattttaatttaaccttttcatggcctatgagcaaagtaaatatcgtgcagtcactcagtgcttatcctttaaacagcagttgtgtgattgtttcctggatactatcacccagtgattacaagctaatgtattttattattgagtggaaaaatcttaatgaagatggtgaaataaaatggcttagaatctcttcatctgttaagaagtattatatccatgatcattttatccccattgagaagtaccagttcagtctttacccaatatttatggaaggagtgggaaaaccaaagataattaatagtttcactcaagatgatattgaaaaacaccagagtgatgcaggtttatatgtaattgtgccagtaattatttcctcttccatcttattgcttggaacattattaatatcacaccaaagaatgaaaaagctattttgggaagatgttccgaaccccaagaattgttcctgggc

SEQ ID NO: 52635 - DNA, 953 bp, Homo Sapiens
  misc_feature (745)..(745): n is a, c, g, or t
  misc_feature (838)..(838): n is a, c, g, or t
gcctgggtggcgaggcgctggtgcaacacctgccagctctactacatgggggacctgatccaacaccgcaggacacaggaccacaagattgccaaacaatccttgcgacccttctgcaccgtttgcaaccgctacttcaaaacccctcgcaagtttgtggagcacgtgaagtcccaggggcataaggacaaagccaaggagctgaagtcgcttgagaaagaaattgctggccaagatgaggaccacttcattacagtggacgctgtgggttgcttcgagggtgatgaagaagaggaagaggatgatgaggatgaagaagagatcgaggttgaggaggaactctgcaagcaggtgaggtccagagatatatccagagaggagtggaagggctcggagacctacagccccaatactgcatatggtgtggacttcctggtgcccgtgatgggctatatctgccgcatctgccacaagttctatcacagcaactcaggggcacagctctcccactgcaagtccctgggccactttgagaacctgcagaaatacaaggcggccaagaaccccagccccaccacccgacctgtgagccgccggtgcgcaatcaacgcccggaacgctttgacagccctgttcacctccagcggccgcccaccctcccagcccaacacccaggacaaaacacccagcaaggtgacggctcgaccctcccagcccccactacctcggcgctcaacccgcctcnaaacctgatagagggacctccctgtccctggcctgcctgggtccagatctgctaatgctttttaggagtctgcctggaaaactttgacatggntcatgtttttactcaaaatccaataaaaaccaggtaggtttggctggtgcaaaaaaaaaaaaaaaaaactccgagggatctattgtcgggggcgggagaaagagagggattgaaa

SEQ ID NO: 52636 - DNA, 965 bp, Homo Sapiens
  misc_feature (784)..(784): n is a, c, g, or t
  misc_feature (921)..(921): n is a, c, g, or t
gactcagagatgagacagttgcctaaaaacttctgggaacaaggccacgtgctgctgggtctcagtcctccacttcccgtgtcctctggaagttgtcaggagcaatgttgcgcttgtacgtgttggtaatgggagtttctgccttcacccttcagcctgcggcacacacaggggctgccagaagctgccggtttcgtgggaggcattacaagcgggagttcaggctggaaggggagcctgtagccctgaggtgcccccaggtgccctactggttgtgggcctctgtcagcccccgcatcaacctgacatggcataaaaatgactctgctaggacggtcccaggagaagaagagacacggatgtgggcccaggacggtgctctgtggcttctgccagccttgcaggaggactctggcacctacgtctgcactactagaaatgcttcttactgtgacaaaatgtccattgagctcagagtttttgagaatacagatgctttcctgccgttcatctcatacccgcaaattttaaccttgtcaacctctggggtattagtatgccctgacctgagtgaattcacccgtgacaaaactgacgtgaagattcaatggtacaaggattctcttcttttggataaagacaatgagaaatttctaagtgtgagggggaccactcacttactcgtacacgatgtggccctggaagatgctggctattaccgctgtgtcctgacatttgcccatgaaggccagcaatacaacatcactaagagtattgagctacngcatcagaaaaaaaagaagagaccattcctgtgatcatttcccccctcagaacatatcagcttctctggggtcagactgaaatccccggttaaagtgtttctgggaaccggcacaccttaaccaccatgcctgtggntggacggccaatgacaaccacatagagagcgcctacccgggaag

SEQ ID NO: 52637 - DNA, 633 bp, Homo Sapiens
cagagctgcagagcaggaaccagggccactgggctgactggctacaggcgtacagagcccggctggacaaggacctggaaggcgctggggacgctgccgcctggcaggctgagcacgtgcgcgtgatgcacgccaacaacccgaagtacgtgctgaggaactacatcgcgcagaatgccatcgaggctgccgagcgcggggacttctcagaggtgcggcgggtgctgaaactactggagaccccttaccactgcgaggcgggggccgccacagacgccgaggccacggaagccgacggggcggacggcaggcagcgctcctacagcagtaagcccccgctctgggcagcagaactgtgcgtgacatgatcttcgtaacggcctcggcacgctccacacccctggagtctcccgaggcccccatgtgctgctgagtggccaagatgatgccaggctgccctatacactgggggattctgccctggcccatgcacacccgtctttccatgatggcagagacatccagtcaggacctgacccgtctctgtctgaggccggctcagcagtgcagcctggtccctgggggctggacccaggctcctaaataaaccagcaactccctcgaaaaaaaaaa

SEQ ID NO: 52638 - DNA, 766 bp, Homo Sapiens
  misc_feature (743)..(743): n is a, c, g, or t
cgccaccgccgaggaaaaccgtgtactattagccatggtcaaccccaccgtgttcttcgacattgccgtcgacggcgagcccttgggccgcgtctcctttgagctgtttgcagacaaggtcccaaagacagcagaaaattttcgtgctctgagcactggagagaaaggatttggttataagggttcctgctttcacagaattattccagggtttatgtgtcagggtggtgacttcacacgccataatggcactggtggcaagtccatctatggggagaaatttgaagatgagaacttcatcctaaagcatacgggtcctggcatcttgtccatggcaaatgctggacccaacacaaatggttcccagtttttcatctgcactgccaagactgagtggttggatggcaagcatgtggtgtttggcaaagtgaaagaaggcatgaatattgtggaggccatggagcgctttgggtccaggaatggcaagaccagcaagaagatcaccattgctgactgtggacaactcgaataagtttgacttgtgttttatcttaaccaccagatcattccttctgtagctcaggagagcacccctccaccccatttgctcgcagtatcctagaatctttgtgctctcgctgcagttccctttgggttccatgttttccttgttccctcccatgcctagctggattgcagagttaagtttatgattatgaaataaaaactaaataacaattaanaaaaaaaaaaaaaaaaaaaaaaa

SEQ ID NO: 52639 - DNA, 547 bp, Homo Sapiens
aatgtgagctcatccactgctgctgcagcgtggtgatcagggagtcacagacaagatcgggaatggtgtgtgtgtgtgtgtgtgtgtgtgtgcacgtgtgtgtggctaaattaagtcatactgtcaaccacacgtgatctcgtctgaaacagtgtttggaagtgggaacagttttgtcctgtatgctgatgtgtccagaatttcatttaatgatagacggaaaatgtgtggttactgaaaactgtatatgatacagaatttcataagagccatgctgttgggcaaagcaactctttttcaaccactgctcatcagtttctgtagagacaaaaactctgtacatattttggaatctgaagaatcctatgtaaatcatttgttacttaagtctgtgaaaaacatatttctttggaggaaaatgtatgcatttataaggtgttccatggaatcagtttttattgtatcgatataattgtctctaagtgttgactgtcttcattgcaatatgaaattcattaaaatgtccatgttccataattactataaa

SEQ ID NO: 52640 - DNA, 856 bp, Homo Sapiens
cattatgctattaatgatcgtctagatgccatagaagacctcatggttgtgcctgacaaaatctccgaagttgtagagcttctaaagaagcttccagatcttgagaggctactcagtaaaattcataatgttgggtctcccctgaagagtcagaaccacccagacagcagggctataatgtatgaagaaactacatacagcaagaagaagattattgattttctttctgctctggaaggattcaaagtaatgtgtaaaattatagggatcatggaagaagttgctgatggttttaagtctaaaatccttaagcaggtcatctctctgcagacaaaaaatcctgaaggtcgttttcctgatttgactgtagaattgaaccgatgggatacagcctttgaccatgaaaaggctcgaaagactggacttattactcccaaagcaggctttgactctgattatgaccaagctcttgctgacataagagaaaatgaacagagcctcctggaatacctagagaaacagcgcaacagaattggctgtaggaccatagtctattgggggattggtaggaaccgttaccagctggaaattcctgagaatttcaccactcgcaatttgccagaagaatacgagttgaaatctaccaagaagggctgtaaacgatactggaccaaaactattgaaaagaagttggctaatctcataaatgctgaagaacggagggatgtatcattgaaggactgcatgcggcgactgttctataactttgataaaaattacaaggactggcagtctgctgtagagtgtatcgcagtgttggatgttttactgtgcctggctaactatagtcgagggg

SEQ ID NO: 52641 - DNA, 586 bp, Homo Sapiens
gggagtcacatgacaatagtggagggaagagtcagcagataaacaagtgaacaaaggtctctgtgtttacctagagcagaggaccctgcggccttccgcagtgtttgtgtccctgggtacttgagattagggagtggtgatgactcttaaggagcatgctgccttcaagcatctgtttaacaaagcacatcttgcaccgcccttaatccattcaaccctgagtggacacagcacatgtttcagagagcacagggttgggggtaaggtcaccgatcaacaggatcccaaggcagaagaatttttcttagtacagaacaaaatgaaaagtctcccatgtctacctctttctacacagacacggcaaccatccgatttctcaatcttttccccacctttcccccctttctattccacaaaaccgccattgtcatcatggcccgttctcaatgagctgttgggtacacctcccagacggggtggtggccgggcagaggggctcctcacttcccaataggggcggccgggcagaggcgcccctcacctcctggacggggcggctggccgggcggggggctgacccccccaa

SEQ ID NO: 52642 - DNA, 727 bp, Homo Sapiens
  misc_feature (559)..(559): n is a, c, g, or t
ttttttttttttttttttgatacagagactcactctgtcacccaggctggagtgcaatggtttgatctcagcttactacaacctctgccacctgggttcaagagcgagactctgtctcaccaaaaacaaaaaaaccatgctgagtgaagaaagccaaaatgccgttcacaagagaatatgtaccatgtgcttccaccccatttatatgaaattctagaacaggcagaactgtaaaagagtacatcatgttgcctgggctgggagaggggagatttccaggtgatgaaaatattctttactttgattgacatggtggtgaagggggtatgttcatttgtcaaactcatcaatttatatacataaaatgaatgcatttattgtatgtaaattcaacctcaataaagtatatttgaaaaattttgctgggtgcggtggctaacgcctgtaatcccagcactttgggaggctgaggcaggtggatcacctgaggtcaggagttcaagaccagcctggccaacacggtgaaaccccgactgtactaaaaatgcaaaaaaattanctgggcgtggcggtgtgtgcctgtaatcccagctactcaggaggctgaggcaggagaatcacttgagccccggcggaggttgcagtgagcaaagatcacaccattgcactccagcctgggtgacagagtgagtctctgtatcaaaaaaaaaaaaacctcgtcccgaat

SEQ ID NO: 52643 - DNA, 448 bp, Homo Sapiens
  misc_feature (83)..(83): n is a, c, g, or t
tgaggtctgcatggaaagctatgctttgaaccttgacaacccgtttctcctggaatatgtgatatgccacattgagaaccatnatggatttctacagtcgattagaacatgattcaatagcattgcttttgattttcagaattcatggtagctcactcaatgaaattgcttcctagatgtagccatcctgattttgagagtggaaaatattatttatcaaaatattaagagcaatttcaaaatagatctgtgagcgatttatgggcctcttgcaaaatggtatacatgttgactgactgatctggaaaaggttaatgataattactgtcagatatttttttacctgaaatttttattggagtattaaaacttatttggagtcctctccgtttcttttctctgtaggtttacccaagagaatggttctgttacccgttatgaaatttcc

SEQ ID NO: 52644 - DNA, 764 bp, Homo Sapiens
  misc_feature (758)..(758): n is a, c, g, or t
  misc_feature (764)..(764): n is a, c, g, or t
ttaattggagaatcaagtagaaaacatcctgccattcactgtaaaaaatgggcagatattgttactgatctaaacactcaaaatccagaatacctggatatccggcacttagagaggggactgcagtatagaaaaacaaagaaggttgggggaaatttgcattgcatcatagcattccagagacttaactggcaaagatttggcctttggaactttccatttggaaccattagacaagaatcacaacctccaacacatgcccagggaattgccaaatctgagagtgaagacaatatttccaagaagcagcatgggcgtctgggccggtctttcagtgctagtttccatcaggactcggcatggaaaaagatgtctagtatccatgagagaaggaacagtggttaccagggttacagtgattacgatgggaatgattgactatgcttgctactgaacagctggcattatatatgaaactgctatatacaggactgtataaagacagtagaagattttagtaagcctacattaaataggagcagatcttgtggtataaaaaataaccttgtagttctccagatactaagcttgtatatgattatggtgggtgatttcagatatataagcagataagcacagattattgtcctttcaagttaagagtatataatctgggacagaaaaatttcacaaaattcaataaaaatttacaactgtttgtctaaaataaagtgaaaaccacaaattttcactttaantagccn

SEQ ID NO: 52645 - DNA, 752 bp, Homo Sapiens
tgccatttaaagcttattaaaactcatttttgttttcattatctcaaaactgcactgtcaagatgatgatgatctttaaaatacacactcaaatcaagaaacttaaggttacctttgttcccaaatttcatacctatcatcttaagtagggacttctgtcttcacaacagattattaccttacagaagtttgaattatccggtcgggttttattgtttaaaatcatttctgcatcagctgctgaaacaacaaataggaattgtttttatggaggctttgcatagattccctgagcaggattttaatctttttctaactggactggttcaaatgttgttctcttctttaaagggatggcaagatgtgggcagtgatgtcactagggcagggacaggataagagggattagggagagaagatagcagggcatggctgggaacccaagtccaagcataccaacacgagcaggctactgtcagctcccctcggagaagagctgttcacagccagactggcacagttttctgagaaagactattcaaacagtctcaggaaatcaaatatgcaaagcactgacttctaagtaaaaccacagcagttgaaaagactccaaagaaatgtaagggaaactgccagcaacgcaggcccccaggtgccagttatggctataggtgctacaaaaacacagcaagggtgatgggaaagcattgtaaatgtgcttttaaaaaaaaatactgatgttcctagtgaaa

SEQ ID NO: 52646 - DNA, 886 bp, Homo Sapiens
gctaaagggagaatgcatggcaagttctctttggtagatctggcagggaatgagcgaggcgcggacacttccagtgctgaccggcagacccgcatggagggcgcagaaatcaacaagagtctcttagccctgaaggagtgcatcagggccctgggacagaacaaggctcacaccccgttccgtgagagcaagctgacacaggtgctgagggactccttcattggggagaactctaggacttgcatgattgccacgatctcaccaggcataagctcctgtgaatatactttaaacaccctgagatatgcagacagggtcaaggagctgagcccccacagtgggcccagtggagagcagttgattcaaatggaaacagaagagatggaagcctgctctaacggggcgctgattccaggcaatttatccaaggaagaggaggaactgtcttcccagatgtccagctttaacgaagccatgactcagatcagggagctggaggagaaggctatggaagagctcaaggagatcatacagcaaggaccagactggcttgagctctctgagatgaccgagcagccagactatgacctggagacctttgtgaacaaagcggaatctgctctggcccagcaagccaagcatttctcagccctgcgagatgtcatcaaggccttgcgcctggccatgcagcctgaaaagcaggctagcagacaaataaacagcaagaaaacggccccattgacgactggcaataaaaatctgtttgggttgaaccccaccctcttccctgggccctcccccaagaattttgggtacctggggggggcctaggcagggttctgaacctggggaaaaggttttgggaaaaaggcccaagttttggggg

SEQ ID NO: 52647 - DNA, 661 bp, Homo Sapiens
  misc_feature (661)..(661): n is a, c, g, or t
ggagcggtacaaatcggaagatgaggcgaatcgcgaccgagtcgcggccaaaaacgccctggagtcctatacctacaacatcaagcagacggtggaagacgagaaactgaggggcaagattagcgagcaggacaaaaacaagatcctcgacaagtgtcaggaggtgatcaactggctcgaccgaaaccagatggcagagaaagatgagtatgaacacaagcagaaagagctcgaaagagtttgcaaccccatcatcagcaaactttaccaaggtggtcctggcggcggcagcggcggcggcggttcaggagcctccgggggacccaccatcgaagaagtggactaagcttgcactcaagtcagcgtaaacctctttgcctttctctctctctcttttttttttgtttgtttctttgaaatgtccttgtgccaagtacgagatctattgttggaagtctttggtatatgcaaatgaaaggagaggtgcaacaacttagtttaattataaaagttccaaagtttgttttttaaaaacattattcgaggtttctctttaatgcattttgcgtgtttgctgacttgagcatttttgattagttcgtgcatggagatttgtttgagatgagaaaccttaagtttgcacacctgttctgtagaagcn

SEQ ID NO: 52648 - DNA, 775 bp, Homo Sapiens
  misc_feature (713)..(714): n is a, c, g, or t
  misc_feature (729)..(729): n is a, c, g, or t
ttaagatgctcaacaagaaaaaaatgcaaatgtaatatttttttcaaattacttctttattgacttgtccaaatttcaaaagtgcctacccttcaataaaacttttttattctgatctccataaattacttagtcttctatgtatagctatcaaggaaataaaaccaattttgccacagccacaactgtaaatgtttttgtacccatgctgaaactcataacaacacagacataaaaatagctgtgaggttttgctttttttgttgtcagctatcttaagaatcattaaatacacctgctttgggtaaaactctttgcaagcagtaattaacactagtaacagtgaaagcacaagatttccaaatcagtcgttttctcaaaaaaatatcgtataagtgactcatcctgtctgctaactccagacctcccagcttgaagccaaatctttccatgtgagattgatatggatttcctagaagtactggaatgttgtcatatcttgccctattttaattctgctatagaaaacaattgccttcacttttaaggagtaatttgaatattaataactctggtctagattttcatataatgtattaaagacaaagtagtgaacatcaatgaacatctgatagagataaactgtaatcaggcataagcttgtttgtatgttctggcagtgactaatcagtaaatgatgtcggtttgcccanntatcacttatcttcngtatttttcccccggtcgtgtaaatagtataacctttcatttaggg

SEQ ID NO: 52649 - DNA, 582 bp, Homo Sapiens
accctccttcatgctcatgctaagaggagtgaagaaagaagacaagactttggctgtgggcatccagttcatgttcctgaggattttggcctggatgcccagccccgtgatccacggcagcgccatcgacaccacctgtgtgcactgggccctgagctgtgggcgtcgagctgtctgtcgctactacaataatgacctgctccgaaaccggttcatcggcctccagttcttcttcaaaacaggttctgtgatctgcttcgccttagttttggctgtcctgaggcagcaggacaaagaggcaaggaccaaagagagcagatccagccctgccgtagagcagcaattgctagtgtcggggccagggaagaagccagaggattcccgagtgtgagctgtcttggggccccacctggccaagagtagcagccacagcagtacctcctctgagtcctttgcccaagattgggtgtcaagagccctgtgttccattctggctcctccactaaattgctgtgtgacttcaggcaagacattgatcctctctcagcctttgcttgctagtctgaaccaaagagttgtttg

SEQ ID NO: 52650 - DNA, 625 bp, Homo Sapiens
ctgagccttgataaactagaagctcagctgaaagcttgcaactgccgactcatcttttcaaaagcaaaaccatctgtattagccttgtgccttctcaatttggaagtggaaactttgaaatctgttgaattactggaaattctcttgctagttaaaaaacattccaagattaatgacactgagttcttctactggagagagttggtttctaaatgcctagccgagtattcttctcctgaatgttgcaaaccagatcttaagaagttggtttggatcgtttcaaggcgcacagcccagaacctccacaacagctactatagtgttcctgagctgccaacgatacctgaggggggttgttttgatgaaagtgaaagtgaggactcttgtgaagatatgagttgtggagaggagagtctcagcagctctcctcccagtgatcaagagtgcaccttctttttcaacttcaaagtggcacaaacactgtgctttccatcttagaaatctgattgttctgtcagaatttatatttacaggtttcaaagcaataaatgggggaataggtagtttccctggtttagcccccatctagtcagggaattaatatactggaatacctaccttctat

SEQ ID NO: 52651 - DNA, 577 bp, Homo Sapiens
gatgcctgcagcccgtgggagcaagtcctggcctttgcagttgcaaaaactggctgcaagctgctccagccccagaggaactggccaagctccagagggcctccttggagggcctcagagggagagagaactgctcagtaattttgatcactttgggcttatttcaaaacctttgtccctcagttccaggaggcagcatttgccaatggaaagctctaggaaacaccagtcttgagaggtggccagccagactgcctgtccacatgcgtgtcagcacatacagccgcttcctggaagccgcctggaatgtcttcacggcagcgttttgctcacacagcagcttttgcacgccccaggcagccccgactgctgaaatccaacttgagctggctggtggtccctggatcctagagcccttcacttcgggttactccctctttcttgcctctatttcttagttggaagaaataaactcacaaattatggtgcagtaattttccggggaaagtaaagcctcaggaatgcccacgcctttcttccaaagcctttgtctctgagacctcttaagttctaagat

SEQ ID NO: 52652 - DNA, 880 bp, Homo Sapiens
  misc_feature (705)..(705): n is a, c, g, or t
  misc_feature (733)..(733): n is a, c, g, or t
  misc_feature (748)..(748): n is a, c, g, or t
  misc_feature (808)..(808): n is a, c, g, or t
  misc_feature (879)..(879): n is a, c, g, or t
taacacattcaggtgcctctgccttccaagttatgttggtgcactttgtgagcaagataccgtgacatgtgactatggctggcacaaattccaagggcagtgctacaaatactttgcccatcgacgcacatgggatgcagctgaacgggaatgccgtctgcagggtgcccatctcacaagcatcctgtctcacgaagaacaaatgtttgttaatcgtgtgggccatgattatcagtggataggcctcaatgacaagatgtttgagcatgacttccgttggactgatggcagcacactgcaatacgagaattggagacccaaccagccagacagcttcttttctgctggagaagactgtgttgtaatcatttggcatgagaatggccagtggaatgatgttccctgcaattaccatttcacctatacgtgcaagaaaggaacagttgcttgcggccagccccctgttgtagaaaatgccaagacctttggaaagatgaaacctcgttatgaaatcaactccctgattagataccactgcaaagatggtttcattcaacgtcaccttccaactatccggtgcttaggaaatggaagatgggctatacctaaaattacctgcatgaacccatctgcataccaaaggacttattctatgaaatactttaaaaattcctcatcagcaaaggacaattcaataaatacatncaaacatgatcatcgttggagcccggangtggcaggagtcgangcgctgatccctaaaatggcgaacatgtgttttcatcatttcagccaaagtcctaacttnctggcctttcctatcacctcgagaagtaattatcaagttgggtttggatttttggaccaccgttcaatcant

SEQ ID NO: 52653 - DNA, 588 bp, Homo Sapiens
cgcgtccgccaagtttacacgtcagacacctgtcgacagcccagatgactcaactctcagtgaaagtgccaatcaggtctttctgggttttacatatgtggctccatctgtacttgaaagtgtgaaagaaaagttttcctttgaaccaaaaatccgatcacctcgaagatttattggcagcccacgaacacctgtcagcccagtcaaattttctcctggggatttctggggaagaggtgcttcggccagcacagcaaatcctcagacacctgtggaatacccaatggaaacaagtggcatagagcagatggatgtgacaatgagtggggaagcatcggcaccacttccaatacgacagccgaactctgggccatacaaaaaacaagcttttcccatgatctccaaacggccagagcacctgcgtatgaatctatgacagagcaatgcttttaatgaatttaaggcaaaaaaggtggagagggagatgtgtgagcatcctgcaaggtgaaacgactccaaatgacagtttcagagagtcaatgtcattacatagaacacttccgacacaggaaaaataaacgtggattt

SEQ ID NO: 52654 - DNA, 463 bp, Homo Sapiens
tccccttaccagcacctaagaaccatccaggctgaaaagtcccctccaaaccacgtgatgaggaacttgaggcaagtcaccagcccctgatcatttcgcctaaaagagcaaggactagagttcctgacctccaggccagtccctgatccctgacctaatgttatcgcggaatgatggcccagggctcctcagagcaggaactccactatgcatctctgcagaggctgccagtgcccagcagtgagggacctgacctcaggggcagagacaagagaggcaccaaggaggatccaagagctgactatgcctgcattgctgagaacaaacccacctgagcaccccagacaccttcctcaacccaggcgggtggacagggtccccctgtggtccagccagtaaaaaccatggtccccccaaaaaaaaaaaaaaaaaaaaaaaaaaaacaaaaacaaaaaaagagagg

SEQ ID NO: 52655 - DNA, 605 bp, Homo Sapiens
cacgcgtccggtcattcacatacctcaacactcaccatcccctccccactttttttctggagacagggtttcactgtcaccccagctggaatgcaggtggcatgatcacagctcactgtagcatcgacctcctggactcaaggggtcctcgcgcctcagcctcctgagtggctgggaccgcaggtgcatgccaccacgcccagctaatgtttttttttattttttgtagagacggggtctggctatgttgcttaggctggtctcgaactcctgggttcaagcgatcctgccacctcggcctcccaaagtgttgggattacagatgtgagccactgtgcccagccaacattcaccccattcaagtgtgcaattcaatggattctagtatcttcacagtgctgtgcaactatcactcctatctacttacaaagcatttccatcatcttaaaaagaatccccatgtccaatagcagttccccttcccccaccgtcatcctcgggcaaccgctaatcttcctgtgtgtctgtggatttgcctcttcagggcatttcacataaacacaatcatacaatatgtggccttctgtgtctggcttctttcattt

SEQ ID NO: 52656 - DNA, 743 bp, Homo Sapiens
acactgataactctacctgaagatgaagaaagagccaacgtgttaaatgtcagaaacagaatccaaagaaatcctaagaaagagcacagaagaatggcaagaactagtcatgtatagttagaatgcttaagatttgaatcttggtttcagccagcacttggagtgtgaccatcagcaatttgcttaatcttccaggcttagtttcatcaactaagttaggaggggaatctctacctcacagggctcttgcatgaatgaaacgtttggcgtaatacggaagccctcagagcagtacgcttcaagcagtttatgaagtccttagcgtctttcttatggccgaaaatagtttggaatgggttgaaacaatgggccaacctaaccagatgaaactgtaaagaagataaatgtaaagagtgtttaagtaccataatttaattatacaaatataagacaggagctatgtaacagaggagagattttagctgacagtaagcatggaatgatttggaagaaaaagaaaagccttagccaggcactggggctcatgtctgtaatctcagcactttgggaggctgaggtggaaggatcacttgagtccatgagtttgagaccagcctgagcaacagagcgagaccccatctctacaaaaagtaaaagaattagccctggtgtggtggtgtgcacctcttttcccagctgcttgggaggctgaggtgggaggatgtggaggctgcagtgagctg

SEQ ID NO: 52657 - DNA, 1044 bp, Homo Sapiens
  misc_feature (962)..(962): n is a, c, g, or t
tgttgactaccactacttttcccttcgtctcattatgtcttggaagaagtctttgcggatccccggagaccttcgggtagcaactgtcaccttgatgctggcgatcctgagctcctcactggctgagggcagagactctcccgaggatttcgtgtaccagtttaagggcctgtgctacttcaccaacgggacggagcgcgtgcggggtgtgaccagacacatctataaccgagaggagtacgtgcgcttcgacagcgacgtgggggtgtaccgggcagtgacgccgcaggggcggcctgttgccgagtactggaacagccagaaggaagtcctggagggggcccgggcgtcggtggacagggtgtgcagacacaactacgaggtggcgtaccgcgggatcctgcagaggagagtggagcccacagtgaccatctccccatccaggacagaggccctcaaccaccacaacctgctgatctgctcggtgacagatttctatccaagccagatcaaagtccggtggtttcggaatgatcaggaggagacagccggcgttgtgtccacccccctcattaggaacggtgactggaccttccagatcctggtgatgctggaaatgactccccagcgtggagatgtctacacctgccacgtggagcaccccagcctccagagccccatcaccgtggagtggcgggctcagtctgaatctgcccagagcaagatgctgagtggcgttggaggcttcgtgctggggctgatcttccttgggcttggccttatcatccgtcaaaggagtcggaaagggcttctgcactgactcctgagactgttttaactaagactggttatcactcttctgggatgcctgcttgtccctgcccagaattcccagctgcctgtgtcaacttgtcccccctgagatccaagtcctacgtgggctgtcacgcaaacaccagggncatctccctttcatccccaccccaagggcgcttggctgtgactctggcttcctgcactgacccagaagccactgcccggaca

SEQ ID NO: 52658 - DNA, 686 bp, Homo Sapiens
taaattcctattggaattagaactctcagaatccctgggagacagagcaaagatgacttaattcattgagcagcagagctccctataagcgaacatcaccttccgcatctttcctactgccacacccatacgagagaggatctagaaagagcgatggcagcctgaacacagaaaacatccccacttggcagacctctcctcagcaatccccccagcctcatgcttcacttgcaaagtgtgacataaccacgggacgagtgccttgcttgaaccaaagcaacgatttagccagtctggacctctctgtgctttttttaattcttcctgtgaatacctcagcttcaactgggcctccatacagtcagttggtgggcttattgtactgtggtgctttgcaatgcaaccctgcaaagaacaagatttgtactaataccaaaggttctttctctatgtctcctcctctgcctccctcgttcttcccttttttctagttcttcacggttccaaagctttactatgaacctgggcatgttggcaatgcagaccgcgcaattccttaccgaattttctcagatatacctcatagacaatagtgtttagagtaatggtattatagcgtatgtaataaattattcactgtttcttttggtaactgggatttaaaaaaaaaaaaaaaaaaaaaaaag

SEQ ID NO: 52659 - DNA, 502 bp, Homo Sapiens
gctggaattacaaaactcagagaaatgtgtcatcaggagaacatcataacccatgaaggataaaagccccaaatggtggtaactgataatagcactaatgctttaagatttggtcacactctcacctaggtgagcgcattgagccagtggtgctaaatgctacatactccaactgaaatgttaaggaagaagatagatccaattaaaaaaaattaaaaccaatttaaaaaaaaaaagaacacaggagattccagtctacttgagttagcataatacagaagtcccctctactttaacttttacaaaaaagtaacctgaactaatctgatgttaaccaatgtatttatttctgtggttctgtttccttgttccaatttgacaaaacccactgttcttgtattgtattgcccagggggagctatcactgtacttgtagagtggtgctgctttaattcataaatcacaaataaaagccaattagctctataaaaaaaaaaaaaaa

SEQ ID NO: 52660 - DNA, 630 bp, Homo Sapiens
ggggggggctctcctctcggtgctccttcactctgggcctggcctcaggcccctggtgcttccccccctcctcctgggagggggcccgtgaagagcaaatgagccaaacgtgaccactagcctcctggagccagagagtggggctcgtttgccggttgctccagcccggcgcccagccatcttccctgagccagccggcgggtggtgggcatgcctgcctcaccttcatcagggggtggccaggaggggcccagactgtgaatcctgtgctctgcccgtgaccgccccccgccccatcaatcccattgcataggtttagagagagcacgtgtgaccactggcattcatttggggggtgggagattttggctgaagccgccccagccttagtccccaggccaagcgctggggggaagacggggagtcagggagggggggaaatctcggaagagggaggagtctgggagtggggagggatggcccagcctgtaagatactgtatatgcgctgctgtagataccggaatgaattttctgtacatgtttggttaattttttttgtacatgatttttcgtatgtttccttttcaataaaatcagattggaacagtgaccaacacaaaacacacaa

SEQ ID NO: 52661 - DNA, 721 bp, Homo Sapiens
ctctctttatctggtgaaatatgatggaattgactgtgtctatggactggaacttcacagagatgaaagggttttgtctcttaaaattctttctgacagggtggcatcatctcacattagtgatgccaaccttgcaaataccataattggcaaagcagtggaacatatgtttgagggagagcatggttctaaggatgaatggagggggatggtcttagctcaagcacctatcatgaaagcctggttttatattacctatgagaaagatcctgtcttgtacatgtaccagcttctagatgattataaggaaggtgacctccgcatcatgccagaatccagtgagtctcctccaacagagagggagccaggaggagttgtagatggcctaataggtaagcatgtggaatataccaaagaagatggctccaaaaggatcggcatggtcattcaccaagtggaagccaaaccctctgtgtatttcatcaagtttgatgatgatttccatatctatgtctacgatttggtgaaaaagtcctaactgttagggtaaaatttggcacatgtgtggaaacaaatgtataatttgtagacattgcaaaaaatgttgcctttcagtgtattgaaagcttatggaatccctgataactaaacattctttgccagcattaactgttgttttgctctaaaaaaatacaaattgttgtgttccttggaaaaaaca

SEQ ID NO: 52662 - DNA, 747 bp, Homo Sapiens
ttgggagccctgtatgggatcactttgattcctacctgcaagttctacacctggctttggggggtattctactattttgtcagtgccctgggcataacagcaggagctcatcgtctgtggagccaccgctcttacaaagctcggctgcccctacggctctttctgatcattgccaacacaatggcattccagaatgatgtctatgaatgggctcgtgaccaccgtgcccaccacaagttttcagaaacacatgctgatcctcataattcccgacgtggctttttcttctctcacgtgggttggctgcttgtgcgcaaacacccagctgtcaaagagaaggggagtacgctagacttgtctgacctagaagctgagaaactggtgatgttccagaggaggtactacaaacctggcttgctgatgatgtgcttcatcctgcccacgcttgtgccctggtatttctggggtgaaacttttcaaaacagtgtgttcgttgccactttcttgcgatatgctgtggtgcttaatgccacctggctggtgaacagtgctgcccacctcttcggatatcgtccttatgacaagaacattagcccccgggagaatatcctggtttcacttggagctgtgggtgagggcttccacaactaccaccactcctttccctatgactactctgccagtgagtaccgctggcacatcaacttcaccacattcttcattgattgcatgggccgccctcggtct

SEQ ID NO: 52663 - DNA, 788 bp, Homo Sapiens
tgatatcaagtagagttcttccacaaacagaacaagatgctaaaaaaggacaaaatgtttcacttttgggtaaatacattcttcataccaggaccagaggaaacctcagaaaaagtagaaaatggaagtctatgtgatcaagaaatcgatagcatttgcagtatagagcgtgcagataatgacaaggaatatctagtacttactttaacaaaaaatgatcttgacaaagcaaataaagacaaagccaaccgatacttttctccaaattttaaggtgaagctgtacttcacaaaaacagtagaggagccgtcaaatccagaggctagcagttcaacttctgtaacaccagatgttagtgacaatgaacctgatcattatagatattctgacaccactgactctgatccagagaatgaaccttttgatgaagatcagcatacacaaattacaaaagtctgaatttttttttatcaagagggataaaacaccatgaaaataaacttgaataaactgaaaatggacctttttttttttaatggcaataggacattgtgtcagattaccagttataggaacaattctcttttcctgaccaatcttgttttaccctatacatccacagggttttgacacttgttgtccagttgaaaaaaggttgtgtagctgtgtcatgtatatacctttttgtgtcaaaaggacatttaaaattcaattaggattaataaagatggcactttcccgttttattccagttttataaaaagtggagacagactgatgtgtatacg

SEQ ID NO: 52664 - DNA, 3441 bp, Homo Sapiens
gtttcaaaggacacaaagagagatgtggactcaaagtcaccggggatgcctttatttgaagcagaggaaggagttctatcacgaacccagatatttcctaccactattaaagtcattgatccagaatttctggaggagccacctgcacttgcatttttatataaggatctgtatgaagaagcagttggagagaaaaagaaggaagaggagacagcttctgaaggtgacagtgtgaattctgaggcatcatttcccagcagaaattctgacactgatgatggaacaggaatatattttgagaagtacatactcaaagatgacattctccatgacacatctctaactcaaaaggaccagggccaaggtctggaagaaaaacgagttggtaaggatgattcataccaaccgatagctgcagaaggggaaatttggggaaagtttggaactatttgcagggagaagagtctggaagaacagaaaggtgtttatggggaaggagaatcagtagaccatgtggagaccgttggtaacgtagcgatgcagaagaaagctcccatcacagaggacgtcagagtggctacccagaaaataagttatgcggttccatttgaagacacccatcatgttctggagcgtgcagatgaagcaggcagtcacggtaatgaagtcggaaatgcaagtccagaggtcaatctgaatgtcccagtacaagtgtccttcccggaggaagaatttgcatctggtgcaactcatgttcaagaaacatcactagaagaacctaaaatcctggtcccacctgagccaagtgaagagaggctccgtaatagccctgttcaggatgagtatgaatttacagaatccctgcataatgaagtggttcctcaagacatattatcagaagaactgtcttcagaatccacacctgaagatgtcttatctcaaggaaaggaatcctttgagcacatcagtgaaaatgaatttgcgagtgaggcagaacaaagtacacctgctgaacaaaaagagttgggcagcgagaggaaagaagaagaccaattatcatctgaggtagtaactgaaaaggcacaaaaagagctgaaaaagtcccagattgacacatactgttacacctgcaaatgtccaatttctgccactgacaaggtgtttggcacccacaaagaccatgaagtttcaacgcttgacacagctataagtgctgtaaaggttcaattagcagaatttctagaaaatttacaagaaaagtccttgaggattgaagcctttgttagtgagatagaatccttttttaataccattgaggaaaactgtagtaaaaatgagaaaaggctagaagaacagaatgaggaaatgatgaagaaggttttagcacagtatgatgagaaagcccagagctttgaggaagtgaagaagaagaagatggagttcctgcatgagcagatggtccactttctgcagagcatggacactgccaaagacaccctggagaccatcgtgagagaagcagaggagcttgatgaggccgtcttcctgacttcgtttgaggaaatcaatgaaaggttgctttctgcaatggagagcactgcttctttagagaaaatgcctgctgcgttttccctttttgaacattatgatgacagctcggcaagaagtgaccagatgttaaaacaagtggctgttccacagcctcctagattagaacctcaggaaccaaattctgccaccagcacaacaattgcagtttactggagcatgaacaaggaagatgtcattgattcatttcaggtttactgcatggaggagccacaagatgatcaagaagtaaatgagttggtagaagaatacagactgacagtgaaagaaagctactgcatttttgaagatctggaacctgaccgatgctatcaagtgtgggtgatggctgtgaacttcactggatgtagcctgcccagtgaaagggccatctttaggacagcaccctccacccctgtgatccgcgctgaggactgtactgtgtgttggaacacagccactatccgatggcggcccaccaccccagaggccacggagacctacactctggagtactgcagacagcactctcctgagggagagggcctcagatctttctctggaatcaaaggactccagctgaaagttaacctccaacccaatgataactactttttctatgtgagggccatcaatgcatttgggacaagtgaacagagtgaagctgctctcatctccaccagaggaaccagatttctcttgttgagagaaacagctcatcctgctctacacatttcctcaagtgggacagtgatcagctttggtgagaggagacggctgacggaaatcccgtcagtgctgggtgaggagctgccttcctgtggccagcattactgggaaaccacagtcacagactgcccagcatatcgactcggcatctgctccagctcggctgtgcaggcaggtgccctaggacaaggggagacctcatggtacatgcactgctctgagccacagagatacacatttttctacagtggtattgtgagtgatgttcatgtgactgagcgtccagccagagtgggcatcctgctggactacaacaaccagagacttatcttcatcaacgcagagagcgagcagttgctcttcatcatcaggcacaggtttaatgagggtgtccaccctgcctttgccctggagaaacctggaaaatgtactttgcacctggggatagagcccccggattctgtaaggcacaagtgatccttggctttcagaatttgcaagaacagcgatttgaattttgggggggtctgctgttcattcctttaggtgctatacattattcaaaaagtctcccgcgcatttgcactaatgatggctgcatgcatagcaatcagcatgtgagcaaaatcgacaagaaaaccttgactttacagagcagtgtgtgagtaaacagaatgaaaacaacaacctccactctttagtttatataagtttgagttctttcctaaattaaaagatctacacttgagttgggaaccaaaagagaaaaatggacttccatctgttttactggtaaaggaaatcctctgatggacaggtcagagtgaaggaaggttgtgctggtaagacatctctgacgaagagccatggatgctttccacaaaatgtcacctcgctgcactaaaggatgatgaatcctaatcattaaaggaattgtttcagctgatttaaatttataatgaactcttttgtaataatgtatactgtagaacatgagtctctcctccctaaaattttaaatgtagaaaagtgctatatattagaaatttccattttgttaaataaatggttagagtctataaagccagtcatgttatgtgaacttactccatgtaacttactggc

SEQ ID NO: 52665 - DNA, 478 bp, Homo Sapiens
  misc_feature (21)..(21): n is a, c, g, or t
  misc_feature (24)..(26): n is a, c, g, or t
  misc_feature (49)..(49): n is a, c, g, or t
  misc_feature (53)..(55): n is a, c, g, or t
  misc_feature (75)..(75): n is a, c, g, or t
  misc_feature (77)..(78): n is a, c, g, or t
  misc_feature (87)..(87): n is a, c, g, or t
  misc_feature (376)..(376): n is a, c, g, or t
  misc_feature (439)..(439): n is a, c, g, or t
  misc_feature (475)..(475): n is a, c, g, or t
ccctatagtgagtcgtatagngannnaggccctatagtgagtcgtattngatnnngtgtggcaagcagctcaacnanntgtgtgggntttacacattgctgatgcactaagacgatcaaatacaaaaggctccatgagtgatgggtcctattccccagactactcccttgcagcagtggacctgaagagtttcaagaacaacctggtggacatcattcagcagaacaaagagaggtggaaagagttagctgcacaaggtgaatctgatcttcataagaactcagaagacttagtaaatgctgaagaaaaacatgatgagacacattcataggcccgaaacaccttaaagacttctgtcattttaaacatgagaggnccaatgaaatcagcatgaaaacatcctaaaattctccaactttccacaaaggctatggccctnctttccaccataagaattgggatttgggccattttnaat

SEQ ID NO: 52666 - DNA, 981 bp, Homo Sapiens
tcaggagagccaaaagggaggacctgaaggtcagcatccaccaaatggagatggagaggatccgctacgtcctcagcagctacttgcggtgtcgcctcatgaagatagagaagtttttccctcatgtccttgagaaggaaaaaacacgtcctgagggggagccttccagcctctcgccggaagagttggcctttgccagagagttcatggcgaacacagagtcctatctgaaaaatgtcgccttgaagcacatgccccctaacttacagaaggtggacctctttcgggcagttcccaaaccagatctagattcttacgtgtttctgagagtgagagaacgacaagaaaacatactggtagaaccagacacagatgagcagagggactacgtgattgacctggagaagggctcacagcacttgatccgatacaaaaccattgcacctctggttgcatctggagctgtccagctaatttaaaactaggcataaacagccaggcatggtgactcaagcctgtaatcccagcactttgggaggccgaggcgggcggatcatgaggtcaggagttcgagaccaacgacaacatggtgaaaccccatctttacttaaaaatgcaaataattagccggtgttggtggtgtgcaccttgtaatcccagctgctccgggagcgggcaggaaaatcgttgactggagccgggttgcgtgagccggttgtgcattgactccagctggtgcagtagacttggttcaaaagagaccactacaaaaaacaacgggcgggctaaattcccggggccacttacctcccagttgaacaggggcccatatagcgcgattaagaagcggccggtacaacgggtcggacacgcggactcggagaccccctggtggcatgcagccccaagagccggcaactacgatgcaccgccgggggagtatatataataagtccaccacatttaggacgcccacataca

SEQ ID NO: 52667 - DNA, 817 bp, Homo Sapiens
  misc_feature (681)..(681): n is a, c, g, or t
  misc_feature (698)..(698): n is a, c, g, or t
  misc_feature (787)..(788): n is a, c, g, or t
  misc_feature (794)..(794): n is a, c, g, or t
  misc_feature (800)..(800): n is a, c, g, or t
ccaggcagagccggagagcgtgctgctggtgcatggcgaggccaagaagatggagttcctgaagcagaagatcgagcaggagctccgggtcaactgctacatgccggccaatggcgagacggtgacgctgcccacaagccccagcatccccgtaggcatctcgctggggctgctgaagcgggagatggcgcaggggctgctccctgaggccaagaagcctcggctcctgcacggcaccctgatcatgaaggacagcaacttccggctggtgtcctcagagcaagccctcaaagagctgggtctggctgagcaccagctgcgcttcacctgccgcgtgcacctgcatgacacacgcaaggagcaggagacggcattgcgcgtctacagccacctcaagagcgtcctgaaggaccactgtgtgcagcacctcccagacggctctgtgactgtggagtccgtcctcctccaggccgccgccccttctgaggacccaggcaccaaggtgctgctggtctcctggacctaccaggacgaggagctggggagcttcctcacatctctgctgaagaagggcctcccccaggcccccagctgaggccggcaactcacccagccgccacctctgccctctcccagctggacagaccctgggcctgcacttcaggactgtgggtgccctgngtgaaacagacctgcangtccccatcctggggacagaggccttgtgtcacctgctgcccagcagctgttgcagctgaagaacaactggtctccagctgtctgcttnnatctgntaggcnagtgtctagacgcattt

SEQ ID NO: 52668 - DNA, 929 bp, Homo Sapiens
  misc_feature (647)..(647): n is a, c, g, or t
  misc_feature (748)..(748): n is a, c, g, or t
cgtgctgatgagtgcacagacgatcacatctgaaaccaccagtaccaccaccactacgcacatcaccaaaactgtgaaagggggcatttcagagacaagaattgagaagcgaatagtcatcacgggggatgcagacattgaccatgaccaggcgctggctcaggcaattaaagaggccaaagagcagcaccctgacatgtcagtgaccaaagtagtggtccataaagagacagagatcacaccagaagatggagaggattgaccagaggaataacttagcttgcacatgaatgcagtcatgcaaaccgttaggaaaaccagagcctatatggagttccctcttctaacccaactgacttgtatctgtccgtggaaaatttcagtccagaagaattgaccttgaccattaataaagacactggcagagagatcttcccataataaagcaatctgattcagcatcactaaaccgataatgcatgaagcaacgataaaattacaaaagagcagcatttttaattttcacaaaatgtctcagttttcagctatacctgcacgttcataaccaacaatataaaccgtggtctcatgtaacacataaacaattcatgcctttcatagtttattattattaaagtctaaacaanattgcaatttctttaggtaaccttatatttaccaataatgaagattaccctccaatgctagaagctgtctaggtccgtccggtgtgtcagattttcctcanattagatgtgcccataaccaagtttatccagtaaacaacctggaacttggtttcatctgggttttattactctcccccataaaccgaaatgacttccctgacccctcttggaaaatatgtaaatggtttccaaatccttggcttttgggggattccccattttaattttgggtatataaag

SEQ ID NO: 52669 - DNA, 606 bp, Homo Sapiens
  misc_feature (587)..(604): n is a, c, g, or t
ccgtcgagaagctcaaggatgaggtcctcaaggagacagtatctcagcgccctggagccacagtacccactgactttgccaccttcccttcatcagccttcctcagggccaaggaggagcagcaggatgacacagtctacatgggcaaagtgaccttctcatgtgcggctggttttggacagcgacaccggctggtgctgacccaggagcagctgcaccagcttcacagtcgcctcatctcctaagcactcctttcccctgctgtccccttcgaccctcagccctctggtgccgctctgcccgatgcacagccacctcagccagcccccaggtagaaacgtgggttaagctcttcctgccccgttcagcttcactcccaccctttcagcgtcctgccccttcaccttgacccgggttcccccactcccattccctggcctctgccataatttgttgttcaactgctccctccttcctgaggggcctcagggcttgtggggggtaggctgagaccccaccaccaaaggttaagtgaggtccccttgattgaggacttcaccccttgattaaagcaacttctgcttcannnnnnnnnnnnnnnnnnaa

SEQ ID NO: 52670 - DNA, 515 bp, Homo Sapiens
cggccgcaaatgtttttttgaaactgaaaaaagactctcttggtgccccttcaagacctattgaagatgaccaagaagtatatgatgatgttgcagagcaggatgatattagcagccacagtcagagtggaagtggagagatattccctccaccaccagatgatgacatttatgatgggattgaagaggaagatgctgatgatggctccacactacaggttcaagagaagagtaatacgtggtcctgggggattttgaagatgttaaagggaaaagatgacagaaagaaaagtatacgagagaaacctaaagtctctgactcagacaataatgaaggttcatctttccctgctcctcctaaacaattggacatgggagatgaagtttacgatgatgtggatacctctgatttccctgtttcatcagcagagatgagtcaaggaactaattttggaaaagctaagacagaagaaaaggaccttaagaagctaaaaaagccctcgtgccgaattctt

SEQ ID NO: 52671 - DNA, 751 bp, Homo Sapiens
  misc_feature (665)..(665): n is a, c, g, or t
  misc_feature (716)..(716): n is a, c, g, or t
  misc_feature (737)..(737): n is a, c, g, or t
tgcacaccaactacctgtcggcctgcagcttcaccaactctgacatgcagatcctgacagcgagcggcgatggcacatgtgccctgtgggacgtggagagcgggcagctgctgcagagcttccacggacatggggctgacgtcctctgcttggacctggccccctcagaaactggaaacaccttcgtgtctgggggatgtgacaagaaagccatggtgtgggacatgcgctccggccagtgcgtgcaggcctttgaaacacatgaatctgacatcaacagtgtccggtactaccccagtggagatgcctttgcttcagggtcagatgacgctacgtgtcgcctctatgacctgcgggcagatagggaggttgccatctattccaaagaaagcatcatatttggagcatccagcgtggacttctccctcagtggtcgcctgctgtttgctggatacaatgattacactatcaacgtctgggatgttctcaaagggtcccgggtctccatcctgtttggacatgaaaaccgcgttagcactctacgagtttcccccgatgggactgctttctgctctggatcatgggatcataccctcagagtctgggcctaatcatcttctgacagtgcactcatgtatacctgagaatttgaaatcttcacatgntaatagatattacttctagaggagcttagagtttattgcagtgtagcttanggggagcaccatggctcacangtcactaagcgtct

SEQ ID NO: 52672 - DNA, 582 bp, Homo Sapiens
aataagaaagcagcttttccaagaaacaatacaatattactggccagatagtattattgattaattcaacaaacagttatgtagcatctactggtaccctggaactgtgctgaactttatagctacacagatgactaagacgcaatttggccttgccagttcatgactgagttatacatgaacagaacaagatcctcatgaaacctctgatatggacatggtcagatgttgaaggccagaggccggctctgctcatctgcacagctgcagcaggacccacgcagggagttaaggatctcgaggaagtgcctccatctgcagcgagtcagtcagcccaagcacgctgtgctctggggagctggggttatggcaagccctttgagccaagaagtgtgaaaaacatacactctactcctgcttacccagatgccacaatgcacagacaactcctggctccggtggaaggaaggatggcagagacattgaatcagaaactccatgttgccaatgtgctggaagatgaccccggctacctacctcacgtctacagcgaggaaggggagtgtggaggggccccatccc

SEQ ID NO: 52673 - DNA, 443 bp, Homo Sapiens
cggacctcggcagcttcgagtctccagctaactctgaaacctcagacctcactctgtacctggtggtagcggtggccgcggtctcctgcgtcttcctggccttcgtcatcgtgctgctggcgcacaggctgcggcgctggcacaagtcacagcctgctgcaggcttcaggaggcggcttgacaggtgtgtccggctcgcactttgtgggcgtggacggggttcgggctttcctgcagacctattcccacgaggtctctctcaccgcggactcgcgaaagagtcacctgatcttcccccagcccaattatgcggacactgctcatcagccaggagagctgtgagaaaaacgatcctttgtctttgttagatgattcgaagtttcctatagaggataccccattggttccagtgagttttattttcatttttacttttgttaaaa

SEQ ID NO: 52674 - DNA, 952 bp, Homo Sapiens
caaggactaccctctcatcccagttggtaaactggtcttaaaccggaatccagttaattactttgctgaggttgaacagatagccttcgacccaagcaacatgccacctggcattgaggccagtcctgacaaaatgcttcagggccgcctttttgcctatcctgacactcaccgccatcgcctgggacccaattatcttcatatacctgtgaactgtccctaccgtgctcgagtggccaactaccagcgtgacggcccgatgtgcatgcaggacaatcagggtggtgctccaaattactaccccaacagctttggtgctccggaacaacagccttctgccctggagcacagcatccaatattctggagaagtgcggagattcaacactgccaatgatgataacgttactcaggtgcgggcattctatgtgaacgtgctgaatgaggaacagaggaaacgtctgtgtgagaacattgccggccacctgaaggatgcacaaattttcatccagaagaaagcggtcaagaacttcactgaggtccaccctgactacgggagccacatccaggctcttctggacaagtacaatgctgagaagcctaagaatgcgattcacacctttgtgcagtccggatctcacttggcggcaagggagaaggcaaatctgtgaggccggggccctgcacctgtgcagcgaactttagcgttcatccgtgtaacccgctcatcactggatgaagattctcctgtgctagatgtgcaaatgcaagctagtggcttcaaaatagagaatcccactttctatagcagattgtgtaacaattttwaatgctatttccccaggggaaaatgaaggttaggatttaacagtcatttaaaaaaaaaatttgttttgacggatgattgggattattcatttaaaatgattagaaggcaagtttctagctagaaa

SEQ ID NO: 52675 - DNA, 871 bp, Homo Sapiens
aataagggctgtttttgctgccccaaaagggcttaacatttaggcggatagtttacttaaaaaaaaaaatcctttggagacatactgaaaatgcaaactagtttctaaattatcaattccctacatgaagaagcagtttgccagagtttagtctcagaaaatgactggttggctctatttaaatcagaacccaatttctacgcgtgttgaataaggtaacagcctttgatgaatttccttcacaacatggttttagtgaagcaaacattttttttttaagggcattgttctttctagtttatttctttttatgaaataaaattattttatttaaacagttccattgtcgtttctgaaaactacagtattctcagaagttgtagcagcagtaaaaaaaaaaaagttgttctataagtgattggggcagatttaactgattttgttaaaccaatttgtaagttactgcttctaatattacacttctagaaagctgaatttatactcatgtcctaaaggagaatatgtggtaataaagtatatttgttaagtaactaattgaaataggcttggttttaagagttccagtatataataatcacaaattgaaacctgacagtatcttgggagttccagtaatgtcacaaattagtgaataagcatgccagtgtgcaagggtaatgtaaggattgttagcctatctaaatattcaaaattactttaaaactttaagtatggttttctgatttttaagaaatcagaaagtgttctgtaatggatccaaatggtttcatttggagaataatgaaatggttaccgaaaagataactttttcattaaatattttttagaaacaaaaaaaaaaaaggccggc

SEQ ID NO: 52676 - DNA, 876 bp, Homo Sapiens
gggatgaactttaacaaaatgcagtttcgaaggtgtttccttgtgagttaacaagtaaagaagatcattgttaattactattttgtatgaattttgctaaagttaactgtaaagaaacacctgctgacttgcagtttaaggggaatctattctccccatttccaaaccatgatatgaatgggcgctgacatgtggagagaatagataatttgtgtgtttgcaatgtgtgttttagataaataggattgggtatttaaattagcatttgtgaatttaatagcattaagattaccttcaaatgaaaaaaaatctcaaaatttctatttggtttttgtgcattttcttttaaaatgtaatcatatgattttagtgtgttagacttgctgagtcctagctgtgtttagaacatctctattctacatttaccttggtcaaatttgaactgctgccataggttttgggtgtaaagaatgtttactgccctccatttaaattctgaaaagggatggtggatgttttccctctcctacgttagaaaccattcttaaaaacttttgaaaatatagaaccattaagcctgctatatctgagcaaattaatgggtaccttttttttcttatttaaagcacaagaggcccataaatcttgagttactttaaattcttttttttgatacaagttttcagagcaagagaataaaaatcatgtgttattaaacccctaactggctggcatgctttcctgtttgtattctatacattttgctggatgaaaccaaggatagttcaggtataattgtccaaaataacctaactgcagcagaaatgtagcacagttgcttagtacaggcttctcacttcctacagacctgaattc

SEQ ID NO: 52677 - DNA, 757 bp, Homo Sapiens
gaggaccccgccgaaggttttctccggttcgggagagagacggagtcccgctctgtcacgcaggctgccaggctggcgtacagtggcgcaatctcagctcgctgcaacctccacctcctgggttcaagcgattttcttgcctctgcctcctgagtagctgggattactggcacacaccaccatgcacagttccttgttcaaaatgccaagaacctggatgactcatagtcaaggccctccaccagtaacatatattggcgagccagccaggagaccactacaggaaacactccatttattccacctgacttcccacttggctgcatcctcaaccattgaaatgaatttgaccctgataatctaaggaggaaacatttgatattcttttgcaataatacttggccccagtattgtttggaatctggagtttgctgttgaatgggaaagcgggatgacgttgcatgtatccaggctttggtgctgctgtcctaagaagggtcaggcctggtcagcatatggtgctctcctttggtgctatttggctccagtgtctttggagtctgaggaggtttggcctttaaaaatcaaactgccaccggaactgctttaaaaatgtttggttcacagccttcactggattacctattggagcaaacaaagtgtaaccatgtaaaacctgtgagcttgtattgatatctcatggctagagttccaaggtaaaagctattggatcttcgtttgtgtgtgtgtatacatg

SEQ ID NO: 52678 - DNA, 655 bp, Homo Sapiens
gactagttctagatcgcgagcggcgccctttttttttttttttatttagagaatactttattagtttctgtaatcaaacccatgtagataagaccttacatatttaatacagtgcgttacccctgtacaaatggaaaaaaattaagtttaacgtttctagaccaatatggctgttaatttctgtacaatgccaactcaacacagtaaaccgggatactttttccaaagttgacagcacagctaaagtttccaaaaattcaaattatatatatatatgtatatatatatatatatttatataaaaagaccaatagcagtatgttatgcatcaatagcagcaacagcttttccaggttctgcagtcatctgaataaaattatagagacatccagcacactccatttaaaaaaaaggggggaaaaaggtaaaaaacaaaaccccagaaaattgcaaagttctgttactgttgtggtacctggcaccgttttttaaaattagcttctgaatcatcatctggaaagaaaacattctagaataacatcattaaaaacagctctgataaagcacggtcactactacgtatcataaagcaggtacaagatattttacattcacagaggtatgatacagtactgtcctatatctataatactag

SEQ ID NO: 52679 - DNA, 498 bp, Homo Sapiens
ttacctgataaactggagtgggtttgggagaacaaactaataggattattgtgtctcctagttggtacctgggagcaattgacatgcccccttcagaaccttaactgttagtagcagtggctgtaacaacacaaaccagtgaccagagataacagcttttaggccaagctggcctgacggtatggctgcaggaagtgactgagcagtagcggtactcagccagaccaagacggagagggaagagtccacagctttctggaagctaaggcattctggtggtagaaaagtgtgccccaagccttcatggacgagttataggtcttaagattagtctcctcttgtttggattccatacttgctaaataacctgataataacctggttttccatgtaactgcctctaggaagaaaatgtactgttcatgctgacacagatatttcagtctgcatggtaaaagttctaaatcttactacaaaataataaactggctggtttat

SEQ ID NO: 52680 - DNA, 582 bp, Homo Sapiens
ctggcttggattcatttgatgtttttaatataagaatgatctaatatttttttaaagtaatagctatcagtaatagctgagtgttttttcccctaatattttccttgtgcaattcagacttaagcatcgagtttttaccatcttccactttaagctaagttatgatacctattccattcacaattggtgttctttttaaggtttgcaaatttcagccaattttgtagctaagattgttctgatcagctcaaaaagatttggcttagtgttttcattgcaaattataattgctgtagagccacacacaacttttgaacttttaattataagtgttatggctaaagttatttactgaaaatttcagtaaaatgtgtgaatgtttctttatgtattaacctcatagcagtaaatgacttgctgttgtttaatttttctaaggcatcttaataggcttctgttgaaaacttcagtgttaacatttttatagtttgtactaaatttaaccgtgatataaaaatgaattttatgcatagatcagaattttaaattaaaggttttttctttaaatgatttgtattactt

SEQ ID NO: 52681 - DNA, 652 bp, Homo Sapiens
  misc_feature (594)..(594): n is a, c, g, or t
  misc_feature (631)..(631): n is a, c, g, or t
ggtggattgcagagtgttactcagaattgggaaatccagctagcggcagtattctgtacagtagacacaagaattatgtacgccttttatcaaagacttaagagccaaaaagcttttcatctctccagggggaaaactgtctagttcccttctgtgtctaaattttccaaaacgttgatttgcataatacagtggtatgtgcaatggataaattgccgttatttcaaaaattaaaattctcattttctttcttttttttcccccctgctccacacttcaaaactcccgttagatcagcattctactacaagagtgaaaggaaaaccctaacagatctgtcctagtgattttacctttgttctagaaggcgctcctttcagggttgtggtattcttaggttagcggagctttttcctcttttccccacccatctccccaatattgcccattattaattaacctctttctttggttggaaccctggcagttctgctcccttcctaggatctgcccctgcattgtagcttgcttaacggagcacttctcctttttccaaaggtctacattctagggtgtgggctgagttcttctgtnaagagatgaacgcaatgccaataaaatttgacagaancatgataaaaaaaaaaaaaaa

SEQ ID NO: 52682 - DNA, 1020 bp, Homo Sapiens
  misc_feature (980)..(980): n is a, c, g, or t
ggtccggaattctcgggatggagccatgtgccagtgggcatgaacaactctggagtggatacagcctgctgtacttcgagggccaggagaaagcgcacaaccaggacctggggctggcgggctcctgcctggcgcggttcagcaccatgcccttcctgtactgcaaccctggtgatgtctgctactatgccagccggaacgacaagtcctactggctctctaccactgcgccgctgcccatgatgcccgtggccgaggacgagatcaagccctacatcagccgctgttctgtgtgtgaggccccggccatcgccatcgcggtccacagtcaggatgtctccatcccacactgcccagctgggtggcggagtttgtggatcggatattccttcctcatgcacacggcggcgggagacgaaggcggtggccaatcactggtgtcaccgggcagctgtctagaggacttccgcgccacaccattcatcgaatgcaatggaggccgcggcacctgccactactacgccaacaagtacagcttctggctgaccaccattcccgagcagagcttccagggctcgccctccgccgacacgctcaaggccggcctcatccgcacacacatcagccgctgccaggtgtgcatgaagaacctgtgagccggcgcgtgccaggaagggccattttggtgcttattcttaacttattacctcaggtgccaacccaaaaattggctttatttttttcttaaaaaaaaaaaagtctaccaaaggaatttgcatccagcagcagcacttagacctgccagccactgtcacccgagcgggtgcaaagcactcgggggtccctgggagggcaagccctgccccacagaaagccagggaggcagccctggccccccatcatgccctgcctagaacgcccccgcctggaaggccacaagcttaaccactttcgcacaaaccccatgttaaccactggcnacttttccaatggccacagaaccaactcaccattggttca

SEQ ID NO: 52683 - DNA, 834 bp, Homo Sapiens
gaattccgggagtggagagagtatgctctgtgtcgtcccagacatttctgcattccgagaaggttggagatgggtccggcaaccagtccaggttccagtaactttggtccgaaatgatggaatcatttattccaccagccttacctttacctacacaccagaaccagggccgcggccacattgcagtgcagcaggagcaatccttcgagccaattcaagccaggtgccccctaacgaatcaaacacaaacagcgagggaagttacacaaacgccagcacaaattcaaccagtgtcacatcatctacagccacagtggtatcctaactaccgtctttttgctaggacttaaactgacttgagtgtggcaaaaagttaacaaaaaaggagaaaaaatgaacaatcgtttgtggtttcttgggaaaacttttcataccaggtgatactattcaaaaaccccgttgtctccctgcaagtgctgatttgaaatgcagaagccacagtaaaaaaaaaaaaaaagaaaaaaaaaaagaaaaaaaaatcaaaatgtataaatattggaaatcaagtttttcagctgttttgttggttggttggttggtttttgtttggttttgtttaaatgggcaagaagtaaataatgtggctggaatacaagttgaacaaactagaagacacaaatctaacatagtttttatggaccaaggaacttgtatattgtataagctttagtaaaaggtacattttcaccatacctttttttatatcacggtattatagtacaccttgttaccaaataggttgttctcttccccacccacctttgagcttttgct

SEQ ID NO: 52684 - DNA, 600 bp, Homo Sapiens
  misc_feature (557)..(557): n is a, c, g, or t
ctcaggtaaaggccgaggggcaattaaaaggaaagcatctggctctgaaaatgaaggcgattataaccctggcaggaaaacatccaaaacaacaagcaagaaaccgaagaagacatcttttgatcaggattcagatgtggacatcttcccctcagacttccctactgagccaccttctctgccacgaaccggtcgggctaggaaagaagtaaaatattttgcagagtctgatgaagaagaagatgatgttgattttgcaatgtttaattaagtgcccaaagagcacaaacatttttcaacaaatatcttgtgttgtccttttgtcttctctgtctcagacttttgtacatctggcttattttaatgtgatgatgtaattgacggttttttattattgtggtaggccttttaacattttgttcttacacatacagttttatgctcttttttactcattgaaatgtcacgtactgtctgattggcttgtagaattgttatagactgccgtgcattagcacagattttaattgtcgtggttacaaactacagacctgctntttgaaatgaaatttaaacattaaaaatggaaaaaaaaaaaaa

SEQ ID NO: 52685 - DNA, 836 bp, Homo Sapiens
ctgtatttgcagtgtgggctaagacaaagtatattaataagcttttcagcccccccactcccgttccgtagtgtagaagcccacaggtgtagaactcagtcttaaacttcagtatgaaaccagtttccttgtgcgatgatggccacataaagcatagtacgtggatgtcagtgagacagcatgagagccagcagtcatcaaagcgttccacgtttgaagttagcaactgcttaaagttatgccctattaaaattgctttctcaaaagtttgggttagtttcaaatgtgatattttggagggaaggtaaagtaggtatctttcaggtcgtgataatgagctcctatgaaaggatgcaatataatgacccgcttttctagaaagttcataatcagctctggaacaagcacacttgattcctcactgtgcttcagaatgagattaagatcagatgttggaacgtgctatgctgtagcgtgtctggaaacaaagtacacaaacctggctacggtgatgagttagcttctgcttactacctgtgacaacccaagtgggtgacactagtgaaccttctccagtctgcaggctggcatagaaggctcttagattatattgggcagcttgcaatctgccgaagcagtgacttgcatttccacacttggcttgagcactcaacccagaaggcgaagatagcttttggttgtaggcggcttcctgtatgggatatccctcggtaagggtaaaggagcagaggcaaaggagaaaagcagaagttgcagctgatgcaggtatcctatgcccttgatggatgagactaaaataaaatttttgaagttaa

SEQ ID NO: 52686 - DNA, 597 bp, Homo Sapiens
ttggccatgggtcaggtgaatggatggagctccaagcggggctcagcccattgacccgagcgaggcgcacacacctgcagcgtggatcaagcgcactctctccagcatcgccctgaccattccatgtgctttgtcctagcatgttcattcttgactttctccacttcattttattaaaaagttaaatgctttaggaatctgtggcgtgtggccactgaccgccccccacctcctgccgctcctccaagtttgagctgagatggttctgtgagtccttggcaggggtcaaagggcacatctccttgaacctagaaagccccctacactctcagaggacacctctcctgtggattcagcgctggggcagtgaaggtgtcgggagccagcagagcatggtgcgtgctgccagctgccggccagccgggatagaggagatgccactggccctccgtgcccccagcccctccctcttaaccgaggctgtccttgctctctgcagaggccgctctgcaggatcctcgtgtcgcgcgtgatgtgtggtggcacagccgtgtcaaagtcacagtgtcttttctgtcgttctagttccagggtcac

SEQ ID NO: 52687 - DNA, 534 bp, Homo Sapiens
ttcctgccttcaggtactgtccccttcccccagctcctccctgaccccatgggccaggcctcagaccttccagctaaccgcttcccatgagccactactctgatgtcagcctataaccaaaggagctggggggtccaggcctggtgaccaacctttctcagcccactcaatcagggtgctccccacctgcaggcaggaggcaacaccctatctgctaccatcagccccttccagagcccatctgccccgcccagccctgccctgcccagccataccctgctctgccccatctgggggtgccctgctcagggatgggctggcagggctgtacccagcctccctggtaagcagagactcaagaaacctctggggtcctgttttctggtcgtgtgatcccaggggtgcacatgggccccttgggtgtctgaacagaagggcatgggagggagggctgcacccctgcagtcttactctgctggtgtagcgggcagctgcccactcccaccccaccctgcaccgcgggctcctgagtcg

SEQ ID NO: 52688 - DNA, 853 bp, Homo Sapiens
agcgcctgggcccgaagggagcgatgctgtggttccagggcgccattccggccgccatcgcgacggccaaaaggagcggcgcggtcttcgtggtgttcgtggcaggtgatgatgaacagtctacacagatggctgcaagttgggaagatgataaagttacagaagcatcttcaaacagttttgttgctattaaaatcgataccaaaagtgaagcctgcctacagttttcacaaatctatcctgtagtgtgtgttccatccagtttctttattggagacagtggaattcccttggaagtaatagcaggaagtgtttctgcagatgaacttgttacaagaattcacaaggtccgacagatgcatttgctaaaaagtgaaacatcagtagcaaatggcagtcagtcagaaagttcagtgtctactccatctgcgtcatttgaacctaacaacacttgtgaaaactctcagtccagaaatgcagagctttgtgagataccacccacttctgatacaaagtcagatactgcaacaggaggagaaagtgcaggccatgccacttcctctcaggagcctagtggatgctcagatcagagacctgcagaggacctcaacatccgagtggaaagactaacaaaaaaacttgaagaaaggagagaagagaaaagaaaagaggaagaacagagagaaattaagaaggaaattgagaggagaaaaactggaaaagaaatgttggattataaaagaaaacaagaagaagaattaacaaaaagaatgctggaggaaagaaacagagagaaagcagaagatagggcagctcgagaacgtataaaacagcagattgcattggaccgtgc

SEQ ID NO: 52689 - DNA, 1055 bp, Homo Sapiens
  misc_feature (714)..(718): n is a, c, g, or t
  misc_feature (720)..(721): n is a, c, g, or t
  misc_feature (724)..(726): n is a, c, g, or t
  misc_feature (734)..(734): n is a, c, g, or t
  misc_feature (737)..(737): n is a, c, g, or t
  misc_feature (739)..(741): n is a, c, g, or t
  misc_feature (755)..(755): n is a, c, g, or t
  misc_feature (760)..(761): n is a, c, g, or t
  misc_feature (767)..(767): n is a, c, g, or t
  misc_feature (770)..(771): n is a, c, g, or t
  misc_feature (776)..(776): n is a, c, g, or t
  misc_feature (779)..(779): n is a, c, g, or t
  misc_feature (786)..(786): n is a, c, g, or t
  misc_feature (788)..(788): n is a, c, g, or t
  misc_feature (803)..(804): n is a, c, g, or t
  misc_feature (819)..(821): n is a, c, g, or t
  misc_feature (952)..(952): n is a, c, g, or t
tccgggtttctctataataaatccctttgccaaatgcatgagttgcagacttgctactggcaagagtgaagcaagtgggtgagtaaaactattttgacgtgggagcgttttcagataggagtttagtcttgacgaaagtgtccgtgcaggaattggactccgaggagggttacagtatctcctgacgggacctgccactcgcatctgggcaatgttgacatttgaggtggcaggcaggatgcctgccttctaatatatttgggtgagtaactgagccagccaagggaaggttgaatgattaaatcagaaatgggattcttggtaaactgaagacttttatttgggaatgaaaaaccttaaaaaaatctcttcatcgttgaactgtgcattttccctgcattttttcccaacaaaattttgttgggggttatgttactgaagaatgaacagatgagtaagtggaggtgttatgtaaaggcatattgtactcgaaatctgaagacctgcagcagatttaaattacaactcttgttataactttttaaaagattgtgaaaatatcaaaatataaatgaatcaagttttaatatactgtatgatgggtggatgaggctgtccattgtaccatttgtttgaattctcaggcatggtttggcagtgcaagaattctgtaacattaacaaattcaataaaaagtaaatatatggaaaaacnnnnncnnccnnngccccccnccncnnncgcgaacccgcccnccaanncccccncanncccgnganaaaccancnccccccttccccccnnccccaacccccattnnncaccggggggggggggcctgtccttataatatctccccggaggggcgcgggctcttgtgtccccaccacccctttttttttttataagagaggcgccccctccctttcggggcggcttatttatttaaaantcagcggggggccccggtcggtattttttacaccaagcgtcgggtgcggggggagaaaccacccccgctcggtgggtgcgcgtcttattttctcaagagacca

SEQ ID NO: 52690 - DNA, 708 bp, Homo Sapiens
ggctctatatctgctatgcctaaaaacttaaactcaccaaatggtgttttgttatccagacagcctagtatgaaccgtggaggatatatgcccacccccactggggcgaaggtggactatattcagggaacaccagtgagtgttcatctgcagccttccctctccagacagagcagctacaccagtaatggcactcttcctaggacgggactaaagaggacgccgtccttaaaacctgacgtgccaccaaagccttcctttgttcctcaaaccccatctgtcagaccactgaacaaatacacatactaggcctcaagtgtgctattcccatgtggctttatcctgtccgtgttgttgagaggatgatgttgtaagggtaccttaaaacaagagactcgcttgtattttaagagaaccaagtggccaaagaaactctttctaactttggcaacatcagaacttgccacatgtagctactgcagcaaggcttctgtgtacttgcctgaaaacaaaggaaggtgctggtcattccatttcttttgtttgaagctaaagagatgtgtagctcacaggggctaccttaccagtataaagagctgataacagtactcagaagaatctgtgaacaaatactttgaaaatgggtttcatgtagactgcccttatgtgtggtcttccccattaatgtggaacattttaatatgaatg

SEQ ID NO: 52691 - DNA, 704 bp, Homo Sapiens
gaagaagagacccaaatcattctgaaggctcaactactttactggaaggttatacctctcattacccacacacgaaggaaagcaggaccttcatcccagtgacctcagctaagactgggtcctttggagttactgcagttactgttggagattccaactctaatgtcaatcgttccttatcaggagaccaagacacattccaccccagtggggggtcccataccactcatggatctgaatcagatggacactcacatgggagtcaagaaggtggagcaaacacaacctctggtcctataaggacaccccaaattccagaatggctgatcatcttggcatccctcttggccttggctttgattcttgcagtttgcattgcagtcaacagtcgaagaaggtgtgggcagaagaaaaagctagtgatcaacagtggcaatggagctgtggaggacagaaagccaagtggactcaacggagaggccagcaagtctcaggaaatggtgcatttggtgaacaaggagtcgtcagaaactccagaccagtttatgacagctgatgagacaaggaacctgcagaatgtggacatgaagattggggtgtaacacctacaccattatcttggaaagaacaaccgttggaaacataaccattacagggagctgggacacttaacagatgcaatgtgctactgattgtttcattgc

SEQ ID NO: 52692 - DNA, 731 bp, Homo Sapiens
gaagactccagctaatgaaaaagtagagattcaaaaacatgccacaggaaagaagtctccagcaaagagtcctaatcccagcacacctcgtgggaagaaaagaaaggctttgccagcatctgagaccccaaaagctgcagagtctgagaccccagggaaaagcccagagaagaagccaaaaatcaaagaagaggcagtgaaggaaaaaagtccttcgctggggaaaaaagatgcgagacagactccaaaaaagccagaggccaagtttttcaccactcctagtaaatctgtgagaaaagcttcccacacccccaaaaaatggcccaaaaaacccaaagtaccccagtcgacctaaagtcagtgattcaactggaaggaaacctcaatgctgcctccagagctttttggaaatactcagatcctggccgcctttgtaaccttctctaaacgtcaggcctggacttaaaagattttttaaaacctccataagtagtccaggggcggtggctcacgcctgtaatcccagcactttgggaggccgaggcaggcggatcacaaggtcaacgagatcgagaccatcctggccaacatggtgaaaccctgtctgtaccaaaaatacaaaaattaattggggcatggtggtggacacctgtaatcccagctactagggaggctgaggcagggagaattgcttgaacctgggaaggcgggaggttgcagtgagccactgc

SEQ ID NO: 52693 - DNA, 847 bp, Homo Sapiens
ggaaattgtggaggagctgccagccgcaagaagcagagggttgctcccaggcaagaggcaaatcatccgaacccgtggtcatcatgaagagaagtttgaggacttctgcaaaaagaattgaacctgcggaagagctgaacagcaacgacatgaaaaccaacaaagaggaacacaaattacaagactcggtccctgaaaataagggaatatccctgcgctccagacgccaaaataagactgaggcagaacagcaaataactgaggtctttgtattagcagaaagaatagaaataaacagaaatgaaaagaagcccatgaagacctccccagagatggacattcagaatccagatgatggagcccggaaacccatacctagagacaaagtcactgagaacaaaaggtgcttgaggtctgctagacagaatgagagctcccagcctaaggtggcagaggagagcggagggcagaagagtgcgaaggttctcatgcagaatcagaaagggaaaggagaagcaggaaattcagactccatgtgcctgagatcaagaaagacaaaaagccagcctgcagcaagcactttggagagcaaatctgtgcagagagtaacgcggagtgtcaagaggtgtgcagaaaatccaaagaaggctgaggacaatgtgtgtgtaaagaaaataagaaccagaagtcattaggacagtgaagatattttgacagaaaatccgaacttgggaaaattttcaaaagtaagttcggggataagtcctagtgcaggttctgtcattaactacaatgacgtccgaacagaaaggttatcactcatataagaaatgaaatcctttcattt

SEQ ID NO: 52694 - DNA, 570 bp, Homo Sapiens
tttgtttttaggaccccagatggtgaaacggcccaagccaaagaagcccagcagaaacagggctctccgcaccaggaatggttcaccaagtacttttctttctaagctaacctttgggatacatcacagaggatacttgaaaaacatttattttaaatcatccgattgaaggaatgaactaacaccaaccaaccaaataatatgcttatgatttatatatgatagctaaaacaaattttggcgttaacacttcatactgttctgccaggcacagcagctcacgcctgtaatcccatcactttgggaggctgaggcagatggactgcttgagtccaggaatttgagaccagcctggccaatatggtgaaactccaagataacgacagaggctacttggttaatttttctccaggatccatctggattctgcagatgaggctggcaaattaaatggaactatgatagggaccatcttactgtatctgtcagatttcccagggtagcactgatctctaccgtcacctcaccctcacccccagggagcagtacttgtgtgttgttttgaaacga

SEQ ID NO: 52695 - DNA, 610 bp, Homo Sapiens
cgtgatcttgtgagactctttttggttataattactatttaatatttagactattttactgagcagactttataaatgagatatctacaaggcacttaaagtgttacagatgttttaccttaagaattatttaagttgtgttgggttaagacagttttcagtgtaccgtaaatgttgtgttttcagaaaaagacaaaacgatggtgctgactggttttctgtatattgcacaacagtcctcaaatacactgatgtatgaaactattcatacatcaagcagcatttttttcactctccttagaattggaactatgcagttaaggcagataaaatgtacagatgtttcatatattacaggttacatatataaatcaaaatttcctatataaaactgatttgggatttggggtggaaatattttgaatattaatttatttttaaagatgcaagataggactttgtgcaatgtatttttgtaaatgcttttcaaaatatctgtctttggtagtgcttctgctgctgccaccaaattgataagatgctattaagaggtttaaataaagagttttaatttttaaaagggaaacaaaaaaaaaaaaaaaaaaaaaag

SEQ ID NO: 52696 - DNA, 644 bp, Homo Sapiens
tccggcccaccaagtcctcatatctgcagagaacccattgatcaccttgtgccctcttttggggcagcctgttgaaactgaagcacagtctgaccactcacgataaagcagatttttctctgcctctgccacaaggtttcagagtagtgtagtccaagtagagggtggggcacccttttctcgccgcaagaagcccattcctatggaagtctagcaaagcaatacgactcagcccagcactctctgccccaggactcatggctctgctgtgccttccatcctgggctcccttctctcctgtgaccttaagaactttgtctggtggctttgctggaacattgtcactgttttcactgtcatgcagggagcccagcactgtggccaggatggcagagacttccttgtcatcatggagaagtgccagcaggggactgggaaaagcactctacccagacctcacctcccttcctccttttgcccatgaacaagatgcagtggccctaggggttccactagtgtctgctttcctttattattgcactgtgtgaggtttttttgtaaatccttgtattcctattttttttaaagaaaaaaaaaaaaccttaagctgcatttgttactgaaatgattaatgcactgatggg

SEQ ID NO: 52697 - DNA, 581 bp, Homo Sapiens
  misc_feature (498)..(498): n is a, c, g, or t
  misc_feature (509)..(509): n is a, c, g, or t
  misc_feature (525)..(525): n is a, c, g, or t
  misc_feature (574)..(574): n is a, c, g, or t
  misc_feature (578)..(578): n is a, c, g, or t
agaacgacgaaaaaattatcaactctacaaagtgccccccagcagcagacctcctcgtctccacctccacctctgctgactccaccgccaccactgcagccagcctccagtatctctgaccacacaccttggcttatgcctccaacaatccccttagcatcaccatttttgcctgcttccactgctcctatgcaagggaagcgaaaatctattttgcgagaaccgacatttaggtggacttcttcaaagcattctaggtcagagccacaatacttttcctcagcaaagtatgccaaagaaggtcttattcgcaaaccaatatttgataatttccgaccccctccactaactcccgaggacgttggctttgcatctggtttttctgcatctggtaccgctgcttcagcccgattgttttcgccactccattctggaacaaggtttgatatgcacaaaaggagccctcttctgagagctccaagatttactccaagtgangctcactctanaatatttgagtctgtnaccttgcctagtaatcgaacttctgctggaacatcttcttcagggagtntccnata

SEQ ID NO: 52698 - DNA, 551 bp, Homo Sapiens
ttctctttctgcccaccacatccaatctctcaaaacggtcaggtctaccttaacatctcttgatttgagccactcccactgtcatcagctttcacctggattatcgtgacagcctcctactgcttctctatcatgtggccagagctatcttcctaaaatgcattgcatagttgatcaagtcactctctggcctaaaaccttccttggctccctgctgccctcaggataaagtctggacccctcagcatggcttgtgagactcatggtgtccttgtccctgctcacctctctggtctcatcacttgccttcttgcattctgggtcccagcctcctgtatccagagatgcagtggctctccattgccactctgattcctcctttcttttggtcacagagaaagggtactttctctgtcaaatctcaacttagacttgacttcctccaaggagctttggctatactctctcctcccgacccccaccctggcatactacacagatcactctgggctcacttgcctgcctaatggtcatctccccagtagactgta

SEQ ID NO: 52699 - DNA, 716 bp, Homo Sapiens
cccacgcgtccgagcagatcttcctggggggcgtggacaagcacacgcagttctggaggtactttgcgggcaacctggcctccggcggtgcggccggcgcgacctccctctgcttcgtgtacccgctggattttgccagaacccgcctggcagcggacgtgggaaagtcaggcacagagcgcgagttccgaggcctgggagactgcctggtgaagatcaccaagtccgacggcatccggggcctgtaccagggcttcagtgtctccgtgcagggcatcatcatctaccgggcggcctacttcggcgtgtacgatacggccaagggcatgctccccgaccccaagaacacgcacatcgtggtgagctggatgatcgcgcagaccgtgacggccgtggccggcgtggtgtcctaccccttcgacacggtgcggcggcgcatgatgatgcagtccgggcgcaaaggagctgacatcatgtacacgggcaccgtcgactgttggaggaagatcttcagagatgaggggggcaaggccttcttcaagggtgcgtggtccaacgtcctgcggggcatggggggcgccttcgtgctggtcctgtacgactagctcaagaaggtgatctaagggccgggggcttcttcacacacacacacacaccaggggaaccaagagaaccacgtagaatcctcaaccgtgcggaccatcaaccttcgagaa

SEQ ID NO: 52700 - DNA, 598 bp, Homo Sapiens
  misc_feature (566)..(593): n is a, c, g, or t
  misc_feature (595)..(595): n is a, c, g, or t
ggcaagtttaagtaataggggatatataatcataagcattttagggtgggagggactattaagtaattttaagtgggtggggttatttagaatgttagaataatattatgtattagatatcgctataagtggacatgcgtacttacttgtaaccctttaccctataattgctatccttaaagatttcaaataaactcggagggaactgcagggagaccaacttatttagagcgaattggacatggataaaaaccccagtgggagaaagttcaaaggtgattagattaataatttaatagaggatgagtgacctctgataaattactgctagaatgaacttgtcaatgatggatggtaaattttcatggaagttataaaagtgataaataaaaacccttgcttttacccctgtcagtagccctcctcctaccactgaaccccattgcccctacccctccttctaactttattgctgtattctcttcactctatatttctctctatttgctaatattgcattgctgttacaataaaaattcaataaagatttagtggttaagtgctcnnnnnnnnnnnnnnnnnnnnnnnnnnnncntgt

SEQ ID NO: 52701 - DNA, 751 bp, Homo Sapiens
tttaatgtagcccagctgagtcgaaaggttgtgacctgaaggcagaagaacccgaatgccacacctcattggagtatagccagtgttggtctgtggcacttgggctgaaaggtgataatggcattgcgtggtagctgacaatgagcaccttcggttccatgtggagcggggtttagctcatgcaaaagacttgcaattgtctccatgggacgatcccagtgggactgtcagcccacagctcgagtgggttggatgcttgcctctttcctaacagttatttccccgggtccagcttaaagactcgatggaaggaggtagaacctctgctgttactgcttgaacttaacctgggaaaggagaggaagacaccatctccaaagctattaatgtcactccttttgcgagcatgattaggccccggagatttccaagtccccccatctacacttacaaacgattagaagggtttaattttaaagactttctggttacactactccacgaactcctccaaagatccgttattcaataactgcctagaaaatgtttccatctcctctaaatccctgtgttctcctctgtggaaatgaaggcagcaagaagcacctgaggccttggttcatgcagtgttctcttttgactaaatcacctaggttcctttaaacatgctacaaagcccaggcatggtggtgcacacctgtactcccagctactcgggtgtactaggctttgggcctagtagttcgagtcc

SEQ ID NO: 52702 - DNA, 699 bp, Homo Sapiens
aagtgtttttttttttttttttttttagagctattgcgtatcttccctgtttgggatccttgtacctggtttgggttttcccttccttgtgacaattataatccagatgcctcttctttctgtttgaattacggtagtgcattgccttagtggcttgcctgtgcctctgggtggattacatatgatagtaaagcccacctgtttggatgggagtagaggaagttggtgtagaccagctgtggagctgaaggcacagtctgccccacccccacctccccactgtggttagtcagaggcatcctgctccaagctctgcttttccttcctctgaaacaatgccattcttgcttctattgctacacatctccttctggctcaggtgaaatccatgcccttctgcttatagacctaaagttcaggtacttattattggccattgatcttgaatttgccctctcctagtgctgcagtcccacttcaaagccattttctgaggaggatggtttaggtctggcaattgtccttgaaaaatcccacccatgttgtaccaccttggtgagtcatatgccactcatcagcttgggaatgatggctgccaactcccaatctcccaggaaggcagggggcagaatctttttttcacttggcctgctacctccattaaaaaaccattctcttacagtttaaaaaaaaaaaaaa

SEQ ID NO: 52703 - DNA, 618 bp, Homo Sapiens
cctgatgacctcattaaccaactgacatttatcatggatgctaaccagacttacctggtgtcagaacgcctagaaagggaagaaagaaaccagacccaagtgctgagacaacagcaggatgaggcctacctggcctctctcagagctgaccaggagaaagaaagaaagaaacgggaggagcgggagcgtaagcggcggaaggaggaggaggtgcaacagcaaaagttggcagaggagagacggcggcagaatttacaggaggaaaaggaaaggaagttggaatgcctgccccctgaaccttcccctgatgaccctgaaagtgtcaagatcatcttcaaattacctaatgattctcgagtagagagacgattccacttttcacagtctctaacagtaatccacgacttcttattctccttgaaggaaagcccagaaaagtttcagattgaagccaattttcccaggcgagtgctgccctgcatcccttcagaggagtggcccaatccccctacgctacaggaggccggactcagccacacagaagttctttttgttcaggacctaactgacgaatgacatttttttcttcctgtcccctcctaccccagtccctaaaag

SEQ ID NO: 52704 - DNA, 807 bp, Homo Sapiens
  misc_feature (807)..(807): n is a, c, g, or t
ctatattaccttaagaaatttccttccatagacagctgcctcaaagggaaatcctctttaaaccgtagttggcgcagaggtcagtcctagtcggagcttaggaggggcggagacgctcacatcgtctgacttgagtcgccactgattgtggcaacagctttgcctcatgagtcaaaaattggcaatttcttttgatttttagttgttgaatttgctgtttcaagcatttgtacatattagaagtctaaggagtagcaagtcagtgggaggactttttcacccctggcattagcagcttcgacctcattttccagatgcaccagctcctattaataagttagcaaggaaagtgtatgtcacgtgcaggaacagtgaggcagggacaggggttctgctccttctcacttcaccaccggcacacagcttgcccctgtctttgcccccaaaggtattttgtgtctagtgtcaaattggagctattcttcactggtccttaaccttgggttttaaaaagaaggcttctctgtttgggtagcgtaagagctgagtatagtaagtcctcttccaaagagatggcaatatgctgggcatctactttaaaacaaagttgtctgatttttgcaagagaggttaggattttattgttcttatttccctttacagttctgcagttccatcacagtatttttttaaataactcaggtgtatgagaagaaattagaaaagaaaatttaacttatgtgggactggtaaatgtttttattttgtaaagaattctataaaattaaagcctataatttctggttn

SEQ ID NO: 52705 - DNA, 666 bp, Homo Sapiens
gcagaattagacatagcatgctttggaaaagcaaataggaattgttgggaatgatttaatcttgttgttgttgttgttgttgttcacttgtggttctacattcctggtgaatgatgaatgttgctgtcaaagggctgccccctaccttataagggttgctgggcatttgaaggcaggaagatttttaaagatagattgaggttggtttaaaattattcctgtaaaccaacaataaagcaaagaagaggttcatttttgtaaataacactggtttcaaatagtgatgttagacttaacctaatttataaacaagagattaatatctccatgcatagttttagacaaaaaaagatgtttcaataaaattactgtcttgtaatataaatgttgtccacttcccttttccacaggcctagaacagttaaagggaacataatttgtttaggctcccacataaatgtgaatctggccaacaactttggttcatcctttagtgaattagaggatttggctaccctgagtatatttatattcatttcttctgttctccttctgttattatacttaatcttctaaactaaactaatgtgaacagtagggaagcaagggcccaaatgcataagtttctttgcactgttgcacttacttaatacaaataaatgtttt

SEQ ID NO: 52706 - DNA, 893 bp, Homo Sapiens
  misc_feature (817)..(817): n is a, c, g, or t
  misc_feature (893)..(893): n is a, c, g, or t
tgtctgtgaagactcagtgtgcagaaaaggtggagtaacctcagccccccagaatggattctgggcagtgtctttgtggtatgggaaagaatattgggctcttacctccccaatgactgccctacccctgcggaccccgctccagcgggtggggattttcttggactatgatgctggtgaggtctccttctacaacgtgacagagaggtgtcacaccttcactttctctcatgctaccttttgtgggcctgtccggccctacttcagtctgagttactcgggagggaaaagtgcagctcctctgatcatctgccccatgagtgggatagatgggttttctggccatgttgggaatcatggtcattccatggagacctccccttgaggaggtgaattcaggccaaaagggctgttggctgtaatcctacgccaggcacaaggcatcttgttgccttgccacgtcctgtcacagctgggtatccttaccatgttccacgcccttgcagtgggagacaggatgtccatgttctctaccatccttttccttcccatgcagattgtgaaatgtaatgagatgtatcaagatatcctagaaataaaaaccagatgtccacctccagtgtttcatactttctggttttacacatcgctggagggataaagagtatggataatctttggatttggagagccgttcaagatacttccagcttcttggctcagcctggcttcctctggttcaccccacataatgattatggctatttgctgtcatttctgggctagggctcctttctaacacctaaactggaataanggcctgtcagcatggctcccctttaatcccggttttcccgtctgggaacagtacctctgcccctggatcccaatgn

SEQ ID NO: 52707 - DNA, 901 bp, Homo Sapiens
  misc_feature (758)..(758): n is a, c, g, or t
ggatcctcaacaggcactgcagcatttcagctataaactgtacttcctgctgtctcataccagtttccctggagatccaggtattgtgggcatatgtaggtctcctgtccaacccgcaagctcatgtatcaggagttcgattcctataccagtgccagtctatacaggattctcagcaagttacagaagtatctttgacaactcttgtgaactttgtggacattacccagaagccacagcctccaaggggccaacccaaaatggactggaaatggccattcgacttctttcccttcaaagtggcattcagcagaggagtattctctcaaaaatgctcagtctctcccatccttatcctgtgcctcttactacttggagttctcaacctagagactatgtgaagaaaagaaaataatcagatttcagttttccctatgagaaactctgaggcagccacttatcttggctaaatagaacctcacctgctcatgaccagagagcatttaggacaatagaggacctaactgaaggaatccttgtatatgaaaggagttattttagaaaagcaataaaaatattttattcatcatagctctctgctttgggctctgcaggccaccagatacacatgaggcccctacttctcaagctgggaaggccaagagccttcccttcagcctttctggttatgttacacctagctgaatgtttacaaggtctggatccatcagcccctcaagcacagttggggcccagcngaaagagagaaaccctttctgctggccaccttggaatgaaactcaggaaaaagcttcccctctggaactgtaaaagggaccttaactgttttggaaaccaaaaaaactgcttggctggtggaattttgggccggggttccctt

SEQ ID NO: 52708 - DNA, 500 bp, Homo Sapiens
cacaacactctttaaattaaaaatgcgtttacacaaggacaaaaaaccaaacaccgcatgttcgcactcataggtgggaattgaacaatgagaacacatggacacaggaaggggaacatcacacaccggggactgttgtggggtggggggaggggggagggatagcattaggagatatacctaatgctaaatgacgagttaatgggtgcagcacaccaacatggcacatgtatacatatgtaacaaacctgcacgttgtgcacatgtatcctaaaacttaaagtataataataataaaattaaattaaaaaatgcgtttacaataaagtccaaacgcctcaaatacggtattcaaagcaatattttagctgctgcatccctctcccgcctcatccccacttcacccctacgcactttactgaactttccgttctctgaacccagaaaccgttctacctggaaggcgcttccctcctcaaatcctcgctgtgtgtgacgcg

SEQ ID NO: 52709 - DNA, 896 bp, Homo Sapiens
  misc_feature (715)..(715): n is a, c, g, or t
  misc_feature (797)..(797): n is a, c, g, or t
  misc_feature (837)..(837): n is a, c, g, or t
ctccgtgctgatagcccagcagactgacacgtctgaccccgagaaggtggtctctgccttcctaaaggtgtcatctgtgttcaaggacgaagctactgtgaggatggcagtgcaggatgcagtagatgccctgatgcagaaggctttcaactcctcgtccttcaactccaacaccttcctcaccaggctcctcgtgcacatgggtctgctcaagagtgaagacaaggtcaaggccattgccaacctgtacggccccctgatggcgctgaaccacatggtgcagcaggactatttccccaaggcccttgcacccctgctgctggcgttcgtgaccaagcccaacagcgccctggaatcctgctccttcgcccgccacagtctgctgcagacgctgtacaaggtctagactcaaagcctctcccatcccttggcctggaccagtgagctggggagggactcggatgaactgaggcgcagcctacgccattgccttggacaggactctggccacaggcagggcgggtctgtgtcccatgtgtcctgtcagtcccctgagtatgtgtgtgggtgtggcgcatgtgcaggtctgtgcctcctgtcgggatttgggttttaacgtcttctgctggcccagccctgctctgttgtggggagttggcccccaggggaaagggctgtgagctgctcccgccattaaaactcacctccacctganggcgctctgctgatctccgcctggggcctgatggccgtccccacccacctgccttccggcccggctccctggcggagccagnaccccaagagttgcccgcgtgctgtccttcccctctgtgnttgtgaatgggttggtttcctgccctgcctggggcctgctttctcggtcaccaagcccg

SEQ ID NO: 52710 - DNA, 647 bp, Homo Sapiens
gagccagaacccagggagttgcccgcgtgctgtccttcccctctgtgttgtgattgggttgtttcctgccctgcctggggctgcttctcgtcaccaagccctggtcctgcggcagctgtcacccctaccatccataccactgtgctgaccgctcagcctgaagagcagagaatgccatgggtgggactgtgggggtcggatcgtggggttgttggcagagggcaaccctgggccccacaccgtgtggacaggcagacaccagattgtccaggagcaggagctgctgggactgcgctggccccggacctagtgggccttctcctggctgctgagatgtcgtctgtgactggcctggctggagggggagtgttgacaacccaaagctgttctccagtctggggagggagaggcagggtccccaatgtccgagctgcatctggacgctgctcttaaaggacctcctggggcaggggagcggtagggtctggactgggcagatgctgtatgacctccctgagcacccgtgactgccccatgctttcccctttgtgctctgtgtgtgtctgggctgtgcccgggggcttcacaaataaagtcctgtgtcaacttcaaaaaaaaaaaaaaaaaaaaaaaaaaaaaagggggcc

SEQ ID NO: 52711 - DNA, 557 bp, Homo Sapiens
ccatcatctctccagcccaggcccctgggcatctcatgctggggggaagggactgaatacctttttccttccccctgcctgtgtcttcagccctgatgcacaggctgccagccccccagtccagccctctcccttccactggtgccttgcttagagccagaagggatgaagccgggggatctatggaacagaggaggagcgatgcagttgggagaggaagctagaagggttatggttggagttctgtacagtgttgagtttccgacagggaaagaggattcctccaatgctcctagagagaaagcctgagcaggagatgatgcagcagaggggaagggccctgtggtgccgccgcccttccttcagcctccgaagggtgatggaaatggagagtggaggaccaggcctccagctgtctggcctcgcccttcacgccttaacactaagcccacctcccctgctctccttcccagcattgagcccttggttgcctgggcccaggctgggggttttcagtatttgtaagcatttcagcagaacaataaagcctttggact

SEQ ID NO: 52712 - DNA, 612 bp, Homo Sapiens
ataattctttctgcctgcctacttttctgcaaaaatgagatgtacagatttcggttccctgctatgaaaagtgatgtggtagcaattttataaatgttgctttctgatttttatcagagtgagaaaattaaaattattgatttgcaagtagtaaacagttcatattttgatttcccctcattttagtttaatataatttgcaataaatgtacatattgttgtttgtttcataaagcatatcactttaaaatggtttttactcctgtgattatgttggaatatttggaattttaaaggagtaaagactgtccagcatttggttttataatgtttgtcaccagatttttattaatgtaaaaaaaatcaatttttaaaaaatagttggactttggcagcttttaaggaaagttggaggtgttttaggattgctatcaattttcagcattgtgctatttggaaataagtgttttgcttttgtctgatggtctgggctcatttttatgtttattttagaaaactgttgcatcaatatattatgtttcttggcattgttcagcataggtaatgtgtgcactttatgtgtacacataatcatatttaagttttttgcat

SEQ ID NO: 52713 - DNA, 1054 bp, Homo Sapiens
  misc_feature (968)..(968): n is a, c, g, or t
  misc_feature (975)..(975): n is a, c, g, or t
  misc_feature (1038)..(1038): n is a, c, g, or t
gtgagacagaggcctgacctgggctctgcacagaagggcctgcaagtggatctgcagtctgacggggcagcagcagaagatatagtggcaagtgagcagtctctaggccaaaaacttgtgatctggggaacagatgtaaatgtggcagcatgcaaagaaaactttcagagatttcttcagcgttttattgaccctctggctaaagaagaagaaaatgttggcatagatattactgaacctctatacatgcaacgacttggggagattaatgttattggtgagccatttttaaatgtgaactgtgaacacatcaaatcatttgacaaaaatttgtacagacaactcatctcttacccacaggaagttattccaacttttgacatggctgtcaatgaaatcttctttgaccgttaccctgactcaatcttagaacatcagattcaagtaagaccattcaacgcattgaagactaagaatatgagaaacctgaatccagaagacattgaccagctcatcaccatcagcggcatggtgatcaggacatcccagctgattcccgagatgcaggaggccttcttccagtgccaagtgtgtgcccacacgacccgggtggagatggaccgcggccgcattgcagagcccagtgtgtgcgggcgctgccacaccacccacagcatggcactcatccacaaccgctccctcttctctgacaagcagatgatcaagcttcaggagtctccgggagacatgcctgcagggcagacaccacacacagttatcctgtttgctcacaatgatctcgttgacaaagtccagcctggggacagagtgaatgttacaggcatctatcgagctgtgcctattcgagtcaatccaagagtgagtaatgtgaagtctgtctacaaaacccacattgatgtcattcattatcgggaaacggatgcaaaacgtctgcatggccttgatgnagaagcngaaccgaaactttttttccgaagaaaacgtgtgggaatttgctttaaaggacctttcccaggnaaaacccagacttttt

SEQ ID NO: 52714 - DNA, 640 bp, Homo Sapiens
  misc_feature (435)..(436): n is a, c, g, or t
  misc_feature (543)..(544): n is a, c, g, or t
tctcctgtgcccccagccccacaggtgctgtgctttgtgctcttggctgctgtgctgggacagaatgggatgccaggaagagaagaaagggggtgcagtctgaggccaccaccccccttcctatctaagggagggctgaagacaaggggccggcattcagtgggcagcagaaaggagaggccccttgaagctgctcagtcagaggcccccgtccctccttttgccttccgcaggactgaagacctgaaggggctggcttttggagtgttgaggtgaatatctgggagcagagatcatgaatagctcagggcagtgaatggcgcaccaagagcagggctgtgtgtgggaggctgcagccaggattgcctcagctcctccccctcaggctgggaggatagcacaggctaggggctccgggggtgggaggggtctcannctctgctgcccccaccccagtactagcctagcttcccaagctgtggcttagaggatagttggcttcctgcctctctcctctaaaatagcaagtctgggaaatcctgnnggtgagtggagtcaccccactcccagttgctggcagagactgagactaaagcatcacttaataaaccccccaagcccaaaaaaaaaaaaaaaaaaa

SEQ ID NO: 52715 - DNA, 747 bp, Homo Sapiens
ggattgcccttttttccttctgtatttttaaagaaggatgttaatttttgactatatattttaaaaaaatctaagcagggggacatgcaaaaacaatcatcatccacttggatgtcattttatagattaacactgtgtgcttttgtatggaaaaaatatatataatttaatagtataaaaaataaaatatatattcatttgcacttacgtgaaacacaaactttgctctacaaaatttcgtgtttcttagtgattttaaaatgcatgtattgcatgtaaaggaaaaccattacaattaatgtttatcacacctttatcttggtctttgttgatttgggttttgttggggtttttgttactgtttttaaattacagtaggcttctatatatcctggatttctgaactggtcttgttgacaaggattcccaagaaatggatcttttcactggctgactctcccatatctgcaagagattctgcaggaactgggtgtgcacacggtgttgtagccagttcaggtactgaatatttaggatttggtgaagttcactgtattgctatatttttgtagataaataaaactcaataaattgttaatccttccctttttgctgtataaaattgctttataatcacatcttttcttttcagaacattggttaacatttaaatgttccctcctggtacttttgttggcctgtgaaccgcttataaaaattttaatggtaattgggggttttacctga

SEQ ID NO: 52716 - DNA, 674 bp, Homo Sapiens
  misc_feature (660)..(660): n is a, c, g, or t
  misc_feature (668)..(668): n is a, c, g, or t
ggaccaactccgtgtcgggagtgcagaaaccaacaaagagcagagctgacatctgataaagacatgtaccttgacaacagctccattgaagaagcttcaggagtgtatcctattgatgacgatgactacgcttctgcgtctggctcgggagctgatgaggatgtagagagtccagagctgacaacatctcgaccacttccaaagatactgttgactagtgctgctccaaaagtggaaaccacgacgctgaatatacagaacaagatacctgctcagacaaagtcacctgaagaaactgataaagagaaagttcacctctctgactcagaaaggaaaatggacccagccgaagaggatacaaatgtgtatactgagaaacactcagacagtctgtttaaacggacagaagtcctagcagctgtcattgctggtggagttattggctttctctttgcaatttttcttatcctgctgttggtgtatcgcatgagaaagaaggatgaaggaagctatgaccttggagaacgcaaaccatccagtgctgcttatcagaaggcacctactaaggagttttatgcgtaaaactccaacttagtgtctctatttatgagatcactgaacttttcaaaataagcttttgcatagaatatgaagatcttngttttttngttcat

SEQ ID NO: 52717 - DNA, 645 bp, Homo Sapiens
  misc_feature (561)..(561): n is a, c, g, or t
  misc_feature (577)..(577): n is a, c, g, or t
  misc_feature (611)..(611): n is a, c, g, or t
ggaaatctgaatgtattatcctgtgtgtgtctaggtagagatattggaaggctgccaggggatttcgaagtttgcaacctttataggataactgatggcaatattaagacagacgcctgcttttgcaaataacttacaagactgtaaattccaaagatctgaatggggctttcctgatgttggtatctaaggcttaggcctatagattgatttacctttggaattgtgctccaaatgtctactgaagcttaaccgaagaactaataaatggactacagtagctcacgttacagggaaggagggtaggcagggaggctctgtgtgttaaaatgagggtctcactgctttaggattgaagtggctggaaagagtgatgcctggggaaggagatggagttatgagggtactgtggctggtactttctgtactaaacatttcctttttctattttaccactaattttgttttaaactgtgagccgtccaagtcagaagaagacagcaaaaaaagcaacttttccaacatacaatttacttttaataaagtatgaatatttcattnttgagaacattccctnggaattgccacataattcattaaaaacatttttnttaagcaaaaaaaaaaaaaaaaaaggtatacgcg

SEQ ID NO: 52718 - DNA, 859 bp, Homo Sapiens
gaggtattctttcaaattttttttaaaagccaactactgtcattaagaaataattttagatttgtgctctagcagaaaataactctgtacccatcaatcttattgccaacattccataccagtggtaggaaagatattctcattttttttattgaaccagacatttttataaaatactgattgactttgtacattatggatattatatatgaaattttgccttgtattctttcacttgaaaaaactccaaaattccacaatattttagtagttaacttcctattctttcttaaatttgatggagaagggaaaataaattgcagttattgattcttgccatctttgttttcttaaagaaatctatgcattttaaggataaaactaaagcatatgggtttacatgaaacatcaggatggattattgtacattgaattcattccgcgtataatgtggtatttcttactctgtccatcttggtagctgtcacttcaaaagaagacagtttccctgagtaatcatcacctacatggccattagagtatctatcggtgataattccatgatacagagtatcttggcattataaattcagtatcccaggacctaaacctttatgctacattttcgaagattttttaaaaataatattgttaatcagtaaaaaaaaaaatattttttgatctaaacataaggttctggcataatctgttagaattttaaaaaaggactgggtgggttttggcccttcaccattttttggcctaaagccaggggaaatattaagaattttccaaaattaaaaaatttttggaaacccaaaaaaccatttttataaatgggccgggttccggggttttt

SEQ ID NO: 52719 - DNA, 537 bp, Homo Sapiens
gcacgaggagaatggtcacattgaagtactgtgtggactagaaatgtaccctgtcatcatgcaatgaaatattgttatcgttttaacatagctcatttatgtagaatgaattctggtggtttaccccaagtcacagttaggacggtagatggtgagatcgcagatgcgctattatctagattcagtgttacattttcgatgtttatcactcagtgggtttttattaatatgctgattaagttatttactgggccagtcattgtgctaaatagttgctcttttgtgtttcattgccttgatgtttgagtgtaatctagcattttaatacagtgtttattttgcatgatctttaacaaatgttttaagcaattttaaaaaggcaggatgttattgacattatacactgaagtcttaacattttaacatttatagtgcttatttgcaaaattgtataattaggaattatttcagagacaatgttttctttttcaggtgagtagttgccgcgtaatatcattggagtacattctttatact

SEQ ID NO: 52720 - DNA, 1028 bp, Homo Sapiens
attttgaacaaggtttatattgactcaagtttaaaaacaaaaagtgtgactgaaaaatttttacagagtctagtgcaccaatgctgatgtgaggggttgtgtatgcgagtgaagaaaatgtgtattctggtggcctgaagctttactggacaaggatgtgtgagagtgcagagatatatttagtgacacagtagagaggcaaaaaaaagctaaaattccaaatgtatattttttcgtattgccctgtcctcacccagaaatgatcaattcctgttactgtattaacccttgttattaggaactctaagccatgccagaacaccgtccctccccttggaccgtatagattctgccctgggtccctagccccttgcagtgataaataactccagctaaaagtgtttggtgttcttatctccaccctctttcctactttgcttaccctcatcctcagacagatgcctcttgcttttaaaagttggatttaacgacgtgttgtagggttcttggtctgtgtgaaggcagagaccagagagaaggaagtgagcccactgctctcctgggagcaatgtgggtgagtccaccagaggccctgctgtgtgtggccaataaattttagtcttccccagccctcgaggcagtgtgtgtggatgtatgcgtgtggatatttatatatgtaccctgcactcatgaatgtatgaactggaggaagttactacagtggaagggttcttaataacaaggtctacctagcatgaagtatttaacattctcccatccccttaaaaatatacctttttataaaatgaaaaccataataaatgtttttgatattaaaaaaaataataacctacagagggaaaatttaatgggagacagcctatttgcccttgtacttttttcccccaattgttgcctgcctaattggtacaccatcctctaagttccagctccttgcccaccgggcaaccttcctttccatttagggttttacatttttaatcttcctttcccccccaaccccccca

SEQ ID NO: 52721 - DNA, 582 bp, Homo Sapiens
atcgggttttcatttactctggactggtgaaaatattttttaaagccagtgctctaagacctcagcttttatctcagaaccccatgggttccagaccaagagtacaggaaatcaaattgttgtcctgtctgtctatagcttggaacagggagctttgattactgactccggttccacacactgtaagatcaaaaaaccatctccacatttgaaagagatgtaaggtgtattcatagggatggtggctcaacaaatcaagcaaactggaatcaaggggagggggaagggaatgaaatggaaagggaggctgattcccttcccctgacttaccactaatttactaggctacctactctcatgagtaacctctcacagctacccagcacatgccacaatcctatgctcttgccttcttttatctgcactgtgtgaagggactcttttaaataaatgagcaagtgtcctaagctatgtcatccaaagattgtcctttccattctcaaatcctgtgactgggatcactcaacagcactgtgatgtattattttcaatgaggtgcctttcttaactgaccaaatgctg

SEQ ID NO: 52722 - DNA, 751 bp, Homo Sapiens
  misc_feature (640)..(640): n is a, c, g, or t
  misc_feature (642)..(666): n is a, c, g, or t
ggggctctcaaagcattttaactcagttgctttagggtccatttttttatgtaatcacttactcagtgataaatgaatctctgaaaacaaatgcttttacattttaatttaaaaagaaaacaggtgcaggccacagaaaagttttaaagtatgccttcttaccagcaatagttcattttaaaaatcatgccagatttttgccaagatcagtgtttcctcaacatgaagatagaaatagatttgtatagtgtgctcttgtacctctacatagattattatataattttgagcagttacacatttatctaaaggaaataaatcaactgtgaataaatgcatgtttaccaaaatggctgtttacagtgcatttagttctgatatttataaagatgacatttcacagaataactttaaaatagtttgaaattctatatagtttagacatcgatcacatctggagacaaaataaaatgtgcaatattttttatgtaggcgagctaacacagtgtaccctattgcagaattatctgattaatttgtaatagataagttgtataacattttcatatcttaaaatgttttttagatcaatcttgaagtgaaatattttcaaaataaaattctacagaaaaattccaanannnnnnnnnnnnnnnnnnnnnnnnncctgtcgggcgcccttcggccctcgaagaagctttcaagaacccatccttttggcgcgcggggccccggtaggaaaggtgaaaca

SEQ ID NO: 52723 - DNA, 606 bp, Homo Sapiens
gcacgaggaatcctgacttttttatatttggaaacatcaaataaaaatggaaaaaatgatcatggctttaaaaaaaaaacaaaaacacacacacatgaactcagatttgcaaaccaggtttctgaaactttgggtaaggtgtatgcttttaactttgaaatgtataaacacccagcggaaacgtatacctttcagtgcatagtgcattgtgtgcttaccctgggttgtttaaacttgtgttcaaatattccccctccaagtgaaagcctgtcgggaattccacagtaacacctttactgttctcccattgatgatcatatacgttacctcttcctagcggtacatttgtatgatccttactactggaattaccgggttaaaaggaaatgcttaccactaagatgtcagtattctcctcatggatattttcagtctcaatgttgccagtctaatagtatagtatgtggttgctttactgctgttctccccacccccgtggagttgtgtcattattttaatgaatgtgagctcttgacttactctagaattctaatacagatactttctgcactaaaaaaaaaaaaaaaaaactcgagggggggcccg

SEQ ID NO: 52724 - DNA, 589 bp, Homo Sapiens
cccagcgaacccgcgtgcaacctgtcccgactctagccgcctcttcagctcgccatggatcccaactgctcctgcgccgccggtgactcctgcacctgcgccggctcctgcaaatgcaaagagtgcaaatgcacctcctgcaagaaaagctgctgctcctgctgccctgtgggctgtgccaagtgtgcccagggctgcatctgcaaaggggcgtcggacaagtgcagctgctgcgcctgatgctgggacagccccgctcccagatgtaaagaacgcgacttccacaaacctggattttttatgtacaaccctgaccgtgaccgtttgctatattcctttttctatgaaataatgtgaatgataataaaacagctttgacttgaaaaaaacatgaaattcatgcaaatatatgtcaagtgccagaactaaaaaaaactcgggggggggcccggtacccaattcgccctatagtgagtcgtattacaattcactggccgtcgttttacaacgtcgtgactggggctggcgtaatagctaataggcccccaccgatcgcccttcccaacagttgctcagcctgaagggcgaa

SEQ ID NO: 52725 - DNA, 620 bp, Homo Sapiens
  misc_feature (596)..(596): n is a, c, g, or t
  misc_feature (600)..(607): n is a, c, g, or t
  misc_feature (609)..(618): n is a, c, g, or t
ccaccatcctcaatctggagcgggtgaccgagatcctcgattactggggacccaattccggcccattgacgtggcgcctcacccctgctgaagtgcgccaggtgctggccctgcggatagacttccgcagtgaagatatcaagaggctgcgcctgtagctgcctggatgagcacacctggctcatcacacttgcaggcctgttccctaaggggccccagccaaggagctgagcgaggctgtcgggcttgggggagatctgacagcccagacctttctacggctggcagcagagaaacaaagtctggacccactccatgctctgccctcagacctggccaggtgatgctctgggggcagcatctccccaccgagagaagcgggctcctaatgaggtgggaaagccacggcaggcagcgagcagcccaggccagctttctgcatggatggtcagtctcttgccctcaaacactacagcaaacaagctacccctgccagtcctagacaacttgggtacatctggggacctagcagttaggcttgactttgaggagaggctgtgatgtttatgatccctgaataaagctactccttggangaannnnnnnnannnnnnnnnnaa

SEQ ID NO: 52726 - DNA, 757 bp, Homo Sapiens
ccatgatcagccaaccccctacaccacccaccggccagcctgtccgggaagatgccaaatggacaagccagcactcgaacacacagactttgggaaagtgaaaagctccttagccctggggcttgaggggggaaaggggtagggtgggtaagagtccatgggggtgcccagtcccaggagaggggacaatgaagggacaggcctggagttactaggacaggcctttgtgctgagtagcaatgtatacaccatttgggctatcagaggtacccctgggcaggagcctctacatccccttccccctcctctctccatgactcttgacatcctagcttcttctaaggggggagggaaaggggggagatttttatatatatatacatatatatatatcaagttttaaattattgatagttcatctggattaccaaaatcactctgcagccctgcccgaggctagtaggctgcaaccctggtccccacccctaacctcctgctccccctcaagccaactatgcagcccacaagaaggccctgcgggcccccccattgcccagcactgtctcatagaaggctctggtggtacctctgggccccaggagcatcagccccttgatcatctggggtttgtcatcaccatattttctccctgctgttcccaccatgcccttctgccatcttctgggagaaggaaaccaaaggatctaaaactggggtttgggggaaggtttcagcctctccccactccccttgcccc

SEQ ID NO: 52727 - DNA, 860 bp, Homo Sapiens
  misc_feature (588)..(588): n is a, c, g, or t
  misc_feature (617)..(617): n is a, c, g, or t
ttgaaggccatgatataaacaaatttgcatgttgaagcctgtataaaacatggtacagtgagtgaatatacccccatccccaagaacactttatacatattaaatggatatatgattactgtgcaaaaattcattctggaaatgaacatatatttgagcactaatatgtaatgtacacctgccctaaggagaaaataaattataaaactttttacattcaaaattactttcccaagcatgtcttagaataatctatgtgttgatgcatgtaaattgtactttaggtaggcaaagaaatctggttatttatgtaaaaactagtctaataaagttagttagtggctttatcactttaaatctttagtgtccaaaagtggtgtttaaagtaatagcacatcagaaaaccttgtctggacaaaactagttcactcactgcttctgcacctgcagttgctccctttagggttataaaataatgacccaaatgttacatgtgttgatattataacttgtcagttactgatgtctgtggtatcctaccctcatctctgaaagggataatactgaataattattagaaaactatanaacttcacactttgtaccattaaaacctnaaattttaatcttgtccttttttactatggatcagtcggcactcgggaacagcagcaaggaaaaaaagcaaatttcattcacatgttctgggttcatacctcttctctacctaattggtcattttaaatttccagccttattccctggataagggatttttaccacatgaaagtcattccagtggaccctaacctccttattggtggaaggttagtgggaagtataacttaagaaaaaggcta

SEQ ID NO: 52728 - DNA, 810 bp, Homo Sapiens
  misc_feature (686)..(686): n is a, c, g, or t
  misc_feature (756)..(756): n is a, c, g, or t
  misc_feature (758)..(798): n is a, c, g, or t
ggacgcgtggggcataaatgattatacgataaaggtatccgttattttggaactcatttcagttgggatctcctgtatgcagagtgttgcatttagaggtttgagtcccatcttggtttcttgccgtgctgactgtagccttcaccttgacttgaatgaaggtctgtggttggaatgtgtgaggagccgctgaggtgttcaggaggtgctgcctggaggtcggtttcttcctgggtgttacgggcaactgctcacacagttgtttctctgtgaacatttccagtgtttaatccaaaatgaaaacccaccaatgcttttgctaacttcagtgccttttataaatcatttttaaatttcctgaacttgctttttgaggatatacagggatattaagtagacgcaggattgtttttgtttgtaaaaattctgaattgaaactttgttttaaaaaaaggcttctttctttcatatgacaagagataggtcaggaatattggaatcaagatttaaatgttaaaattcgattttgttacacagggtgtgttcatttgttttgtagcagacaagatctagatcccagacagaaacaacacatgctattctaaaaagccgcattttaaaaggcaccttggttctcaaaagaaatcagaatatggatattcgtagtgatgatctgttttctctanaatcttaccatattgtctgtatatggttgtaaattcaaatggaaagtaaaacgttttggccctgaaaaanannnnnnnnnnnnnnnnnnnnnnnnnnnnnnnnnnnnnnnnnaagggggcccct

SEQ ID NO: 52729 - DNA, 893 bp, Homo Sapiens
  misc_feature (705)..(705): n is a, c, g, or t
ctggaccggtccggaattcctgggatggaagatgatttgaagtgggtagaagagaatgttccttcttctgtgacagatgtagcacttccagcccttctggattcagatgaggaacgaatgatcacacactttgaaaggtccaaaatggagtaaggaatgggaagatttgcagttaaagatggctaccatcagggaagagatcagcatctgtgtcagtcttctgtacggctccatgggattaaaggaagcaatgacatcctgatctgttccttgatctttgggcattggagttggcgagaggtgtcagaacaaagagaacatcttactgaaaacaagttcataagatgagaaaaatctacgagcttcttatttacaacactgctgccccctttcctcccagactctgacatggatgttcatgcaacttaagtgtgttgttcctgaactttctgtaatgtttcattttttaaatctgacaaactaaaaagtttaacgtcttctaaaagattgtcatcaacaccataatatgtaatctccaggagcaactgcctgtaatttttatttatttagggagttacataggtgatgggggaaattgttaactacctttcattttcctgggaagtcaaggttacatcttgcagaggttgttttgagaaaaaagggcccttctgagttaaggagccatagttctatcaatgatcnaaagaaaaaaaaaaaaaagagaaactgttacagtatgattcagatcatttaaaaaagcaaaatcaagtgcaattttgttttacaatggggtattattaaagattttttctatttccgatgtactttttagaagaaatattagctttaactccttttgacatcttgctattggtgacaccttccaattg

SEQ ID NO: 52730 - DNA, 916 bp, Homo Sapiens
  misc_feature (23)..(23): n is a, c, g, or t
  misc_feature (828)..(829): n is a, c, g, or t
  misc_feature (849)..(849): n is a, c, g, or t
  misc_feature (859)..(859): n is a, c, g, or t
gaatgacgtttcgcctgccaagnattgtatttttataagtgatacaagggccccatgagctccatggccacatctgtacaaaacaggccctcctttcaggaactggtctcgagagagcaaaggggtcaactccctaaatggcagctgagacagtcctccctggtggcatggccctgtttcctgttgatatggtgatagttggagagtcaaatttttaccagaatttgtgaatatcatctctggttaatgattacacaaaaccttttaaaattttaaaaaattatttctaattctataaataaactctgcagttgtacagccactgtacagctaacatctcaacactggaaatgaggctggtttcttccagtttggctcagattcttcagggaagcccagttaagacaaacagctctctatactcaatccttactttgctgagaagatacaggcctgcccactcgctcccacctgctcttcatgaggagtcctttattcctgcatgtttcctgttctttgggacctttaggagctaacctccacagatgctgatagtctgtagagtcaggaataccatgtaacatgttgaagtagactaaagattagttctttggcaatagcccagtctggacttactatgtacttttgaaaataaaactgcttatttgtaaactctgtaattaggaccttttgctatttgagttatattcctttctaacttcaaacgtctgcattcatgtataatagccattttatgcacagatgaggtgattcccacactttttttcgcagatgtttcattatctggatgagtgtattacataatannattgaataatggtagtcttnccaatgacanaagcagctagttgattgtcattttgagtttaaatgtttgactgctatcagcaaaaaa

SEQ ID NO: 52731 - DNA, 1052 bp, Homo Sapiens
gtccggaattcctgggatccagctctcttgtgtacacacatagtggctgtcattcctcaaatggcaaaaccagcccctgttgaggagtagctcattggcatgaagtagacttaaatcttgatataacttcaaagccgatctgggctgagtcttttggacctatttttttaaaaaagtatttacgtaagtgtttgattctaagaattgtttgtaagtatttttaatatattgtaaggagttatttacccaaaacacttgctccaattttgccccttataattgccaaattgtaagcatcaataagtaggtaagaacaatttatataaaaactgatagaaatgacaaattcggggtttcggcttgtccgggagtcaataagtacgcacagtgctctgctacattgtagagtttctgaagagatcaaatttgactccactttaggagtcccaaagcaaatgtccatgtctaagatgaatatttaacttgcatagtcattctgtgctatattgtaactgccagatggccagaaagaaggcaacagtggactcagacttctgaggaatttgggtttgttcccctttgtagactaatgtgtaggttgctgttgtgcgaagatcgtgtaactttagcagacatgtatttcttgcacagctaatagaagacaaagttgaaaaaaaggatgcaaaataaaaagctgcctaaggtgaaagttagaaattgtagacttttttttaccataatagtatgtgttcatttgaagatgatttggggtttattttacagctatataaaacataaatttgatgatgtacttctaacctttcaagcattttctgctattgactatataatatagcctccataaattttttttaatgacaatattctgtttgaacggttgtaccatactcagccatggccctttctttttgacgaaaagggttccaaaaattttggattttttattccccctccccccaatttttggattaccttaagatggatttatcggaaaagaacgtttcttttgtcaaaagaataatgggccactt

SEQ ID NO: 52732 - DNA, 559 bp, Homo Sapiens
ggtaccatctgtggtggctctctgcaagttttaaaactgcctctgctgagctctcatcattttggtggtttctgtgttagatctcgttagtctgcattccacagcttctcagttgccatttgatttcccaacttgtccggaagtgtttccagaatactgatcacttttttttttgaggcatctgacaaagtcacaaagtctcagactagaaataattacccagtatgatcatggcatccaagaccagagtctcagaactcattaagaaacagtttacttggaatggagaatacccatctgtaatacaggtcctgtcatttcattcatctcaaattattttgaattcttcccaaatggctgctggatttaggtggtaataggggctgtgggccataaatctgaagccttgagaaccttgggtctggagagccatgaagagggaaggaaaagagggcaagtcctgaacctaaccaatgacctgatggattgctcgaccaagacacagaagtgaagtctgtgtctgtgcacttcccacagactggagtttttggtgctgaat

SEQ ID NO: 52733 - DNA, 745 bp, Homo Sapiens
  misc_feature (745)..(745): n is a, c, g, or t
ccctgactccacaatgcccctttccttggctgaccagtatgactactggtccccacctttcccttgcctatccctacctccctcctactaggttgtcccatccctctcttcacccattcattcatgaccatttttcactaccaagctccccccctcccgaaggaggctgaggtttttgtgactctctagactctattgtgggatggaatgaacattgctaaagaatcttgtgttcgctttactttaaaaaggtatttttttcctaattataaaactgatgtgtcagttacggaaaaattagaaatgcagcacaaatacatgaatattttaccacaaaattgccatataatatcttgtcttttttgggggtgtgaattttttgcattgttctgatcatattctttatcatgtaatttatgttcttttttactaagtattatgtgtggttattatagattttcacaaagatatattgctggtaatatattttattgtgtagtcttataatttacttaaccttctttcaattgttagaaatttaggctatttccagattttcagtattgtaaataatgctgtgatgaccaattttgtgaataaaatgtttttatgtatttcagattattcccttaggatagtctctcagtgccaagttgtcaaaaacatctctattttgcttatcttcctgctctcttgctgccttagggggtagtaaactgaaacataaagtaaacatgcatacaan

SEQ ID NO: 52734 - DNA, 643 bp, Homo Sapiens
cagctctgcgttgctcccgtgctgcctgcgccagccccaggctgctgaggagcagaggccagaccagggccgatctgggtgtcctgaccctcagctggccctgcccagccaccctggacatgaccgtatccctctgccacaccccaggccctgcgaggggctatcgagaggagctcactgtgggatggggttgacctctgccgcctgcctgggtatctgggcctggccatggctgtgttcttcatgtgttgattttatttgacccctggagtggtgggtctcatctttcccatctcgcctgagagcggctgagggctgcctcactgcaaatcctccccacagcgtcagtgaaagtcgtccttgtctcagaatgaccaggggccagccagtgtctgaccaaggtcaaggggcaggtgcagaggtggcagggatggctccgaagccagaaatgccttaaactgcaacgtcccgtcccttccccacccccatcccatccccacccccagccccagcccagtcctcctaggagcaggacccgatgaagcgggcggcggtggggctgggtgccgtgttactaactctagtatgtttctgtgtcaatcgctgtgaaataaagtctgaaaactttaaaaaaaaaaaaaaa

SEQ ID NO: 52735 - DNA, 352 bp, Homo Sapiens
gcaaatcataaaaaaccagataattgaactttgaagttatagaaaatcagagaggggtaagtttatagggcattttgttctgatggttcaaccagaggtctaggaaatagcactgttggcccaaacagaacaggcttttagaagataaaagcgacaagaaggaatctggtgaattttagtcatcccagctttttagtcttaaccacagttctcactctcttaaatggtacctcaaaaagctggagcctctctgccatgattatgcttctacaaatttcttttataaagrgactcaaagctaatgatagcttaaaagraaagttaatgccttctcattggraatgtataatca

SEQ ID NO: 52736 - DNA, 824 bp, Homo Sapiens
  misc_feature (635)..(635): n is a, c, g, or t
  misc_feature (655)..(655): n is a, c, g, or t
  misc_feature (664)..(664): n is a, c, g, or t
  misc_feature (741)..(741): n is a, c, g, or t
  misc_feature (824)..(824): n is a, c, g, or t
agaggtaatcccagggcacccacaccttgccccggcccctgctcacctgccaagccaggctcatctgtatacgtatgctgccccgacttctgctgctgcactgggctcaaccagctccattgctcatcttttctccccacagggttcctcaaggcatgctgcagcctataccactcaccctagcactttggtgcaccaggtccctgtcagtgttgggcccagcctcctcacttctgccagcgtggcccctgctcagtaccaacaccagtttgccacccaatcctacattgggtcttcccgaggctcaacaatttacactggatacccgctgagtcctaccaagatcagccagtattcctacttatagttggtgagcatgagggaggaggaatcatggctaccttctcctggccctgcgttcttaatattgggctatggagagatcctcctttaccctcttgaaatttcttagccagcaacttgttctgcaggggcccactgaagcagaaggtttttctctgggggaacctgtctcagtgttgactgcattgttgtagtcttctcaaagtttgccctatttttaaattcattatttttgtgacagtaattttggtacttggaagagttcagatgcncatcttctgcagttaccaangaagagagnatgttctgaaagtaccctctgaaaatattttgtctctctgacttgattctataatgcttttaaaacagtgagccctncttattcatttgtgtatgtgatgctgtcagaaaatgcgatgaagagtgaatcgatgacaaagaaatactttgttgttaaatcn

SEQ ID NO: 52737 - DNA, 573 bp, Homo Sapiens
atagagcacttacctgaagtcagtggcctggatcatagccctggatcatttcccagtctgtcctgtgctgtgtgaccttggacaaggcgcttcatctctctgggcctctatttctccatttgtaaaacaagtggctgcagtagatgatggctgagagcccttcctgttcccagatgccttggtccaaagaccccacccctctgctggtcctgccaacgtgttggtgctataagctgcttcagatataaaattggtttatctataatgtttgttcatttaatagcttctaaaaggcctttttgttatacagtgctttttttctagttttatggacttggttactgtaataatgtcttgtttttagccatgtaactacaaacagatattctcttgatgtcttagtaaatttgcatttgatatatcattgatgagattttgttgttatgtaatattctttggctacgcatctgtccagcatcttattaaccataatactgtgatcattatttggaaatatgtcctatggaaagaataaaagcatgtacttcacagctagcatgttcacagatttga

SEQ ID NO: 52738 - DNA, 740 bp, Homo Sapiens
  misc_feature (599)..(599): n is a, c, g, or t
  misc_feature (614)..(614): n is a, c, g, or t
  misc_feature (633)..(633): n is a, c, g, or t
  misc_feature (708)..(708): n is a, c, g, or t
ttttaaaaattcataacagcaaccttgaaaaaatagacttaaatgaatgcttctagaaacttccagcggctcacaaagaataagactgccttaaggctggcaacatctaagcctctaacagcacagggaagcaaatatcttaccaggcagcctatgaattaacccaaagaagctttggttggttttggtggatttttatcatgccatgttggacatgagattttttagatcttccttcccacattgctagacgtctcactcaaagacatttgttgggagtcacatttgcatcatagatgagacagtccattcatcttagttaaattggattgagaatgccttttgtttccaggaaaatattgatcaccatgaaagaagaatagttttttgtccccagagacattcatttagttgatataatcctaccagaaggaaagcactaagaaacactcgtttgttgtttttaaaggcaacagacttaaagttgtcctcagccaaggaaaaatgatactgcaactttaaaatttaaagtatcttgcactgataaatatatttaaaaattgtatgtttataaagttattaatttgtaaaggcagtgntacaaaatgttcagnttatattggtttagattgntttgtaatttttaaaggtgtaaaaataacatattttttctttatggaaatctataaaacctttctgtagtaaaanggtttcattttactggtaaaaaaaaaaaaaaa

SEQ ID NO: 52739 - DNA, 810 bp, Homo Sapiens
  misc_feature (8)..(8): n is a, c, g, or t
  misc_feature (10)..(10): n is a, c, g, or t
  misc_feature (12)..(12): n is a, c, g, or t
ggcgaagncnangaggtgtgtgtatgtctttatgaaatgtttgaaaagagataagctgactgcttgataatcactctcaggtgtaaagctccaagtgtaaataaaagtggcatttaacaaatctttcagaacaaagtacagctgactatatataccaagagctaagctaaaggaacagctgagagctccgatctccacgagagactaatctaaaagctctgctttgtacttcctcaccctgctttcgtacaaggaagggggacgatgggaaatcatggacttgtaagttgtatttaaacataaaaatgaacttggtaacttctgggtttagtagagcctcagtgtcgctttaacttagtttactttttttttatttttaaagcagcaatggatggttttaaaggagtattatgattgtaaaattgctaaatatgactgtaacacagctttgtggtagctgtgacacagttcacttgggcaaaggagtggtgatggactcgttaaaatcatatatacttgaatagtccattgaccgaaactctttatagactattgtgtaaatgtggaatcacagactgttaacattgcctggacttcagcagagtcctggagctgctgggacctctcctatcatgatgaacttggacttttttttttgatttctggttttaaaaaacataaaattatagaatccagataattcgctggagtcattctgatccccatgtagatctgtatttagtatcatttggatttggagaagtgttgattacattatggctgtgtaataaaatttttattaaaactgca

SEQ ID NO: 52740 - DNA, 707 bp, Homo Sapiens
caaaacttcaattgtttctactctgcaggttaatatggctccaaaagggccccctcctttcccaggagtccctctcatgagcacccccatgggaggccctgtaccaccacccattcgatatggaccaccacctcagctctgcggaccttttgggcctcggccacttcctccaccctttggccctggtatgcgtccaccactaggcttaagagaatttgcaccaggcgttccaccaggaagacgggacctgcctctccaccctcggggatttttacctggacacgcaccatttagacctttaggttcacttggcccaagagagtactttattcctggtacccgattaccacccccaacccatggtccccaggaatacccaccaccacctgctgtaagagacttactgccgtcaggctctagagatgagcctccacctgcctctcagagcactagccaggactgttcacaggctttaaaacagagcccataaaactatgacctctgaggtttcattggaaagaaagtgtactgtgcattatccattacagtaaaggatttcattggcttcaaaatccaaaagtttattttaaaaggtttgttgttagaactaagctgccttggcagtgtgcatttttgagccaaacaattcaaaaatgtcatttcttccctaaataaaaatcaccttttaagctaaaaaaaaaaaaaaa

SEQ ID NO: 52741 - DNA, 752 bp, Homo Sapiens
  misc_feature (1)..(1): n is a, c, g, or t
  misc_feature (28)..(28): n is a, c, g, or t
ntccgaggagagcaggcgacccacgcgnccgatacaattatcgagacatgggagtgaccagcaccttttctttaaatggtggaacctggtttccttttaccatgaaattgtcttacttgaaaatattgatcctgatgagagagaagatggtgccaaggctgtctttgtataatgggctcaaattctctacctcttcagggctaatacttttatctgagctgctgcctatagtgtcttttggaaaactacttaaagggtgattttctgttactttttagcaaatttttttaatcacctcttgctacacccattcttttcatgtgcagccgactcaaaaattaccagttttggtgaaaggctaaattagataatttggaaccaggatactaatgatttctcatctttacttttttttaatcctaatataaagtgaatttgattgaaaaggcaaatagctattagggaagcagtttgccattgttgcagagttatctgtactttgtttaactgaaaaaaatgtagaaatatatgtaaagaatttaagacaagagtactgaatggatgatttgtcataggctttcccctttctttctgttctagcagcaggaaaagtttctctatatcctctccctctacctgtaacaattttgttttctactgttaattacattgtgtatttatagttctatgcttactgttgtgcatatactggcaataaaactgtacataacattaaaaaaaaaaaaaaaaaa

SEQ ID NO: 52742 - DNA, 798 bp, Homo Sapiens
  misc_feature (625)..(625): n is a, c, g, or t
cacgaggtgtccagaccccttatgcaaagaggcaaaattgttgccttggccccatcatggagtaacttaaaaatacatatctatcttccagaacaagccacacaacaacacacctcccctccttgagcctggcacacagcaccgggctctctgaatttggaaagtgtttcattttgtggcctactgctcggggcaggggggctgagccaggatgtgcaatagaagcaggggttgtcccctctgccagatctgtggggagctgcccaggccacccgtgcacctgtcctgcttcctgcagtccccactccctgcctcctttgagggactgggggacttggggtagggggacagacgggaaagggtctgaatgctctggcaatggcgagaagaagcgatcgccacactgccactctgctgcccagccaccaggatttctgcctggagccctttgccctgtccctgctgcctgaggtggcgtagagcagaggagaagaatttgctccaggccaggagcacaaatcgttgttcaatgaatttctctccaactcgaccttggtaaacggaaatgttgggggtgaagagaaacaatcactatttttttcttttttatctggtaataattaanagaaaacccgaaaaaaaaaaaaaaaatggcctatcgcggcgctcgctacctaggacgttatattagtcctttatgaggttattatatgaaaagagagagatatcacattcggtccctatccttttgcgattgctctgttgccacaaaccggagaaaagcaatatgtgcatgta

SEQ ID NO: 52743 - DNA, 1014 bp, Homo Sapiens
  misc_feature (843)..(843): n is a, c, g, or t
  misc_feature (877)..(877): n is a, c, g, or t
  misc_feature (930)..(930): n is a, c, g, or t
  misc_feature (957)..(957): n is a, c, g, or t
caggtttattcagcgtagccctgtcatcttgctgcggagtcaagtggtcatccctatcttacagtgggccattgcctctactaccctggaccaccgggatgccagttgtagtgtcatgaggtttctacgagacctcattcatacaggggtagccaatgatcatgaagaagactttgaattacggaaagaactgattggacaggtgatgaaccagcttggacagcagcttgtcagccagctgctgcacacctgctgcttttgcctccccccctataccctaccagatgtggctgaagtgctctgggagatcatgcaggttgacagaccgactttttgtcgatggttagaaaattccttaaaaggtttgccaaaggaaacaaccgtgggagctgtcacagtgacacacaaacaacttacagacttccacaagcaagtcactagtgctgaggaatgtaaacaagtttgctgggccttgcgagacttcaccaggttgtttcgatagctcacactcctgcactgtgcctgtcacccaggaatgtcttttttaattagaagacaggaagaaaacaaaaaccagactgtgtcccacaatcagaaacctccgttgtggcagaggggccttcaccgccaccagggtgtcccgccagacagggagagactccagccttctgaggccatcctgaggagttcctgtttgggggtgtgagggaaaatcagcgcggattttaaaaagatggctgtggcctgcccggcgtggtgggaggggagctgggtttcctgggtgaactttctaaaggaaaaatatttttaagtaaagaaaaaagggaaaaaagggaagactanacaggaaaccagaaactgaaaacattcacctggntaccaaatgacacattgcacgcaccacacacatacacggcacaaagcgccagnttgcgcacgctgtaccccgaaaaaacnaaaaggaccaagcttttctgtggaaacaaaatattttaccttaggggataattgggg

SEQ ID NO: 52744 - DNA, 574 bp, Homo Sapiens
gctggagatcgttattctattatgaataagaaacgagaagtttttccaaagtgttagtcaggatctgaaggctgtcattcagataacccagcttttccttttggcttttagcccattcagactttgccagagtcaagccaaggattgcttttttgctacagttttctgccaaatggcctagttcctgagtacctggaaaccagagagaaagaggatccaggatgtacttggatgaggaggcctggcttatctaggaagtcgtgtctggggtgcttattgctgctccatacagctgtacgtcagccccttggccttctctgtaggttcttggcagcaatgagcagctttcactcagtgacacaagtaattactgagtcctaatttgatagccaccaactgtacctgggtaggcaaagtcagatttttgagaacctttttcctgatttgaagttttaattaccttattttcttttatgctttcctctgtcttgtaatcttttctcttcttaatatccttccctataatttcaattatttggattaattttagaataaacctatttatttctaaaaa

SEQ ID NO: 52745 - DNA, 784 bp, Homo Sapiens
  misc_feature (717)..(717): n is a, c, g, or t
  misc_feature (727)..(727): n is a, c, g, or t
  misc_feature (739)..(739): n is a, c, g, or t
  misc_feature (776)..(776): n is a, c, g, or t
gagctgcaatgatcatcgagaaccctcaatctctattttcacatccagtgtttcaggtgtggaatttgtaaaggccagcttggagatgcagtgagtgggacggatgttaggattcgaaatggtctcctgaactgtaatgattgctacatgcgatccagaagtgccgggcagcctacaacattgtgacacggctttcaagcttccggatcactcaccatttctttactgagagtgtcccctggcaactgcttaacaaaatcccaagctcaggggcttctcagcatttacctaatttctgaaaggctcttctgaaaggtggtatctgttctttcgtagcacagtgtttatgtttttcctgtttattgttttggtttttttttttttgcatttgcacagtatacacaaaagaatatggggttgtaatgatcctgaatagctcaaaaaaggttttagcatggtcaaacaggcttatggtttaaaatgtgttattctcttctttgggaattagctaaatgatacaataaacctgttttgttttagaatgtctaggaattaaacactttatgtttacagaattgagctgcagaaagtgcaagacatgccaatttgagacacacggtcttctaagactgaaggataaatttaatgcatttcagaaactaaacatcacagcaagctctatctctgagctataatttggtttttaatgcaaagacnctagtttganaatatatactgnaatcctgaacatttggggtaccttaccctttgggggnagaaaatt

SEQ ID NO: 52746 - DNA, 628 bp, Homo Sapiens
ctagtcaccagcacagaataatctccaacattttctaaattctaattgccaactgtttctatttatatttgatttatatttcatttggagtctgttacatggcagcttaggcagactagatcttgttttttccaatgcagcataatgagtatgatctatttcttttcaaataatctttgagatcccaggaaaaaaaaaatgctctgctccattgagctataatgtaaatgtgtttgtttaaaaaacaggtgaggcaagtgagtgatttattgttcctgaggaagtatatctgattttttttctcatactccaaaagctagtccctactctttaataaaaataatgggtaactttttgtttttcactagcgaacttccatgacatttcctttctatgtagtgtgattaatgcaatacatattatagttatctatacacagtgtaagatttaacaaactgaaatgatccacctcatatgtgagtccgtccaaaagatgttactgctctgggtgggccagtgttctatatcggttatactaactttcatttaaagtatttattctaaaatgcctctgagaaacagtaaaaaataaaaacaacaagttgtctaaaatgcaacagcttttata

SEQ ID NO: 52747 - DNA, 627 bp, Homo Sapiens
cgtgatctcggctcactgcaacttccacctcctgggttccagcagttctcctgcctcagcctcccaagtagctgagattacaggcgcctgccaccccacctggctgatttttgtaattttagtagagacggggtttcaccatgttggccaggctgattaactcctgacctcaggtgatccacctttctcggcctcccaaagtgctgggattacgggtgtgagccaccgtgcccggcctgcaaacacattttaattgacaacactagggctgttgtacaaaatagtaatgatagccatggaagttttaccttattctgtgagaagtgttcttaaacttattaagtgtctaaactaaggtttagtgcttttttaaaggaaagttgtcccaggattcatcctaaagaaagcaaaagttaattcaactgatccaccaatggaattagatgggtagagttgggttcttgagttttaccaccacttagttcccactgaattttgtaacttcctgtgtttgcatcctctgttcctattctgcccttgctctgtgtcatctcagtcatttgacttagaaagtgcccttcaaaaggaccctgttcactgctgcacttttcaatgaattaaaattta

SEQ ID NO: 52748 - DNA, 959 bp, Homo Sapiens
  misc_feature (807)..(807): n is a, c, g, or t
  misc_feature (819)..(820): n is a, c, g, or t
  misc_feature (822)..(822): n is a, c, g, or t
  misc_feature (825)..(825): n is a, c, g, or t
  misc_feature (830)..(835): n is a, c, g, or t
  misc_feature (843)..(843): n is a, c, g, or t
  misc_feature (860)..(860): n is a, c, g, or t
  misc_feature (866)..(866): n is a, c, g, or t
  misc_feature (885)..(885): n is a, c, g, or t
  misc_feature (889)..(890): n is a, c, g, or t
gccaaataagaaacgcaagccagaccacgatgattgtagaagtccctcccgccctggttctgcacgttacagttagcagacgagcaattccatttgttcttctccagcatctctaaggcccacttgaatgcaaaggaaaacacttgcacagcaaagcaagagaagtcacagcagcaagacacgcacagtcaaccattttccgagaaaaaaagaaaattccccacttggaaagaaagaggaggaacactggattcttactttctggatcttgacactgggctgcaaaacctaccttcctctctcccgcctcccctcaccctcaactctcaatgtcttgctgtcattttctgtctcggctccctcctcccccttcccccttcccccaccccacacccttcaccctctgtgtcctggtccttctgagggccactgcagatgactctcctttgaaatgagaaaaagaaaagaaagcaagaacagaaaacgaagccacaggaagggaagtagacattgtatgcttatggtttctcattatgaaggtgcagcttgtaggaggtttgtacggatgtgctttgaagttatgtatattacatataacaggaaaaaatattaaaataaacagtgctggtaagtatgaagctgacattctaaaattataattatctgactgtgattgatgtatcctgaggttcctagatctcactgaactggcccagctaaggagacctggactctggggtgtgggttggctcacagtaggggctgacgggttcagtgtagtaatactgtgtgtggtgtttgaaattnggtgaatggggnnanaanaaaannnnnnggggggcnctcatttgaaaaaaggngggggnttttggaaaaaaaaaaagnaaanntgagtggggcttcccccaaaaggcgagtttcaaaaaaccccttctccccgtgcccccctggggaggaaa

SEQ ID NO: 52749 - DNA, 691 bp, Homo Sapiens
ctctctgtgccacctctccacccaggaggccatgtagcatagtggaaaaagtccctgagggcggttaggagttctgggtgaccatcctggctcagctcctaactcaccatgtgacatcaggctatccccattccccctcttgggcctcagtttcccgacttgcaaaataagcagaaagaaccagatgctctccagggtctttttctactttgctatctcatgggtcttcattttctcttattttgttttctctggatcttttccatctgagggtacaggaagtaccaggacctgtttcagtttttgaatcctgcaagcacattccaagactggcctgaaactgcatgagcaacatcactcgaaataattttttttttcaaaagcaccttaacaaccaattgcgatgctgtcctgttcctttttactcacacccttctctcctttctcgtccccatgctcccccacctcagtgctccgtgctgtatgcgtgtgctctctgttcttgtatactcaatataagtgaaataaatgtgtttgatgctgaaccataaaaaaaaaaaaaaaaaaaaaaaactcgagggggggcccggtacccaattcgccctatagtgagtcgtataacaattcactgcccgtcgttttacaacgtcgtgacctgggaaaaccctggcgttacccaacttaatcgctt

SEQ ID NO: 52750 - DNA, 520 bp, Homo Sapiens
ggaacactgtatcagcagcatctgagaacataagaacagttggacattggaaagaggtttgttgccctcatccctccttgaaccacttttttttcccgcttccaccaccaccacacatatatacccctttttctcagtcttaagcatcaaacaatttctgcctctttctttttaattctcccagagggatggttaatgcatcacaatttaacttgtctattcaggtattaatagtcaagggatgcatctgtttgcttatagtaccagttatattcctaggaccttagagagcagtagtgtgagaatagaatgcctttctatttgggttaaactatgtgggaggaaaaagtaacagagtaaaggctttgccttaatgaagtcaagtgttctgcctggtgggaagtggccacacgctgcactgcgctgctcttgtttactctgttctttcagagcctttgtactttgccatcactgctagtaatttcttggtccttttcaatactccattttaatcttgatt

SEQ ID NO: 52751 - DNA, 849 bp, Homo Sapiens
cgggatccaaggccccgaacaacaggtcttcacacaacgagctagaaaagcacagacgagccaaactcaggctgtaccttgagcagctcaagcaactggtgcccctgggccccgacagcacccgccacaccacgctgagcctcctgaagcgggccaaggtgcacatcaagaaactggaggagcaggaccgccgggcactgagcatcaaggagcagctgcagcaggagcatcgtttcctgaagcggcgcctggagcagctgtcggtgcagagcgtggagcgcgtgcgcacagatagcacgggctctgctgtctccacggacgactcagagcaagaagtggacatagagggcatggagtttggccctggtgagctggacagtgttggcagcagcagtgacgcggacgaccactacagcctgcagagtggcaccggcggcgacagtggcttcgggccccactgccggcggctgggccgccccgccctctcgtaggcccgtgccctctgctccttggcctgcctgcccgccagccacgcgtgtcagccctccagttctccttcagttgacgccagcctctccacaggcccactgctgtgccattctggaagctccagctgctgctgggctgcctggcactgcccgcttgccggtcagggcctgccgagctgcctgccccttccagctgggcagagtcccctgcaaggaggcagggcccagcttccacatccggagccctggtcagcatagccgcccacggtctgttctcagattcctaatcattccagaagtattaaacgtcattgctgcaaacctcggcaggtgccgtgtgaggggcttaatgaccaccaca

SEQ ID NO: 52752 - DNA, 630 bp, Homo Sapiens
acatctaccaaccctgtgcatgactgatgttggggaaaaagaaaagtaaaaaacttcccaactcactttgtgttatgtggaggaaatgtgtattaccaatggggttgttagcttttaaatcaaaatactgattacagatgtacaatttagcttaatcagaaagcctctccagagaagtttggtttctttgctgcaagaggaatgaggctctgtaaccttatctaagaacttggaagccgtcagccaagtcgccacatttctctgcaaaatgtcatagcttatataaatgtacagtattcaattgtaatgcatgccttcggttgtaagtagccagatccctctccagtgacattggaacatgctactttttaattggccctgtacagtttgcttatttataaattcattaaaaacactacaggtgttgaatggttaaaatgtaggcctccagttcattttcagttattttctgagtgtgcagacagctatttcgcactgtattaaatgtaacttatttaatgaaatcagaagcagtagacagatgttggtgcaatacaaatattgtgatgcatttatcttaataaaatgctaaatgtcaatttatcactgcgcatgtttgactttagactg

SEQ ID NO: 52753 - DNA, 744 bp, Homo Sapiens
ccagtgaactcttcaagacaagaaggctttatacccatctagtgttgggcaaccattccaaggggcttacctggaaatcaacaagaaccccaagtataagaaactcaaagatgccattgaagaaaagatcatcattgctgaagtcgtgaacaaaattaaccgtgctaatgggaagagtacatctcggattttcctcttaacaaacaataatctccttcttgctgaccaaaagtctggacaaatcaagtcagaggttccactggtggatgtgaccaaggtatcaatgagctcacaaaatgatggcttcttcgccgtccacctcaaagagggctcagaagcagctagtaaaggagactttctcttcagcagtgatcacctgattgaaatggccaccaagctctatcgcacaactctcagccaaaccaaacagaagctcaatattgagatttccgatgagttcctggtacagttcagacaggacaaagtatgtgtgaagtttattcagggaaaccagaaaaatgggagtgtcccaacatgtaaacgaaaaaacaaccgtctccttgaagttgctgtcccttaactggcgcctcctctctactttcatggacttgttcctttgtaatagtgcaatttggttttgttttatttggggttcattgtatgtttgggaatcaccaaaggcttttagagttctttggcaaaataaaaatatttgactaatcaatttttattattggaatagtt

SEQ ID NO: 52754 - DNA, 753 bp, Homo Sapiens
aaaattgaggcagtggtcacttctggctgtaaatgcggcactctgtgattgtcaagacctttgtaattgagggtgccttggctgggtccaggatatacttcatcataagccatatctggagccagcatgaattacaggggacaggaattcccattcatcggtcacttcccacatggggctagggatttcgtgtgtacactcattccatcttctcacgtggctctgtgaagtaggttttgatattccctttttacagatgagagagtggagactctgaaaagttaaataactggcccagatttagttagtaaacagcagaggtggactttgacccgttgctctcactggccccaaagcctgtgttcatgttacacactggtcccctcccactccaggtgtctgtactttttgtgtcacctttgagaaaggtggtcttttagtttctttagccacacggtgagcagcttggactctggggatacactaaacttgccagctctcttcaatcctcacatcctgtgtttcattgctagtgtccctccaggatggatattccagtcctcgcagctcagggctctgcactccccatgaaagaagcataacagttagcaccaaaagcaagctactggggaggctgaggcaggagaattgcttgaacctgggaggcggaggttgcagtgagccaaaatcacaccattgctctctaacctgggagacaagagcgaaactccatctcaaaaaaaaaaaaaaaaa

SEQ ID NO: 52755 - DNA, 927 bp, Homo Sapiens
ggtaaatgtggtctctaggtttgtggtgtgtacctttgtgttaatgtgtagggaagagacagtgacttgatggttatggggagtgtatcttgatgtgtgtataggggtaagtattgctaaattatttacagcttttattcagggtgagtcatgtgatgaatggcctaatcagaaaagtgaaggagcgaagatgcaagcttgccaaatgatgaaatgaacaagattttgtatctattttttatcaggtgttgtaaaatttgtgcatggctttttgttgttgttgcttagtaactggtagaggagaaaagatgaggaaagaaactcagctttcctcacagtcttttcaaaggtacacagttggggagtaaaatctgactggcctaatcgatggaaaagaccctgtccttttcaccccatcctgcaatcctccgtgcagaggaactacactgttgtattctagtaattcactgtgatttataacaaaccggtgatgtcattctattgtgcacttttgtcaaaccatttatgtgactttaataaacatagtaaacttgctgactgcaccagaggtccattagtgatttatatattgcatgacattttctatttgagtttgacatgtagagtcatttttagtttcatggcaattgacagtcctaataactcagctaatttgaaactacaatctgctgtgtacacgaacctgtgttcgtgtcccgtaccgtttgccccccacaccaccccgcgccctttccgggcgcggcaaggggttgacatggctggccacccgtcccgccccctttgtacaaggggcatctgcggccctagggcctatccaccgctacccccccccccccccccccccaccccccccgccctccccgcgcccccctccccccccccccccaccccccccccccccccccc

SEQ ID NO: 52756 - DNA, 555 bp, Homo Sapiens
gcacgagacaaaatccaatagtcagcaggatgtcatattaacaacacaagatatttttgaggatgatatatttgctacggaagcaattaaaccctctcagaaaaccagagagaaggagaaaacattggaatctaatttatttgatgataacattgatatctttgctgacttaactgtaaaaccaaaagaaaagtccaaaaagaaagtggaagccaagtctatatttgatgatgatatggatgacatcttctcctctggtatccaggctaagacaaccaaaccaaaaagccgatctgcacaggccgcacctgaaccaagatttgaacacaaggtgtccaacatctttgatgatcccctgaatgcctttggaggccagtagagcacacagggtatccacaggttaccctgcagctacattgttgagttagtgatgatgttgtatatgctgatggtcttaactggattacaaaaagcaaatactagaacagctagctcatcgttcacccaatgtacttggtatttttctgcactggtttaatcatgcttaatactaca

SEQ ID NO: 52757 - DNA, 627 bp, Homo Sapiens
gaagatcagtgcaaaattaacaagcagatctacaacctgattcaccttgatcccagaactcgtgaaggtttcaccttgctgcatctggctgtcaactccaatactccagttgatgatttccacaccaatgacgtctgcagctttccaaatgcacttgtcacaaagctcctgctggactgtggtgctgaggtgaatgccgtggacaatgagggaaacagtgcccttcatattatcgttcagtacaacaggcccatcagtgattttttgaccttgcactccatcatcattagcctagttgaagccggagctcacactgacatgacgaataaacagaataagactccgctagacaaaagtacaactggggtatctgaaatactgcttaaaactcaaatgaagatgagtctcaagtgcctggctgcccgagcagttcgggctaatgacattaactaccaagaccagatccccagaactcttgaagagtttgttggatttcattaagtgactggatatgtaaagtcgtttaatgtggtgctaaaaagtaaaggacttttaatcacagacagtaaaaaaaaaaaaaaaaaaaaaaaaaaaaaaaaaaaaaagggggggggggcaaaaagttac

SEQ ID NO: 52758 - DNA, 617 bp, Homo Sapiens
ccgcactttctcatttgggttctgaattggagactcagtttttatgagacacatcttttatgccatgtatagatcctcccctgctatttttggtttatttttattgttataaatgctttctttctttgactcctcttctgcctgcctttggggataggtttttttgtttgtttatttgcttcctctgttttgttttaagcatcattttcttatgtgaggtggggaagggaaaggtatgagggaaagagagtctgagaattaaaatattttagtataagcaattggctgtgatgctcaaatccattgcatcctcttattgaatttgccaatttgtaatttttgcataataaagaaccaaaggtgtaatgttttgttgagaggtggtttagggattttggccctaaccaatacattgaatgtatgatgactatttgggaggacacatttatgtacccagaggcccccactaataagtggtactatggttacttccttgtgtacatttctcttaaaagtgatattatatctgtttgtatgagaaacccagtaaccaataaaatgaccgcatattcctgactaaacgtagtaaggaaaatgcacactttgtttttactttt

SEQ ID NO: 52759 - DNA, 863 bp, Homo Sapiens
atattttaagaaaaagcaagctgcttttagatatgtgggggcaaatttttaatcttgcagtaatattaaacaggaatatccaatttaaaatgatgtaaagatgtaataaaattccttttcattgtaaaatagtaattaagtcaatttacacagacctttgtatttaatatgtctccctatttgtatagaatttcagatgggtctagatgagaaccctatgcataagcttggatcttgatgaaaggttaccaggatcaggatcaaaaattgggaaatactaagctcttgaagatatttttctgatataattagattgaaaagagcaattttgaaaatgctgtgttctccagaagtacagggtgcattatttgacatcaattacttaaagaagttatgagttgttccccaaacagattttaaaaacagcaaaataaaagcactttaagatataattttactgagtttaacttcacagaattatctttttaatgcttggagacatattgaataaactgtagtcttaaatcatgtgatctgcaatcgtttgcttttgcttaaaacataattactgaaacccttggtattggttgtatatgaagttaactatttgagttggtacacactgcttgtgagtttcatagttattgtaatgcagagaaggaatttgagaatttgtttctcctcaacatgactaattaacactgaaaagtcagtcaaggtttaagatttattttcccagaaataaatataaagcaattgaataaccatccatttagtcgtatttccaaagtatagcaccattcactcatttataccagctccctttttatggtggtgggggagaaggtttacccccacatatt

SEQ ID NO: 52760 - DNA, 715 bp, Homo Sapiens
ttagacgtccagtagggggatgagcattggagcactccagctgtagcagaaacctggatattaagtacacttttattgaggaaatcacatgtgtgatgtgggagagaataatgagggtataaatatcttaggggctgagcatgagtaaggtgggagctgcttttctattctatggctggcacgggtatgtcctcaataacctcaaggaaaataaacttcaaaaattaagatccttggccaggcacggtggcttatgtgtgtaatcccagcacttggggaggctgagggaggtggatcacttgagtccaggagtttgagaccagtctgggcaacatggcgaaacttcatcactaccaaagaagaaaaaaattagccaggtgtggtggtgtatgcctgtagtcccagatactctggtggctgaggtgagaggatagcttgagcccaggaaattgaggctgcagtgaactatgattgcactactgtgctccagcttgggcaacagagtgagatcttgtctccaaaagtccttgaaggattttaggaagttgttaaaagtcttgaaacgatgtttgggggcatgttagggttcttgaatgtttaattcctctaataactgcttattcaagagaagcatttctgactgggtgcagggcagtggctcatgcccataatcccagtactttgggaggctgaggcaggagcattgcttgagccc

SEQ ID NO: 52761 - DNA, 642 bp, Homo Sapiens
atattatacgcttcagatcatgttgcttatattgttgctgcaatgaccatcgttttcactttgctggtaaccacttgattgctgacagctacagtcaatgaacctgctgatgactttttttaatgtagtacaacagtgacagttatgacaggcttaccttggaagagttgtcatttttactgccaattttttggatgaagatgtttttataaacctttcaaaatggtctgcaaacagagcaggaattgcacaattaactcaataatgctgtgtgttctcaagaagctcccttagtgaggccgatcttaagatggccgattctgcccgttgaaggcatcctgggaaagaaaacaagcatcccagcgggcatctcaccacgacttctcctggagtcctcacacggtcactgacaactacagtcagttttaggaactagagtgccgtatcatcagacttaccctgtcctgccccaccttccctgctaacatcgaggtgtgtgcagttaccttctgagcttggaacaagcagactggaattttcctctgctacctcttgtgtataaaatcttgtttataaaatttcaaaaggaagtagatacactagggaagaaccttaattctaaatttggttcatgtgtggcaa

SEQ ID NO: 52762 - DNA, 556 bp, Homo Sapiens
tcgtagatttgtctgtaaaagtgcaggaacagttattctatgagaacactgcatctgcattcatagccacgagtttgttattgctacaggctactgagcgtcgtaacaggaaaaccacccacagctgaccggctcggtggaggacactcctgggacaggtctctttgtcagtgaacaagggcgtcactctgggaggggtcggcggtgctggcggccgggtccctggtgcactgacctatctgggataggcagtaccctggaggggggcctggggcagaggaggcagcagaaaaccaaacatttcactgagaaagccccctccctgctctaagaaggggctccgtgaagttcttcccagagccgcgctgcctgcagtgcgctctgaccttctcttcatgtgtgtaaatctgtaatataccattctctgtggcctgtttttcctggaagaagaaaaaaaaaggtttggcaggccatctttttttgtacttaaaagtagccttaagaacaataataaagtgctcttaaaccacatagtgtacgtgtgcagtttcagcgc

SEQ ID NO: 52763 - DNA, 555 bp, Homo Sapiens
gtccttcagagtttcagctgcatcctggtgtcccacccaggtcgagcccccaggcttctggaaaacagtgtgtgctctactttgatggaaacatggcaaggaatttaaagacaggaatgtattaatattattgaaggtgtgttcgtaacctctgattctgtggacttgccactttctccaaacgctcggttcctttgaagatttcttctgaacgtgtgtgcgcacgctgggcgggttcgtgcatacatgcggggaccccagactgtcagcacagggaagatggatcccatcctaatttttatcacctgaaggttggaaccagtgagggactgggagagagtgatttataagcaccaatatcaacttcatgtggatttttgacgaggggtagtttgtaatttcatttaaattcttttcagcagctggaaatattgcactatctgaaacactgaatctccttttgtaactggtgttcactgacaccttgatggctcttgatggctctaaaaagttgtaggattttttgtttttgtagctaacttatggattgagatg

SEQ ID NO: 52764 - DNA, 908 bp, Homo Sapiens
gaacaacagcctttttggtagtcacatagcagaatgatcagagttacattgcttattccaaaacatggttctttttaaaacatttttttttacccaaagaaaagaataatagaaattactaacaataaatataaattcagagtgttgatataggattcagtatccagagtttatttttaatcttaatcctcagcttcttgggagttgctgggcttcagtgtctctgtggtttcaccagcttagcttgagctctggttattttggatcttttctgctttttttaagtaactgagtcatttttaccacacagtccagtttgcatgtatagctaggaaacatgtattgctctagattgggcagtttaagtcattttaaagaaagttagttcatagttgttgccttttaactcatagtcaagcttcagtctttcaaagagaaatgtgtgattttcatttacttgctgatatttgtagtttggagatccttgtgggcattattctaactgatacgtagacacttacttggaaatttttggacattatattaaatgagtgctatctgtgaaattggttatattaggtggcttgactaatggtctttctataatggtatatggactgcatttttaaaaaaaccgcatttgcctttatgctagattggtaaaaaattatattagaatgcattaagacatgtttttccttcatatgctagacttttcctagcatttcgtatttctgtgtagtcagggtgtgatttttaaccggaattgggtttaaaaaaaatttggtggtaatatattgtgagaaattaattgggggttaccttattgaacagtaaggatggtagttaagtttcctggaacttttaccgaattcggttataaataattctggtttaaacgataatct

SEQ ID NO: 52765 - DNA, 786 bp, Homo Sapiens
  misc_feature (688)..(688): n is a, c, g, or t
  misc_feature (739)..(739): n is a, c, g, or t
  misc_feature (744)..(744): n is a, c, g, or t
  misc_feature (747)..(747): n is a, c, g, or t
  misc_feature (755)..(755): n is a, c, g, or t
  misc_feature (758)..(758): n is a, c, g, or t
ggaggttatgtgcaaatactacacgagtgtctataagggacttgaacatcatggactttagtatcctagggggttcttggaacccatcacccataggggcaccataggacaactatagtaccgtgtttatttcctattaattcaggttccatttagagtctaaaactaaaacctaatcatttagtcacagtgtaaaaacaaatggaaataacagctcaaatcttcaaaatattactatagcattatgtttaaaataatctacaacaaaaatgtaccattttcaagcagtactacattaggagcccttttatagaaaataatttcttctttacccccgttccagtgtgaatctagtattctgttaacatttgtgtggcatttggagtttgtcatccccattgaagggagagccttctcagacatgaagcaagggaaacatactgaatagttttacacaaatttgatctggcttccatttgtccccctcatttcccaaatgtttaaatgtattggatttggattctcaatgtataagttgccttatctgttaatgtctatcttctgtctctttaattttgtatatctgctgtttttgcttttggatacatttttccaaattagaaagtcacaatggaaaaattataattcaggtattaggtaaattattacccattaaatggtacaacgngtccctccaattaaaattaaaatggaactggccatttggtttggttttttnaaccnccnacaccaantanacacaaagcgccgaacaacaaaccgccg

SEQ ID NO: 52766 - DNA, 605 bp, Homo Sapiens
aatctgagggtgatgtctggccgctggtcaagaagccaacagtcatgtggctcgcagatgcatcctgcatcccagtccccctcccagcacccccagccatcccccctgtcttcccccacatctttgccagaggtgtgacatggtcagggggcccatctgctactctttcccaccagctcccctgttccagttctggttgctgttagtttccctgaggtatttgcaaccaccatggctgggtaaccaccgatcagcacagctgtccccttggtctcctgtatcccagtcactagtcctccctggtccaccccaccctcatcctcaggagccacagccatttcttagagggtttcaaaaggacagcctttggcgccttttccttctaacctttgagtccagccctttccagttttcattcactcgaagtaactgcactcaagctgtgctcaaaatcggcaacgcatttatttacaccaagcccttcccataaaacacaactgctgaagaaaatagcagacgtttcccctctctctaactctgggtatcccacagatgcaaaagggagaataaacctgaatattattaccagcaaaaaaaaaaaaaaa

SEQ ID NO: 52767 - DNA, 639 bp, Homo Sapiens
gcacgaggggaagaagcagcttatttgactaaccagcccctctgtggtcaccagcgtcttggcttggtgggagggctctcaatcagcagggccccaggagggaagaagaagtggggcaaagcctggcctcgccgctcgggagctttgccatctgagccacgcctcctccaggccatgctccttgaacttggaaatgtcaaccggagcccttacaccagccctccagcatctaatagacttgaatctactctaaacgaatatttaatccaacctcactacattgtagctcagtccaacgactaaccctgaaatgggggtgttccagccttcagcgagatggccaagcggtcccctgggggctgtggcagcggacttatccttctctgttgccaaccttgccgtccgacctcctccgcccccatgcggtgaccccgtccgtgtctgtgtctgtccatacgtgtgagtccagctaaaaagacaaaacagaacccgtgggcccagctcggaaggtgcgtggagaaggctccgacgtctccgaagtgcagcccttgggatggcattccgttgtgtgccttattcctggagaatctgtatacggctcgcctatagaaatatagcctcttcatgctgtattaaaag

SEQ ID NO: 52768 - DNA, 558 bp, Homo Sapiens
cagatgacatgtggaataaagtaatagagtaacaagtggcagggccagaaccagggtccccaaagtcctggtgttggcacatttgtacttcttgtaagaccatctttaatttttctgggaacacacctgccttttgtgtaatgcggggaagactaatgcatggtgacacctagttttcctcaacaggacacttgatcccaaaacccctttaagaccttaggtttcctcagcggaaaactgtactttaatcccaaaccccctttaagacatattggggctgggcgcagtggctcacgcctgtaatcccagcactttgggaggctgagatgggtggatcacctgagatcaggagttcaagaccagcctgactaacatgctgaaaccccatgtctactaaagatagaaaaattagctggacatggtggcaggcacctgtaatcccagctactcggaaggctgaggaaggagaatcacttgaacctagtaggcagaggttgcagtgagccgagatcacgccattgcattctagcctgggcaacgagagcgaaactctgtctc

SEQ ID NO: 52769 - DNA, 695 bp, Homo Sapiens
  misc_feature (650)..(650): n is a, c, g, or t
ctgaaaactgttacctcaggactctatttaaatgctgctttttctgcagcacgcttggggaaatcctgtcaggatgaaaaggaagttgagattttttaaatccctcttcgcttgctttattttcagtaccaacttgttatctttttccttatctgaggctacctggggattgtgggcagcaggcccctggactcccagaaatgctgagggtccctcttccaggggagttccctggggagcaagagtagaggggctattcccgagggtcctgtggtcagggtcctgctttgtccctggcaggctgtcagtccagctggagggggtcagtaggctccagggagtgggccctcccctccgatcttggagtctctgggtgttccttcagcctcagcctcactggtaccttctgccctttaggggaggctatgagtctgggacaggaggacaaattcagagcccagagggggaaatggagaaacctgggctgctgaggaaagccacgggtgttggcgtgaactgatgatgtctcatcccacgcccactatggccacattacctaacctctccatatctgggctattcaaggtcttggaggccagcacagacccagctagttgttgaagccagttcttttttgtcttgggcatganggaattaaacgttttctctggcagaaaaaaaaaaaaaaaaaaggc

SEQ ID NO: 52770 - DNA, 775 bp, Homo Sapiens
cgcgtccggtctgtgcccaatcaacccagcacaaatgaaattcttcaagctgttctgaaggaatgtagcaaagagaatgtcaaatacaagattgtagcaatcagctgtgcagctgatatcttgaaggccaccaaagaggacagattccaggagttctctaacattgtcatacctctcatcaagaagaactcacttgaaagcagtggggtccggacaaccaaaaatgaagaggagaatgaaaaggaaaaggagctccagctggaatatctgctgggtgcctttgaaagcctgggcaaagcctggccgcgaaacgcggagacccaacgttgttatcgtcaggagctgtgcaaactgatgtgtgaacggctaaaactcagcacgtggaaagtgcagctaggagtcctgcaatcaatgaatgccttttttcaggggttaatgcttttggaagaagaacatgccgatcctgaggctttggctgaaattctgcttgaaacttgtaaatcaatcacatattctttagaaaataagacctactcatctgtgagaacagaagctttatctgtgatagaattgctgcttaaaaaacttgaagaatctaaacagtgggaatgtttgacatctgaatgcagagtgctcctaattgagtctttagctactatggagccagacagcagacctgaactgcaggagaaagcagcgttactgaagaaaacacttgaaaatctggaataaattagaaggggaagaaacaaacaagtgccatgttcattggggg

SEQ ID NO: 52771 - DNA, 795 bp, Homo Sapiens
ctcagttcatttttactcccacgtattatagttgagcaaaaatggtttatatcttggaaaaaaaactttctgtttaaaaaaaataaacaagtgaatgtggaaattagtctgttaatgttcttaataaaggttctggagtttaacctagcagcggatggctttctttagcttagcccagtttccagggaagcatgttttttccaggctgtaaaatggcagaatctcctggatatataatttattctgttgaaaaaaaaaaaagcttgcagtatctatgacctatctgcagaaggagttttggtaaatgtagatttggatgtattaggtcaccctgaaaacaatacaagaaaagggatccccaggtaatcggggggagcgaatactggcaataaatttttttacttctcttggttactggtctggtttccattggaatttcttatggtaaaaatctggtttaaatccatttatattattttacagtcttttatgtaaaatttattatatcacgggttttcaaagcaaaacataaaatattgtttatacagttgtataggctgacttctgaataatggtatctattattttcattcccataagagggtgtacacaattaactccaggttttatgatcctggcaatatatagtattacctatatatgatttaggcatgtggcaaacacattttcaagagtccttctgatctaaaaagaactattgtttacaaaaaacaaaaaaaaaaaaaaaaaaaaaaaaaaaagggggggggcaaaaaaaccgggggcccaatgacc

SEQ ID NO: 52772 - DNA, 778 bp, Homo Sapiens
cccacgcgtccgcccacgcgtccggtaatgtacaatgaactccatgagtctctccaggctgcctgcagcacgtcttttccaagtagcctattggattcccatctcaaatgtcctggatgcgagcgtcagcggctccagagctcggggcgggtgaggtcccctttggggaaccctttcctggccatcgaggtcggggggctgccgtctgtgggcaggaggacccgaggggcagccaggaaaggcgatctcttcactgtgaaaagttgcccgggtgcagcgccttttccttctaccatgggaaatgcaggctgggcccttggggtgagcctgcggggctctggtgctgtccccgaccccaccacaccagaatgcagttccagcttaggaagccacaaacaagccacccaggaggaacaaaacaccgccagcgtggattttccaaatttccctggaaagtaagtctcgctctgccaaagaaaagtctggcttggagagtctctggagcccaggatgccagcatgtgccaatgactgtcaccttcatctcttcaaaagaaaagccatagccgaggactgtcccgcgacccccgtggactgcgtctaggtcatgtgattctgttttcatttctcatcccatccaattgtgtccttttctcctgtcatttttcttcctctgtggtcccttcaaaagttgttataaatttgtactgaacttcaaaatgtgtccgttctccccagacactctagccacagtatattgggataaaattacttcttaa

SEQ ID NO: 52773 - DNA, 578 bp, Homo Sapiens
gaggaaatcctgtgggcctttctgtcccacccctgtcagcactgtgctactgatgatacatcaccctggggaattcaaccctgcagatgtcaactgaaggccacaaaaatgaactccatctacaagtgattacctagttgtgagctgttggcatgtggttagaagccatcagaggtgcaagggcttagaaaagaccctggccagacctgactccactcttaaacctgggtcttctccttggcggtgctgtcagcgcacagacccatgcgcatccccacccacaaccctttaccctgatgatctgtattatattttaatgtatatgtgaatatattgaaaataatttgttttttcctggattttgtttggttttcgttttgcttttagcctctacatgctaggatcacaggaagactttgtaaggacagtttaagttctcctgcaaggtttaatttgttatcatgtaaatattccaaagcaggctgccttgtggttttggccagccttgtgctatgttgataagattgatttactgcttaaaatcactttactttatccaatttttactgaacttttta

SEQ ID NO: 52774 - DNA, 810 bp, Homo Sapiens
acctccaggacccccagcaccctttcctccttccggaccatcatgtcccccacctggtggtccttatccagccccaactgtgccgggccctggccccacagggccatatcctacaccaaatatgccctttccagagctacccagaccatatggtgcacccacagatccagctgcagctggtcctttaggtccatggggatccatgtcttctggaccttgggcgccaggaatgggagggcagtatcctacccctaatatgccatatccatctccaggcccatatcccgctcctcctcctccccaagcccctggggcagcaccacctgttccatggggcaccgttccaccaggagcctggggaccaccagcaccatatcctgcccctacaggatcgtatcccacaccaggactctatcctactcccagtaatcctttccaagtgccttcaggaccttctggtgctccaccaatgcctggtggcccccattcttaccattaagttaacaatggacgaagagatgacgctttgctttttgaagtacatgtatatgcacatgaatgcatatataaaaattgctggtttcactattagagggcattcatgaaagaacaactcttgcacctctcagagaagataactgcctcttgtacttggatgcgtagtacatcatatgtatacaatcagataaaagcatagaagtaaatcattcggatgtgatttttatttggttttcatggaaagttaaagtgataaagtatattgaatagttctttgacagaatttgtttaaactatgaaactacacactta

SEQ ID NO: 52775 - DNA, 402 bp, Homo Sapiens
tttttttttttttcttgagatgaagttttgctctgcattccagcctgggtggcagagtgagactgtctcaaaaaaaaaaaaaaaaattaatgatggtcaaagggtataaaatctcagacaggaagaatatgttttatgctttttttgagttctgttgtacagtgtggtgcctatacttaataatggggtattatacatttcaaaattgatgttctcatcacagaaatgtatttgaagtattgcatatgttaactagcttgatttaactattccatattgtatccacaatttatgatatcactttgtaacccatacatttatacaattataaattgtcaatttacaataaaaaaaaaaaaaaaaaaaacctgagcaggcggccgctccaacatccctcgtgcc

SEQ ID NO: 52776 - DNA, 803 bp, Homo Sapiens
ggatccttggtctaattcgcactttcctcacgagaattaaattaagcaaaaaacaaacaaacatagtgggccctcgtctagatcatgatgtgccagtttctgagacatctttttaaggctcttactgcagctcccctccccaccctcctcttctttgcaaaacagacccaagcagggcaggctcagaccactcgcttctttcagatctttcttgcaattatgataacatgagatttgctgttgtgcttttagagaaaagtctggactcagccacaaactctaataagacctgtacatctgagaacctttcccgttactgcgttttcaccacctgtyttccccatgctttatttatctgtatgaacacagatttgacattacagctaaggaaataatttgagttgattcagaaatcctggcatgtgacaattttgttaaattaccaagtttggtttttaataatttctcaatattatgcgccaagatctaattttaaaactgtatgaggactttgtgctgaaaatagagtatttttttaaagtaaggctgtcttggtttaaaagcagattacagaaatgtaagtcaacttaagaacggtgaatgaatgtaaaaacattcagttgagaccatatgcattttctgtgctgtttgtacttgaggtatgtaacatttgtatacctgaacttattttaaagatgaactgaaatgcacatagccaagtcttgagatacaagattgaatgtgtatttcttaaaaatacaactttgtgttgtactttgaaataaatgatgcttttttcaaaa

SEQ ID NO: 52777 - DNA, 758 bp, Homo Sapiens
aaagggctgtaagctaattgtggtgtctagtaagtagcataatgagatgtgaggagttggaactttgcgtgttttgcgtattttcatctgcattcagcttcttactctgggtttgtactcgagtgttatttctttacaaatgcccttgtaattaccactctgaagtctgctgactgtgtctcttgaacatacttaggatattctgcacattatggaaaaaggtaaattttagaagtttctgctctactaactgtagatatttatgactctgcgagttatctatttttataaccacctgtggtccattgttcattttaattcacatttcttatgaagtatggtaacagggagggagacacctagattagcagctcaatttgtactacttcagccaatctgtgaatgtaaaaactacactgttgccttgctaggatccaccctcctataatatggaacaaatatctgaatgaaatccaccctaggagacggagtcaaactaaacttgtggtttttcatttaacttttgactacagcatggccccatggcatccacaccaagagggtgttgtgatgaggtgccggtgttgcaaagggaactttagtttttccactggttcttatcctgctaagccttttacatacatgtgtactatatttgtttatagactgtaggtggctattataatttaaaaaggttgatttataaaaatttaaaccctaaaaaaaaaaaaaaaatcggggctatattccgcgggaaa

SEQ ID NO: 52778 - DNA, 758 bp, Homo Sapiens
taagacctatttataatatttagcgaactcggtctccctcagatcccccgcgagggaggctgctggacccaccccgctgtcccccatgatagaagtctgtaaataccttggtgaccaatgcccacttcccctcctgggtcacctctgatggctgctgtccactgagaacgtgggcagtgtccaaattcctgtactgtaaagactaaaaggcgtttgctctgagactgacaaggcggaaacttccatgtgtctcctgccaggctctgtccccctacgccatcccgacacgtccccgttcccccgaaacctggctcagtgcaatactcccattgccatggggtccttcaccatggtactgtctccacagccctcagtccccaccccaggagaggcgcctgccacctcctcctcatctccggtggttcaatcgctccgcctgtccccaacccagtcccatttttatggccaaactgattctgaaacaaaatgaaactgcaaacctcgtgtgtcttaactccccccagggatgccactccattcctccgccccgtggtctggtgcgtgacaatccaaagcgccgagacgagggtgctgtgtccctcaaacccagagtggtgggcgcctctgaaaccatacagccactcctggccccaaacactcgtttgcatcccaggttcctcgcccacctacccccgccacaccccgtctttttagagatctctctaataaatcgggtaataagcaaaaaaaaaaaaaaa

SEQ ID NO: 52779 - DNA, 625 bp, Homo Sapiens
gcgcgagtacaggctgcaggctcgcatcgcacaccgaattcaggaacttgaaaaccttcccgggtccctggccggggatttgcgaaccaaagcgaccattgagctcaaggccctcaggctgctgaacttccagaggcagctgcgccaggaggtggtggtgtgcatgcggagggacacagcgctggagacagccctcaatgctaaggcctacaagcgcagcaagcgccagtccctgcgcgaggcccgcatcactgagaagctggagaagcagcagaagatcgagcaggagcgcaagcgccggcagaagcaccaggaatacctcaatagcattctccagcatgccaaggatttcaaggaatatcacagatccgtcacaggcaaaatccagaagctgaccaaggcagtggccacgtaccacgccaacacggagcgggagcagaagaaagagaacgagcggatcgagaaggagcgcatgcggaggctcatggctgaagatgaggaggggtaccgcaagctcatcgaccagaagaaggacaagcgcctggcctacctcttgcagcagacagacgagtacgtggctaacctcacggagctggtgcggcagcacaaggctgcccaggtcgcc

SEQ ID NO: 52780 - DNA, 486 bp, Homo Sapiens
ccacgcgtccggcacccttaggcccaggagcagctcccctgagagaatttgagtcactcatttccttgaacagcacccccctttatactagcagccatttgtgccattgcctgtgccctagggtttgtggggagagagcgagggatcactgagcagttttcccagagctccatgggaaggcaagctctccctcccaatgggagccccactgtcactaactgtaaactcaggctcaggcttcaactgcctacccccatcctcatatttctgtctgtcccagcacctcaggagcattctcattgtggccggctaactccgcctggatgtgaacaggcaagcacagtgggaaatgagtcacgtacttgtattgcacagtggacacctctagaggtccattggtttaaagggatagggaaggaggagggatgagaccatcaccccctcccagaagtaaatctagtatctgagttttctttatgcccttga

SEQ ID NO: 52781 - DNA, 721 bp, Homo Sapiens
  misc_feature (289)..(289): n is a, c, g, or t
  misc_feature (652)..(652): n is a, c, g, or t
  misc_feature (707)..(707): n is a, c, g, or t
cacacccacatccacatgctctgggtggaaaccagcctagagtggggacgacgctaatggtgttgctttagaaccgtgcttttcttacccttttagactcgtgtctttgtatgagacaccattgcaagaaaattttatccctccagaagtattttattactaaagaacaaaagcaaaaaaagcttaaattgcactggttaaagtacagtttccaacagctgtccttcctcagtactctaatggccactccaccgcgagtggaagtcactgttgtgtgtacacaggtggncccaatcaaaactccatcttttgagcccaattatgtccattttgttatagactaaatcaggggtttgttctacaagaacaatacatgttttaccctttcctttaactagaaggataactagtaatgcatcaacataatttctgtattaaccatcatgcgcacaagaaatacatagtaaataaggaagctgaaaactcctggcattggatcttaagctagatgattagaatgtgaaaaagattttacaaatgtaaaacttctatttctctgtagaaactttcttcactttgctgtgcaagaagacactgctttgctatatttaaaatggcttttttaaaagagatttatgtatttggtaaatgnttgtagtcaacagttcacacaagaagctgtacacggtttgatcatgtaaaaccgnttggcggcacaagc

SEQ ID NO: 52782 - DNA, 753 bp, Homo Sapiens
catggcaggagggctgcactgacattgatgcctgggggaccttttgcctcgaggctgagctggaaaatcttgaaaatattttttttttcctgtggcacattcaggttgaatacaagaactatttttgtgactagtttttgatgacctaagggaactgaccatggtaattttggtaccagtgaaccaggagatttagtgcttttatattcatttccttgcatttaagaaaatatgaaagcttaaggaattatgtgagcttaaaactagtcaagcagtttagaaccaaaggcctatattaataaccgcaactatgctgaaaagtacaaagtagtacagtatatggttatgtacatatcatggttaatacagtcctggcattctgtacatatatgtattacatttctacatttttaatactcacatgggcttatgcattaagtttaattgtgataaatttgtgctgttccaggtatatgcaatacactttaatgttttattcttgtacataaaaatgtgcaatatggagatgtatacagtctttactatattaggtttataaacagttttaagaatttcatcctttggccaaaatggtggagtatgtaatggtaaatcataaatcctgtggtgaatggtggtgtactttaaagtgtcaccatgttatatctcttttaagacattaatttagtaactttatattggggaaactaaggttttaatttattaattggatcatggccgtgtaatacactt

SEQ ID NO: 52783 - DNA, 761 bp, Homo Sapiens
taataggatcgatacgtaacgcgtctgttcagttttgaggagaagccccaaacaagctacagtatgcaaagccagaagatttagagcaaaataatgtgcatcccatcagagatgaagtacttccttcttcaacatgcaattttctttctgaaactaataatgtaaaggaagatttgttacagaaaaagaatcgtggaggtaggaagcccaaaaggaagatgaagacacaaaaattagatgcagatctcctagtccctgcaagtgtcaaagtgttaaggagaagtaaccgaaaaaagatagatgatcctatagatgaggaagaagagtttgaagaactcaaaggctctgaaccccacatgagaactagaaatcaaggtcgaaggacagctttctataatgaggatgactctgaagaggagcaaaggcagctgttgttcgaagacacctctttaacttttggaacttctagtagaggacgagtccgaaagttgactgaaaaagcaaaagcttaatttaattggttggtaacttgtaccaaaatattttacttcaaaatctataaagcaggtacagttaagggaattaagttagaaacttaaagggctttctggctttccctttggcttgctgttggtgggagtaacgggacatctgtactgaatttggattttgcccaaaacacaaaaacacaaaaaaacggggccccttgacacacacacaccgctgaccacccggataccctcacaaatttccggcttcac

SEQ ID NO: 52784 - DNA, 464 bp, Homo Sapiens
aaactactcactgtgactctgcttgaccaggctcacgggaagggagaagcgagtcgggggctttgacctcatgtggaatgatggccctgttagcagagaggagggggctcctgacctgtcgggaatgggaaactttgtgaccaacacacacctcggctgcgtcaacgatcggaagaaacaactgaggcagctcttctgctcccttcaagttcagaagaaagcttccagttgatccccagctgccaggaggaaatcagccttagcaggccttgtgtttgagattgggagctgagccagaaaccggaaaaccctgggctcatgggcaggacagcttcgggagttgagtgtcaagcccgaagggaagacttttggaaggaaaatactggcaaatccaagaagtgaaccagccgactttaggaaagccagaagccaggctactctagaccttctgccttcagagcatg

SEQ ID NO: 52785 - DNA, 1122 bp, Homo Sapiens
  misc_feature (983)..(983): n is a, c, g, or t
  misc_feature (1033)..(1033): n is a, c, g, or t
taaagaaaagggctaaaagtgatgcctacaaatacattactttctggggaaagaaaagaattccaagaatgtttgcaataatggcctccaatactgaaacaaccaaaagcaggtgaaatgaggctgaaatcaaggctgtttcattttagctgaagacctgcaaagctgcttggatttctagcagttgaaaacctaacctgcaattgatgcttaatcatccatccacatgaacatgcagtcagctatacgcatcaagactcgtttgcaaaaaccattgatttttcagtatgtgggataagggtttgggtttttttgttttttggtctgtataaggaattatgtgtgtgtgagttgggatgtatggatatgtgatagtcatattttcaaggtatggatgtttggtgataacgtctcagagcatgcctaaaagagcactgcaagattatttttgaagaaatgttattttattagatctaactcttcatagtatgtaaatgttagaacattttaataatattttaaaactgggctttcccagtatttcaaaaagaaataatatatctgttaacgttattggaatgctgctcagttctctgatcagtgcttatgttatgattgttgataactaaccaaagtagatgcctgcagagactttaaaatgtaaaataaagatgtatgctgcctgtcagctattctcattagaaaagttttaacttattttactccatatagaaactgtagagactaaaaccagttattttcttgtacatttgtgccatgcactgttgttatacaagaataggtgtacaaagctaaagaaaaattgtggtcattgatgatggaatatatgacttgcaggcttttgaagtctgcagaattcaagaaaagagctgcaaatggccattttgaatctttattcagggactcacatgcctttaccctaaagaaacctgggggctaggggggaatggaaagaagccctnaagactggacctaccaaacatggcaatatacttattcactgggctaaatnctgtaggaataacatgaaactgggagaccctattctttttcaaaaaatccacttttgttggaaaagggagggaacaaccaaacaaggga

SEQ ID NO: 52786 - DNA, 611 bp, Homo Sapiens
gggaccctggctgagcattttgggggtactcccaggacccagggaccacgggggccccacccaacgggacctcaacggccctggccttagccgtgtacgagagagcctcaccctaccctcccattctctggaacacctgggcccaccccatggaggaggaggtgggggaggcagcaacagcagcagtggcccccccttgggtccctcacacagagacaccatcagccggagtggtataatcttacggagtccccggccagactttcggcctagggaaccttttctcagcagagacccatttcacagtttaaagagacccaggccaccttttgctaggggccctccgttctttgcaccaaaacgcccattcttccctcccaggtactgatggaaaccaagggaaaggcattttgaacagtctagagaacattggaagtaggagtttggtttattgttgttgtttttatttgttttctctttctcgattttttttttattataacaaagggcctctcttccaaagtaagaaatcacatacgcttacgttttactattcaattcaatcctccctcccattgcacttatctaccttccccaagttgtttgtatta

SEQ ID NO: 52787 - DNA, 545 bp, Homo Sapiens
  misc_feature (451)..(451): n is a, c, g, or t
ttttttttttttttttatagtcttttcaatctataatttgtgtttttaatttcttgatatgtcacttctgttcctccctgcttgcattttttaaaaactagacattgtggcttgagaatttatcaatcatctttccgaaatgaccacattgtgcttttagtttgtatgtttaagtggtcaagcaaggctctaggaggtagtcactgagctggaccttaaacacatctgcaggagctcacaaaatgggagcaaaagaggcattccagaaagaagagtagttaagcagatgtgggggcagggcaagaggagacagcaccttgttgccagagattctacacaaaggtgtgatggacactgatgctctattaagaagcttttgtggtgtgtgtggtagagaataattaaggcttctgataagacaggaaagggatatttcatcatgactgttaanaaaaggtaactgggttgtttaatgttttaattgataattgtcactgatcgtatttctacttgttaaataattaaaaatcatcttaaaattcaga

SEQ ID NO: 52788 - DNA, 636 bp, Homo Sapiens
tgtgctgcctttcaggtacgggttgggggtaataaaagccagtgcattaagtttatatagactactttctatgcaagactgagatatggaatagataggaagagatatgtactgctgggtacatggacagtaagtgtgttttcagatggagtaccagcaccgaaaatgggttgagggagggggggttgtatgtatgtttctgcccactaattttgagcagccatattatgaattaaatcgtcacagccaagtaataacccaagaatggtatgagtttcatgtgtaatagctcaaatggaataagcatgaatgctggagtgggccattatcctcaaatattctatgtcacttctcatttaaagactcttgttatgaactattagaaactttaggcaaaatcaaaagtatttgcggcaaaataaaggcctattctactcttatttaaagtgaaacactgtatacttgtttctctccaaagcgaaattaagtatttataatttcaattgcctcgataagtttccaagtcactgaaatctgctgaaggttttactgtattgttgcacaactttaagataatttttgtctcaatgtcaacttttttcactgaataaaaatttaactggggaaaaaaaaaaa

SEQ ID NO: 52789 - DNA, 664 bp, Homo Sapiens
  misc_feature (643)..(643): n is a, c, g, or t
gcacgaggcgccctctcggagggctggtgttcaccaagtttccctcctcgctgcaacccaatgacacctgtattgttccagcgctccaggactctgggttcttaagatttctgggagcgttgttcacccaccccctttaggaaccaggctggtgttcttgcttgaaagcgttgtgccctctgagtgtctggctgatcacatcagagaggtctgcgtggcagtttggggctgtcacgtgaccagtgacccacactctctgctgcccagtactgccaagtggggagggtcctgcctttttctctgccccaggtctgggacgcaggtgatgccagccaggcccaggagtgcccagcatcccccaactgatgacacagtagcactgattctgtcttttcctcagaatctggcctttttccatggcaatgaggtggggcccagcctcctctaaagtgactttgtttctgcacagttgtaactgctcttggggatgtcagtgaggctgggagcagggagccacgggatgctgagagaggaggcccgagaggacacccaccctccagcgtggcctttgatccagacttagggacgaggctgtcactggtgggcaccctctgttcctgtttgtgtgtttgaatagtctganatgctgtgactttttttgtgt

SEQ ID NO: 52790 - DNA, 568 bp, Homo Sapiens
actgggccttggtggcactgtctcactgctctttgacactgcttttggtaccctgggtggcctatttcaggtggtttttagtgtctgcaagcggattggctacaaggttacttttgacaattctggggagttataaactcaaaaaactaatagtatccagtcacagtgaatttgaaagctggaatagtttgtctttacaatgggtttctgttcactgtcagttatcattatattttggcctttggtggggatgtctgcttgtttttgcaaaagaagatggcagaatttagacttgacagaggagaaatgctcagggtgagattaggtgtagtaatctgctgtttacctccagttatatgtgcaaactcccaagccactaataacttcagttatgcactctaacacagacgaccacctgaaatgcactggtatttatttctgataattaaaaattacaggggagggaagaactagaaaaagaacaactttagaccaaaggtgtctgagaaaaggagaaagggagcttgttcttcccattgctctttgtgatttaaggcaaaacagatta

SEQ ID NO: 52791 - DNA, 483 bp, Homo Sapiens
agcatcggaggtgcctcagccatggcatggatccctctcttcctcggcgtccttgcttactgcacaggttccgtggcctcctatgagctgactcagccaccctcagtgtccgtgtccccaggacagacagccagcatcacctgctctggagataaattgggggataaatatgcttgctggtatcagcagaagccaggccagtcccctgtgctggtcatctatcaagatagcaagcggccctcagggatccctgagcgattctctggctccaactctgggaacacagccactctgaccatcagcgggacccaggctatggatgaggctgactattactgtcaggcgtgggacagcagccatgtggtattcggcggagggaccaagctgaccgtcctaggtcagcccaaggctgccccctcggtcactctgttcccgccctcctctgaggagcttcaagccaacaaggccacactggtgtgtctc

SEQ ID NO: 52792 - DNA, 704 bp, Homo Sapiens
cgtataattaatatgtggaactagtttgcttttataattcattgtatcaagaaggagtcatgttttaaatccaaggcattgagactatctagaagcaaaaaagttggttttaaaaattctttttattagaagtgtgtttaaaaacatgtctttttttcccttgagcgacagtggcctcactacattgcccaggctagtcttgaactcctgggttcaagcagtcttcctgccttggcctcctaagtagcagggattacaggcatgcacccacatgccaatttttattgcttaaaatggcgagttctatggatattatctagccccaagcccatatctgtacacttttgttcattttataataccagaaagaatgttctatcagtaaaagaaggttttaagtatgaatctccatttttgtggagtttttctaccctgtaaaaattaactttgtggttcccagtaattacagtaaggagtttttctatattttcacagttggatttatctaaggatatttctcagcatattaaggaatccttttctacatttgagcaaatactgaggttcatgttgtaccaaataataataaattgcttttgtgtttaatatgtaacacgtaagaacaattgaaattttcttctaagatttaatactagtcttttagtataaaggaatgtaactggagaaaaaattaatgctacagc

SEQ ID NO: 52793 - DNA, 582 bp, Homo Sapiens
tctaagactaaataggtagttgtgttctttatttttaaaatttctttttagagcaaatgttatgggttcttacccaaagagtcaaaaactatttcttaagaaagagcagagttattcatgactgttctttatacactaaaagcatgcatctaatctaatagtcctcttattatgcttttagttgtatgagtctctttctatgaactgaacacaaaactcaggaattggtggcttaattttagatcagtgcttgtactaggcttagttatatgaatctttataacacataattactaactttgtagccatatatgtaattgactttgaatgttatttacctgaaattaatcttccttcacacatggaccgtaaacggttcccagttgtctgagagcctcatgagggtttctaggatttatgaccttatgaccagtttttttcatttaccaagattttattttcctacatgaaaatttaattgagtaataattattcacatgtgcattttctttttagctgttaaatgtactatgccatcatccaccatttagtaaaatgtagctggcccaggacatgtaaaaa

SEQ ID NO: 52794 - DNA, 676 bp, Homo Sapiens
atactctctgaaagtcatgcacatacctatgggattttacacaccaccagcttaaaatgctatgtctctatccatcagaaatagtcattattctatttttaaggcagcaacaagaaaagaaaaaacacttttcctgagggatttctaaccatgtatctaatcctcccatttgggcagtataggtgtttgcttttttgttttctttttttaagaaaaaccttgaaacctttgacactgacagatgtgtttgcaaggatacggcttcagtattactaatttccatgtgtatctggaagtatttttaaatggcataccaaaatccagaagtttaaagatgcctataaaagtaaacaacatttatttaaaaagaactctgaatatgccttcttttttaattagaaatatcttcgagacttgggtgtttgttaataactaataactggagtaagctacaggatctaaagcagccctttttacagtctagttaggagagagaaaataattgcaaatatccacttagaggcaaagaacaattttttattatcaaaaaggtttctgcacattgttgtggcaatattgtatctgtttagaaaatgggcttttccaaaagcaaacaaagataggttcctcaggtgaccaaaactgaaaatcatatttccatgtttcattaatcaag

SEQ ID NO: 52795 - DNA, 609 bp, Homo Sapiens
  misc_feature (578)..(591): n is a, c, g, or t
  misc_feature (593)..(603): n is a, c, g, or t
ggatgattaatgtttttgctatatacttttatacattattttcttatcaaactagttaacaagtatttttatatgtttgtaagcagatatgctttcatagcataccttgtgtatatgtaaagataagtatttaattctcactgttcacttttaactgacaaagaaaaacaagtggaaactacagaaactgtggtagaacttttacttgctggtctggtcttggttgtacccatctttggccagtcacataactactcaagaaaccttcccaatagagtacaacaggatgagactctgaaatcactttcagtattccctgctagatattgattgttatttcaagtattaagtgtaagcttttaatggataattagtataactgtggatggcatctgattttgtttttaattctgtggattgtgtttaagcaattcaatagtatgttcctgattttgagatgctaagtggtattgcacagttgtcactttatcaagtgtgtacaacagtcccatgaagtttatagagcatacccttgtatagcttcaggtgctagaattaaaattgatctgttatcgaannnnnnnnnnnnnnannnnnnnnnnnccctgt

SEQ ID NO: 52796 - DNA, 1103 bp, Homo Sapiens
  misc_feature (914)..(914): n is a, c, g, or t
taaaaatatatatctgaattgtaagagttgttagcacaagttttttttttttttttttaagcacttgttttgggtacaaggcatttctgacattttataaacctacatttaaggggaatttttaaaggaaatgttttttcttttttttttgtttttcgagggggcaaggagggacagaaaagtaacctcttcttaagtggaatattctaataagctaccttttgtaagtgccatgtttattatctaatcattccaagttttgcattgatgtctgactgccactcctttctttcaaggacagtgttttttgtagtaaaatcactggtttatacaaagctttatttagggggtaaagttaagctgctaaaaccccatgttggctgctgctgttgagatactgtgctttgggagtaaaaaaagaaagttatttctttgtcttaaagaatttttaaaaaattagtcatgagacttattcatctttccagggaacatactgattggtcttaaaagactagacagttaagtaaaaggtggctggaacatctatttttctacaaaactggaaaaatgaacctggttctagaagaatgtacaccaaaataaaacatgtgaagcagtattgattctttattgggagtacatttttttaggtctcttaaactttaatttcacacagtaaattttgaatctcataaggaagcatatttgaacctagtcaatttaatcttagtgttcccttgaaaactttttttccctacaaaattttaagtgaaaaatacaatagtaaattaagattacactgggggaaaaaaatgcaggtatcacttttactccattgttatctgacctagagctttatttaagttttagaaatatgtaatacctttcatcattccatcatccctaaattctgntacccaaataatggctaatgttacaaaaagttatactcccagagacccaaagcttgacatttacctattgtattgagaaattattcccaataccaataaaggaatggtcctattttttaacccctcttttaactagcctaatacctcccgcaaggccctcaacgtcctggggctaaatttaaacctgtc

SEQ ID NO: 52797 - DNA, 565 bp, Homo Sapiens
ttgtcacagggctatgttgcttaaaggtagtctggctgctgaatccctttctcagctcagagcagttttaagatttaattgggaatacagagaaacaggattgtttgagaaccaaaatcaagaggaacagaaatcttaacttgatttcatgtgttagaacattgtaccatgcctcttctgtatctgtggaagtttcctgtttgacacagggtatctaggaggggcggggaagacatggatagtataggaagacattaatcctagcattgtcatttatatacattaatgaaatcctgatgaggacctgctttttgtttgttttcctttgaaacccagccctattgtatttgtatttaaaatttgtacacatttgtataataatctgtaccttgtggtatttggtactattagaggaaaaactttggattcagaccttcttgcagtttttatatcattgttttattttgttttttaaataaattctagtggtttgatccaaatcccattacagttgtataaagaaataaaattttgtacttatattattaaaaatcacatttttaat

SEQ ID NO: 52798 - DNA, 438 bp, Homo Sapiens
gaacgaggaggaagatcagctgtaaataaacgctgggctccccagagcacctgtccgcccactgcccttgctgttctgggatcttcgctgcagttcacgggaaacaagcctgagtccgctcgcacccacggctgctctcccggctcggcccggccgcctctgtctccggccaccgggtggcgctgccgagccagagccgccgcgtcccggcgctttccaggagccccaggcccggaggaggcgaagcccgcagagcaaaggtggaaacacgtgcctacgctgtaaagaaatcctgttccagagcatacctgttgtacaaacagacactgttcctaacgagaggagtgacgtattttcatcaccgtttttaatttgttttcttacgggtttacgattttgaatttttcttatttggttgaaagaattttgattctatca

SEQ ID NO: 52799 - DNA, 665 bp, Homo Sapiens
ttttttttttttttttttaattggcgaaaggaaggaaaaaaaatctgtagatcttgtcactaaaatctaatttatatcaaatttatgagagaaagtattttcctaattatggtcaaataaatttggttaacatcctagtgattctctttctatataataaggcaattacagttttcaaagcattaagtctaacataactttaaacattctcttaggtttcaagacacttctatttaatattcattggggaaaagttgtccagctatcagctaagaaaacacatgcaaatatggttgtgtaaagttaagggttataaggaaaaaaaaatcagtagaattacataatactaaagttgcagttgaaagaatatccaagtatgtgttggtagttactaaaagaattatagctgttattgccttgtatttatagcccttgtttcaggttttatgattcaagtcttagtccaatctttcttttggacatttgcaatatttaccagttgtgttttgtgtagtctgaatttgctttctgtagttgagcaaacgtcttaaaaagtcatttgtaatttattaaattactttctatgatgttctatagagcaaatggaagtttaattattttttattaaacatattctttgactaccccctcgtgccgaattcttg

SEQ ID NO: 52800 - DNA, 516 bp, Homo Sapiens
gcacgagaaaataaaggagcttacactcagtagagactcactataagctccactatttactccagcgtgtgtaaattgtacttactctattctcagagtatatttactgtccttaccattgattctttccctttgctaattttttttttttgttaatggtagctgcgactttaggtggggtatattttcttctcctaagagaatagacagtttttccagattcatcatcattgactgtcaagaaaggacccttcagcaaggctgtaccctcaatgcagttgatggcctgtcttcacggatttacagacttggcctgatgcccatgtaaattcaagctttggcttgtggtaacaaccacaagaagacaagcatctgtggtgcggaggcaagcaggctaactaggagttgacaagctaagaaagtgaaactgttctttcttagttaactgtctttctctggagctctgttattttgagtataatatttccacgacacttagtaaatgcaagctaaaat

SEQ ID NO: 52801 - DNA, 583 bp, Homo Sapiens
  misc_feature (529)..(529): n is a, c, g, or t
  misc_feature (548)..(548): n is a, c, g, or t
taatttgctcctgtagctgcattatttcttgattagaggtttgggcatataaccagattaaagtgaaggaactttctgttgtttttgtagcaccgctcagctgtcttgtaaaacagtgaacacacgctttctggttctagtaatcctgggtgtttatcacgttcagagaaactcaagctattgcatgattagccccctatctggcaaggaaaccccatacagaagaaacaacaaacctgcgcctgcaccgcctctgcgtcctgggtagtctgtgcttgtaatccagcatgtttcacagagtaagcctgttgtgactttgcttttggggtctatgtcattggtttctgatgcttgtacaaacacgcacacacaaatggataaaacagcacctctggctgttacattaccataaaccatatcacatgcctacattttacaaatgatttctggtttctcttagttcttctctaacatagtactttctttccagcaaaagcaaaatgtgttttcagatttgttactttaatanaggttatccataccaatanaaaaaaaaaaaaaaaaaaaaaaaaaagtgttaaaa

SEQ ID NO: 52802 - DNA, 591 bp, Homo Sapiens
atcctttgggagaaaatcttatagaatgggggaacaatatgtggtttaaagttattttaaaatgccagttaatttcctcggcaaaggacaatagaggaacttagcttaattgtctggctttaatttaaactgtgttaatacaacattaaaataaaacactaaatacttttgaggtacagtctgctcacttttttggttctcaaatagcaaagaaagtaatgtctaaaataggctcttagcattaaaaactgacagcattttgtaactacacagtgtacagaatttttttttaattgaagtcaatcactaaaaaaattagaaggcagggtctatttacacaattaagctgaagaaagcactaattttttgtagtttaaaatatatatatattttagtcagatttaaaattttaagctttatagagtgtaaatatattttgctattactgtatgtgtatgtgactgctcaagcactttgtaaagaaattaggatattttagaatggtacactatgcattcaaatgaaatgtgcctttcactatgtcattctaagaaaacaagtgttttttgcagtcataaattatcacaaatg

SEQ ID NO: 52803 - DNA, 566 bp, Homo Sapiens
  misc_feature (537)..(537): n is a, c, g, or t
tggcttttgtcagatggagtgccggtctgcagaggactgctctttcgaatccacagtgttatctgtgtaaatagctttaatttttcttctgtgtcttaggtgaagttttgttcatgtagcaaccaggtagacagtgaccaaataaggctgtaaatgtgctgtagttttctactgtgatgtacttgaaggagaacctgtgtcctctacttttctgatctcccacaagtattttgtgtttgtttcctgagtcctgaggttattattttactcctgttttgcccccagttttctttgttttttttctggagacccagggaggcccatggtggagatcatttgtaaggaatggatcatggtctgggtttccaaaactaccctagtacagtgaatgagagaaatctgcctggaaattgtttcagaaccatgtacctttatgctttgtgattgtgaaacattgacttttttgtaaccccaaaatgaaaactgtttagtaaaggggatctattttgtgtgttttgaaacttaagtgcaatgtcncctggaaaaagctaaagaaatgtatatgt

SEQ ID NO: 52804 - DNA, 804 bp, Homo Sapiens
cgaccacgcgtccgcgaccacgcgtccgataaatgtttctttggtattcttcagcctgtgatttaaagttttacaaaaagcagagctttttcctaagttacttttcagttaggtaactgtgtgatccagttcttccagctgcttctataatgaggcacatattaatacagtttttatatggtatctatgaaagagttcacttcatagagaataatacttgagcaaatgtatccaagaaagcaagcaaatgaaaagaaacctatttatggaataaactccagatctgaaattcagtattttagaaaaatgccagctcttcttactgtatttattaaaacttgtaataatgtgatttttttcaaggatattagttcaaattgaaatggtttcacgccacacggaaatctttaagttatttgttgaggtaccatatatttagggtgctaggggcaagtaatgttaatatgtgcaataggaactactggtttgaatgtgtaaatgggtgatctctctgagtcctggcaacatccagcaaaactactgcttattctccaaagaatattgggagctctcaatcctcggtgatatgggaaagagaactgagtatttgccctatgactgagctttctataggaatttcattaaagaatgtgcaattcaggtagtccttcttaatgttctcagtcaaataaactgagttgagctggtttcggctggctcctggacaacaacaaccacgacacacacaaacacaaaccaaccacccacacaacacaaggacacgcacaccgaaaaaaaaatacc

SEQ ID NO: 52805 - DNA, 791 bp, Homo Sapiens
  misc_feature (734)..(734): n is a, c, g, or t
  misc_feature (776)..(776): n is a, c, g, or t
acccaggcagtggggctcagcacacaggcagaagggaccaggacgttaaagtccctcctgatgtttaccatggaaaactgcttctacctgctcatctctcaggcgatgcggtaccttagggacccggctgtgcacccccgggacaaacagcggatgaagcaggagctcagctctgagttgagcacgctgctgtccagcctctcgcgctacttccgccggggagcccccagctcccctgccactggtgtcctcccctcgccgcagggcaagtccacctctctctccaaagccagccctgagagtcaggagcctctgatccagttggtgcaggcgtttgtccggcatatgcaaagatagggcagtgctgttctgcccacctacccctctccaccagcctacactgcaccctggctggcaggggtgctgctggctgctagggcctatacaatggagggcacctcctgtcacccccctcccggagtagccacgactccagccaccacccactgacgttatttttatactagatgaagaggtcaacagcaggcatggggagccgagtcttctgtgctcaggtcctcacgctgcagacgccccctagaggaactttccttcctttccagcattccccacagcactgccggccaggggagaggcggcagcccagcagagggctctatgcacgggtttcaaacctgttttccacactctgtctttgcagttttggtaattcntgtggtctatttatacagatattaaaatcttgtttatagaanaaaaaaaaaaaaaaa

SEQ ID NO: 52806 - DNA, 629 bp, Homo Sapiens
ggcacaggggatggtgtgcattcagagcattgggttgggggcttccctgttccctcagccccagtcgagaggaaagagaatcgggccactgccagaaagagagtcaagcaaacctggaagggcaaatctgagagtgggaaggccaaaggccgaggcccagatttagtattcactagcagcgccttcgggtagcaggatgattccttttcctgcctgtctgctgctggctctcttccctaaggtacaggttggcaggaccacctccgcctacttctccaccatccctagcatgccagcccgttcccagatcaacctgccagtggagtcaggcagtgcactcctggagccaagagggaagggcagggtagagagggtatgtccagtagcctggagctccatggtggcttcatgcctcccttctcccagctcaggtggccctgagggctcccctcggaacagtgcctcaaatcctgacccaagggccagcatggggaagagatggttgcaggcaaaatgcactttatagagattttctattgctgggaaggtgtgtttctcccacaatttgtttgtgaatattcacttgttttataaatgtctgacctgtcttgagtaaaaaaaaaaaataa

SEQ ID NO: 52807 - DNA, 606 bp, Homo Sapiens
  misc_feature (537)..(542): n is a, c, g, or t
  misc_feature (544)..(554): n is a, c, g, or t
  misc_feature (556)..(556): n is a, c, g, or t
  misc_feature (558)..(564): n is a, c, g, or t
  misc_feature (566)..(579): n is a, c, g, or t
  misc_feature (581)..(582): n is a, c, g, or t
  misc_feature (584)..(587): n is a, c, g, or t
  misc_feature (589)..(592): n is a, c, g, or t
  misc_feature (594)..(594): n is a, c, g, or t
tagaacttaaaatttttttatacaattacccaattggtgatatgatcttaagcttttgtgtcagattatttaatatgatgacttcatgctttattatgccttattatggctgacgtattactgtggtgaaacaaaatatctttaaaagttaaaacatccagatatataagctattttttcctaaggataaagtacctttgagcatgagtgtatcacagctttcattaggaaaacttttcattacatacttgtttaaactctgtcttccagggtaaaaataataaggttgaatcattttattaaaaatactttttaagaaaataactatgaacatctgaatattaaagatataaaaatgcacataattcatatttcaggtggtatttgcattcagtgccttactggtattctcagaacattttaatgatttctaacatttcttaacagtcatagatatatacattttcattttttgtacttgaatattctaaataaaactgacatttactcttgacaaataaaacatatatttactannnnnnannnnnnnnnnnangnnnnnnngnnnnnnnnnnnnnngnngnnnnannnnanaaaaaaaaaaag

SEQ ID NO: 52808 - DNA, 606 bp, Homo Sapiens
gtgccaaattgtggtacacttagaaaattctacagtcgtcgatttttagggtgttctctttcaacacctttttgttagtaatcattgccagtagtgccttcatcagttaagggaggtgtcccagcacagatcattctcaaaagcgagcagggaagagctagtgggcatgctgaaggccagcgtggacagcaggtgaggcaggtgctcctcacacccagacctgggcatcttcattgagggaaagaaaacagtcattgtgcaaaattctgttagtcagtgattctttacttgcaaattcaggggcttagaaaatgaaagcaaacacaaaaccttgagtgtgctttgggaaccaaatggaccttctgggacaagctgagcaagctgtatgaacgccacgtttgtgaagagctgagggtatcaggagggccgacgctgtgttggcatgcgcagtaggggatgagggttagccatagtattctttgcaaatgtgaaagcgagacattatatcttctcttgcttggtgtaactaatcactgttaatttcaggaaacagaactcattaaaactccttagcaaaccaggtctacatcctgttttgtttgctga

SEQ ID NO: 52809 - DNA, 670 bp, Homo Sapiens
  misc_feature (493)..(493): n is a, c, g, or t
gttatacctattttactacaataaaaagtataaaaaagagaagatatttaggtgacttacagcaaccaattgcaacaaaacaaaatgttaagaaatgatctttttatgaggcaattggaaatttgaacactgatcaactataggatgattggaattattaatttttaaaggtgtgataagatactgcacttggctgggcacagtggcacatgcctgtaatcccagctacttggcaggctgaggtgggagaatcgcttgagctcaggagttcgagaccagcctgggcaacgtggcgaaatccccgtctttacaaaaacaaacaaacaaacaaaaaagatattgcagttgtgttgtaagcgtccttatctttcagagctacatagtggaatgtttatggaatatttaggataaatgatataggcatttgggatttgctgcaaaatgacccagaggcaggggtcagggggagaggtagagatgagacaagaggtanaggggagaggtagaggtagccacgagctgataattacagacaagagatgcggagtatgtgggggctcattatcctgcatagtctatctttgtatatctttgaacttttcaagaataaaaaagcttaaaaagtatacatggcctggtcctaccagagactcacccaatgccagcctcc

SEQ ID NO: 52810 - DNA, 882 bp, Homo Sapiens
  misc_feature (758)..(758): n is a, c, g, or t
gaagtgtgcaaagtcacagaccttttgcaaagaggtttctagacagcagaagaaaacccctctctcagcgctcatctcacgcagaggatgccaggcagggtgaggatgggggagtagatgccgcttttgcagtggctcgcactgctgtggccactgctgaccactgaggctcccagcggagggtgttcacagccaggtcccgggccacggagctcccttacttgaagttctccttcagcatagattagacgtgatccactttgctttcttgcttctcacctcgcccccttgcacattgcctgacaccctcatattggccagctgtaatctcgtgactatgggactgaggctcaatcttggcttggggtgtttgaatgtctatagcaaaggaattcataatgggaaatctttttcatttgagaaattgtatgatatttattggttgtgtctactgccaacatttatatccaattctaagatttctgaaaaaaaattcttatcccttgctgctcagaaaaagtttacggaaaacaccagttcactaaaagcaccgaaatctgcaaagcctgtcttccgctagaacaacgtctacaaatgtgaagatgatgacttctggcacgcggtcatgagggtggggaatggcactaggagctgatgtttgcctcatttaaagtaggcaagccgagccaactgcagccatcattcattaagttttgggtagtgctctaatggtttgttcactttaataaagacagatnttggtaaagtagaatatttttcattctgagcatgtttgtcccaaaaggtgatgcacttaagctgacagtcccttcagtggttttgttaggtcacggcttgtcctgtctggattctgcatctgga

SEQ ID NO: 52811 - DNA, 630 bp, Homo Sapiens
  misc_feature (608)..(608): n is a, c, g, or t
caggtggagagccgcatgtcactgtcagagatgagcccacccccacccttccctgggggcgattagctgctgagtcacccacccagccttggagctggatgcctgtgcagcagaacagaggcaacggtggcaggcaggtggaggctgcgcacagcttctcccggtcatggcacacacctgtgcccagacgccaatgcctcctaagccaggagctgggttatgcaccgccatggcccacattaacgctccaccacaagcccagcctagtcagagccctcattgccccatccctgagtgggcaggagcctggcctggggagggcttcggcctgtgaggattctccccgaaggtgccctcggaggcagcaggtttgaggccctggggggcccgttccccagaagctgccagtgctttcagatgcattgactcttcccacctcccctccctcagaaaggtagtgcccacactatttttaaaatgttattttatgcaatacactgttcctagtgagcagggctctggccctgaggagtctttgcaatgtattgaaggaattgctgccgtgtgagttttgaatgattttgcagtaaagacctgatctttctcanaaaaaaaaaaaaaaaaataggt

SEQ ID NO: 52812 - DNA, 551 bp, Homo Sapiens
ttttttttttttttttttgaaaataatagacatttgtagaatatggagactaactcctaggagttgctttactctgtcaggtgacttaagtcactgggattcactaattttctctgagagaacagctgattgagaatttccattgtaaatagctcagtgttgtatagtgaggcttacgatgttttgtagtcttggcgtaaggacacagcccaagtaactgacgtttcccctccccctcccctctgaggagcctgcctgcctcacaactcaccctcacttcactgaatgaggaggctgagcagctgcagtgtttctgtccggaggaaatggatcttaggccactggacaagaacctgcacccaagggccctgaacccattttcctcccctgtcccagccttcccactttgacagacacttttaactgtgttccttactgctgccacaatcagcatggttgtatagtgccccattaggccatttacatacccagagttatactcaagcagaatgcacaaatggacatgtcataatttttgttacacctcgtgc

SEQ ID NO: 52813 - DNA, 691 bp, Homo Sapiens
ctgaaaaacaagtgatgtctgtgcagccttacactctgtctttacagaagcaaatagtacacaaaagatctatttcagacacattttgaagatgaatcttcaactttaataccagctcttgttttccttgtatgatgaggggattgggggatacagttattttactagcaccttgtgaagtgtttccgtgtttgtgatgctgtaatttattaatgtttgtagctttttatatttgtacatttcttatgagcttgtttatatacccattacctggatgtttttgtccactgggagaggcagcttggtggaggccttatccactcccacttgtcctgtttggagggacgcagtccctagggcccgagactgggtgggagagggggagtctcacggggccccaggcttattcagaactggtgtttttaaagtttcctttaccctgcccttgttgaacatttatataatctaacctggacatcaagctgttctctctctctcttttttttaattttattattattattttggcaacatgtacatttctaacaaagtttatcgtggctattaaagtgttttatttcccaattcatattactcttgtatcgagtccatgaggtctaaggcaacttagatcaaagttttaaaaaagtaaaaaatatttcaggtcttgtacaaaaatacagaaaaaaag

SEQ ID NO: 52814 - DNA, 956 bp, Homo Sapiens
gaaaccttgttgctttttcccagagtctgatggcagtgactgtgatcaagggaatcttcaccgccacaagtgcaggcagcaggtgtggttcaggtccccccccaccccactgtgctcctttgaagccaacgtgcctccctcgcctccatactggagggacgacgcaggggagaacagagaagtgcttggccctaggattgaggcacttgtttcctagcccgctgggttagggctggtgcaagcgaggcaatgttgaggatgctttaagcactaccagccgaatccgggaactctgttaacagttgtccaaccagcagaatgaggctaactgtataaagcatgggacccaggatgaggataaggaaaggacagcggctttccctgggcagtacaatggcttgaaggcaaaaagggataaagtgacagccgactgtgactctggtgaggaggggtgagcagggaggttgattctctgatgttaactaagtggcaaagtctcaacccgtgctcagccctccccccttcagggaagagaaacaaagattcaaagtaagcatgatactagtgggtttaccaggtgtttcttcccaaggagacatatattttttaataaacgatagttgcaatgaactgtgggctcagagacctttcttaaagtagttggagaagggagggcgtggggcaaagcagtggggaagaacatccccaaacttttggggggccagaggggctctcttccttaatggatgatcaagctagcccgagctggggccggtcctggggggatcgggtacagcctcccctgggggtggggggacagggccctttggggggaaaggtggggggggcctggggtccttccacccccaagcccccaggaacactgggtttccaaatagcccaccaacccaagatggggaggtccccacatcctgggggggggggcaaaaatggct

SEQ ID NO: 52815 - DNA, 590 bp, Homo Sapiens
aaagtcaggaaattgtagtgaaagaactaatggttttgttttttggaataaaggcacctaagctattgctaattgaattgctgctagaattagaaattatgctttagaatagaattggtatttctgtgattctttttgcttcttggtattttctcttgtatctatgtatctagtattgaggcttgctctttcatgtggctttatcctctctttaatagctgttgtaaaattcctgagtaactggctgcttcaggatcagcttgcagagtcttgcttttaggttagatacaaacaaagtaaatcatagttggtgtaaatccagcaaaaaacagctggctttggaatggagaacactacaattcaaatttgaagtatattcagaagaaaactttggaattagctttacatttgtttgtaaatctaaacaaatatgcaaaattggtcaaaatgtaagtatatagcatttttaaagattaatggttccttttatgtgctgatttctttgtattctgttctctgcattcatcattcaggaataccaccaataaatgtatttatatatcccttaaaaaaaaaaaaaaaaaaaggac

SEQ ID NO: 52816 - DNA, 604 bp, Homo Sapiens
attctgtctttcgtagcctgccttgactgtcaagaaatggcatgtgtccactgtaaagcaggtatatctgaacattgagaaggtttctgtgttataatgtaaagcaaactggaccacacacatcaaggaaagtgaggtggagtggctgtgtctctaacttgccatgagacctcgagcgaaccacttcacttctctgggtttctggtgcatggtgtaactgtcacttaaaatgaggtgtcttcctctccgcaacatctgacttgccttagatgcttcagttcccacttctgtgagcagctagcatctttctcttctgctcctggcccactggagctccagctctacgctgcaactctctcaacatttccccttaaatgtccccttgtcatctccaaccagtgtgtctaaaaccagcataaattccgtatttccaaaaacctaaccattagtcacccaggtttgaaaattaattgtcttcaacttcctctgtaagtggcacactgagctcatcacgcatcgtctcattcctactccctgtcatcaagttctgtggatggtttcctctaaaataaatctctcattactttttctgccactagcacac

SEQ ID NO: 52817 - DNA, 600 bp, Homo Sapiens
aagcccttctaccctgccctcatccgctacatgagctctgggcctgtggtggccatggtctgggaagggtacaatgtcgtccgcgcctcgagggccatgattggacacaccgactcggctgaggctgccccaggaaccataaggggtgacttcagcgtccacatcagcaggaatgtcatccacgccagcgactccgtggagggggcccagcgggagatccagctgtggttccagagcagtgagctggtgagctgggcagacgggggccagcacagcagcatccacccagcctgaggctcaagctgcccttaccaccccatcccccacgcaggaccaactacctccgtcagcaagaacccaagcccacatccaaacctgcctgtcccaaaccacttacttccctgttcacctctgccccaccccagcccagaggagtttgagccaccaacttcagtgcctttctgtaccccaagccagcacaagattggaccaatcctttttgcaccaaagtgccggacaacctttgtggtgggggggggtcttcacattatcataacctctcctctaaaggggaggcattaaaattcactgtgcccagca

SEQ ID NO: 52818 - DNA, 728 bp, Homo Sapiens
  misc_feature (547)..(547): n is a, c, g, or t
tcaggaacaagttgatatgggtttagagtgtccagtatgcaaagaagattacacagttgaagaggaagtccggcagttaccttgcaatcacttctttcacagcagttgtattgtgccgtggctagaactgcatgacacatgtcctgtatgtaggaagagcttaaatggtgaggactctactcggcaaagccagagcactgaggcctctgcaagcaacagatttagcaatgacagtcagctacatgaccgatggactttctgaagctaaagaccacacctgaatcagggctgtggtaatcatcttaccatagctgtaaattgtatcaaaacaaaaaattagtagatggatttaggaatatgtaagaaactcaacacataatataaatgcaatgaatgtttttcttctttaaatttaaagttagtatctacagatggaattgtatctacaaccaaatgcctcttatccctgaattcagagtgataattttataagtgtgaaacttaattatgtagggctccccccgtctgaatagaattaattccttanagtctagttagggtcctgctgtctgtcatgttgccttgtaacggatgtttccacctccttctccaacctctaccccaccattagtgtattttactataaaaacagtggaaccacagcccctaaagtcctgctgatataaagtcctttttgtcttaattgtatttaaaaaaaaaaaaaaagg

SEQ ID NO: 52819 - DNA, 916 bp, Homo Sapiens
  misc_feature (1)..(1): n is a, c, g, or t
  misc_feature (816)..(817): n is a, c, g, or t
naaacagctggtcggtccggattcccgggatcaagtttatatgtgacagttgaaaaagaaattcccttgaaatgatcatgaggttaaaattttcttcattaggggacttggagaaccagtagtcgtaagattagttgatagtttcactcccaagcaatgaattgcttctgtgtgtttccctgtaggactcaatagtaaatgctgtctgtcttacacatttataaggaccctgcaagacgacgacaaaggcctttggcctgtgctactaaacaagaagcctatgaaaaatttcttctttaaacttgttttttctctttccagtaagttcacatttggataattttaaaaagaaaagtaattacctttgtgtttccagaacactataattggggtgtatcttaattcagttaaatattattagtagacctggattttcccccttgaccccatcagtctataaaggttaaactgcaacttttatgaaatggtctttaatatttccacaataatcctgtgctatatttgttttaagaaacaaagtaactctatacacttcaagactttacaggattttttaaatcctgtattgttggatcaattaataaagatgcaaaaaaactttatagagatgtaaaaacaaaactataatggatctcctatttttctttaaatacaaaaaaaaaaaggtaaatgaactattctccttgtaaagctaaattcccattctgtctaataaggaagactgaaaaaggtttaaagacataatggaagatacatgcttgaagataacgaatgtaaacaggtcatcattgagannagtgaaatatcacatgctctctttatatatggacgatatcctgagagagagatagaaacaatcatcgtattgtatgtacgtgtcatactgctcagattt

SEQ ID NO: 52820 - DNA, 632 bp, Homo Sapiens
ctgtatttaactcttgctatttgtaacttggggatggtctcccctgccccagggcacataagagcaaaggctccaatggtcagtggatgactctgcaaaagtgaccccctgtgccagaagctatagccctctccccaacaggtctctcttgttggccagagggcctgcttcccatgggcattgcaagtgccaccgtgcggggcctggctctgcacacccaggaaaagtctgcagacccccagccctccgcaataattcaccagaccagaagccactggtgtacagagaacacttaaaaaaatgtattttatgtgaaaaaaaattaaaactctgtatactgtatcagcagctttgtgtaaaaatggcaatcaagagagtctaatatatttaaaacttttttaaaaaaaatcttcgcggatctttgatatcgtactgaggtaacttccacgtagccccttgccacgcggcaccggtgggccttgggtccaaaactgtggctcagccacatcccaaagggggcacatgtccctggagttgcttccagctgccaaggcctgtgacagaattcgctgttaagagtttttaattaaaattattaaattccttttaataacaaaaaaaaaaaaaaaaaa

SEQ ID NO: 52821 - DNA, 639 bp, Homo Sapiens
tgcgccaccacatcacatgaccttaacatgatcaatgtatttctctgccttgacatttaaatacataaattgagataagtagattagaaaatcattcaaatgataccataatttgtacgggacagggtgcgggcaatggccacgtggccaaggccctgcaggaacgcgccgaggtctccctcaccctccaggtgtccttcgcacccaacagtgcgtctgaggaacgagctgcagtttgagcgttcccctgagatgtgcgtagcctccgtgtaaatgtccactcccatggcttaattgcctatcagacgcattttcccagacgaaagcaatgttgggttggggaagacagtgcagccacccagcctttaccagcagcgtacggcagacgaaggcagtcgaggtgtggaggtgatcacgaagatacatgtgtttgactgtttaatttgaaagtttacattttttatgctttgtgttggtgtgtaatttttgtactcttggtggctagtttttgtcaaatcttttttggaatattgcttaaatgttttgattttatgatagtgaagcttgtattcagtgttttgccaattaatattatatgcttgtaataaaagcaaaagaaaagcttaaaaaaaaaaaaaa

SEQ ID NO: 52822 - DNA, 544 bp, Homo Sapiens
  misc_feature (528)..(528): n is a, c, g, or t
  misc_feature (532)..(532): n is a, c, g, or t
  misc_feature (540)..(541): n is a, c, g, or t
tttttcttttttctcgggaagcgcgccattgtgttggtacccgggaattcggccattatggccgggattgtccagaaagcattttaaatgaagaggtataaacccttaagggccaaaattctgtatattagattactcttaaacgaaaaaccagctgccgcttttatgtacacatattacatacgagtaggcagcagactttaaaaataaaaaaaacctaggcatgttgatgttgcaaaatgctgtataaagctgaaacctgttcattcagtgccattgtagttgacatgaagcgattgtaaaactgtctccgatttttctctggtttattaaaatgctaactataacattttttgtgaatactttgaatgtttcctaacagttgtgatgttactgttccgttttatgctcttattccaagttcatttttaatggtttggaagccatttttgtaatgaataaatgttcatgctgtacagtatctgtagcatgccgttctggattaataaaagcaacttagtatgtgcngaanaaaaaaannaaa

SEQ ID NO: 52823 - DNA, 653 bp, Homo Sapiens
gtagagatgcaattggttctcctgcattgagatttgatttaacagtgttatgttaacatttatacttgccttggactgtagaacagaacttaaatgggaatgtattagttttacaactacaatcaagtcattttacctttacccagtttttaatataaaacttaaattttgaaattcactgtgtgactaatagcatgatgctctgcagttttattaagaaattagcctaaccatacaactctcatttccttagtaagccaaattaggattaacttctataaacagtgttgggaacaatgtttaacattttgtgccaatttgttcctgtattcatgtatgtaagttacagatctgactcttcatttttaagttccttgttacatcatggtcattttctagttttttaccagactcccatctcacaataaaatgcatcaacaagcctgaaaaaaaaaaaaaaaacaaaaaaaaattcactggccgtcgttttacaacgtcgtgactgtgaaaaccctggcgttacccaacttaatcgccttgcagcacatccccctttcgccagctggcgtaatagcgaagaggcccgcaccgatcgccctttccaacagttgcgcagcctgaatggcgaatggcttgtaagcgtttttttgttt

SEQ ID NO: 52824 - DNA, 553 bp, Homo Sapiens
ctaccgtcataacttccgttcaaaggcggctcagaagattagaaccagacttactaaccaattccaccccccagcaacccccttctactgcctactttaaaaaaaattaatagttttctatggaactgatctaagattagaaaaattaattttctttaatttcattatggacttttatttacatgactctaagactataagaaaatctgatggcagtgacaaagtgctagcatttattgttatctaataaagaccttggagcatatgtgcaacttatgagtgtatcagttgttgcatgtaatttttgcctttgtttaagcctggaacttgtaagaaaatgaaaatttaatttttttttctaggacgagctatagaaaagctattgagagtatctagttaatcagtgcagtggttggaaaccttgctggtgtatgtgatgtgcttctgtgcttttgaatgactttatcatctagtctttgtctatttttcctttgatgttcaagtcctagtctataggatcggcagtttaaatgctttactcccccttttaaaa

SEQ ID NO: 52825 - DNA, 511 bp, Homo Sapiens
  misc_feature (472)..(472): n is a, c, g, or t
gacccggcccgggctgcgtacacccttgccctgctttgccttaaagcctcggggtctgcccggcccctcgcccctgcctggcactgctcaccgcccagggcgacgccggctggaccaggcactgctggcctttctcctgcccggcctcggaaccagcttttctctcttacgatgaaggctgatgccgagagcgggctgtgggcggagctgggtcagtcccgtatttattttgctttgagaagaggctcctctggccctgctctcctgcagggaggtggctgtcccgcgggaagccatcagcttgggccagctggcaggtggcaggaatggagaagctgaccctgctggccaggcaaggggccagaccccccccaacccccagctgccatcgctctcccacccagcttggccccctgcccgcccacctccctgggagccgggcctgtacatagcgcacagatgtttgttttanataaataaacaaaatgtcaaaaaaaaaaaaaaaaaaaca

SEQ ID NO: 52826 - DNA, 544 bp, Homo Sapiens
  misc_feature (516)..(516): n is a, c, g, or t
aaaagccaaaaacacaaacacaagaaaaagaagtcaaagaagaacaaagataaggagaaggagaaagatgaccaaaaagtgaaatctgtcactgtgtaaaaagacagattttttaaattgacttaattactaagtcatctgtattaaattttgttataatgtaaagagattcaagccttgtaaataatgacatggaagaccctgtgctgcacttaaaatattgctgcttgattatttgatttttacatcagagctttataacacgaacttttgtacagaattgtgagttgtgaccatgtaacatgagaggttttgctagggcctattatttttaaccaccattaattagttggggtggagtttactgtaatgtgaaattttcacatttgaattttttaattgcctggcaaaagctgatataagttctaaaatatcagcagaatgatttgctgaattcattacaaccctgttatgtcactttttgattacaataaaagttttcagtaaacttttcanaaaaaaaaaaaaaataaaaaaaaaggac

SEQ ID NO: 52827 - DNA, 751 bp, Homo Sapiens
aattcttcgttagatgaaaagaatgaattaacaagacgaaaagactctccttctcggaataaagattctgcatctggacagaaaaataaaccaagggaagagagatttgcctaaaaaaggaacaggagattccaaaaaaagtaattctagtccctcaagagacagaaaacctcatgatcacaaagccacttatgatactaaacggccaaatgaagagacaaaatctgtagataaaaatccttgtaaggatcgtgagaagcatgtattagaagcaaggaacaataaagagtcaagtggcaataaactactttatatacttaacccaccagagacacaggttgaaaaagagcaaattactgggcaaattgacaagagtactgtcaagcctaaaccccagttaagtcattcctctagactttcctctgacttaactagagaaactgatgaagctgcttttgaaccagactataatgaaagtgacagtgaaagtaatgtttctgtaaaagaagaggaatcttcaggaaacatttctaaggacctgaaagataaaatagtggagaaagcaaaagagagcctggacacagcagcagttgtccaggtgggcataagcaggaatcagagccacagcagccccagcgtcagccccagcagaagccacagtccttctggaagccagacccgaagccacagtagcagtgccagctcagcagaaagtcaggacagcaggaagaagaagaaaaaaaaaaaaaaa

SEQ ID NO: 52828 - DNA, 947 bp, Homo Sapiens
  misc_feature (947)..(947): n is a, c, g, or t
ggtgaaggcccacagtgggggctgtgggttctgacactcaggtcatagcctcagaggtctgaggtcagcccccacagacccatccggcccgccccccaagtccctgcagagagcacttagagttatggcccaggccctggtccacccttcccctgtgcacctccggctgggtttgccaagtcagggagcagggctggccgcaggaactcccaaaccttggctttgaatattgttgtggaggtgtgctcgtccctttctggacgtgcaaggtacctgtcccagcaggtcagatggggccagctgaggcgctcccccaggcaggaagggccagccttcaccatcgcgtgggattgggaggaggggcctccgtgagcagccctcactctgccgctgtcccagcccagtccctcgtcccggagccttggacaggctcccacaagccagacacttgcgttcacaagcaacctaaggggcaggtgaagaagccgcaggcctggcaagacgcgctagaattcctctaaggtcgtctgagaatggaccgagttttaaagaaggcgtggggtgaactgattggatcttcgtggtctagatgcaatagataagtctgaagcatttaattgtaagtcatctttgacattggggcctacacctggtacgagcgtcccttatggttaccttggagcttaaacattatggttacacttagttgtggggtcccaggtgaaaaacccggagggttagaaaaacctgcgatggcctctggagccctcgggaaccgcgcccaaagggaaagtaccgtggaattccggccaagcatgccccatgagatacagagcggtaccaggacacacgaagggtggacaactgccaaccgggaaccccctcggacagcaattaaccttgggcacatcgaggagaacccaggggagaacaggaacacacccgcn

SEQ ID NO: 52829 - DNA, 696 bp, Homo Sapiens
  misc_feature (684)..(684): n is a, c, g, or t
ttaatttcacctaccagtttttgaaaaagaagttctatatatttagccaatttatgtatgatgaacacatcaaatccagattgattaaagatattcgatttttcagggaaattaaggaccaaaatgatcataagtatccttttgatagagcagaaaaattcaatcgaggcatcagaaaacttggaataacacctgagggacagagctaccttgatcaattcaggcaactcatcagccagattggtaatgctatgggctatgtacgaatgataagatctggtggtcttcattgtagcagcaatgccattagatttgttcctgatcttgaagatattgtaaattttgaagaactagtaaaagaagaaggtcttgcagaagaaacattaaaagcagcaaggcatttggattcagtcctcagtgatcacacacgaaattctgccgaaggcacagaatatttcaaaatgcttgtagacgtttttgctccagaatttcgaaggccaaagaatatacatctccgaaatttctatataattgttccccctctgaccctcaactttgtagagcattccattagttgcaaggaaaaattaaataaaaaaaataaaattggagctgcctttactgatgatggctttgccatgggtgtggcttacattctaaagcttttggatcagtatcgggagnttgattcacttc

SEQ ID NO: 52830 - DNA, 773 bp, Homo Sapiens
gagtgaactactgagtttgccagagtgaaaatccatctgaaaaactcagctacctttagtttttagtcctcatttttggtcttgtctctgcggactgtgaagaatcacaatgctctatatgccctggactgtgtggcaaatgcaggttgcagcgtgtgtgttacatgaggatcttccacaatttcagaatgcacgccagagctgaagggggaaacttggtaacttgcccattattctctgcttttagccagagttaaacagactgatgggtctggtagccaacaacttggcaacttccactccttctcacctcgtgagattaagggctgtgaaaagaaatctagtctaactccaacagaaatctgtctctgttaagtgttttaccttctgtaagtagagatggtagagccaagatttttcttttggtaatttccctgtctataaagtgagaccaaagggatatctgttccctgttacctttttggagaattcataacatttgaagatcaaaaaattgaatgataaatatgaatggcttttcaattctgtggactttgtaccatttggcttcaccttgtactgcaagatgaatttgtaaacaaaacaaaattggactgtctggaaagctaaagttctgaaatatggaatgtactgcctctaatttttctttgtcttcctctcactggcaattttttttccctccaggtttcttaagaataatgttttttaaaagaagctttttggccctcccggaatacacaaaaaaaaaaagg

SEQ ID NO: 52831 - DNA, 645 bp, Homo Sapiens
  misc_feature (504)..(504): n is a, c, g, or t
ggtatagaaccaacctagaggctttgcagttggcaagctaactcgcggccttatttctgcctttaatctcccacaaggcatctgttgctttgggtcctccacgactcttaggcccgcctcaacaacccaggcacctcctaggtaggctcaaaggtagacccgtttccaccgcagcaggtgaacatgaccgtgttttcaactgtgtccacagttcagatccctttccagattgcaacctggcctgcatcccagctccttcctgctcgtgtcttaacctaagtgctttcttgtttgaaacgcctacaaacctccatgtggtagctcctttggcaaatgtcctgctgtggcgttttatgtgttgcttggagtctgtggggtcttactccctcccctcccgtccccagggcagatttgattgaatgtttgctgaagttttgtctcttggtccacagtatttggaaaggtcactgaaaatgggtctttcagtcttggcatttcatttangatctccatgagaaatgggcttcttgagccctgaaaatgtatattgtgtgtctcatctgtgaactgctttctgctatatagaactagctcaaaagactgtacatatttacaagaaactttatattcgtaaaaaaaaaaaag

SEQ ID NO: 52832 - DNA, 570 bp, Homo Sapiens
cttgctttggttctgacttctgggaactgctttgcatttctcctatagatctgtagttaagggaaccaaggggtcattggggcaaaagcattgtttctcaaagctccttgattaagagaaagaacagaaatttgcacagaagatagtgtcaaggagtgagaaagtttgtttgagggcagtagctcagtgtggaagaaaatcctgaagtttctgttgaagccatacaatgttctatggggttactctctaagacattctctgaggtgtgtgaggaagtcactactcctagcctttgttaagatgtaattttaaatattcagttatggtactatgtttgcaactctcgtcttatcacaatgcctcagtagtttgttcccttagaaacatttagatgtgcacaaattaatcttttatatatctaaaggtttttctatcatgcattggattgctcagaataaagtgtctgttagacttcgttttggtaaataaattctccataatgtagattaataatataaaagtctttaatgacacaatatatctatatagcctcactgtataattcagaaa

SEQ ID NO: 52833 - DNA, 670 bp, Homo Sapiens
acatgtgtgttgtgtatatgcatgtgtgtgtgtgcgtgtgtgtatagttttagctccaagccaagcaagtttgtgtttggatagaggggaacttaactattaactacaagttgtatgtctgtggtatcttgattttcccatttctaaagatgaatttcacaaagccataaagcgtgaaattagagctggacttaagactcattggccgaccatcctgtgtcctggcctggccctgcagtaagaagcgtgtctgggtctggagaagggtgcttccgagagtgtgcaggtggcccttccccttggaggcgagaagagagaatgtgctgtctatcttcctggttttcagtccacagagtcggtagaccaggggttacgtgactggggaaaatctcacatctccttgtctgaaaacatttcccctgctgttctctttctaacatgttgtggaaaatctgttcagatactgctcatctgactgttttgtacatgtgacaattgccttaaaacctagcacagtcctcagaaatgaataccgtgtttccactggaaaaaaaaaaaaaaaaaaacttgagggggggcccggaacccaattcgccctataggaggcgaattacaatttacgggccgggtttttacaccgttgggactgggaaaaccctggctttaccaa

SEQ ID NO: 52834 - DNA, 570 bp, Homo Sapiens
  misc_feature (478)..(478): n is a, c, g, or t
  misc_feature (483)..(483): n is a, c, g, or t
  misc_feature (486)..(486): n is a, c, g, or t
  misc_feature (489)..(489): n is a, c, g, or t
  misc_feature (501)..(502): n is a, c, g, or t
  misc_feature (504)..(505): n is a, c, g, or t
  misc_feature (509)..(509): n is a, c, g, or t
  misc_feature (511)..(511): n is a, c, g, or t
ctctaccttccctctgcgctcctccctccctatcctacttgcccatatgagcacggctccccatggccacatactcctgcaaagcttttatgctgcttcgcttttctctaaacagatctgatattgctgctcctgtggttttctcaaaattaactttgccgtggtttttaaaaaggaatcaaaatgcattgttgcattaagctttttcaataaaggaaaattacggaaggaaaataggcaacaccagcaaattatatgtggacaggttctaaactctatatatacatatatatatatatatctatatatctatatacgtaatcatctagttctgtcatcttactgaaaggaataacacttctaaagatcaccatttctgagaagttcttggaaatctttatgtctaagtgattgtattagatcagcaataatgactatgtaatctcaaaaaacaaataaaatattcttaacatggaanaaaanaanaanaaaaaaaaaaannannaaananaaaaaaaaaaaaaaaaaaaaaaaaaaaaaaaaaaaaaagggccacatgtgtctcaacct

SEQ ID NO: 52835 - DNA, 560 bp, Homo Sapiens
ttttttttttttttttttggagcattattgatttattagaaaaactagtaaatgggtttcctctggttggtggaagcacggttgagcaggtggaggacaggacccagctggccccagggccagccccagattgcatggtctgtgcccaacagggttgcattcctctgcagccgccgcctcctcatttcctccctgagcttgtttgtccaagccaccaagccatgtggtcccgctggcttcatcctcctctggattcctgcccccctcccatgaagggaggaagaggattcagggtcagcctaggggaccctggctccctccgataggcaggaaggaggagggatgcggaggagaggctgagccttccacgggcctcctgttaggggtgttggtggaggccaggttggggagggaagcctaaggaccctccacacctcccacagccagagtcagttgaggctgggacaaaggggaaggagagagggaaggaggaccgcctgaccttgcccagaaggagcttcctctaaactgccctgggaaggaagcctggtcctcgtgcc

SEQ ID NO: 52836 - DNA, 653 bp, Homo Sapiens
  misc_feature (8)..(8): n is a, c, g, or t
ccacgcgntcgcccacgcgtccggggaagaacctggggatccttcccctcaagcctgggctcatggagcccctgcccaggccctcaggtgggcggaaagtccatcccctccgcccttcaggaaggatgctcccgtgtgcaggggtctcctgcctgtgccatccactggggctcgagacaatttcccactcacctgtgaggccggtgtggctgcttcccttgtaaatagttgttctctggtaagaagccaaatatttaagctcacttcttcccagagagaggaagctctgctcaggcctccagcgttggctggccatggccacagccagatggaggagcccatccccaggagactcaggcagtggcctggagaggctttgttctgtaacggtgccttttcttagggtccaggcaggaatgaagccaataatttattgctttccattctgtggtatgatgtgcgtgtgcgtgagtgtgtgggccctggtttattcccctcctgtcaagaatgaagtggattcagttcaggtactttcgagggttgtagtgctgaccctgtggttgtcgctgatgtacacacatttcattatttgccaatggtgcaataaccactgctgaccaagccagaaccaccacacacacacccacaacagg

SEQ ID NO: 52837 - DNA, 666 bp, Homo Sapiens
cacagctaacatagacgacttgaaaaaaagactggagagaataaagagcagtcgcaaatgaagctgccccactcccccggcaccctgcagctttagtttactaaactagaagtcctcatagtttaaaatggcctcagcaggcctagtgtatacaaactggttgtatgtatcatgccgtggagctagggggaggagtcattgtggcacaagtatttgtacatactctgcttctctctgtcagcgtcctgctgctctagaagactgtccgtggatgagtttagtgtacagacttgtaaacagctgccccctctctgctcagtctagttcccagatccttttctttttaattgctcatttgtaaaattgtcctaatctttcctagctttttaatagttaatattagaaactctttaatagttttcctttcagtttgtgagctcttctctgtcgccctgaagggtcactgtattctgtatgaatgcatggcatgatacaactaatttaagagtcttttataaataaagtttgcattaactatacccaaaaaaaaaaaaaaaaaaaaaaaaaattttgggggcgcgcccgggccccgaaaagatttttaaaacacatggtggggggcggggccccagggaagggaaccagggggacaaggggcccaaagga

SEQ ID NO: 52838 - DNA, 622 bp, Homo Sapiens
cgtaagtgatgcaatcagctgtctgctttttaaggttgggattgtgctgactttgggattaacatgagcttctttagcaaccaagcatgaacttgattaagaccagaagtttgggagatgagtcctggcattatgtctaggactaaagcagtggctttgtatagcaagctgagtaaaggttgacatattccaaaacccttctttttaaaatgaaaaaggatggagagaaggatggaaagcctggacttaaacctttagaaaaaacttctggagagaaatcccttttaaacagttacttttgtcattgcctctggtcatttgtctaaataggaatggaaaattaaaagaaaagcaacaatccaatcttttttctaaaaattatgctggggtctcgactaaaactgaatttgaattggaaaattctggtgttggttggagttccatcttgcaagggataatacaaatcctatgatctctatgcccaatatgctgcctcaactctgagctgtctgcaaggcttagtaagtattgagtggtgttttttttttctttttatacaataccatgttaaccacatgagttaaataaatttgagaagttgttttaaaaaaaaaaaaaaaag

SEQ ID NO: 52839 - DNA, 719 bp, Homo Sapiens
  misc_feature (672)..(678): n is a, c, g, or t
  misc_feature (680)..(680): n is a, c, g, or t
  misc_feature (682)..(698): n is a, c, g, or t
  misc_feature (700)..(703): n is a, c, g, or t
  misc_feature (705)..(718): n is a, c, g, or t
gtggaccggtccggaattcctgggatgcgcttgctggaccagcaggctgcggggggagctctgcaggtggtccacagccggcagcttagacaggcgcctgggcctccagaggagtcctagcacctgctggccatgagggccacgccagccactgccctcctcggccagcagcaggtctgtctcagccgcatcccagccaaactctggaggtcacactcgcctctccccagggtttcatgtctgaggccctcaccaagtgtgagtgacagtataaaagattcactgtggcatcgtttccagaatgttcttgctgtcgttctgttgcagctcttagtctgaggtcctctgacctctagactctgagctcactccagcctgtgaggagaaacggcctccgctgcgagctggctggtgcactcccaggctcaggctggggagctgctgcgtctgtggtcaggcctcctgctcctgccagggagcacgcgtggtcttcgggttgagctcggccgtgcgtggaggtgcgcatggctgctcatggtcccaacacaggctactgtgagagccagcatccaaccccacgcttgcagtgactcagaatgataattattatgactgtttatcgatgcttcccacagtgtggtagaaagtcttgaataaacacttttgccttcnnnnnnncncnnnnnnnnnnnnnnnnncnnnncnnnnnnnnnnnnnna

SEQ ID NO: 52840 - DNA, 629 bp, Homo Sapiens
atagcaggaatgagcccctgacctttgcatggttacgccgatacatcaaatggcctttacttccacctaagaatattaaagacctcatggatcttgaagctgtccacgatgtcttggatctttacttgtggctaagctaccgatttatggatatgtttccagatgccagccttattcgagatctccagaaagaactagatggtattatccaagatggtgtgcacaatatcactaaattgattaaaatgtctgagacgcataagctgttgaatttggagggctttccatcagggagccagtcacgattgtcaggaaccttaaagagccaagctagaaggacacgcggcaccaaagctctagggagtaaagctactgagccacccagccccgatgcaggagagctgtcccttgcttccagattggtgcagcaaggactcctcactccagacatgctgaaacagctagaaaaagagtggatgacacaacaaactgaacacaacaaagaaaaaacagagtctgggactcatccaaaagggacgagaagaaagaagaaggaacctgattcggactagttttctgttcctgttttttttttttatttaattttgcaaataaaaatttattttgaa

SEQ ID NO: 52841 - DNA, 593 bp, Homo Sapiens
attctagtgagatgcccaaattaacagaacaattagcaggaccacttcgtcaaatgcaggaatgtgctaaaagaattgcaaaagtttcagcagaagccaaattggaaattgatgaggaaacttatctaagctcatttaaacctcacttaatggatgtagtatatacctgggcaactggagctacatttgcccatatctgcaaaatgacagatgtctttgaaggcagcataattcgttgtatgaggcgcctggaagaattgcttcgacaaatgtgtcaagcagcaaaagccattggaaacactgagctggaaaataaatttgcagaaggaatcaccaaaatcaagagagatattgtgtttgctgccagcctctacttgtagagtcagctaaaggaatgtgagattttaaattattgaccacctgtttgattacagttgactacaaatgcctgcaagtgtggatttggttctcccatacattttaatatgtattatatttaaatcaaacatcattcatagaaagcatattacatacatgtttatacataagcattacatttttttaataaaaatgtatacaggtggggcaaaaaa

SEQ ID NO: 52842 - DNA, 856 bp, Homo Sapiens
aattctatggaaattacaaatccaaaactctatgatgatgtcttcctagggagtagagaaaggcagtgaaatggcagttagaccaacagaggcttgaaggattcaagtacaagtaatattttgtataaaacatagcagtttaggtccccataatcctcaaaaatagtcaaatataacaaagttcattgttttagggtttttaaaaaacgtgttgtacctaaggccatacttactcttctatgctatcactgcaaaggggtgatatgtatgtattatataaaaaaaaaaacccttaatgcactgttatctcctaaatatttagtaaattaatactatttaatttttttaaagatttgtctgtgtagacactaaaagtattacacaaaatctggactgaaggtgtcctttttaacaacaatttaaagtactttttatatatgttatgtagtatatcctttctaaactgcctagtttgtatattcctataattcctatttgtgaagtgtacctgttcttgtctcttttttcagtcattttctgcacgcatccccctttatatggttatagagatgactgtagcttttcgtgctccactgcgaggttttgtgctcagagccgctgcacccccagcgaggcctgctcccatggagtgcaggacgagctactgctttggagcgaagggttcctgcttttgagttgacctgacttccttcctgaatgacttgttaaactaaataatttaatttgctttatttatattcttgctggaactaaacttatttgcttttaaaacacaaattttttaatggagggggcctaaaattctcagggccaaattcgtacactttgtaaaggc

SEQ ID NO: 52843 - DNA, 719 bp, Homo Sapiens
  misc_feature (451)..(451): n is a, c, g, or t
  misc_feature (531)..(531): n is a, c, g, or t
  misc_feature (537)..(537): n is a, c, g, or t
  misc_feature (544)..(544): n is a, c, g, or t
  misc_feature (609)..(609): n is a, c, g, or t
  misc_feature (624)..(625): n is a, c, g, or t
aacacattgaaccctagatctcaggcttcctgacctaccgccagtggccccttgctggccaccctataaggtcctccttccctggcagccccccatgtgggagaaatacctgattctcccaatctgcagtgggagagctttgctgaattccatcccaaagtcaaacatgggcaagaggtgaggatttcacttttaccctcaagtccgatttgtctgtgattttaaactaactgtgtatgtattgatgtttggaagattgtttgaattttaaagtgataatagtacttaatgttatccagtattgttcattaaatggtgttatcctaaagctgcacttgggatttttacctaacgctttactgattctctcaagcacatggcaaagtttgatttgcactccgttcatttctgacacgttttgctgcctcctacctttctaagcgtcatgcanattcgagaatggagaaggacgctgccggtccctgagcggtgtggagagggcggaaggtggactccagcgcagcttgaggngctgangacggangctgcagcatctgtgtcgttctactgagcacgcttctctgcctcgctcctgactcagcactttgntcactggctcagcanngtatgttacacatcacttttatgttccctgctttgtaattcatggttgaagatgggtggccaactgtacagatatttattacgctttccagact

SEQ ID NO: 52844 - DNA, 550 bp, Homo Sapiens
tttcatttagcttagttgggttcttagagccccctgtttgttgttttgtgttgtttccaatgaaaagcaagtttaccctcagagttatgcttttccaaagaggctgatgtctttgtttttgttttttttaatgtttcaggttctaagtgaagtgagttggggaggggttgggagtgttagtaatcaaggtttagaacaccatgagatagttacccctgatctccagtccctagctgggggctggacagggggaagggagagaggatttctattcacctttaatatatttttacaaaaaaagcaaacaatttaaaaacaagcccaccgcttctgtacatgtctaaatatatttttagaagtgggtaggattgtgaatttctgatgcagggcctttttataaataggttagggtagcatcattcagacttctctgttgtttttgtccctgtctttttcttatgttgtgttactaatgtaatttatattttttttagatcctccctttcctatagagataaaagtgatttatcttggcaaaaaaaaaaaaaaa

SEQ ID NO: 52845 - DNA, 417 bp, Homo Sapiens
gttgggctgcattcaaagctgttctgggctgcattagacccgtgggctagagttggacaagcttgtagatgatttcaggttataaaaccagaagtacaattcaacaaaaaaggagtaagtcatcaatataaatattagcaaacgagatattgctacatctctatttaaagtaaaatacaaccgattttaaagttcctgaaaccatagccatattttgacatttcacaaagaatggttctagtctactagagtacatttggctaagtagataacttacctaaatttgctccaaagctaaatcacaagtaaacatatttatgtttaaaacacagaaataaataacttaagatttttatctaagcggtcagtgttgtgttggaaagatatatctataaataaactttgaactgatttcaa

SEQ ID NO: 52846 - DNA, 432 bp, Homo Sapiens
tttcagcatattggccaggctggtctcgaactcctgaccttgtgatccacccgcctcggcctcccaaagtgctgggattataggcgtgagcccctgcacccggccaaaagttgatttttaattacataaaaatcgtaaaaacttctagtaaaaacttgatttggtgaatacagttatattttaaaaccttaaggtgacaagcattttctatgcctaaatcttcattggtttgcctggaaagagtctctgttaaaagattttccatattcaaagtaaaaggaaagatttcttgctttctaattgtcttttggacacatgcctattttctttgaggtataaacctttagatgtgaaaaatgtaatttcattctgctattgtgtgtgcttgtgtgtgtgtaattgaaaaaactgggaaatcctgctttgttggta

SEQ ID NO: 52847 - DNA, 615 bp, Homo Sapiens
caaagaggtgaatttacctgtgctagggttttacactgggagtgctaccagaactaccacaggatgaaagtggtgagcccaccactgcagagaagttttctcagtgccgtaatatagaggaattctcaaaataagccctactccttttcacttactgaaaacaacttggataatgtgtaacagccagccccatttcaaaaagattaccaggggtaaaacaactttttcatgggtcaaaatcatcttccgaagaaaatgatttcttaaaagaattgaacattgtaaatcaaagggcattgtcctgttttggattaacaaaacaggaaaaataaccaatccttgtaaaattatttgaaattttcttgtttttatcagttgagtgcctatagatgcacatacaaaaacaactgccatttttgtatataatagtcttccaagatagagatttacattaggagagaattaaacatccaggagggatgaacagtatttcatgtgtgctatgtagtgttttgcttcattgagagtcattttcatgaattatttttactactgcagtcatcttaaatttataatcatctcaaaaaagatgtcacaatgaacagacaaccatct

SEQ ID NO: 52848 - DNA, 803 bp, Homo Sapiens
ggcagcgaaaattcaaccccttgggtgaaagaagtgaggaaaattaatgaccagtatattgcagtgcaaggagcagagttgataaaaacagtagatattgaagaagctgacccgccacagctaggtgactttacaaaagactgggtagaatataactgcaactccagtaataacatctgctggactgaaaagggacgcacagtgaaagcagtatatggtgtgtcaaaacggtggagtgactacactctgcatttgccaacgggaagcgatgtggccaagcactggatgttacactttcctcgtattacatatcccctagtgcatttggcaaattggttatgcggtctgaaccttttttggatctgcaaaacttgttttaggtgcttgaaaagattaaaaatgagttggtttcttcctactgtgctggacacaggacaaggcttcaaacttgtcaaatcttaatttggaccccaaagcgggatattaataagcactcatactaccaattatcactaacttgccattttttggatgctggatttttatttgtggaaaataacttgctacttctgtagctgctctcactttggcttttcttaagtaattatgggatatataagggcgttggggaacaaaacatttttaataatgaaagtatggaaggggagtccaaaggctttaactggaaaatggcataagaagaaggttataaaaataacccatggcaactttttcagggaaatggtttggccctcaagggggccctgggattttagaaaaggaaaacccggtttggtcctaaa

SEQ ID NO: 52849 - DNA, 610 bp, Homo Sapiens
  misc_feature (556)..(556): n is a, c, g, or t
tgtaatttctacttgtgaatctgagctgtagcagcccagagggagctaggcaaactattccagaccaccaactgataagtgatcagattcttgtaatgtaggattttttaacctgttgattatgggttgttgatataaatgtaataatgttcacctcgattttcctggagtaacaaccagcgtggtagtagcccacctgcatgaggacggccagtgttaacaatatttttgttctgatcttcttccccattttgtttcctcaaacaggtttttaggagagtggagatttaaagtcaggatgtggcctttttattttaattatatacttaattcttagaacaagtagaatgggaaaggagtgactgataaatctaagattcaaaatagtcccgtcgaaacttaaaggccagattattgctttggagctttctataggtactagccatcccgtcgttaaatgttttcatggatatttgaaaagaagaccatgtacctttaataactgttcttttctcgagtttctgcctcgtgctttgacctggattgcattattatngtttatgcgaagtaaaaaaaacaacgggaaagcacaagctttcctgtatattaa

SEQ ID NO: 52850 - DNA, 592 bp, Homo Sapiens
  misc_feature (548)..(548): n is a, c, g, or t
ctgtctcctacatttagccaatgaaaagaatctaaaactggaaggaacagaggacctctctgatgttcttgtgaggcaaggagattgagttcactatggagaagtcagcagcaggaggcccatcccttactcagttgccgggacatccccagtctcgggggaagaagatgccatgggcttatacccaggctgtagccaactaccaacgtgcctgtttgtttgttgctctttccttctctccatcatagtctgggtgccagcgccctgaagctccgtgctcaactgattaaactttactgccctatggtgaccatctaggagaggggagggcagagggggtgagggtactattctggattgagaaaacctatatccattctttatatcaatgtatagttttagtctcctaaattgatctgttattttccaaactattctcttgtagaaaattttccagtgggcacttaatggtgcccttgaagaacttcctaatccatgtacataaaatacatcatatgtacacttataaatgtatatagaatgctcanaaataaaattcttaataatagaaaaaaaaaaaaaaaaaaaggac

SEQ ID NO: 52851 - DNA, 599 bp, Homo Sapiens
ttgtttttgaaagagtaaaagtactgatgcttctgatactggatgtttagcttcttactgcaaaaacataagtaaaacagtcaactttaccatttccgtattctccatagattgaagaaatttataccacatatcgcatatgaccatctttccatcaaatcaatgtagagataatgtaaactgaaaaaaaatctgcaagataatgtaactgaatgttttaaaaacagaacttgtcactttatataaaagaatagtatgctctatttcctgaatggatgtggaaatgaaagctagcgcacctgcactttgaattcttgcttcttttttattactgttatgattttgctttttacagatgttggacgattttttcttctgattgttgaattcataatcatggtctcatttcctttgcttctttggaatatttctttcaacacattcctttattttattatacattgtgtcctttttttagctattgctgctgttgttttttattctatttacaggatgatttttaaactgtcaaatgaagtagtgttaacctcaaataggctaaatgtgaacaaataaaatacagcaaatactcagaaaaa

SEQ ID NO: 52852 - DNA, 614 bp, Homo Sapiens
  misc_feature (554)..(554): n is a, c, g, or t
cgggaatgggctacctacacctgtgtgctgggctttcacgtctacggcgtctggccggacggctccgatgggaccgacatcaactccctgtgccgctcccacaacgagcgcgtggtggcggtggccgacgacttctgcaaagtgcatctcttccagtacccgtgcgctcgtgccaaggcgccgagccgcatgtacgggggccacggcagccacgtgaccagcgtccgattcacgcacgacgactcgcacctcgtctcgctgggcggcaaggacgccagcatcttccagtggcgagtgctgggcgctgggggcgcggggccggcgcccgccacgccctctcgaaccccctccctgtcccccgcctcctccctcgacgtttgatcgctgcctggcgggaccgactggcccggcggcgtggccccgccccgccctgcccttccctggcccaatcccccacgactaggggccgactctttcctggactgacttcgagacattcccgatcgcgcattttcctggagggcgcgaacggcgcccctgcacacactgtttanacccgctggctgagccgggcagccccagcctaggccttgactcccgctgcctgctgaggg

SEQ ID NO: 52853 - DNA, 373 bp, Homo Sapiens
cacgaggccagcatggccggcttccctctcctcctcaccctcctcactcactgtgcagggtcctgggcccagtctgtgctgactcagccaccctcagcgtctgggacccccgggcagagggtcaccatctcttgttctggaagcagctccaacatcggaagtaattatgtatactggtaccagcagctcccaggaacggcccccaaactcctcatctataggaataatcagcggccctcaggggtccctgaccgattctctggctccaagtctggcacctcagcctccctggccatcagtgggctccggtccgaggatgaggctgattattactgtgcagcatgggatgacagcctgagtggttattatgtct

SEQ ID NO: 52854 - DNA, 592 bp, Homo Sapiens
ttttatatgaaatatttaccaaaaaaaaaaaatgaggtaaactgtatttaaaacctttgacttgagtttgctggtaaagcttctgaatattgagtttgctgagaaataaaaatcaaaacttctttaagctggtaaagtgaggggcccaccagcagtgatctcctgatgccttactggaaactttgtttacttgtctgctaccctctgatttgtttttagttagtttttattgtgagcacacatagtacctagttacatcttaagatcaggtttataaaactgtggagtggagcggtatggtatggaatgacttggaatgtaagctgtcagggagaaaatgttgttacacttttgctaagatctgggggtttcttcatattcctgctgttggaagcagttgaccagaaatgcttgccagtcctgccaaagcactgctgtgaaatgtgaagtactttgtttttttatttttaatgattttctttttgttattaatatttttctctgttcctttgttattacttgcatggtttggcgtcagaagtccttacctctttatattgtttgcaggtttaaataaaacagtgtggtgcca

SEQ ID NO: 52855 - DNA, 570 bp, Homo Sapiens
gccagctgaggacaggcttgcctggacttctgtaagataggattttctgtgtttcctgaattttttatatggtgatttgtatttaaattttaagactttattttctcactattggtgtaccttataaatgtatttgaaagttaaatatattttaaatattgtttgggaggcatagtgctgacatatattcagagtgttgtagttttaaggttagcgtgacttcagttttgactaaggatgacactaattgttagctgttttgaaattatatatatataaatatatataaatatataaatatatgccagtcttggctgaaatgttttatttaccatagttttatatctgtgtggtgttttgtaccggcacgggatatggaacgaaaactgctttgtaatgcagtttgtgacattaatagtattgtaaagttacattttaaaataaacaaaaaactgttctggactgcaaatctgcacacacaacgaacagttgcatttcagagagttctctcaatttgtaagttatttttttttaataaagatttttgtttcctaaaaaaaaaaaaaaaag

SEQ ID NO: 52856 - DNA, 874 bp, Homo Sapiens
  misc_feature (476)..(476): n is a, c, g, or t
  misc_feature (829)..(829): n is a, c, g, or t
gtttgtggacaatattttacgtgcaaaagagatgtcattcagttaaaaagacaaacctctagatgtgtaattacatggaaaatactagcaatgtgaatgcttttgtagtaaccatcttgtagtacctgtgaaatctataactcagaaatggtcagatggtcaggagccagctatgcagcagtataccatctgtttaattattttgtaggtcctgtgtgtggaaccaactataaacccagttctaaagttgtgtatgatggtgaacctttgggaatagttcttatcaacttaattggatacttttagcaaataggaacttaattctcagcactgaacatgaattacttccttggagtttttttcattcatatttttgttgtttccaggaatttatttgatattaatgggcgtaaaacagcatcattgtacttaagctatggatgtttttattttatattttctttatttataactgngccaagtattattttgctacttaccgtgttattctgtggaaagaaaaacctgtaaagtgtttaataaattagccctccttacataaattaaatgtcaaaattttgtaaaatattaatcagaataaatactgactcttaagtgtgtgcttatgatttcactcaatttacttcaggaaattgatgaaatgatagtggtacctatgatatgaaaagattatacatttatatcctggttaactaggagtcaagtggcataagactgtaggaatttggaaaaataaagatggtgttagtattctaaaaaaaaaaaaaaaatttccaatcctgtgtgtatgcatggggggggggggggnaaattttttctaaaaaaaggaaaataaattttttagggaattctt

SEQ ID NO: 52857 - DNA, 709 bp, Homo Sapiens
acaccagtacccagaagagccagtagtaacacctgaagcaaaggcgtttattcgacgatgcttggcctaccgaaaggaggaccgcattgatgtccagcagctggcctgtgatccctacttgttgcctcacatccgaaagtcagtctctacaagtagccctgctggagctgctattgcatcaacctctggggcgtccaataacagttcttctaattgagactgactccaaggccacaaactgttcaacacacacaaagtggacaaatggcgttcagcagcgggtttggaacatagcgaatccgaatggatctgatgaaacctgtaccaggtgcttttattttcttgcttttttcccatccatagagcatgacagcatcgattctcattgaggagaaaccttgggcagctccggccaggccttgtaggaaaaggccccgcccgaggttccagcgtcaacggccactgtgtgtggctgctctgagtgaggaaaaaattaaaaagaaaaactggttccatgtactgtgaacttgaaaacttgcagactcaggggggtccctgatgcagtgcttcagatgaagaatgtggacttgaaaatacagactgggctagtccagtgtctatatataaacttgtccttttcttttaataacgttaggtacatttctgaaagctgtagcacaaggtctctgggctgtgtggacgagtcatc

SEQ ID NO: 52858 - DNA, 501 bp, Homo Sapiens
ataaaatgtataaatatttttgacttgaacatttggatggcactgggtgcaagtagagcatccatccttcggatggaatgtttggaaaaaagagacttttaaaaaggagacggttgttttaaagagtctgtttaggggttaaagtactgtaactcacgactgttaaaaaataaattttcctgtgctgtaaaggaaggtttcacagtaccactgagttagatttcagccacagatgcttagctttttttttttgtcttttttttaaggaggaagcctttgttttgttttcctgagccctcactctgtttttgtgctgttactcggtagagtcaagactgttactttttagccatggctgacattgtatcaataactaaaactgaaacattcaaaagcgaacagggaaaccgagggcttcaagcgtgctcagagccgtttcagacagtggaaatccatgacaaacaaaaggatgtgatcattaattgtaaagcgctttgtaaa

SEQ ID NO: 52859 - DNA, 732 bp, Homo Sapiens
  misc_feature (696)..(696): n is a, c, g, or t
aataaagtttgtttttctataaaaagtcataacaaagtattagtatgactttttgaataagttaatttctgccagtgtttaattattttattaaagaaaaggatgttacactgaatccttaaagaataaaagtgatttgacctctgctttgagaagacagcctgtaatttttaaagctatacttcaaagaggggattttgaattttataaatgcttgttaatgtctatttttgtaaggtttttgtgttttcctttcattgttgttaagaggctatttttgctccacataggcctgcatttattttaaaggtcagaattttactcttaatggtcatatattagttggggttgtagctgacaaaagtcatgaaatttcgtggttttcacagttaaaatttccgtctgttcctttaaaactctcctgcatgcctggggctcttgggatctgctctgtggcctaggatgtggctgttttatctgccgtataatgtacatcgtgctgacaatgccttggttttgtctgaaacatttacacttctattttccaccagtgttctttaaattgtttctgttttaggtgacttaaagttttaactaaagcatgagtaacgtttgttggcatacagtcccttcaccacaaattaatgtcttgcactgtctaccaaagcaaggatcagttaactcacttgtcccttncctacccaaattaacttacaagctaaaaaaaaaaaa

SEQ ID NO: 52860 - DNA, 550 bp, Homo Sapiens
  misc_feature (5)..(5): n is a, c, g, or t
  misc_feature (7)..(7): n is a, c, g, or t
  misc_feature (92)..(92): n is a, c, g, or t
  misc_feature (106)..(106): n is a, c, g, or t
  misc_feature (537)..(537): n is a, c, g, or t
acccntntaatttcatgttttactattcaaagcatttggtcttttaagtctcataaaaatccagtgaggtaaatatgaatccctatcattgntatcctgcaactantaaaatggaggaaatgtgaaggaatggtagagaagttaaaaagagtaagggtgaatgtgggtttaaaaaaagaaatactctctcaacatcaaaagaaaaggacataggaatagatggtttaatactttgtgaaaaggaaatacatacacctttccacagctaatttaaaagaggaagaataaatgtaaagttgacaataatacagataagaaagtaataggctgggtgtggtggctcatgcctgtaatcctaaccctttggaaggctgaggccagaggattgcttgaagctatgagttctagaccaacctgggcaacttggcatttttttttatttagctgggcatggtggtacactcctgcattcctagctccttgggagagaggcaggaaaatcgcttgagtccacaagttcaaggctgcagtgagccntgattgcaccact

SEQ ID NO: 52861 - DNA, 784 bp, Homo Sapiens
  misc_feature (639)..(642): n is a, c, g, or t
  misc_feature (644)..(652): n is a, c, g, or t
  misc_feature (654)..(661): n is a, c, g, or t
  misc_feature (663)..(664): n is a, c, g, or t
  misc_feature (670)..(675): n is a, c, g, or t
  misc_feature (680)..(680): n is a, c, g, or t
  misc_feature (682)..(686): n is a, c, g, or t
  misc_feature (688)..(689): n is a, c, g, or t
  misc_feature (694)..(694): n is a, c, g, or t
  misc_feature (699)..(703): n is a, c, g, or t
  misc_feature (710)..(710): n is a, c, g, or t
  misc_feature (719)..(720): n is a, c, g, or t
  misc_feature (724)..(724): n is a, c, g, or t
  misc_feature (729)..(732): n is a, c, g, or t
  misc_feature (740)..(740): n is a, c, g, or t
ggaagtttactttgaagcccatttttggctgtttagtcagcatgaagtgggcatgataattttttaatatttctttttgtgaaatttcctgtacagccttttgtaggattactacaggttaatgtgagttgaggaagacagtctttctcaaacaatactacataccttttattatattacaaacctaagtgttttatatcctagagtcaaggaacaaatttccttaggattatagtattacatgccataaaatactatgctttattggtcccatgttttgtgcaattttaaagagatggctttctattaagtataaactatgtatatataagaaccatattttccacaactaaaatgtgcattattttttccaaagttttatcattgctatttatttttacctttgtttttgaacattcaatccgttcattttgtatgtatgcttaatacgtgtcggtcatatacagtattgaatttttactgtatagtaattctggaaagagcaaataaatgaagattgtttttatttgcctgataaagtaattgaaagtgtatttttggtatgaagctggttttctgtcacaattgtaatttcccaaattttaaaatatcttataataaaataaaaatatatgaaannnnannnnnnnnnannnnnnnnanngaaaannnnnnaaaanannnnnannaaaanaaaannnnnccccccnaaaaaaaannaaanaaaannnnaaaatttngggcccgccttgggcccttaaaaaaactttttcaaaaccttttg

SEQ ID NO: 52862 - DNA, 580 bp, Homo Sapiens
caagcagttcaccaccctggacagagatcatgatgtctacacaggaaactgtgcccactaccagaagggaggctggtggtataacgcctgtgcccactccaacctcaacggggtctggtaccgcgggggccattaccggagccgctaccaggacggagtctactgggctgagttccgaggaggctcttactcactcaagaaagtggtgatgatgatccgaccgaaccccaacaccttccactaagccagctccccctcctgacctctcgtggccattgccaggagcccaccctggtcacgctggccacagcacaaagaacaactcctcaccagttcatcctgaggctgggaggaccgggatgctggattctgttttccgaagtcactgcagcggatgatggaactgaatcgatacggtgttttctgtccctcctactttccttcacaccagacagcccctcatgtctccaggacaggacaggactacagacaactctttctttaaataaattaagtctctacaataaaaacacaactgcaaagtaccttcataatatacatgtgtatgagcctcccttgt

SEQ ID NO: 52863 - DNA, 771 bp, Homo Sapiens
ataatcatctttatatttggggttttaattacagttccattagtgcctgtagattagtgaacagaaaattgctttggaagagattctgccctgtagacactatgtgaataactgaagtaacactagactgaatctcctttttggagtatgtatcttctctcacttgttcaagtacaggcacactgttcaaccgcatggtatctttctgttgtgtgactcctacaaatgtaattttaaatgaaattaagttaacatggattcattacgttcctggccctgtagacacgtgtaagattatttaaaattctttcatttttttctgcctcttactatacgactgtagtgcaacaaatattttaaagcccccttttcttctttattttcattagttgtacattgatttcagtgtcaacacatttaaagattcattcatgttgcacagtggcttacatgaacgtgaaactgtgatataaggttttctttcatactcataattagcccaaaacagtcgccaaactttgccattgtgctcctgcatttgtgtttgagctgctatatatttgtggaaattacactgaaagttgactaagagactattgaaaaagcatgaataattaaatatacatgtgagagacatctcatctgctgtattttacttagtgaatattgttcactcttccgtgtctgatgtmttgctgaatgctgtaactcatagtttacttttgtycahhmtagtttgcmctttttbttaataaaatcaacttgagaaaa

SEQ ID NO: 52864 - DNA, 759 bp, Homo Sapiens
  misc_feature (678)..(678): n is a, c, g, or t
  misc_feature (731)..(731): n is a, c, g, or t
tctggcagctgcattagagtgggatgtgtatcccagcagcctctgcctcacctaggggtccccacagacttggaacacctctgagccagggggccagcccccagcagaggctcagctgggttttgtgtatttagctggttgataggcacattcctattcctgttgcataaccggttctagccgcagagccctgcgggaggccaggtgctaatcacacacctcgctgttctgttctcggtatacagtgttggcaggcagcgtggcgtcttgtgatgtcttgcacctggggctcccagcacctcggagcagtgctgggagtcagtgtgttccacaccttggccagggccagcgctgtgctggcacacctgtcggtgcaattccacagcccagacccattccaggcagctgggatcagccctcatgacatttaatccgttgagtcgtcagaatcccactcactcaagacattccccctagatttgtatttctcaaagcttttttaaactttcaatttcataagtaatacatggatacactcttgtgaaaagaagaaattggagcattgtccttaaagctgatgtccttaggagctgggcgtggtggtacgtgcctgtagtccctcggctactttggaggctgagatgggaggatccttgagccccagaagtccaggtgcantgagccatgatcatgcccttggactccagtccagcaacagagcaagatccttnctctttctctcaaaaaaaaaaataataa

SEQ ID NO: 52865 - DNA, 579 bp, Homo Sapiens
tgcagtttattgtaatatatgggattagattcatctatggagggcagagtgggctgcctggggattgggagggacagggcttggggagcaggtctctggcagagaaggatgtccgttccaggagcacacggccctgccccatcctgggccttacctcccctgccagggctcgggcgctgtggctcctgccttgatgaagcccgtgtcctgccttgatgaagcctgtgccacctgcaagtgcccgccctgcccctgccccaacccccaccgaagagccctgagctcaggctgagcccagccacctcccaaggactttccagtgaggaaatggcaacacgtggaggtgaagtccctgttctcagctccgtcatctgcggggcttctgggtggctcctgccactgacctcaccggcatgctggcctgtggcaggcctaggacctcaggcggggaggaggagctgccgcaaggccctgtccagcagaagagggaggcttcctgactgacacaggcagcccatcttggtcctgtcaccctggcccaactattaaagtgccatttcctgtcaaaaaaaaaaaaaa

SEQ ID NO: 52866 - DNA, 590 bp, Homo Sapiens
cgtccgcaaataagtcatatacctgttttcagtcctaacatttaaggattcttgagtcccaatcacataactgtggtgttactctgtcatttatatggtgtcaaaagcacttgatgagtaaacccagtagcatctttttgagtgtttcataatgcattttccaacttgaaaacaataattgaaaaatagccttattgtatattttatgccatgactaaaagtgccatttttactgatgctattagactgataatttcttgaagtgaaatttaacctttttttctctttagtattatgtttataatgccatatttttagaaagcattccagatcaggcatggtggcttacacctgtaatcccagcactttggaaggctgaggtgtggggattgcgtgaagccacaagtttgagaccagcctggttagcaaggcaagatccccaactctacaaaaaaataaaaattaaaaaaaaattattaggctgcagaggcaagaggatcccctgagcccagaagttcaagggtatagtgagtcgtgattgtaccactgcattcctgctgagcaacagagtgagaccccatctcaaaaaa

SEQ ID NO: 52867 - DNA, 568 bp, Homo Sapiens
ccccccagcttaaccacttcctttggtctgcacccaggtgaagggaaaccccaaagtactgtctcaaatggtatttgaactacgccagtattgttggaataagtacattaattacttgaatgaatgaacacagcaccgtagaaatttcctttatggttacaccttgtatgtctaaagcattcaggccctgttctgtagtgtttcttatcctcacacagagtagaaaagcctgtttgctttatttaacttatacataaaagatgacatctgaaatatctgatgtgtattataataccagcttctgctctagaactactttgggtgaaatggtggtaatagcaaatgacctcctttaacaagacactcatctcaaacaatgccatttagttcaggagatctctaagtgtagctgtaaatttttgggttaatttggcttatattggaccttttaaaagaaataaagttttttaaatgcaataaaaaaaaacaaaaaaacaaacaaactttaaacaacaaaacaatcaccacccacacacacaaccataacaacaaaacaaacacgaaaggg

SEQ ID NO: 52868 - DNA, 577 bp, Homo Sapiens
atgctgcccgccgcgctgctccgccgcccgggacttggccgcctcgtccgccacgcccgtgcctatgccgaggccgccgccgccccggctgccgcctctggccccaaccagatgtccttcaccttcgcctctcccacgcaggtgttcttcaacggtgccaacgtccggcaggtggacgtgcccacgctgaccggagccttcggcatcctggcggcccacgtgcccacgctgcaggtcctgcggccggggctggtcgtggtgcatgcagaggacggcaccacctccaaatactttgtgagcagcggttccatcgcagtgaacgccgactcttcggtgcagttgttggccgaagaggccgtgacgctggacatgttggacctgggggcagccaaggcaaacttggagaaggcccaggcggagctggtggggacagctgacgaggccacgcgggcagagatccagatccgaatcgaggccaacgaggccctggtgaaggccctggagtacccaactttcttgtacaaagttggcattataagaaagcattgcttatcaatttgttgcaacgaacaggtca

SEQ ID NO: 52869 - DNA, 672 bp, Homo Sapiens
ggtgtcacctgcatgccttaatctttcattgctggggtgtggccttgggagatcctgggccagcccctccacacatctccctaagtcagagtggctgctggccctggtagatttgacttgctcttgcctcactcgacctccaaagtgggactgaagacagtggtcaagagacttgagttcgggacagtaagccaggggttaaggttctttcctttttttgaaagccaaagacccagtttgcattgtgctgctgcattcatggttagaagctttccatgcctaggttctagggaatttatttttctatgtgtatatattttcaaactttgtttcctgggtactgggcatgtgcctgtctgagccccaggtctgtctacaccccaccattcattctgtctgtctgttccctggacactgcctaaaagggtctcaagacagtgccctgtgggttcctaggactagggcccatcactgttctcttctgctgggaaatgcagctttaaaatggctaaccacagcagagggcagatgcttgatagattatcttttccttgctttcttgtttctgttttgaaagtgaaatggggttttaaattgttatttaaactctttttccaaataaaggtttacctttttttcccctcaaaaaaaaaaaaaaaaaaaaaaacatgt

SEQ ID NO: 52870 - DNA, 717 bp, Homo Sapiens
  misc_feature (655)..(655): n is a, c, g, or t
  misc_feature (696)..(696): n is a, c, g, or t
  misc_feature (701)..(701): n is a, c, g, or t
  misc_feature (708)..(708): n is a, c, g, or t
aatgaattatccaagattcgatgggatttatcagtgtgtagatagctctataatgcttgaattgtacacttctaagtgtgcagtgcaagagcttgtttatatttcatactttttatactttgaggaaaaaaagtcaaagaaaaattgtatttgagggaaaaaaccatgaccaagtaaaggataaattcaaaaaatagcctcatgagacttggcatacacactcatgggattccagttattatggagtgcttccatccctctccaccccttccccccaaaaggttttctttgcaggtgcttttggaactaagagctagtatcttggattaactgatgcctgctagtgctttctgattactcgcattctgtttcttgctttaaaagaagagtaaagacaagagtgttggaccagtattgcagttctgtagtgtcatttcttataaaaaacaaaacaacaacaataatttatcaaaattggcatatttaaagcctaacattctaataaaggcacaaatttctttttaatacttgtttcagcctctttaatctctttataagttaactaataaatctattttcttcagacttctgcaatagttctttaaaatcacaacagttagcaagctgacttttggaatgtgccaatacaaatacntggggaacttttaaataaggttgagtgctttccaatttganaaacngggttcnccaatttgg

SEQ ID NO: 52871 - DNA, 665 bp, Homo Sapiens
  misc_feature (628)..(628): n is a, c, g, or t
acaccgtttgggaagatgcgagggagccacttgcgcctgttgccctacctggtggccgccaaccccgtgaactatggccggccctacagactttcctgcgtggaagcgtttgctgccaccttctgcatcgtaggctttccagaccttgctgtcattttgctgcggaagtttaaatggggcaagggcttcttggacctgaaccgccagctcctggacaagtacgcggcctgcggcagcccggaggaggtgctgcaggcggagcaggagttcttggccaatgccaaggagagcccccaggaggaggagatcgatcccttcgatgtggattcagggagagagtttggaaaccccaacaggcctgtggccagcacccggttgccctcggacactgatgacagtgatgcgtctgaggacccagggcctggcgccgagcgcggaggagccagcagcagctgctgtgaagaggagcagacgcagggacggggggctgaggccagggccccggctgaggtttggaaaggaatcaagaaacggcagagagactgagggttgcagacacatatatttttgaggctgggtgacgagaaaatctagagacatgagggacataaatgggcctggcagcctnggctctttgcggctgctggcaggactgagctgtccgg

SEQ ID NO: 52872 - DNA, 730 bp, Homo Sapiens
tgtgaacagccttttagctcaaaatgttgagtcatttacatatgacatagcatgaatcactctttacagaaaatgtaggaaaccctagaatacagacagcaatattttatattcatgtttatcaaagtgagaggacttatattcctacatcaagttactactgagagtaaatttattttgagttttatcccgtaagttctgttttgattttttttaaaaaacaaacccttttagtcactttaatcagaattttaaatgttcatgttacataccaaattataatatctaatggagcaatttgtcttttgctatattctccaagattatctcttaagaccatatgccccctgttttaatgtttcttacatcttgtttttactcatttctgactggacaaagttcttccaaacaattctgagaaacaaaaacacacacgcagaattaacaattcttttccctgtgcttcttatgtaagaatcctcctgtggcctctgcttgtacagaactgggaaacaacacttggttagtctcttttaagttacagaaagccaattgatgtttcttattctttttaaattttaaatattttgttataaatactcacaggataccttatttccctagctatcatctcctgacttaatgttttttaaacccaccaatagtaatttaattaaagatatatgttgtaaaaaaaaaagaaagaaaaatcgctaatcggggggcgcag

SEQ ID NO: 52873 - DNA, 943 bp, Homo Sapiens
aaamagcaggctggtaccggtccggaattcccgggattctctctctagagcgagccagacagggagagaggaggaaaaaatacacataatacaaacatacatgcatgcacacatacatacatatgtatacacacacataatttgaaaactgattggcmcttcaacgatgctgaaattgtttttaaattgaagtttctttcttccacaaagcagccgtttctattcaaatggaaattcagtaccagagaataaatgtctatgtagtcatactgaatttagatagataagggctacagcatactaaatcgacaaccaaatttgtcatgtgactaaaccgttacttcagatgaagcttacattactgttttctgcttgtktattttctgtagagtacttttacacagattggtaaagttcaggtttcagagaactgcttttgtgcagaamatttaggttcttttttccacctttttggtcagtaaaacttaatgaaaaaagcaaagaaaaaaatattctgaacaaagctatagggttttaagttcagcctcccaacttagtcatcctaacatgattattttgtgatttggggtgcttgccctggtgctgttccagtccatgtkcatcctgagctgtgtgatctgcctcgaggctatgatctgagcaagcaggagataacattttcttctgcatcaagtgaggaaaaatgtgcttttggccatgtctcaaagacaggaccaacttcagattcccaaagaagccagctacagagcctctggaacactatggtcttacaagcagtactaaaatcaaccctcagcctcttcaatgccaaaggtatccctattggttgagaaccacatggtaatttttaatgggacttttatcagcaaatggagttacaggaattctctgtaatgagtkattctgaagaggtactttcctg

SEQ ID NO: 52874 - DNA, 770 bp, Homo Sapiens
  misc_feature (606)..(606): n is a, c, g, or t
ctttaaatgtagtaagtgtgacagagtcttcacccagagaaactaccttgttcagcatgagcgaactcatgccagaaagaagccgttggtgtgtaacgaatgcgggaaaacgttccgtcagagctcatgcctttctaagcatcagagaattcactcaggtgagaagccctatgtatgtgattactgcgggaaggccttcggcctgagtgctgagcttgtccgccaccagagaattcacactggagaaaagccttatgtttgtcaggaatgcgggaaagccttcacccagagctcatgcctttctattcaccggagagttcacactggggagaagccctacagatgtggtgaatgtgggaaagcctttgcccagaaagcaaatctaacacagcaccagagaattcacacaggggagaagccttactcctgtaatgtgtgtggcaaagcttttgtcctcagtgcccatctcaaccagcacctgagagttcacacccaggagacactttatcagtgtcaaccgttgccagaaagcctttcggtgccaactcgagcctcagccgcatcagcgtgtacacaacaagcagcaatactgcctgtagccattgngtggcagcagagtcccagaatatgagaccgttactccggatgtcgaaagttggaactatcccattgcagtttctctccaataatgctctaagattgtcacaaaaaaaaaaaaaattgggcgcgctgccaaaatttaaccatttggggcgggccagatagaaccg

SEQ ID NO: 52875 - DNA, 842 bp, Homo Sapiens
cgccgccgcccgccgcgtgctgggctacgacctgctggaactgagcctgcacgggccgcagagaccctggaccgcaccgtgcactgtcagcccgcgatcttcgtggcatcgctggccgctgtcgagaaactacatcacctgcagccctcggtgattgagaactgtgttgctgctgctggattcagtgtgggagagtttgcagccctagtgtttgccggagccatggaatttgctgaaggctctacggtttctccagaagaattcctctaagtttcatttcagacgcaccaggatgttgccggttagtggcgcattccacacccgcctcatggagccagccgtggagcccctgacgcaagctttaaaggcagtcgacattaagaagcctctggtttctgtctactccaacgtccacgggcatagatacaggcatcccgggcacatccacaagctgctggcccagcagctggtctccccagtgaagtgggagcagacgatgcatgccatatacgaaaggaaaaagggcagggggttcccccaaactttcgaagtaggccctggcaggcagctgggagccatcctgaagagctgtaacatgcaggcctggaagtcctacagcgccgtggatgtgctgcagaccctcgaacatgtggacctggaccctcaggagcccccgagatgactgcagggggctcaaatgcaatgaccccctctgtcctcctgaggagaggctgtaggctgtgcctgtmgccccctaccttcctaatggctcctcctctgaggagtgaaagggatttgtttgcaacgtgctttgaaggccacawaaaaagccctaaaaatga

SEQ ID NO: 52876 - DNA, 499 bp, Homo Sapiens
agagttcagtacatcatgctcttgtgcctctgcctgcttttcctgcgttcccaccctgtattccccccgcctttcgggtttccagggcttcgagcttgatcttttgaaagttttattctattaaatttttgctatatcttctggttttctgaaaaagctttagaatggtttctataccctttgtatcactgcatttttccatatcatctccggttcgatcgcgtccagatggaaaacggaagcagaggcttctaatcgtcgcatttactggctccagtgcaacacatccatctgaaaacactcggaagtctggtgcttggagagggtgccattgtctcttgtacataaggtcatgacgtgtctatgtcaaaagttcttatatatttcttttataagctgaaagaaggtctatttttatgtttttaggtctatgaatggaacgttgtaaatgcttgtcaaacaataaaaataacgaaaagtgaaaaaaaaaaaaaaaaaa

SEQ ID NO: 52877 - DNA, 1498 bp, Homo Sapiens
aagctttcagacccccatgccattgaagctgaaaagtttcagtgcaatttatgcaataagacctattcaactttttctgggctggccaaacataagcagctgcactgcgatgcccagtctagaaaatctttcagctgtaaatactgtgacaaggaatatgtgagcctgggcgccctgaagatgcatattcggacccacacattaccttgtgtttgcaagatctgcggcaaggcgttttccagaccctggttgcttcaaggacacattagaactcacacgggggagaagcctttttcttgccctcactgcaacagagcatttgcagacaggtcaaatctgagggctcatctgcagacccattctgatgtaaagaaataccagtgcaaaaactgctccaaaaccttctccagaatgtctctcctgcacaaacatgaggaatctggctgctgtgtagcacactgagtgacgcaatcaatgtttactcgaacagaatgcatttcttcactccgaagccaaatgacaaataaagtccaaaggcattttctcctgtgctgaccaaccaaataatatgtatagacacacacacatatgcacacacacacacacacacccacagagagagagctgcaagagcatggaattcatgtgtttaaagataatcctttccatgtgaagtttaaaattactatatatttgctgatggctagattgagagaataaaagacagtaacctttctcttcaaagataaaatgaaaagcacattgcatcttttcttcctaaaaaaatgcaaagatttacattgctgccaaatcatttcaactgaaaagaacagtattgctttgtaatagagtctgtaataggatttcccataggaagagatctgccagacgcgaactcaggtgccttaaaaagtatccaagtttactccattacatgtcggttgtctggttgccattgttgaactaaagcctttttttgattacctgtagtgctttaaagtatatttttaaaagggaggaaaaaaataacaggaacaaaacacaggagaatgtattaaaagtatttttgttttgttttgtttttgccaattaacagtatgtgccttgggggaggagggaaagattagctttgaacattcctggcgcatgctcccattgtcttactattttaaaacattttaataatttttgaaaattaattaaagatgggaataagtgcaaaagaggattcttacaaattcattaatgtacttaaactatttcaaatgcataccacaaatgcaataatacaataccccttccaagtgcctttttaaattgtatagttgatgagtcaatgtaaatttgtgtttatttttatatgattgaatgagttctgtatgaaactgagatgttgtctatagctatgtctataaacaacctgaagacttgtgaaatcaatgtttcttttttaaaaaacaattttcaagttttttttacaataaacagttttgattta

SEQ ID NO: 52878 - DNA, 600 bp, Homo Sapiens
  misc_feature (566)..(566): n is a, c, g, or t
  misc_feature (569)..(594): n is a, c, g, or t
ggatgtgggagcaatgagagttgaaccgttgtttttgttggagatgcagactgtgtcttgaaaatgatgattatatatgcaaattctgccctaccctcaccctcttccaagtttccccccaaaaaggtcacacagtgcggcttcctgtgggaaacaggagcagagctggcctgcagagcccctggggctgtgatgaagctcatatcttatctctgttctattaacaaaatgggagtttgtgggttttaaaaaattccgtttctaaatggaggaatagatgactttctttcttttggtgggggttgggacttgtggctttaaagaaatcacttctgagtaggatgtatattttcgttggatttttgttgttatttctttagaaccctccacagcaacatgcaagaccatggagttaaagaaacccagagacctttatcaattaattgtactgtttgtgaatttgtataaataataacaaagatcctcttaaaacgtttatattcttacagtaaaaggttaaactgatatttatataataaaagaggaaatatgaagtatgtttttgngannnnnnnnnnnnnnnnnnnnnnnnnnacatgt

SEQ ID NO: 52879 - DNA, 1085 bp, Homo Sapiens
  misc_feature (703)..(703): n is a, c, g, or t
  misc_feature (707)..(790): n is a, c, g, or t
ggtccggaattcccgggatcctggatttccctggaggggaggcactagctgagggaagtagctcccttcattcatgatgcacagtttacgcagcagacacacaactgcgcctactatttgctcggtgccctgcaaggtgctgcctaactttgatttgttatttcagctctctccaggatagtgccaaatggtgcaatgggaaacctgttttgctggggggctctagatcactggctccagaactcccggctgccagggtagcccctacccccagccccttgctcctggacagcagtgggtctcacctttagcctctgcccccagttctggtctgacccaacagaggggctctatgatattaagaaggggcccttcctgctctgtgcctcaacctattctccataatagggagtctaatcctattccttccctgcctgatgaggatggtgtgaggatgaggaggacggcatctcatttggggctttttggcagtgggcctcattttaatcctgcagggctgcctgccagtggatctatccagctgcttccttgtagccaagaatgagttcaatgaattgtgattcactgattttattgattttgttttaaaacagggagactggtatttttgaagctgctatcattttctatttctttattaatttctttgtaatcatcttattaaagttttcttatttagtgngaannnnnnnnnnnnnnnnnnnnnnnnnnnnnnnnnnnnnnnnnnnnnnnnnnnnnnnnnnnnnnnnnnnnnnnnnnnnnnnnnnnnaaaggggggggccccctaaaaaaacccccccggggggcccccggttttccccccccccccatttttttttaaaaaaggggccccctatggggggcccttttttaaaaactggccccggccccccttttttaaaaaccccgggggtgggaaaacacccccccttggggaaatttttggggagaaaaccctttttctcggggggggggcaaaaatttggggaaacattccccccaagaaattattaagccctcaagggagaaaaaaaaaaatttttttagggggaaaatgggggtaa

SEQ ID NO: 52880 - DNA, 601 bp, Homo Sapiens
ttgaaacgatatacactatattatgtataaatgtatacacacttcctatatgtatccacatatatatagtgtatatattatacatgtataggtgtgtatatgtgcatatatacacacatgcacataacaaaatcagatgctcattacaaatccagatgctcattacaaaaccagatgctacacaaacagcagcagaggaaacaaggttggactcttgcaacagatcacaaaaaataaaaacagctacttgcagtgactttggtcatttctgtatgttcataaagaatggattgtaacaaggaaaaaaaggaacagtgttagtgaaaaaggaaaaatgggcgaaaccatcttgatccgatgcgaatgcagtaatgttctatataccatttcatcagttatttcttttagtcatgttgatttgatttcagtttctggctatgaaaaacatttttaaactcgtcacccacaacaaactgaacaaaactactacagtgaaagcccttttcagtgaaagatgtcagaaacctcaaaacctttggcctgactcagaactaccatgtgaaaatcagtactctcttaatgtttgaaataaaaactgaaa

SEQ ID NO: 52881 - DNA, 625 bp, Homo Sapiens
ccacgcgtccggggagtttgttccttttttttctattatactcttaaattgttgtcagttatcaaacaaacaaacagaaaaattgtttggaaaaaccttgcatacgccttttctatcaagtgctttaaaatatagactaaatacacacatcctgccagttttttcttacagtgacagtatccttacctgccatttaatattagcctcgtatttttctcacgtatatttacctgtgacttgtatttgttatttaaacaggaaaaaaaacattcaaaaaaagaaaaattaactgtagcgcttcattatactattatattattattattattgcgacattttggaatactgtgaagttttatctcttgcatatactttatacggaagtattacgccttaaaaatacgaaaataaattttacaaggtttctgttttgtgtggaagagtaattgatgttgctaagaatgatgtttgtttttttggggtttttgttgttttttttttaaatgttaccagcactttttttgtaagtttcactttccgaggtattgtacaagttcacactgtttgtgaagtttgaatatgaaggaataattaaaaaaaaaaaaactcttcaaaaaaaaaaaaa

SEQ ID NO: 52882 - DNA, 672 bp, Homo Sapiens
cccaagagacgcacatgatgttaaaaagagatctggcagcagtactaatactacatttcagtgtaatcatcttggggtggtttggccaggatttcccaattccttgatatctggagtttcttcaccattgtccggcatcctgcggaggcttaatatacaggcgtaaggtcagcagcaatttgtctaataagtgatgagatcagtagctgaagtctctaagctgggccattactaaataccatagccatgttgatctggaaatttatccctctagtgtcttacctcacataagccatttgcccactgtgcaatatagaaaggtgttttcaaaagtatttggccgtagattttcacatccatcataaggttggcattcaataaggaaaaagttctaactccagtattaaattgtacataaatcccaaatgttcttaaagaacactcagggacatgtttgttgcctgggattggtaatgaaaggttggtttttgaaacttgaaatttcaccattggtttttttcctatcatttctgcatatccagcaaaaggaatctcatgttgactcctggcagagttcagtggcttcagtctgtctatctgttctgaggggaaaacttgtgttctggatccagtaatcaatttggcaactttaatcgaggttttcaaaattcc

SEQ ID NO: 52883 - DNA, 411 bp, Homo Sapiens
  misc_feature (329)..(329): n is a, c, g, or t
aatagtttcaccagtagttccgagtttgttatacatcagagaatccacactggggagaaaccgtatgagtgtaatgagtgtggcaaagcttttgttggtaattcacccttacttcggcatcagaaaatccacactggagagaaaccctatgagtgtaatgagtgtggcaaaagctttggaaggacttcccatctaagccaacatcagcgtattcacacaggggaaaagccttattcttgtaaagtatgtggacaagccttcaattttcatacaaaactaactcggcaccagagaattcacagtgaggagaaacccttttgactggtgtnagattgtggaaaagcctttcaggtgcttcagggaacaaattaaaaaaggcatcttgagaatttcattactccagggagtctt

SEQ ID NO: 52884 - DNA, 425 bp, Homo Sapiens
ttcggcacgagatgtaaaggaggtactgtcattttaattaacctatgtttaatagcttttccttctggactttgcaaagccttcttggcaaacacattgcaaagcattctctgggaggttcagcctccttgtgtgtactgtactgtgcagacatgaaaaaataaacccgtttactgtgtgcgtgtaaatagcctggtcatcaggccattttcagccaatagtcacatccagtgcaattttgcaccgaacacttaagggtgtggtttgtaagtacgatctgtaaaataactgggatgaattcccatgtatacctgtgtaaatagatttgttaactgaaatatactttaagaaagataaaatctgtaaataaacctgatttattaaattaaaaaaaaaaaaaaaaaactcgagggggggcccggtac

SEQ ID NO: 52885 - DNA, 807 bp, Homo Sapiens
atttaattttaaaagacaatgtatcttaattataatttagctttttaaaacaatgagatagctttacatttcccctttgtttgaatgagaaaatggatcttgggttgctatgctagaacacttgtagattgctgggtcctttgtaagggggccatggacacaccacactttctttcaatccttacatttgaagcattgatattcttcaaaaccttcttgttacatgtgcgcaatagaaatttctaatgttcatgacttttatctttcctgtccatcaattcactggttgtaaatgcttcctgagagctgtctaggtctgtatcccagattgttgcttaatgacatctgacagatgcattgttttctgaaatcagcttaagacaccaattgtggcaactggaaactcattacctgctgcattggatcaactatggaagttggagcaggggtgggcggaggtcacctaaccaatcaatggaaggcaactcacacctgctccaagcctcagctttgagaaacaaacacgtttataagaaaaaatatatagctattattacagaagtgaatatgttgtgctctcttactgctcttggtgcattgacagtttctgtatctcaaccctattcatctttatgaaaaagcattctgaagatctatcctcagcactgctgagtgtgcagtcacactttcctaccaacccccttcttaccatctctagctgccatttgtggggggaacaaaacaagggaatcctgattgtgtacagtataaattgtattatattttttgtacttatgttttatgtaa

SEQ ID NO: 52886 - DNA, 745 bp, Homo Sapiens
tggccccagctcctcttgtcctcagcccacccctcattgtgacttatgaggagcaagcctgttgctgccaggagacttggggagcaggacacttgtgggccctcagttcccctctgtcctcccgtgggccatcccagcctccttcccccagaggagcgcagtcactccacttggccccgaccccgagcttagcccctaagccctcctttaccccaggccttcctggactcctccctccagctccggaacctgagctccccttcccttctcaaagcaagaagggagcgctgaggcatgaagccctggggaaactggcagtaggttttggtttttattttttgagacagggtctcgctccgtcgcccaggctggagtgcaatgttgcaatcatggctcactgcagctttgaactcccaggctcaagcgatcctcccatctcagcctcctgagtagctgggactacaggcacaggccaccaaacctggctaatgtttaaattttatgtagagatggcggggggggcgggggtctccctatgttgcccaggctggtctcgagctcctgacctcaagtgatcctcctgccccagcattccaaagtgctgggattacaggtgtgagccactgcctggcctggccgtaggtttgtaactgtttcatagaagagccctggagaagacagtagaatgagcctatctagtttaaaaaataaagaagcacgttgatttcaaaaaaaaaaaaaaagg

SEQ ID NO: 52887 - DNA, 627 bp, Homo Sapiens
cacagcactgctgcggtgccagggacctagcgcaggacttttggtaatccataaaatggattctgagactgcgacggcaaggctgtcctgtcccccaggcacccaaggatcctgccagacagcacactttggaggaaggtctgcagggagcagctgagccatttgttcttgaactctgggaggcagaagtccccgcacccatcatgcgtggactgataggacatcttttcgtggtgtgcaccagtgctttccacacttgacagtggttggctttgatgaaccctcatgctgcaccttcagagccagtcctctagtttggaataaaaattgcagaggtggtttttgggtctttaccacctgcggctggtggacagcagccagtgtgtctggacacccaggggcattgagactgcatgttgtcacatgaccacttctcttcacacatctgctttcagtgcctggtgaaaaatagaccttggcctaacagtgtgactctctccaccgcctcagtgtagggaagggtccaggccagggaaggagcaccctctagtggaggcgggggtgaattcttaggtcgagctgatgcaagaaactccggtagccagcctctgtgaccttgtacatgag

SEQ ID NO: 52888 - DNA, 504 bp, Homo Sapiens
tgtttttggctgtgcattctattttctacatagcactgaatctgagtaacagtcatcctggatttatagttggaacagaacagtaacagacctaactgggactcagccagcactagcctcatcttagctgccccttttctctgctttgcagtttactgcttccctgggctagccataacggggttctgggcaggtcagactcttcagcaagacagtgtattaatagtgtgaattagatacactgatgacctgctctgcctagttaagaaactgaattaatcagcagttacaaagcacatactttgttacgtgctaggctttgcctcctggcctctagataattaagacggcccagggaataccagcagagaagtgctaattgtatttgggtgttacaaaagcagacctagacgagctgttcacttaactggtacctgttggtcagaaaaagaatttatttagagattatgatcatgtaaaattacagtactcaacccttctagc

SEQ ID NO: 52889 - DNA, 578 bp, Homo Sapiens
ctcctctcatgcctaccatggtgctgtatcaaggggatttgttcacatatgggctcagcaacgcacaagtgaggtcagccatggcactaggtcatttccattttagccaaggtgcctctataggggtcagacatcatgtgcccagacctaaggtcaggaatgtcatatttttctgttaaaatcattttatttctgtgtatcttacctttaaatcattgtggtttactctgagattctgtagtcctaatattgtatcattgtgctgtctgcaaaacaacttgaatctattttgtttgcatcttttgttacatgtaacgcagctgtactttatgttctttgcaactgtttccattatgagaacgctgtgctatttacaaggttacatttttcttggccaggcgaggtggtcatgcctgtaatcccagcactttgggaggccaaggtgggcggatcacttgaggtaaagagttgagaccagcctggctagcatggcgaaacccagtctctactaaaaatacaaaaattagccgggtgaaattagccgggcgtggtggtgtgtgcttgtaatcccagctact

SEQ ID NO: 52890 - DNA, 1071 bp, Homo Sapiens
  misc_feature (48)..(48): n is a, c, g, or t
tttctgtttcggactagggtgtagcatatttagtaggatgctcacatngttgtagtgtttgggccgagggctaagggttttggctcttgtacgggatggatgatgtgagcgcacagttcgtagggtcaggcgtcttgcggtaggaaaggggcagggttcgatacctctggggtgtggcgtgttctctcttgcccacctccccaagctcctttaaccaggagcttccctcccagagtgagctacgtcttgggaggattgaagcagggaggtggcagtggctagagttgctcagatcggctcagatgaaggcccaggggtcaaagcatttgctcaccacaactgagtctggaaggcactgtgcagccaaaccctcttgtccaatcacatgcaggccccaggcccctcagaaacgccctggtggagggaggagcccaacagatagggtcagggagtcagtggggaaagcagaggggagagcttagagtgaaacttgaaactgctatggacatggaggtcagatgggaacttggaactgggcatgaatcctgaatggtggggaaacttgaagccatcacagccaagaggtggggttccatgacctgccctgaggtcagcagctcccagactcctttgccctcactagggaagccccagtcaccggacttgtccccatggagtgaagagaggccccattttttgagtgttgtgtgttcaaaacagtgttgtggccctggtgggcatgttgctttaggtgaaaagaataaaggggaataagatttttcccccatcaccccaccccttttccatcctcctccatcccccccccccccattctctctcctccccccccttgttttcctcccaccatccgcggtatcctacccttctttctctcccttattccactctccatcgccccaacattcctgggcgtggttccttttttaaattccccctcgcgggggcccccctctttttccatcacccgctcttatctttgaacaaaaagggtccaatatctatgggccgcgttcttatttgccatatcgcatcgttttccactcacctttt

SEQ ID NO: 52891 - DNA, 735 bp, Homo Sapiens
catattttaattttctaaattctaatttgtcattttatttcctaaagttaatttccaatgcatttattcataaaatattcattctggaatgcagtgtttgtttaaatgtaatccaatgtatatagaattagtggtggctgtagtgctgtatttattgcttataattttttttaaatgtgaacttacttttaattttctcttggttttaatctgctagtagaaaccactagttatctgtaaaaatatattcaagatattctgatcaattataacaatttatgttatgcctagagtatatctctattttttgattgtatgaaaatattaaagttatgagttaaagtttattttcactgatatttactacagtgccaaataatctaatttataaacataattcttacagtaatcaatgggatacttctcaaaattaacaaatctcttaacaaaatatatcttttgccctctttaaagtcttcagtaaaccagtaaatgaattcaataaaccaattaagaaaaagtcatgatttgtttttcaaactaaaaaaatccaactatactacaatggatgcaaactccttcttatgctgaaagaagaaaaaggatgtctcaaaataagaaaatgttcagaaattcatctcctttatctactatatttcattttgtagttttgtttaaatattagaaagaaaaataagtatttaaaggtaatttttaaagagggcatattcatgg

SEQ ID NO: 52892 - DNA, 609 bp, Homo Sapiens
ttccacggctacctcagtcactgccagcaacccctccttcatgctcaacccttctgtgccagggatactacccagctattcactcccattctcacagccactcctgtccgagccgaggatgtttgcgccttttccttcccctgtcttgcccagcaacctttcgcggggcatgtctatctatccaggctacatgtccccacatgcaggctacccagctggtggcctcctacggtcccaggtgcctccatttgactctcatgaggttgccgaggttgggttcagctccaatgatgatgaggataaagacgatgatgtgatagaggtcactgggaaatagctagggagcccctccccacctcacttggggcccccagcaggttgcccaccaagctggaaggcagtgatttagaccttttgagaataggacacttggcaggagggaaaaggaagaggacaaaggagggtggttggccaaagtggcagagctctgttgctgtttaacaaaagaggcatatattaaaatgaaaaaactcgagggggggcccggtacccaatttgccctattgtgagtcgtattacaattcactggcccgtcgtttaacaatgccg

SEQ ID NO: 52893 - DNA, 852 bp, Homo Sapiens
  misc_feature (823)..(823): n is a, c, g, or t
ccacgcgtccgcatccttctagcataatggagaagtctgaactgaggagtatctttgatgaaagacatttaggaccctagaaactaaatcttgtcaccaagactttatagtaaagtagtagcaaaattatttttaaaagactttcttccttttactacccatttcctctcttgggaaagctgatgagcaaattatccaagactcatttctttattaggcaaagtcagaatatttcccctctgaaaatctgaattatgccctcattctttttcaagaaatatctcaaagagcaaatagaattaaacatgacacttgattgtctgattatttggcatgtataaaattatcatgtggcttaatgtgccttaagtgaaaatttaaacttagacctgaaacctttacagttggatgtagcgttgagcttttgcatgttttctgtataataaaccacttttgttttgtttgttttgtcttttaacctacacctttatcattactctaacagatttagggcttctctttctctacagctaagtaagggaatatgtgcaattatgagacatacaaaaaaggaaagggaaaggactttctaagtagcaaatctgtgccatgaagtagatgtggcgtgaagatacagagcctgaggatagtaattttccctgagccacgcacacaggcttttatttcatgccttttctctttctgtgccgtcacctttgagaaaaacgattgcaccttctccaagtctgcctttttaacagctacagttaagttggcaagacttccccagctctgaatatagccatttgccgactccggcctnctttgcgagactgactcaaatctgtggat

SEQ ID NO: 52894 - DNA, 1131 bp, Homo Sapiens
ggctgccgcagtggaggagctggtttcgggggtgcggcaggcggccgacttcgcggasagttccgctcctactcagagagcgagaagcaatggaaggcccgcatggaattcatcctgcgccacctgcccgactaccgcgacccgcccgacggcagtggccgcctggaccagctgctctccctctccatggtctgggccaaccatctcttcctaggctgcagttacaataaagaccttttagacaaggtgatggaaatggccgatgggattgaagtggaagacctgccacaatttactaccagaagtgaattaatgaaaaagcatcaaagctaagccagaagatttatcacattttcatcatcagctacaggattagaaaggaggctgggatgaatgtgacatagaccacagcagctctcttaagactcctggtattaccaacataaagaggcaggtggaatgagaaggactctgtctagattggcttttttaacattctcattttcccaggagttatcactgtaaaagtatgcatggatatttatgtatttataaatcatgcactctaagatgagttcatcaacattgtaaaagccctcttttctgttttcaggtttttttttttcttatcgacaaggtctcactctgtcgcccaggcagaagcacaaaggtgcagtattggctcattgcagcctcgaactcctgggctcatattttcagggttttttgttttttgttttgtttttttgagacagagtcttgctctgttgcccaggcagtagtgcagtggcgcgatatattttcagtttttaaacgtcagaatttttgtttaaaatgcctttttgggctgggcacagtggcttatgcccataataatcccagcactttggggaggccgaggtgagcagatcacctgaggttaggagtttgagaccagcctggccaacacgatgaaacccgtctctactaaaawamaammaaattagckgggatggggggggmtctgtatccmgctmycaggrgstgaasagaagactgytgaactgggggtggggktgcgtarcaaawcsmcattgmmycatctgggsgaaaawaaaacgyycaaaaataaataawaawaaaaaaaaaaaa

SEQ ID NO: 52895 - DNA, 691 bp, Homo Sapiens
tggtgaacattttcccccagtggcttcacctcattcctcccactggccttaccccttccttccccagtggaagcattttcaaaagcaaagataattttcgctggtgaacttcagaacttgccttcagggttagcttcatgtaattttaccatttcccatccccattccccaccacattatgtcaagattcaagttataaattaacgttttacttagactttgaaagagatttcatgagtaatttgaatgaaccttgctgaattaatctgaatagcaactgtctgacttgataactccagtgccagtatagtggctgctgcatagacactattcagtaaatgtctgatgaaagaaatggactttttccctttaatactgatgatgcaattttgaaatgttgcttgttctggaatacttcggaagttaaacaataaagtcagcttggagaggagatcatgatctttatactgtgaatagcagaatgtcacagatgaagaatattaaaattaggggcgtccactccaaaacatatcaccagagtgacaacttcagccctcagcctctgcaatccatatatatcctggtcttgggagtccatagaatactgtttccttctaataaaggtttcaaacaaaaaaaaaaaaaaaaaaaaaaaaaaaaaaaaaaaacaaaaaaaaaaacaaaggggggg

SEQ ID NO: 52896 - DNA, 504 bp, Homo Sapiens
ccatgggtggtaagagaaacctgccttcaccaaaatcttttaaggggaaagaagtggagagaaaggtttgcttcacttctgggactgcagtttgagaaataaaagggatacagagatatctgcactttgtagaaagggcaagattatttgcttatatctgaagggaggtgggtggttttgctggatgtttggtctgaaagagttacttttgataaagttaatctaattgtagttatattttctgtgtgcttttttttaattactaagaaaaaaattggtgagttcagtagctttggtattatgagtgcaaatcataatagctccaatgtgaaaaaaaaaatcaaaagtataacttgtcacttaatgttagaaaattgcctaaaatgcagtgtaataaataatctctgtaccaaatagtaatttaaatggggtaattttctgcaaggaaaatgtactgtttttatgtttccaaccctcttgaattaaaataaaaacaacttcttt

SEQ ID NO: 52897 - DNA, 482 bp, Homo Sapiens
ggactcgtggggttgtgaagagtctgatggaataaaatgactccagagatttacacagccaccatttgatcccagcctttgtccttgtgttatttaaacaatggcttcctgctttctcaggggtcaggaaaatgatttaaaaatttgtcttcttgacaaggcctgaaaacgaagggaggtgtcgtggagaaatggtgatttttctggttacatcacttgattcaagcactccctggagctttcaaagccttttttatctgctcagagttgacacccaactcagagtcagaactcaccagaagatgaggaacacccccgaaatcaatgtttcctttctccatgggatttttttcaatcttggtacagctgcatatctcccaaactcggatgctcttgtgaaatgacagccacatcagtgtggttactccccacaaataacactagggggaaatgaccttttttatttaaaaaaaaaaaaaaag

SEQ ID NO: 52898 - DNA, 571 bp, Homo Sapiens
  misc_feature (430)..(430): n is a, c, g, or t
  misc_feature (449)..(449): n is a, c, g, or t
attgcactgatagatactaaattattattttattaggttgaaaaagcccttactaaaagcccctcatatatcaattactttatttcattatgactacttaggttccgggctggggacaagttcacttaaaaaggcaatgttatttaacaggtcaccagttaagacttctgctttgtagatacatgcagaagccatcaaacaagggggagcttttaactgcaacaataagctaaagtatgtaaaatactacattctattcagtcttggagtgttttgtagaaagttatcttcagccaaatctttgctgaagactggttgtggagtgttggtaaatgctttgtgtttttatgtaaaatattttctaaacaaaaaatgttaaaagtacatgtcctctgtagtaaactgatatctatatatatgaatcattcangcctaaagtctagtaatanactgtacttgtgaatagagaaaccctaaatattcatgcagtaaaaattatgcggtctgttaagaaaaatgagtaatttgtgttttggacttgaaataaacagtgttctgtagataattcctc

SEQ ID NO: 52899 - DNA, 719 bp, Homo Sapiens
ggggcaaagatacatgtgtctgattattttttttggttagttgccgaaatatactagttctctgagggttaaagaagtaaaatacctttttaaagttaaatatcactagaaaaatcagtgttattacaagggaagaaatgaacccagtttaagaatttgccatcagtagcagtattaagcagtggttaatgtcttagaagtcagacttctttttcaaggtcttcagaaccacacttgatttctgttttgttgcagctgtaattgacacatactaggcagctgactccttgaatatccagtgtgacccataaaatagtctgttaataccggatcttaatttttatgttattcattaagattttaactatattcagtacgtaatttggagacaaactagcatcatcaaaactgcctgtaaataaggtgtttagtctttctataaaaacagaatagagcagttacctaccagttaaaatatcttatatgaagaaaatagaataaagatccagtcatatatgtaaataagatgtactgattgtacgtaaatgaaaaatggaccctttaaaaattatttttacctgaagcttgtcataatttttttaaagcaaatatatatatggtggatggtactttttcaaagtgtgtaattagtggtgatcaccctcaaacataaaccttctgttgtggaacccattgggtccctttttcaactggctttt

SEQ ID NO: 52900 - DNA, 540 bp, Homo Sapiens
agcccagcgcctcccaccccttttcatagcaggaaaagccggagcccagggagggaacggacctgcgagtcacacaactggtgacccacaccagcggctggagcaggaccctcttggggagaagagcatcctgcccgcagccagggcccctcatcaaagtcctcggtgttttttaaattatcagaactgcccaggatcacgtttcccaggccctgcccagctgggactcctcggtccttgcctcctagtttctcaggcctggccctctcaaggcccaggcaccccaggccggttggaggccccgacttccactctggagaaccgtccaccctggaaagaagagctcagattcctcttggctctcggagccgcagggagtgtgtcttcccgcgccaccctccaccccccgaaatgtttctgtttctaatcccagcctgggcaggaatgtggctccccggccaggggccaaggagctattttggggtctcgtttgcccagggagggcttggctccagcactttccttgccccagcctttggg

SEQ ID NO: 52901 - DNA, 658 bp, Homo Sapiens
cgtccgagcacactgagccaagtgccttctctgtctcacacttgccttcaggaggccggcatcacagaggagagacacataagaaagctcctatctgcagccagactcttcaaactgccgccaggccctgaggccatgtagccaggcccggaatgggcctctctggacaagagccaccctttcactgtgcatatgatgctgatgcaattcctccatcatctctggacgtgcagaccagatccagaagaaaggcctggcgtgtggccaaacagcgtgaaaccttggcacaggactgaggatcctctcctccagaaaagccccctcgaggaaataaattagtgcggttctctttgacctccaaagacaagacaagcacttatttttattttcagaagacaaaagaaccaagatgccaactggctgcgaatgctctatctccagtctgtctctgtgtactggtagaggctgggaggagtagggggcagcctgttccatttctgatagtgcccttgctcttctgtctgtcatcttgcaggatgcccgagggccagatgggcttagctaggccaaagtaacagactcaagagttattgtacattactgaccacgctcatttgttcaaaagttagaacatctggctgcaccaggaaaaaaaaaa

SEQ ID NO: 52902 - DNA, 848 bp, Homo Sapiens
gacccacgcgtccggatgaaataataatgcaaactgcagaaattgaaaatgaagatgaggctgaaagggttcttttttcctacggctatggtgctaatgttcccacaacagccaaaagacgactaaagcaaagtgttcacttggcaagaagagtgcttcaattagaaaaacaaaactcgctgattttaaaagatcgggaacatcgaaaggaccaagtaacacagctttcacaagagcttgacagagccaattcgctattaaaccagactcaacagccttacaggtatctcgttgaatcagtgcgtcagagagattctaagattgattcactgacggaatctattgcacaacttgagaaagatgtcagcaacttaaataaagaaaagtcagctttactacagacgaagaatcaaatggcattagatttagaacaacttctaaatcatcgtgaggaattggcagcaatgaaacagattctcgttaagatgcatagtaaacattctgagaacagcttacttctcactaaaacagaaccaaaacatgtgacagaaaatcagaaatcaaagactttgaatgtgcctaaagagcatgaagaccatatatttacacctaaaccaacactctttactaaaaaagaagcacctgagtggtctaagaaacaaaagatgaagacctagtgtttcggatggggaagcacctgtagaccattatatactcctgaagttctttttctggatggaaacaaaattcagcttaaccgtgtactcagcattttttaaataacaatgtttatttgaactaatatttaacatttaccaattcagtgttaccaaactgtgttaacgaca

SEQ ID NO: 52903 - DNA, 556 bp, Homo Sapiens
gaagatgaaggcatggaggaggaagaagagaaggaagcccttgccatataaaattcatgcagactaaacagtttccctgacagaataaataaagtggatgctaccccactccagaatcaaaagcaatttaattaaagtctcttaagttgtaaagagttttaaatgatccgtgttgaaggcgaatgcctgcaaatgcagtgggtctgacgtcagctgccgggcctgggctgggaggccatttgctattctgtttaaggcaggctggattgtcttattttggaaccagcttggtggggggtttgctttgctactgcttctgagccctgagcttcaaaggctgaaattaatggtgaacaaaattgtgcggctctggccatcccatgcggggcaagcccattgagggttatcattaagtaaagaaataaagagggggaaaaaagcctgcctgttccaaaaacctcatcagataatgacctcagtgattgggttttcattaccaaacagcatccagagattatcaacccatagaagaagggaggggaaaaaaaaaaaaaaa

SEQ ID NO: 52904 - DNA, 554 bp, Homo Sapiens
ttttttttttttctagagatgaggtctcacaatgttgcccagctggtctcatactcctcagttcacgcattcctcccacctccacctcccaaactgctgggattacaggtgtgagccaccatgcccaacacccactgatctttaactctcacatgttgggcataagaagtcactatataattgttactggaaagcaagacttaacgaacaattctgactatgaaaaatgtctctttcagtttgttctgtaaatatttagaaaagtgacagctgtcaacctcagagtaactatttctaaaaatgtaaatatgtattaatccttgtatcttttatggtaattttgcatattgatatgaattatataaaattgtttaaaataaaaggtgtccttgaattactgaccacccatagatgtctactgttaccaggttttacaatgcaaattttcactaatacctgggtttaatacagctcacaccactgaatgttacacatgagtttaactgggtaatacacaggttttgttataatacagttactgattaaattaataa

SEQ ID NO: 52905 - DNA, 695 bp, Homo Sapiens
  misc_feature (600)..(600): n is a, c, g, or t
  misc_feature (633)..(633): n is a, c, g, or t
  misc_feature (655)..(655): n is a, c, g, or t
agttctgctcgtattttaggtgggtgtgaagtgaatttctatatgtccaggagtgaatacaacagaaagagttggatcttatttatttaattagggagttaaaacaagaccaaaaagactcaacagccgcttgaagccaagaactcttcaatgccagctactgccacctaaaaatcatctggctttatagtggatcagaataaaggttattctaactgtggggagaaaaaaaaaattgtatcaagttccacaggtagcagacacttcacttccaagtaaaagatgagaaatcaattattcccacaggattttaggtcagggagcaaaaatctcagaacttgaccatgaagatacacaacagactcgcaaaaataaagtgggaaatgaagttcagattcccttctgtagatttccttaaaactattatttttttcttcttcgtaaaattttgataatctgttctcttaaaaaagttaatgacacaattaagatactgacatcaaattgttgccttttaccaaaatgcaaattttatgaagtgcctacctttatatgtataaagcatttaataaataattctaatgtgccatattttgctgngagtgccttaacatttatatttttatatgaatnggttcatgtatttataaaaatnggatattggaccttggaaaatagatgattagatttttggg

SEQ ID NO: 52906 - DNA, 592 bp, Homo Sapiens
  misc_feature (522)..(522): n is a, c, g, or t
  misc_feature (546)..(546): n is a, c, g, or t
  misc_feature (568)..(568): n is a, c, g, or t
  misc_feature (579)..(579): n is a, c, g, or t
ttgtagtatccagaaattacctggagtcagtatttttattcgccttctagaacttgggatccacacatcacccatttatattagtggtaaaattatctgctaaaatctaattgtaagaaaggcttaccttctgtcatcaagtgattgtatcatcctggatcgtcatttccaaggaactagcctttcttttcctaagcgtctgtatgtgttctaaaacttccagtatatatttatagaacttagaaaaaatgttacattattcagagtagcaagtcttactggagtacctatgtttgttttcttggtttttatttttttttaagtttaaaagtagtaattaaacctatattttgtgattgtttcctggtctgtgtttttaaattcctttccttcagttttcctcatgaagatgtttcagatactgaatttgtttagacattgaatgactttgttaaaggcacaattaatcacattggttgtactctgaagacagacttctttaaaaaaaaataaacaatttanaacaatgtggtgattatagataantgtaatatacgccatccttaanacccaaacatnataccagatcaca

SEQ ID NO: 52907 - DNA, 846 bp, Homo Sapiens
  misc_feature (654)..(654): n is a, c, g, or t
ccacgcgtccggcccttggtcttagaaaatgggagtacccagtgggggagcagctgtacaatgaggtagactcctacaggttaattatcatctcctaatcttaccctgacccttttgtcaaacgttatctagattaaacctcagtataggcaggctgcaggaaatggacattccagtggcccctggggttccagcctgtagcagcttcatctgtgctttgtgcacttggttctaagtcatctctgcaagggaccctgacgcctgggagatcagagccactgaccctttatggcactgctaacagaccccttccctcaggtaattctggatccagaactcattatgggatgtaatccaggtcaacactaataccacttggaaggttccgctctgtctcactctgcttgagtatcccactgatcagtctctcagtgcctgcctactgggcagctcatctgtccacttattcgtattaaatttgctttttatttaggtctctggagatggttgcgtggggaagagcccatgactttcctatatgatcccttgaacatactctccaagtcagtagattacctctcaggcagccttcataaaagtgtttcactgtactgggggtttgtgttcatctcactcacatagacagtctctggngtagcaggtgggggggtgatacaagttcacactctgtggtttctcctcctgttagccattcccaccctgcctgatgttttaaggaaaagcccaggaatgatgaaccccacttaaggctttccttgggccttgtttaagtccaatccttctggggggccaggaaaaaagaagaaatggctccttggccattct

SEQ ID NO: 52908 - DNA, 1108 bp, Homo Sapiens
  misc_feature (825)..(827): n is a, c, g, or t
  misc_feature (843)..(843): n is a, c, g, or t
  misc_feature (845)..(847): n is a, c, g, or t
  misc_feature (849)..(850): n is a, c, g, or t
  misc_feature (903)..(904): n is a, c, g, or t
aagtggctaattactcattaaatacaggaaaagaatgtagtatctaaatccagctttttcttacctctggtacacttcagattacttacctaatacatattgagggcttttaacccttagttttatcaatttttctagttttattttatttttataaaataattgaaaaagaaccaaaaatgaattcagaagttccatagatggatttttgccccttcttaattttctcccacaatgaaaacattttagaagacattttgaatcaaaatgtattatgaccattgaaagttctctattttctaagaagctgagcagctccaagggcctcgtttcaggtggtactctatgtattgtctgtgggcttgtttctacctgtacagtggaaccatgtgaccatgtcttgtgcttgcaatatagaaaccatgcagtgctgttttgtgaattggcagtttctgtataaactcttatttatatacattggcctctctgtatgattttccatttgctacatgaattgtaaaattaattataaaattatagtacctgctaaatacaattctgaggcttcatgtcattgtctttagttgaataccatgctgtgtgtcttgaagatgtccacgcttgcatgatgctaggtggcaatgccactttaaattaagccttaatcagatgttaaatttgtgagtttcagagtatgcaaaaatattaggcagagtgagtgtaaactgttcagatcaagatgctgtatcatacattcagtttatttttttctggagttaaagggaagcattcagtgatacacctctctctctctctctctctccnnncccccccttaaccaanannncnnttccttttctttgcctcctcccccttcccttcccctcccccccccctttcctnnccttgcccttatgccccatccctgggggaacaatggggcccttgggggcatttattgtggaaccagtaaaaaacaactggttctaaaagaactctcgacaatttttccgggggttttttatttttattttaaccgcggtcctatatttattattccccccaagaacctgagaaatttcctgaggggaagtaaagtcgaaaaaag

SEQ ID NO: 52909 - DNA, 384 bp, Homo Sapiens
aaaccacgccgaagagaggtagcgttttctcctgagcgtgaaccggctttttggcgttgcttcgctgcaactgccgtcagccattgatgatcgctcctctctccgtattggggagtgagagggagagaacgcggtctgagtggtttttccttcttgatggctcaatgacagagactagctcgtaaactccggggcgtttccgggctgttcgctcctgcttggcaatgtcgcgagaaaggttttcgcctcctgtttcagcggtgacggctcttgggttttctcggggtggctttttaatattagtcttggcgcgaggcgggggatgctgtgtggcacctcctattgtctctttttgcgttttctcccattctcgctccctctttt

SEQ ID NO: 52910 - DNA, 682 bp, Homo Sapiens
aaaaccatatgtcccagcaaggggaaaagcagtcatttccagattataaaaatcaatgaagtactctccacctaggtcagctgaaattcgagccctcacagtcaggcctgtcagagaagttaagcagaaacatctcggggggacttctaaaatttagtgaagacaaggccttgcaactccaaagaaactttttttcccccccttgaaacagggtcttgctctgttgcccagcctggagtgcagtggtgcagtcacggctcactgcagcctcaagctcctgggctcaagcactatccccacctcaacctccttagtagctgggactacaggtgcacaccaccatgcccagctaaccacagaaactttcatctcttcattttttctttgggcaccattaatacctaagacaggtagaaagggtcccagaaagacaccattggtaatggccgattgccggctgcagtcatcgcccccagatcaggctggtacaggatgccttaaggtgatgagaggtgagggtgcatgaagaataatgagcacagggaagagagaagcaggacaaagtagcagataaaatgccggcaaagcacagatgaatgtcttcaagaagctcttgtatttctctgcacagtgtaaatatccttgctatttcaggatggcggctggcctgctcagtaacata

SEQ ID NO: 52911 - DNA, 940 bp, Homo Sapiens
gagtctttaagcatgatcttttttctgtctagtacttgttttcattctggccagcagttctacattaaatcacctgtcaagggctctgtttacatctatacattttgaagatgaaatttttagccttaaagtttatattctcaagtccttttacaatcagtgtgtctcctgaactagcacacaggctgtagaaacagtcttagaaatcattgaaagatttgattatgaaagaatagcaaaattatatttcttgacatataaaaagttggtttaatgcctttatttctctttaaggaccagaaccaggaatactatatcgaaaaattagtctgtggatttaacactgacttagcatatagcttaaagttgctctttggtttttaacttcctccatacataagcttcaaggacaataagatgttaaaaaggaggaaataattatttttattttgacactgtgacagttttggtaactaggatcctagggagggaaatgtttgcctgttgaacttctttctgttatgagaggatttagttaggtcattaagatgttgatcacacagcttcaatcacaatatgccaagtataacctggtttcgttagaggtgtctacagtccagatgttcttcgtaataaaagcaagttttgaacctctgagtccaaagcaggtggtggattatatgtaattggacaaataaaatcttaattgcagcactatcagtatgttgaatttattatgtattattatcttaaatcggaaataaatttgattttaatatggtgtaattcaagcaatggttaatattattactgaaaaaaaaaaaggcggggttaaattccggggcatgcggtaccttgtaagccaaggcaatatagagggtaaggggaatgtgggatttggaatgacaaacggaaatgtaatttttatatataaagaacg

SEQ ID NO: 52912 - DNA, 691 bp, Homo Sapiens
  misc_feature (620)..(682): n is a, c, g, or t
gcgcgggtgcctttcccgccggggactcggccggtgtgcttcgtgctgtagttatcgttagttcctcttcccgagatggggccgccgagagaccccagcccctttgaaaagcaaggtttgtgctgcgcttccagttccgaaaagcagatgtttaagcccttggactgagggtgggatcgcagctccgaagacggagaggagggaaatggggccctttcccctctattgcatccccctgcccgactccttccccgcacccacgtgccctagattcatggcagaaaatgaccaaatcctgtgtatttgttttatatatttaataactgttttaaatgaaagttttagtaaaaaaaatacaaaacaaaaagattaaattgctattgctgtagtaagagaagctctttgtatctgaacatagttgtatttgaaatttgtggttttttaatttatttaaaattggggggagggcatgggaaggatttaacaccgatatattgttaccgctgaaaatgaactttatgaaccttttccaagttgatctatccagtgacgtggcctggtgggcgtttcttcttgtacttatgtggttttttggcttttaatacagacattttcctccnnnnnnnnnnnnnnnnnnnnnnnnnnnnnnnnnnnnnnnnnnnnnnnnnnnnnnnnnnnnnnnaaaaggggg

SEQ ID NO: 52913 - DNA, 815 bp, Homo Sapiens
cactttcttcacatctgaggtttctttctctaatccactgaaattattgtgtgctaaatttgggaaacagatctattctaactcattaacccagttgaaatttatgtctgtcatcttaatatatcatgcagtaaaaggaagaatctttttaaagtgacccacctttcatgctgctccagcattgtcctgcttgtgctgatggtgtgattaggtgtagagaatttgcttaaatttaacttcaaagttcatcacacagcttaatgagtcacattgaaatactcagtaattgaactgcaaatcacttttagttacaaaaagagctaaagcatgtcagtggcatgatgcttgccaagccagatctaggcatctaggataattaaggtattttagtatgcaatttactgccataatatcaaaggtcagtaacagtgttctttctttcttcaagcttatgtatacctttaaagataacttgcatgaattactttgattactttggtctcaattatttgtcaccccagttaaacatgaaaggttgcagtgcttcctgttcccttactggaagttagctttttcttttctctttcttcctttctttctctcactctttctttctctttctctttctctctctctctctctctcactcactcactcacagatgtgctaatgccacagaaagggctccttttaacttaggataagtgaaaagtactaaaaaagattcaggttatcatcattcagcactttattgtcacttcagaataacattttactgatgggcatatttgccctgcaacatgtcctacatgacg

SEQ ID NO: 52914 - DNA, 976 bp, Homo Sapiens
ccaagctgccccagctccacggagtccggatttttggaatcaataagtactgagagtgcagccccttcccctgcccagggtggcaggggaggggtagggtaaaaggcatgtgctgcaacactgaagacagaaagaagaagcctctggacactgccagagatgggggttgagcctctggcctaatttcccccctcgcttcccccagtagccaacttggagtagcttgtagtggggttggggtaggccccctgggctctgaccttttctgaattttttgatcttttccttttgctttttgaatagagactccatggagttggtcatggaatgggctgggctcctgggctgaacatggaccacgcagttgcgacaggaggccaggggaaaaacccctgctcacttgtttgccctcaggcagccaaagcactttaacccctgcatagggagcagagggcggtacggcttctggattgtttcactgtgattcctaggttttttcgatgccacgcagttgtgcttttgtgtatggaagcaagtgtgggatgggtctttgcctttctgggtagggagctgtctaatccaagtcccaggcttttggcagcttctctgcaacccaccgtgggtcctggttgggagtggggagggtcaggttggggaaagatggggtagagtgtagatggcttggttccagaggtgagggggccagggctgctgcatcctggcctggtggaggttggggagctgtaggagagctagtgagtcgagacttagaagaatggggccacatagcagcagaggactggtgtaagggagggaggggtagggacagaagctagacccaatctcctttgggatgtgggcagggagggaagcaggcttggagggttaattacccacagaatgtgatagtaataggggagggaggctgctgtgggttaactcctgggttggstgttggkagacargttgggaaaag

SEQ ID NO: 52915 - DNA, 447 bp, Homo Sapiens
  misc_feature (424)..(426): n is a, c, g, or t
gcaaaaaaaagaaaaaagaaaaaaaaaaggaaaaaataaaaaaaccatgtatatttgtacaaaaagtttttaaagttatactaacttatattttctatttatgtccaggcgtggaccgctctgccacgcactagctcggttattggttatgccaaaggcactctccatctcccacatctggttattgacaagtgtaactttattttcatcgcggactctggggaagggggtcactcacaagctgtagctgccatacatgcccatctagcttgcagtctcttcgcgctttcgctgtctctcttattatgactgtgtttatctgaaacttgaagacaagtctgttaaaatggttcctgagccgtctgtaccactgccccggcccctcgtccgccgggttctaaataaagaggccgaaaaatgctgnnnaaaaaaaaaaaaaaaaaaaag

SEQ ID NO: 52916 - DNA, 617 bp, Homo Sapiens
gacagtttacctaatggtgccagcctccttttgctttggcaagctggatttctcagagccagcatgttgtttccataactactttgatattttaactcaggtactccagtcttcaccccaacctcagctgattgtagtacacctgctagctctgttgccccctcaaaactgcacccagagcagggccacaagggtgctttttttctttaaaaaaaaaaaaattagaaccaattcatgttcatgccaaaaacaaattgtccccaagcctatatgtattaaaatgttaactttgcctaaaaatattgcagtgactttttaggcaggagtgccaaaggacactatgaactttttgaactgacagtttctcctaactttctgctttagcgtaattgctcagagtagagagcccccacaaagttatttaaaagatgccctagcagcaatccaccagtttttctaagctagaacctttgagtcccccaaactgcctgaagacttaagttttgtgggcactggaagtcactttgatagatggattgaaactgttcctatttgccctgggacggtttctatctatcaaaggaaggttttcacctgtagaaagccccctgcctcca

SEQ ID NO: 52917 - DNA, 653 bp, Homo Sapiens
  misc_feature (505)..(505): n is a, c, g, or t
catttgcatattactatggaagttattcaccttgtccctgtttttctttaagatattttaaaatcatagttatactacagtccttttttaaatgtatcctgatacattgtaaaatattttaatttcattgtggaaaataatgttggataaggagatatttttcactgttaacttttagcccatgcattttcataatttatttttttcacttgctgctttatatgacatatgtgacatttgattatttaacacttgatgtgatctgcataaacccaagttgcacaaccctcctgctgaagataaaattgaggttaaagataaagatttattttcatatttgtacagtgatcggcttcagtgatggtttttgtgggcatttattgtgtgtgtgtaagaaatttcatatgtatatattaagtaggcctctgagtattgaataattgttttatgattttgatttatatggtttacattttcattgtgtgggccatatttcgtttatacntgtttatttctcttcaaaccttaataattataccataaagtgtaatttttatagcaatgcaaatgtctaaggaactacaaatattttctacgttgtaaattcaataaagctgcttcctttggcaaaaaaaaaaaaaaaaaaaaattgg

SEQ ID NO: 52918 - DNA, 495 bp, Homo Sapiens
ccacgcgtccggtggcacagggtgcttttaaaaggaatcctgaccaatggactggtatctgtgtatgagctggattatggcaaacacgaattagtcaacataagaaaagtacagcccctagtggacatgttccgaaagctgcccttccaagcagtcacagctcaacttgcaggagtgaagtgcaaccagtggtctgaggaggcttctatggtgtttcgaaatcatgtggagaagaaacctctggtggcactggtgcagacagtcattgaaaatgctaacccttgggaccggaaagtagtggtctacttagtggacacatcgttgccagacaccgatacctggattcatgattttatgtcagagtatctgatagagctttcaaaagttaattaatgactgcctctgaaaccttgacaactaattcagattttttagcaataacaaaatgtagtaggcttaaaaaaaatcttaactctgctacatggctctgactgc

SEQ ID NO: 52919 - DNA, 568 bp, Homo Sapiens
cggccgccaactttttggaccaagcagttcctttggggtgtggggtgagtgctgttccagacagaaaccaaacctttttcggttgctgctgggtatggtgactacggagcctcatttggtattgtcttcctttgtagtgttgtttattttacaatccagggattgttcaggccatgtgtttgcttctgggaacaattttaaaaaaaaacaaaaaaacgaaaagcttgaaggactgggagatgtggagcgacctccgggtgtgagtgtggcgtcatggaagggcagagaagcggttctgaccacagagctccacagcaagttgtgccaaagggctgcacagtggtatccaggaacctgactagcccaaatagcaagttgcatttctcactggagctgcttcaaaatcagtgcatatttttttgagttgctcttttactatgggttgctaaaaaaaaaaaaaaaattgggaagtgagcttcaattctgtgggtaaatgtgtgtttgtttctctttgaatgtcttgccactggttgcagtaaaagtgttctgtattcattacctcctgccg

SEQ ID NO: 52920 - DNA, 687 bp, Homo Sapiens
gttttatagatatggtaattaatgaaacaactttaaattgtcttccattctttcttcctcagttcatttctttttgtcttcccactgatagtctttggcagctcttgaataaattctacctgttggcatcaaggggaagaaaattagcctggaaatttttatctttacataaagccaattatatagcagtttgattatgaattctaggtggaagaattagaatagtctttggaatgggttttgggtaacagccaaaatagggaaaagggtattgttaggaaagttgtcttgatattaagtatttactgtgagtccagtaagccaaaggaccaaacaaaataggttcagggtttcattttaatctcaaagattctgattcttacccatatgtcatcagttcagtttgggacatgtggtgcagcatgtgtgaagaaaatattcattaaaatgtaaaaataaacacttgaaattgtccacaacactgagcaaatattcgttataattaggatgcctacctttctgggatatttgtaaggtgctgtagtttttttaacatgctcctgaatctcctttattagttgttcttgatcatgtgacttgtaatcaggatttagaacgacaaaagcctttactacgctaaaattaaatatttcgagaacaccaggaacaaacaacaacaaaaagggg

SEQ ID NO: 52921 - DNA, 903 bp, Homo Sapiens
actaagatagggttactacttgagttgctatggctccagctgaaagaaagcccgtgcagtcatatcacgcgtaaacatttgctttatgctaaaaatatggtggacctggcattacagctattacaaatctcctaagatgtctcgggtagtgtattagttacttttcatactgctatgaagaaatactggaaactgggtaatttataaagaaaaagaggtttaatgtactcacagttccacaaggctggagaggcctcagaatcatggtggaaggcaaagaaggagcaaaaaggtatgtcttccatggcagcaggcaagagagcacgtgcagggaaactgccctttataaaaccatcagatttagtgagatgtattcactatcacgagaacagtatgggaaaaacctgcccccatgattcgattacctcctaccgggtccctcccacgacacatggggattatgggaactacaattcaagatgaaatttgggtggggacgcagccaaaccatatcgggtagcaacaacctagggtcagttttgcaggtggtaaagccatttaccaagatagttgtaggtaaagaagggcagatttattagagaaattgtgaaaatatgttgcagtgggcagctcagcagagaaggggctacctgcaaagaggcaagggctggaggaaagttttatagggtcctgctgaagggtgctacgtgtggaatgaggtcattgtgcccgcaggttgtttgtgattagctgtctctaacaattgttcatacaataattgttcattattgttctcaacttggggctctccccaacctggggacccttccttattgttgcttacttatcaggtctccacataaaggtgtggaaacttcattcattcatatcttcaacacaaat

SEQ ID NO: 52922 - DNA, 636 bp, Homo Sapiens
cgcgtccggtttgtttgtcaaacatgtggaaagcagtttttaagagagcgtcagttgcgactgcacaatgatatgcacaaaggcatggccaggtatgtctgttccatttgtgatcaaggaaacttcagaaaacatgaccatgtacggcatatgatttctcatttatctgctggtgagactatatgccaggtctgctttcagatattcccaaataatgaacagttggagcagcacatggatgttcatctgtatacatgtggaatatgtggagcaaaatttaatttgaggaaagatatgagatcacattataatgccaagcatttgaaaagaacctgagtgattttctactgtactaatgtttagatgatagcagataaaacaccaaagcaaaggatatgagctatttaggaattgattatataagatgatttgttagaaacaaatttcaaggcccttttaactttaatatttttgtttaggattttaagtatctacatttaggtattaaatgtttatcatttttgttgtttcttaatagaattatttgtttttagtttttcttagctatgattaaaatttttaaatgtagactacaagtggttgttacccattcaatgactattaaactttagtttt

SEQ ID NO: 52923 - DNA, 698 bp, Homo Sapiens
  misc_feature (657)..(657): n is a, c, g, or t
ggttcggagaaataccaagccgtggctcagcggcttcagtgttgcaatgctgggggcactgagcctagtgggtgtgaacagtggacagactgctccctactacgctgccctgggtgctgtaggagcccatctgactcaccagatttacactctagacatccacagacctgaggattgttggaataaatttatctccaaccgaacactgggactaatagtttttttagggattgtccttgggaatttgtggaaagaaaagaagacagacaaaacaaagaagggtatagagaataaaatagaaaattaatgaatgaaatttatctaggaatttttaaaacattttttacaaaatataattagatttgaatacaaaatctgatacaatatgttaaagaattaagaacctgaagatgaagatttagagcatatttacctggattttacttatttgctagcaaaattcccccttgtcacagaaaccagggactcttcaggatttgagatggccttgagtattttagttgatacattcttctgcccattataattctcacctgaagttatggggattgcacgggttttggcactttagaaaaagcctgatgtgggtcttacataaatgaatgtctgtataagaaaatggactcttttttttanggaaaaataaaagcaactatgggaaaaaaaaaaaaaaaaag

SEQ ID NO: 52924 - DNA, 922 bp, Homo Sapiens
aagggataacatatgagtttgcttgttgtccttatgggattcttctctttttatagctggacgccctatagggctcttggcagtccacgaaagacctggagtccgcctccccatttctccggtcggtgagtggcaggaggaaatcgccaaacatgttttcccgctttgcctccccaactcggaaacttgcaacttgccgtgtcctggaggttgagacaatttggggtctcttggctgccgtccaacagatttatctctgagggcagtgtccttggtgagaggtccaagtaggtgtgggcgacattttcctccatctcatgagggagcagccctgcacactagggcccaaaactctgcgaaggagcttggaagttcttcatccgttccacttgttttgctactccacacacccttctaggacatgttgattgccaactgctctgtgcagctttcccatagctgtctgttcccgtgcatttcggagcaccaagcaaatacgagcagagagacctggaaaaaaaaatgatgaagacagtattaatgataaaattaacatggctgagtgaattgtcaatgcaagttcctttactaactctttgttaagttttgctttgtactccttacatcctctttctcttaagccattgttttaatttcttctcgttatcatttttaaaagtaacagaaatacagctttcttcctaccttcacgattgacttggtggaggttgggttgcaaagaggaagcagtaagaaaaaataattattctatacattcacaagtccttcaaggcacaaataaaagtaaggaattgaaaatttgtcctttctcctaataaggtctttataaaaaatttaaaggaagttttgtgtttcattaccagtttcccaaatactgttggaggatactaaaatgtgcctg

SEQ ID NO: 52925 - DNA, 718 bp, Homo Sapiens
  misc_feature (697)..(697): n is a, c, g, or t
cacaaaaggaagtcctggggttgatgtgtttgagcgttaggcgaagtggttccccccatcccccaaacggaaaaatgtcagtatttgctaagctgtagagacctgatgccgtgatgtggcctgttccgcctccacccattacacggggataacgctggggggtggcgggcccacaaaagaggtgctggaggagactctcccacccctggccgggccggggctttggggccggaaggttcacagtacgcggtttgtccgaacgtcacggcttttattgggagttgggggtttggggtgccctgtcaggtgatcagaacattaaaaatggactcaacgtaaaataatcttctggacccttctaggacgacatggccgtgaccggtagtgctagaaaccagtcttcgagcccccagtgccacaccatgtccccccacctgcatacctgtggtctccccctgccaggcaccctgtgctgggcacagggacatccctgccaggcctagagggccttgtgtttttaaggcagtcaaatcttgcagcctggttcagtgccagctccaagggctattgggtagctgcaagggtcaattatgcattcctgtgagtcaggtttttccaacccaggcccttgactctgccctgagcttgcagctggatacaaagtgcaaaaaagcttggctccttctgtattctttanaaacaaaaaaaaaaaaaaaaa

SEQ ID NO: 52926 - DNA, 548 bp, Homo Sapiens
ttttttttttttttttttacacaatcattaatgagatttgtcttcagccaccagtgttggccttgaagcagagggcacagcccttggtgtttgtaaaataagtatgaatacacagtgtggcagtgttgtggtttttgttgttgtttttcctctccttttgagaattttcttttgtaaaagaaaaatattttttaaaccgaaatctgtggatgaaatagaagctggagccctcctcttggaatattcagcctaagaacctcataggactatgaattcacccgaaattctcatttgccatcaggccgagcttttaaagaaaaattgttctctaaccaggattgtaacaaaagtgtaaatactgtttcagagttgagagttggtggtgcaaatatgtatataatgaactgtatttttacaatgatcgccgcatgactatttcacaccctttttatactccatatctgtcttccagaaacgtcacctgcctttctcctgtggtctcttaatccagtaattgtattactgccattaaaggatgcagttatttt

SEQ ID NO: 52927 - DNA, 658 bp, Homo Sapiens
agactgtgtagggaatatgatattttagggacaaagctgaggactggttttaaataggctttaaaataaaagatcaatattatcataatgctatcattctgctaaacggccccaaaacagtagaatttctgctcatgtcctagcaggttcagaagactgcagccaagttcagatgtaaaaacaagaagtagcacttttccaaaggaaaacaacaaaacaaatgggaaaaagataatggaccgcatttcacctattttaatactattttaacaattttttcatctaccaatatatccccaataaataaatataaaagggggggagggtcaatctggggaatcttagttttttatgttttaagaaaacaaaaaaaactgcattatttttgtaaagtatttattgagtcacggattattgtgcatcaagcaattgttaatatgacctggtcctatggggtagaacttaggaaaaataaagttggttcttattcaatattttactttgcaaaattctagtaaaagagagtatataataaaatcataataaaaggtgaaacaacaaaaaaaaaaaaaaaaaaaaaaaaaaaaaaaaaaaaaaaaaaaaaaaaaaaaaaaaaaaaaagaaaaaaaaaaggggggggggggggaaaaaaaccggg

SEQ ID NO: 52928 - DNA, 772 bp, Homo Sapiens
  misc_feature (660)..(660): n is a, c, g, or t
ttttttttttttttttttgagatggcgtggtggtgggcgcctgtaatcccagctactcgggaggtttaggcaggagaatcgcttgaaccctggaggtggaggtggaggttgcagtgagccgagatcgcgccattgcactccaacctaggtgacaaagctacacgccatctcaaaaaaaaaaaaagaaaaagggttacaaaaggttcccagctccggggcatcagcctgagtgcgcttgagctgctccaaacctggcccttccccactactctagcattgctacccgcatggccctggaactcccgcggcggcgggggcgggcccgtgcctgctgtgccccgacttcccacaccagccgcgcccaccgcaggtgggactcaggttcaccctctgggccaggtccttcacgaggagggagctacccttcgccagaagtttgtgagaatgtggccgcccttttcctgccctctgccccatgtgggtggggggcctcgtggcccggccggcgccccgtccccttctgcatgtctgaggccaccggcaaccgccgccccactccagatttgcccccgccctgttttgaaagccccttatttataacttttatactttgtgcaggtcgcggcgcttcctgcctcatcctcggctgcatggggcggnggcgctgtttttaacgtgcccgtttgtactgatgtatgaacttgtcaatacaacaattgtttgttaaaaaaaaaaaaaaaagctacagctcgtgccgaatcttggctcgagg

SEQ ID NO: 52929 - DNA, 953 bp, Homo Sapiens
cgtgttttatccaacagacgtataggagaaaatttgaatgcctcagcaagttctgtagaaaatgagccggcagttagttcagcaactcaagcaaaggaaaaagttaaaaccacaattggaatggttcttcttccaaaaccaagagttccttatcctcgtttctctcgtttctcacagagagagcagaggagttatgtggacttgttggttaaatacgcaaagattcctgcaaattccaaagctgttggaataaataaaaatgactacttgcagtacttggatatgaaaaaacatgtgaacgaagaagttactgagttcctaaagtttttgcagaattctgcaaagaaatgtgcgcaggattataatatgctttctgatgatgcccgtctcttcacagagaaaattttaagagcttgcattgaacaagtgaaaaagtattcagaattctatactctccacgaggtcaccagcttaatgggattcttcccattcagagtagagatgggattaaagttagaaaaaactcttctcgcattgggcagtgtaaaatatgtgaaaaacagtatttccctcaatgcctataaagttgcagctgtcaaggacgatatagctaccattgaaacgtcagaacaaacagtgaagctatgcatatgatattagtaagatccaatgcgagaagctggttccagatatttacctcagatagtctaactaggtcggcataattaccttattatatctggggcacgtaagaccggggaatccggggtcagacacccgtgcggtcaaccgtagattttttatacactccggaatgattagaagaacacttttagaccaatagcgacgacatgtcgctgctagaacacaatatatacatcgtgggcacgcaagagaacattcagggttcgacgccctcgtttctttcccttctttttttgtcaatattttga

SEQ ID NO: 52930 - DNA, 898 bp, Homo Sapiens
  misc_feature (859)..(859): n is a, c, g, or t
  misc_feature (873)..(873): n is a, c, g, or t
cgtggacatctgtctggaggagcaattttactgcgacattttaaagaaacaaatttaattgatttccaagggtgtccatcgcgcttccttcactgccttgatcatgtcggggtcaccacctgcgggggtttgtcctgcagaccctgactcaacgacggatgaataatgtacactgacacagatcttatgcttgtcagtcctgctgagcatccaggccacttacagactccaagaagagtcctgtcagccacggctctgacttgttggccctcccggcatttatttagcacacatttaatgacagaagtctcaggctggaaacactctttttgtagaacatacaaatggacatttctaagcacattgaggcctataatgaaaaatcaaatatcccacaatgaaaactagaaggaagctatctgtgataatgctttgtggtgtatggattcatctcactgactgaaacctgagttttgattcaccaggttggaaactctttctgcagaatctgcaaagaaatatttctgagcccattgaggcctacagtggaaaactgaatattctgtgataaaactagaaacaccctatctgtgaaaatgctttgtgatgtgtggatttttctcatcgaatggaacctctgttttgactcacaagggtgaaacactattttagtagaatctaggaagaaacatatctgagcccatttatgcctacagtgagaaactgaataccctgcaataaaaagtagacagaagctattttgtaaaatgctttgtgatgtgtggattcagtgttaaacttttatttttgatccacagtttttgacaccctatttgtagaaatatatgaatgaacattntctccagccattgnagggcctatcatgttgaaaccaaaa

SEQ ID NO: 52931 - DNA, 625 bp, Homo Sapiens
gacggatgaaggggaatgacggaagaattcctgcggtaaagtgctgtgaagacactcctgttttagaaagagctctctagccgcagcaaggaggattaactggaggcccaaggagtagtctggactttggggcagtaactttaggggggccctgagggagagctggtcgcgaggacagggacagcaggcagaggttgtggcccacagcaactcgcaggagaggttgtgaataattcccaggtgatgagtgtgcagctttgaggaatttcaaagggttgcttggcgtcttttcctgaagacacttctataaggtatttagaaatctatcaggagtgagaatcaatccagtcagaaaattttaggcatttgggcaactgcattcagaaaacagctatttatttggaatgcataataaaagccatgagactgaatctccatgcctctttgccccctagtagccttcaagaagtctcaacacagggttaccacagatttagccaggatgatgtgtagcagcttttcttggaacaggttgatggattaaaataactttttttcagctctaatgtttttttcttgaatttgccagtcacatgataattttcttcaaaaataaaactttata

SEQ ID NO: 52932 - DNA, 594 bp, Homo Sapiens
  misc_feature (538)..(538): n is a, c, g, or t
ggatgtggtcgtctccctggtcactatcatgttggacacgggcctgccctgttttcgcggccaatcaagttcttgaagcacaggtttagccccaacatgactgagcgcgaggctgcaaatttcatcatgaaggtcatccagagctgcttcctcagcaacaggagccggacctacaacatgatccagtactatcagaatgacatcccctactgaggaggggaccttcgagggcctctgccccatgtgcccttgaagctgccccacaatcatggagccctgcgacctacccgccctgccgccacatgcagtggaggagaggcctgtggcccgaagagcctggtagcgcctcctggggcagcacgtgggtggcgcaggcttagtaacgccgtggactgcagcgacaatcagtggatggtgctgtctatgcacaggtgtcagtcctctgtttgcactggacatattccctacctgttttatttcataggtacatgaagtattgtgtataaaaaaagagataagatttaaccaacatcaacanaataaaaacccaaaatagtaaaaaaaaaaaaaaaaaaaaaaaaaaaatgcggcatt

SEQ ID NO: 52933 - DNA, 674 bp, Homo Sapiens
ttttccgtttccacatagacaatcacataatctgtaaataatgactcttacttttccactttagtcgttaggttatacctatatatatattttcttgctttactggactaatttcaacctccagcacaccaccaatgaatagcagtaataccagcataattgtctgcagttctgctgagatacgtgctctattttattggcttggctgtaggtttttattttattttttgaagaggctaatctcttacaggaaaggtttctttttatatccagtttttacatgatgaatgatttcccagtatttcataattcatgaggctgaattcctcttgaatttattaaatgcttcctgtgcatcctctgtgatgatcatgtttatttactgctagaactcaagtacctagaactgttcctggccaatgatggtatgtaataaatacttcaatgaaatgatgtggtgatgcatgtctatagttctagctacttgggaggatggcctgaacccaggggttctagaccagcttagacaacttagcaggaccccattttcaaaaaacaaaaaacaaaacgaatgaatgaatgcatggaaggactcaatctttaaaataaatgtggtcaggttgggtgtggtgcttcatgcttgtaatcccagcactttgggaagccaggattgg

SEQ ID NO: 52934 - DNA, 628 bp, Homo Sapiens
ggccatcattcgagagcagcagacgcggcccatctggacggcggaagatcagctggatggctccttggaggacaacctagacctccctcaccacggcctggccgacagctccgctgacctcagctgcgacagccgcgttaacagcgactacgagacggacggcgagggcggcgcgtacacggatggcgagggctacacagacggcgagggggggccctacacggatgtggatgatgagcccccggctccagccctggcccggtcctcggagcccgtgcaggcagatgagtcccagagcccgagggatcgtgggagaatctcggctcatcagggggcccaggtggacagccgccacccccagggacagtggcgacaggacagcatgcgaacctatgaacgggaagccctgaagaaaaagtttacgcgagtccatgatgcggagtcctccgatgaagacggctatgactggggtccggccactgacctgtgacctctcgcaggctgccagctggtccgtcctccttctccctccctggggctgggactcagtttcccatacagaacccacaaccttacctccctccgcctggtctttaataaacagagtattttcacagaaaaaaaaaaa

SEQ ID NO: 52935 - DNA, 518 bp, Homo Sapiens
gcaaggtcaataagagttacatcatcgaatgatcgatgtgtgtcggctgagacaaggaggaggtggagaggatggttcatgaagccgagcagtacaaggctgaggatgaggcccagagggacagagtggctgccaaaaactcgctggaggcccatgtcttccatgtgaaaggttctttgcaagaggaaagccttagggacaagattcccgaagaggacaggcgcaaaatgcaagacaagtgtcgggaagtccttgcctggctggagcacaaccagctggcagagaaggaggagtatgagcatcagaagagggagctggagcaaatctgtcgccccatcttctccaggctctatggggggcctggtgtccctgggggcagcagttgtggcactcaagcccgccagggggaccccagcaccggccccatcattgaggaggttgattgaatggcccttcgtgataagtcagctgtgactgtcagggctatgctatgggccttctagactgtcttctatgat

SEQ ID NO: 52936 - DNA, 634 bp, Homo Sapiens
  misc_feature (591)..(625): n is a, c, g, or t
  misc_feature (627)..(627): n is a, c, g, or t
gggagatagaaaaggtagttataacttgaagcatgtatttaatgcaaataggcacgaaggcacaggtctaaaatactacattgtcactgtaagctatacttttaaaatatttattttttttaaagtattttctagtcttttctctctctgtggaatggtgaaagagagatgccgtgttttgaaagtaagatgatgaaatgaatttttaattcaagaaacattcagaaacataggaattaaaacttagagaaatgatctaatttccctgttcacacaaactttacactttaatctgatgattggatattttattttagtgaaacatcatcttgttagctaactttaaaaaatggatgtagaatgattaaaggttggtatgatttttttttaatgtatcagtttgaacctagaatattgaattaaaatgctgtctcagtattttaaaagcaaaaaaggaatggaggaaaattgcatcttagaccatttttatatgcagtgtacaatttgctgggctagaaatgagataaagattatttatttttgttcatgtcttgtacttttctattaaaatcattttatgaaatccagaannnnnnnnnnnnnnnnnnnnnnnnnnnnnnnnnnncntgtcggc

SEQ ID NO: 52937 - DNA, 650 bp, Homo Sapiens
ccgtgctgagataattaagttagatactaatatgaaaaagaatatttgtgtaaaatattttgaagttgtaattagtgtatatacaagttgttaatacttacgaaaaaaggaagcattcccacctgtaataattttgttaacactagactatcagtaaattatcaagaataaaaaccttggtttttctgtaatatttgccactgagcaatttttattaaaaaccaaacagaagtatttacacaagaacaagtgaaattacacaaaatgataatggggagaaatttctcatctggtgataaagggaaaaagataatgtaaaagcagattgctgctatttgcataataagcacttgttgaagaataaatgattaagttcaatatttttgctctattttatacctactcactttggtggaattagttctccatgtaaagtatctttttaatagtaagcaccatttaataatgaaacaactcatatgttttgtaatccttatggagaattacttcatgtgataattatagtctcttcatggaaaacagtaaaaatactcacgtttatgatgatgggcctaggtactaaattcctcattcaatctttttttaccaaatggtacttaataaaatcttttaccttataaaaatctatt

SEQ ID NO: 52938 - DNA, 414 bp, Homo Sapiens
  misc_feature (8)..(8): n is a, c, g, or t
  misc_feature (13)..(14): n is a, c, g, or t
gtactctnattgnngttatgcttttaataagaccttcccagataataatcttggagctcttttcccagctgtctaccatgcatttgcaacaggaggaagatgtaatgaatatgcagtattaagttgatttatgaacagtgctttgatatgccaaagggaaaactgtcccacttaaattagattaagtagggtggctaaaaataaataaaaacactggaaattctttctctcactttctcttgatgcaatgaagggaatatgacactacagtatacagagttgttgttatatgatgcacaaaatattttgatgatttgaataaatgttaacttttaatctgcgccttaataatgactggttatctgtaaatatagaacagatacagattgtatttttctgtgggtttttgtcctt

SEQ ID NO: 52939 - DNA, 698 bp, Homo Sapiens
gtacttatctttatttgtaataatttagtctgctgatcaaaagcatgtcttaatttttgagaactggttttagcatttacaaactaaattccagttaattaattaatagctttatattgcctttcctgctacatttggttttttcccctgtccctttgattacgggctaaggtagggtagagtgggtgtagtgagtgtatataatgtgatttggccctgtgtattatgatattttgttatttttgttgttatattatttacatttcagtagttgttttttgtgtttccattttagtggataaaatttgtattttgaactatgaatggagactaccgccccagcattagtttcacatgatataccctttaaacccgaatcattgttttatttcctgattacacaggtgttgaatggggaaaggggctagtatatcagtaggatatactatgggatgtatatatatcattgctgttagagaaatgaaataaaatggggctgggctcagtggctcacgcctgtagtcccagcactttgggaggctgaggcaggtggatcacgaggtcaggagatcgggaccatcctggctagcacggtgaaaccccgtctctactaaaaaacagaaaattagccgggcgttggtggcgggcgcctgtagtcccagctactcgggaggctgaggcaggagaaatggtgttaa

SEQ ID NO: 52940 - DNA, 794 bp, Homo Sapiens
  misc_feature (23)..(24): n is a, c, g, or t
  misc_feature (39)..(40): n is a, c, g, or t
  misc_feature (49)..(49): n is a, c, g, or t
  misc_feature (651)..(651): n is a, c, g, or t
  misc_feature (750)..(750): n is a, c, g, or t
  misc_feature (790)..(790): n is a, c, g, or t
  misc_feature (793)..(793): n is a, c, g, or t
tgtcagtagtggtaggcatgtgnnacttttaacaccatnnttggtttgnaaactaatgtagagatgcctgattccaaacaggtgtggagaatattgaacggctcagaagccgcgtcccttacttaacacaattccgaatctccctcatccatgatgcgtccattggatcactcgctggtggtcactgtgtggcagttactaggggaattctgcctctgactgttctttttcttttggtctttaaacaccctgtcgtgggatgtgctcactgatttgtggctatgttgaaggtatcacttgtcttgagggttttcaatatttcaggatcatgctggtggcaaaaggactccatgcctctgtggaatcatgtccacagggggacctgcctcccgtgatgtcccacctttccttcaaggtctgtcatatgagtcctccccttttacaacacttattatggtatttttcaagttattcttcttagatttgcagtacctactgaaatttgtgtttttatagttgaagttaggaaaatgctatttgatttgtaattagatatttaagtcacttgtccaatgatgtgtatgtctaagcctcatgtaccgatttgaagtcagacttaaaaatgtatttacagattcacttgagactttntaatcggttcttcaaatatttcatgtttacattaaaaatttccagagaagcataaaagtattcactttcctgccttgtcatttctggaaagattttggngagatattttattgcatataattaataaaatggtctactnggna

SEQ ID NO: 52941 - DNA, 741 bp, Homo Sapiens
  misc_feature (601)..(601): n is a, c, g, or t
  misc_feature (706)..(728): n is a, c, g, or t
  misc_feature (730)..(733): n is a, c, g, or t
gggtacgttgtgtgcgtatgcactaacttcataaaacaactctataaagttttttgtcataaggtatcgtgaaaattgcaaagtgctatccaagtgtaaaggattattattattgcagaattttttttttcttttgtaactgaacaggccttaaggtactcagttgtttctcataattcctttaattaccaggtgtccttgaatgcttatcatggaatgtgagatactataattaacatattttggttttggaatatccactccacctgttatactagtgttcttgtgggaattttatcagttatatttggggaaagcacatccagttttccgtttggacattgttaataaatctgaggtgggtttttcccatactcctcatgctaactttgtggtatacttttggttttaaaaaatgtatcttagtgttttttttgttaaaatagctttcttttattagggaacttttgagaagttaaaaattctgcttctgaattgtatttgaatagtatgggcttacaacaaaaaccagataattcttgcttctattctttttgaatattttttcccctctaataaagtacttggattcgaatacacnttccttttttgagtgaaatttgtttaattaggatttaataaaagcttctttactagagtaagattagtttggtgtgtccttcaaaatataatggttttttttctnnnnnnnnnnnnnnnnnnnnnnnannnnaacatggt

SEQ ID NO: 52942 - DNA, 505 bp, Homo Sapiens
gctcgactaattttcggatgggagagtttctttacacttgccgtggatcttaaaagctatcttcatgtaaattgactgtactaggcctactggggatcagagttcccaagaaaggaaaccttttcttgtatctggattcaaatttatttccaatgtttcaagcgggaaacatgactctttattgtctgtaaatctaacattattacttttcctcttagaagaatattgtattgttagatgtttgttgagctggtaacatcgttgcaaccactgcaatatcttcgttagtaatctgtataatactttgtatacaagtactggtaagattgttattaaatgtagcttcagtcattaaattactatagcaaagtagtacttcttctgtaatatttacaatgtattaagcccacagtatattttatttcaatgtaattaaactgttaacttattcaaagagaaaacatctcatcatgtctattgtccaaagttacctggaatcaaataa

SEQ ID NO: 52943 - DNA, 520 bp, Homo Sapiens
agaaaaaccttataaatgtagcaaatgtgaaaaaacgtttagtcagaattcaacccttattcgacatcaggtgatccatagtggagaaaaacgccataaatgccttgagtgtggaaaagcctttggccggcattcaacccttctatgtcatcaacagattcacagtaaaccgaacacccataaatgcagtgaatgtggacagtcctttggtaggaatgtggatctcattcagcatcaaagaatccatacaaaggaggaattctttcaatgtggagaatgtgggaaaacgtttagttttaagaggaatctttttcgacatcaggtcattcacactggaagccaaccctaccaatgtgtcatatgtggaaaatctttcaagtggcacacaagctttattaagcaccagggcactcacaaaggacagatatccacatgatgttaattggaaagcagtcattggagaactagaacttataaacctctacttcaagtgtgtatcacgtaattgtttccatgaaaa

SEQ ID NO: 52944 - DNA, 756 bp, Homo Sapiens
gggagggaagagaatggttgcccgtattcttcctttcctctccacagagcaagcagctgacattctcatgacaacagccaggaacctccctttccttatcaagaaggatgcacaagatgaggtgctgccatgcttactgagtcccttctctctccttctctatcatcttccatcagtgagtatcaccagccttttgcgacagctaatgaacctacctcaaagtgcagctacaccagcactctccaatcctcacctcactgctgtgctccagaacaagtttggcctgtcactgctcctcatcctcctgagccgtggtgaagacctacagagttcagaccctgctacagaatcaacacaaaataatcagtggacggaggtgatgttcatggcaacacgagaacttctgcggattccccaagcagccctggccaagccaatctctatacctacaaacctagtgtccctcttttctcgctatgttgaccggcagaaactgaacttgctggagacaaaactgcagctagttcaggggatacgataaaagatctccaaatgtgtcctgtacctccttttggctgccacctgcactgctgccatcaccaatggagtgtttttaatgagggaaggaaggtagctttttccccaaagcaaagtcttggtgggatcgattccctgtttacagggggttggtctctctaaaatgtcagaatatttcccccactggcctctatggaaattttgggctgggtggatact

SEQ ID NO: 52945 - DNA, 529 bp, Homo Sapiens
  misc_feature (279)..(279): n is a, c, g, or t
ttggaccacgaggcaccatctctccaggaggctgccttaacagcagcgtgctccaacaggctctgcaggctgccttccttcatctccctgcagtcctcgccgagcccaggagcccagcccagggtccgggcccctagggcccccctcaccaaggactcagggaagcctctgcacatcaaaccacgtctgtgaggaccccagggaccggcctgcacctacctcagaccctcatccttggagaggaaagaggctctgtccaccactctaccccacataganggccgcccgccaccaagcctcacctgggggtcacagggacactgctctgcctgcctggccctcaaccttccatgaccagcgtgtgcgcagggcctggtcttcctcccccaagccaggcccctgtccccaccccaccaccttccagggtgccaggcagggctggcctccaggcctgtccccgactgccattggcaacagtggacctgcagcccccagccctccccacccaggttttcggcccagtgaagag

SEQ ID NO: 52946 - DNA, 737 bp, Homo Sapiens
aatagtagtgtcaactgtattatgtagaaattctaaagtttttgggattatttcatagccctgaccttgctacttctctccactttatgtggcaggtttaatctcaggtctccctcatacacttctcagcctcagcacctaaccctcacacaacactccagtattgatgcagtcaatcttgtataacattttttgaatgtccaatgtgcaaagcacgatgttggaaattatacagaggtgaataagacaaaaactcttgctctcaaagatgtcagtctttttctttgcaaggataacacatgtagagtaaaatgcataaaggggactaattttaaatgtacagcttaattaatttttatgtatgttaacacccatgtcaccaccatgtttaggacatttccagcacccctgaaatttccttcatgccccttcccagtctgtacctacacctctaaatctattttcaatcttaatggccttttaaataactgggcttctcacaaccatagtgaacagaaacagctgggttgtcaacgtctaacctaatacttcaggaaaactcatgatggtttccatgttaagagagacatggagcagggcactggcatggtggatggatcacgcctgtaatcccagcactttgggaggccgaggtaggggggattgcttgagcccaggagttcaagactagcctgggtaatataaggaaaacctgtctctgcaaaaaaaaaaaaaaa

SEQ ID NO: 52947 - DNA, 755 bp, Homo Sapiens
caccaaacaagtctgaacaattctttatgtgatttatttttaaagtagaccttttgaagagatctatgaatgggatataaagcaattttcagtgttacaggttttcttcttcttctcaaaactgtttgctgtaagtaactgcaatcagtacttactactttccatttgcttatgagtttcttgacaaatcaaggtgtagaaaaccagttattaagtgattttgtactttcctggtagttgtcactaaaataatttttgtggcatataaatatatttaataaaatgcaaaaattatcttcctgtctagtagaaaaaattacatgagtaaagtgaagcttctgtctttgttactgtaccaggtgacaacagctgagtgtccctccatggacagtcactattggccttttgagtgagacagttctttaggataaaaacctgtcatcccattgcaggattcatttagcctttctggcccttacccactgatgctagtcattgtgaccaccccacctcccccaaataaaagtgtgccaaactattcattgttgagaaccattcaattgtattcaccaaaattggaggatatattggaatgccctaccttaatataggtcacatagcattagagaaaattggtttggagagtattacagcaaagtgtgctgcaaggaggctactccagcacaatggcaggcactgcttcccaggcatatggacaattctgggaggtggccagggtcagtacctgataacta

SEQ ID NO: 52948 - DNA, 661 bp, Homo Sapiens
ccgcccagcatgttagacaatttttaattcatcctctctgtgctgttgttttctcagctgtgaaaggaatattctggtggggacaaggttacagagttgctgagagggtctcatgacatgaaggtactggccttggcacagtgcctgggggggcggggactccgcacatgcctgtgatgtcacagttactgtcagttcacagcgaaccttccctccttttcctgttgactttcccacactcctgtaaccctccctccctcccttcttcctctctctctctctcactcacgcacacgcacacacacacacacacacacacacacactccattctctgtctccatgactctggagtaaactaacgtctcgagttgccattggaagccccattgtcctcattttgttttgttttgtttgtttgagacggggtctcgctctgcaccccagcctgggcaataagagtgaaactccatctcaaaaaaaaaaaaaaaaaaaaaggtgcatgaaacatatgaagcaaaaagtgaaagtccccattcttttcctttttccagaggtgatttttgtggccaatctggtttcattccctcccagacacttttctaggcatctatgcgcctcttttcacatataaacaaaataggagttttcctgtgcttccc

SEQ ID NO: 52949 - DNA, 620 bp, Homo Sapiens
ttaattagacatagggtatatataaactcaattttatctgcatttttttaaaaattgaaataatctgattgcatgtatgaaggactcctgcctcattacccaattacataaatacaattatctataggaaggtgaaattgttgatctattatttcaaagacttgtagactagcaaagattcattctgattagaaataaggtctatagctaaagatatttttattttaaaaaattacagcccttgtaacaaaaatcatttgtaacattggatatgaagacattattagtatttaaaattattgtagtcatttgatcataaatgaagtagcttgcaaaatagacttggtctttgaccctttaaggtgtaactgactgactgttgtgtttttcaagactgattttaggcagttttatgtatcgtgtaccaatgatatgtaaaataaagcaccttttctactataaacaaaaaataaaaaaaaaaactcgagggggggcccggtacccaatttgccctatagggagtcgttttacaaatcactggccggcgttttacaacgtcgtgaatgggaaaaccctgtcggttcccaacttatttgcctggcaaaacatccccttttgcg

SEQ ID NO: 52950 - DNA, 767 bp, Homo Sapiens
gcacgtttgtaatcccagttactcaggaggctgaggcacaagaattgagtatcactttaactcaggaggcagaggttgcagtgagccgagattgcaccactgcactccagcttgggtgataaaataaaataaaatagtcgtgaatcttgttcaaaatgcagattcctcagattcaataatgagagctcagactgggaacagggcccaggaatctgtgtggtacaaacctgcatggtgtttatgcacacagagatttgagaaccattgttctgaatgctgcttccatttgacaaagtgccgtgataatttttgaaaagagaagcaaacaatggtgtctcttttatgttcagcttataatgaaatctgtttgttgacttattaggactttgaattatttctttattaaccctctgagtttttgtatgtattattattaaagaaaaatgcaatcaggattttaaacatgtaaatacaaattttgtataacttttgatgacttcagtgaaattttcaggtagtctgagtaatagattgttttgccacttagaatagcatttgccacttagtattttaaaaaataattgttggagtatttattgtcagttttgttcacttgttatctaatacaaaattataaagccttcagaggggttggaccacatctctttggaaaatagtttgcaacatatttaagagatacttgatgccaaaatgactttatacaacgattggatttgtgacttttaaaataattattttattgggga

SEQ ID NO: 52951 - DNA, 420 bp, Homo Sapiens
  misc_feature (242)..(242): n is a, c, g, or t
  misc_feature (310)..(310): n is a, c, g, or t
  misc_feature (345)..(345): n is a, c, g, or t
  misc_feature (399)..(399): n is a, c, g, or t
  misc_feature (418)..(418): n is a, c, g, or t
ccacgcgtccgtgaagagacagtgctgtagccttgagactaatgaacaaagaaacctgctctagttttacaggaccatattttagggtctgtcctcatacctgtcacattggtgatctcacagaggagggccatgccgctgaaaagggaaggagattgaaacatttgattgccttatcacatggtcaagtaccttgccaaataaaggaaagcaaatgatttgggtctcaactgaagatgaanctcaactcaggaagagatttatctgtatatacacataactgaaaaccaagtttaagcccaccaatgcnctgctgatgcatgccatataattaatgggtaactnttattctttatgatgtctacataacaagtgtgatttggaaggcacatgtgagcntatgcattatgatccaatnta

SEQ ID NO: 52952 - DNA, 840 bp, Homo Sapiens
gcacagtgtttaaggatgacgacgatgtggtcattggaaaggtgttcatgcaggagttcaaagaaggacgcagagccagccacacagccccacaggtcctctttagccacagggaacctcctctggagctgaaagacacagacgccgctgtgggtgacaacattggctacattacctttgtgctgttccctcgtcacaccaatgccagtgctcgagacaacaccatcaacctgatccacacgttccgggactacctgcactaccacatcaagtgctctaaggcctatattcacacacgtatgcgggcgaaaacgtctgacttcctcaaggtgctgaaccgcgcacgcccagatgccgagaaaaaagaaatgaaaacaatcacggggaagacgttttcatcccgctaatcttgggaataagaggaggaagcggctggcaactgaaggctggaacacttgctactggataatcgtagcttttaatgttgcgcctcttcaggttcttaagggattctccgttttggttccattttgtacacgtttggaaaataatctgcagaaacgagctgtgcttgcaaagacttcatagttcccaagaattaaaaaaaaaaaaaaaagaattccacttgatcaacttaattccttttctttatcttccctccctcacttcccttttctcccaccctcttttccaagctgtttcgctttgcaatatattactggtaatgagttgcaggataatgcagtcataacttgttttctcctaagtatttgagttcaaaactcctgtatctaaagaaatacggttggggtcattaataaagaaaatctttctatctta

SEQ ID NO: 52953 - DNA, 613 bp, Homo Sapiens
ttgaatttaggtgacactatagaagagctatgacgtcgcatgcacgcgtacgtaagcttggatcctctagagcggccgcctactactactaaattcgcggccgcgtcgactcctcctccaggaagccttcccaacccaccctctgagctttttattggagcactgatgatcctgggtcaataatgcctgatacacatttgtcttccccatgagactgagccccatgggaacaaaggctatgtctgattcattctgtgttcccagttcccagcacccagcacagggcttggcacaaagaaagggaggccccagggaggccagcggattaggcctgaacagggatcatccagcccatcctcccattcctcttccctggctgattctgtaactttccctaaagggaaaattggcttctgagataacctggctgcgggaagcagaggttgtcgtgagcagagattgtgccattgcactccagcctgggcaacaacagcgagactccatctcaaaaaaaaaaaaaagtcgacgcggccgcgaatttagtagtagtagtcgaccccgggaattccggacccggtccctgcaagcgtcccagctttccctattagggagt

SEQ ID NO: 52954 - DNA, 591 bp, Homo Sapiens
  misc_feature (566)..(566): n is a, c, g, or t
cacgcgtccggaccaagctgcaccagttggcaatgcaacagtctcattttcccatgacgcatggcaacaccggattcagtggtatggatacctcagtgtttatttctgtaaggtgtagtgcaagagagaggccagtcccaaggtctcagcttgacatctgtttaaaacaaacttcgttatccagcatcctgctggtttaaacttgcctgtctactatggctaagcccaaggaggtaatgtgtttgttaacgtggttttcatttggggtcagttattctaaaagaaaaaaaaagccctggaaggtttgggggtgaggtttggggatgcttgtcaggcaaagggtaggctgatatttctttgagcccatcctgactgctgcccccttgatctgatcagcaccccctttctctccaccagcaattcacaggcttgggtagagaccatccatttgtgccaaattgtgtagtgttttttttgtttttgtttttgtttttattttgtttcgtttttggggcttttctgtataaggaataacttgtccgatagggttaggatgagaccaccanactcattttcacttgtatcttaaca

SEQ ID NO: 52955 - DNA, 661 bp, Homo Sapiens
cgcgtccgcaaatgacaatagttggaccccacagcaatcattacttttgtagacagcaaagttatgctccttggcttcaggtgaagacccccagatccaggccagtggatttacaagtgagagtcagcagcactgggcatttcaggcaatagctctgaacaagccctttaccatgcgggtaggtaaaccccagaatatacagatgccccttacgatacatgggtggggagggtatgtggccgagagagcataagcttaggagacagagtggatttgaattccactgagcttttggctgtggacccatggggacgtggcatatgtctcgctgagccttagtttcctcctgcatggaatagggagagcaatagtacctgcctcattcagctaacgtgaggatctagagcagcatttgcataaatgacgcgtggggcacagagcagactcaacacagagcagcttacgttatgaggcttggcaggctgggagctcctgtcggcctctctcctcagctctgtgcccactgagctcggcacaagggttggcccatgacaggtgtttattatgtggaaataaatgagagggacaagacatttgctgatttcttcactggttccaactgggaattcaaatgtatctcacggttcccataccctcacaa

SEQ ID NO: 52956 - DNA, 806 bp, Homo Sapiens
ggttccatttgccatggttataagggagacggggagctcaaaactgaagcacttcaggggcgtcgctgatgaagatgcacacaacatacagacccacagagacagcttggatttgctggacaaagcccgagcaaagaaagccatgttgtctgaacaaaatagggcttctcctctccccagtgggctcctcaccccgccacagagcggtaagaagcagagcagcgggccggaaatggcgtgaccaccccatccttctccaccaaagacagttgcgcgcctgctccacgttctcttctgtctgttgcagcggaggcgtgcgtttgcttttacagatatctgaatggaagagtgtttcttccacaacagaagtatttctgtggatggcatcaaacagggcaaagtgttttttattgaatgcttataggttttttttaaataagtgggtcaagtacaccagccacctccagacaccagtgcgtgctcccgatgctgctatggaaggtgctacttgacctaagggactcccacaacaacaaaagcttgaagctgtggagggccacggtggcgtggctctcctcgcaggtgttctgggctccgttgtaccaagtggagcaggtggttgcgggcaagcgttgtgcagaggccatagccagctgggcagggggctgccctctccacattatcagttgacagtgtacaatgcctttgatgaactgtttcgtaagtgctgctatatctatccaatattcaatacagataatactgttctcgaacaacaacaacatacaacattcgaggcatccacg

SEQ ID NO: 52957 - DNA, 678 bp, Homo Sapiens
  misc_feature (678)..(678): n is a, c, g, or t
cagaatctaggcaatttaacaagcttagctttcatttttagcaaattacaatcaagcataagctgaccccatttaatagggccactacttactcatcagagttaacttgagtcagggtggctgtaggccccatgaactcaaatgtaaattcaggctggtccaaatgtgggcagcatgataaaactgtaaggggggcagccatgtacagggtctggctcagtgccaggatcccccatctcagacaggcttcctggcttccctttctggccttttgggatgccagagctgttctgaaactgacagaatgctataaccacatccttgtgcctgattcaaaggttaaaaacaatgttatttaaaatcttacctcatcaaaatattttacgatgtatttgtaaatttctgtcaaggccacttcttcattaaattcattttcatgtttctaaaagaaagacttgttgagagattctgaaatgacgtaaagtaaccaaatataagcttatttctgctttctaatgataccttagattcctgagttaaaaattcttccatttctgaggatgacaatggaggcaaatccctgattgctttgtaataagattttacttcttctttgtaggttgggatatccttggcatagagaagcttattagttggtgcttcctgggggaaaaaaan

SEQ ID NO: 52958 - DNA, 462 bp, Homo Sapiens
  misc_feature (76)..(76): n is a, c, g, or t
  misc_feature (239)..(239): n is a, c, g, or t
actcattccatggcaatgttcacacaaaaaatgcctctccagagatcttacaggtttctatttatcataacactcnccatgctttatatttttatatgttttgggaattctcttagcattagacagtgaacttccatgcagatgaccacatctaattcattattattattgttattcatgctggacctcaggtacaaaaggttaagaacttctcagttcattatatgatcatcattggngcctccgagctctctctctctcccttgatttatttggtcccttttatctccagtccttactcccacatctaacctcttacccctacctcataggtaaacattttaatgaatttgatgtttccttttatttgcatagatcctctgtaatatgtagtagtgtccagtgtacatgtatttttaattaaccaaaatggcattaaattatagatctaattttgtaaaa

SEQ ID NO: 52959 - DNA, 716 bp, Homo Sapiens
ggtgcctgctggaacaagtgcaggcctgcttttctcgcccaccatctgtcgttgtgtcctgtgcgggcatcacccaggatgagtttctgctgcacatgtctgaggatgactgggacaaagtcatagctgtcaacctcaagggcaccttcctagtcactcaggctgcagcacaagccctggtgtccaatggttgtcgtggttccatcatcaacatcagtagcatcgtaggaaaggtggggaacgtggggcagacaaactatgcagcatccaaggctggagtgattgggctgacccagaccgcagcccgggagcttggacgacatgggatccgctgtaactctgtcctcccagggttcattgcaacacccatgacacagaaagtgccacagaaagtggtggacaagattactgaaatgatcccgatgggacacttgggggaccctgaggatgtggcagatgtggtcgcattcttggcatctgaagatagtggatacatcacagggacctcagtggaagtcactggaggtcttttcatgtaactgcctcaaggaccctggactctgctcacccccccaccactctgcctggcctcctgctgatgaggactctaagttcccaggatacaaaaggggtggcagtgtatggttcaggaatgctgaatatgggaagcaggggtgcttgtgaccctaataaattccaagtcctcttccctgcca

SEQ ID NO: 52960 - DNA, 500 bp, Homo Sapiens
tgcctcacaaactagtagtatttagaaataggctgtgctgtcagctgtaaaagatcaggaggcagcagacaccactctggtttcttcactgcattcagcaatgcctgaagttagtgctcaggccgggcatctcaaaagaaaagatacttgagttattcacattttaaaattcaaaacggttcatttttaagtggcagtgatgaatcagaaatttggaagatgatacgggtttcttttttccagggaggaggaatgggttgggtagggaactggacaggcttggacctcatgtttcatttctaatttcaaaatacttattagcaaattgggcaacaatgggcatcttccatgccaccacccaggcataaccagttggtttgtttccttctgaggaaggtttcaaatgtgtctagtgttcagtattgaggacaaagaaatacaagtggcaggcccaagtattttctgtgatatcccaggttaataaagattagattctaagt

SEQ ID NO: 52961 - DNA, 506 bp, Homo Sapiens
cacgaggcaggcgaccacattggataatcagaatattagaaaggcaattgaggttcaaattcagaaaccccaagagggacgatctacagcatgtcaaagacagcaggtattttgcgatgaagagttgctaagtgaaaccaagaatacttcatctgattctctaacaaagttcaataaagggaatgtgtttttattggatgccacaaaagaaggaaatgtcggccgcttccttaatcatagttgttgcccaaatctcttggtacagaatgtttttgtagaaacacacaacaggaattttccattggtggcattcttcaccaacaggtacgtgaaagcaagaacagagctaacatgggattatggctatgaagctgggactgtgcctgagaaggaaatcttctgccaatgtggggttaatacatgtacaagaaaaatattataaatatggtactaacgcctgtttgtgaaattagcttatcaggctgaaattaaagccatgcaaaaga

SEQ ID NO: 52962 - DNA, 1077 bp, Homo Sapiens
catcttatttctttaacagaaagcttgtatatgaaccatctacacaagcaaagccagtcaagaacacattcctccgaatgtggatctacagtcaccatatatatcagcaggacctaaggaaaaagattttggatgttgggaaaaggttagatgtgactggattttgcatgacaggaaagcctggtataatctgtgtggagggtttcaaagagcactgtgaggagttctggcacacaattaggtaccccaattggaagcacatttcctgtaagcatgctgaaagcgtggagacagaaggaaatggtgaggacctgcgccttttccattcttttgaagagttactccttgaggctcatggtgactatggattaaggaatgactatcacatgaatctgggccaattcttagaatttctcaagaagcacaaaagtgagcatgtttttcagatactatttggtattgaaagcaaaagttcagactcataaaaagcgattaagaggcctatgcctgtaatttcactaagtcagtatttctgttaataagaccaaattaaaaaggctagtggctgtgtagcatcctcagtgcaaaacccagctccagaattttcacctggtaacgaatttcaactgacagtgaaatgaataggcctttaaacctttataacattgcaattgtgatgttatctctaagtttttgtgtgaagtccttcaaaaactatttcattgaaatttaataaaaaccatcccttttaactttgtgaagaaacaccccccacctcaactacccacaaaatggccgggcgggggccgcgtctcttctaagagtgcccccagggtgccccaatctccccgtttccccccactctctttggtactccagtgggggccttccaatttacccgcacttctcaattcttgcccacctgtcaccaccgttcttttaatgtgtggcgaacccttgtgaacaaacggcggcacacttggggaaaccctcttactcccaacgagacaacctgttttcttgtagacccgggttgttgcaacctaatgtgctgcccacacacgcatcaaaccatta

SEQ ID NO: 52963 - DNA, 645 bp, Homo Sapiens
  misc_feature (583)..(583): n is a, c, g, or t
ggcaatgagtggcatcaacaattatacccagcactgtaagcatcaaaatacctttctgcatgactctttccagaatgtggctgctgtctgtgatttgctcagcattgtctgcaaaaatcgtcggcacaactgccaccagagctcaaagcctgtcaacatgactgactgcagactcacttcaggaaagtatccccagtgccgctatagtgctgctgcccagtacaaattcttcattgttgcctgtgacccccctcagaagagcgatcccccctacaagttggttcctgtacacttagatagtattctctaaggcatccactgcatttcctttcatttgacatagcttctgttacaattgcatccacgttttcttttcttttgttgattttcttgttcccgtagaagaaagaagaaaggtgtttggagaattcgagtgcctaggatgccagaccagagttgagacaaaaagaaataagattattttctgctttgtagttctgtacttttcgagagaagggaatagggaagacagcaacagacagattcagatttctaaccctgcaacttttgccaagctttattngccctgtgttcacagcaataaaaccacttcctgctgcaaaaaaaaaaaaacacctaaaaaac

SEQ ID NO: 52964 - DNA, 495 bp, Homo Sapiens
cagggaacagaaccttcgccccccgcctgagcagctggtagactagatatcttccaaacattatctcatttacttccctggagttacaaataggtagatttcatgtccgttgaggggtgagaaagctgaaactttgagacttaagaatcctggccgaggtcagcctcctccgaagcttcatctcttgccaccactttctggtgcacacctaggacagatttcaatccctgagatcccaggatgaaacctatgtttgccaaataccagctactgtgccagaagagatcatggaaccaggtgtggaaagctgcttgagaagaggagccaaaacatcatagttgaaccgtcctggaatagaaactcgccctgaattctttcttgtgtgaaatccaagagccctctcttggggttggatcgggaccctgttcctgtaacaagtccacaatgccagagaattaaagagaaccacaaagctgaacctcaaaaagttagcct

SEQ ID NO: 52965 - DNA, 372 bp, Homo Sapiens
ctgccagtgaccaagcaaccacagcccgaatccgggacacacttcggcgagtgcttaacctacctcccaacaccattatggaatacaaaactcacaccgacagcatcaaaatgccaggcaggctgggcccccaaaggctcctttttcaaaacctctggaagccgcggttgaatgtgccatgaccctctccctctctggatggcaccatcattgaagctggcgtcatcggagtctcttgttctgttggcgtgctacctggaagatccttctgtcctggacaagaggaattggaagagcattttatgttttaagaacaggctgacacgcagcagctacaacaacagctgagatcacttaataaatggtgctaaa

SEQ ID NO: 52966 - DNA, 777 bp, Homo Sapiens
  misc_feature (636)..(636): n is a, c, g, or t
  misc_feature (667)..(667): n is a, c, g, or t
  misc_feature (688)..(688): n is a, c, g, or t
gataccctcgggctcaaggtagtcttttatctttataaagaaagattagtgtttaagagcgtagacttgagctagactacccaggttgaaaccccactagctgggtgatcttgaacatgctgcttagcttctctgtgccaaacttactgatatcctcatctgtaaattagcgataataatagtacttacctggtaggattatggtgagtattaaatgagtaaatggaaacagcttagaatagtgcctgacatatattatgttctctgtagttactggctgtgattattaataatattgccgcaccctaatatctgttatttaattgaaatctgcttgtgtgcttataagaatttactgagttctcacttcccttacagtcatacatggtttttcccttttgcctaaatcagaactcaacagcctgggaaaatcactgacaaatagtggatataggtttcatttctgaggatcaataaacagcttgtaatgttgtatacacatttattctgtttgtacaaaggttttccattctatggagaggatcccagtcttcagattctctggtaagttgataacccacacaagattcatgaagaggatctattttaattttctctttcattctataaatcagnctgttgtatatagggactgaccatgattctncattttctggcataatattanctgctcaatgattgattgtgatgaagatgaagtattgctgagcaccacaatcttgatctttctgagactgtgtgtcatgagacaggaag

SEQ ID NO: 52967 - DNA, 787 bp, Homo Sapiens
ttcacggccggggggcgccattttgctggagcctgcgaccgagtgggagtggagtggagcggctgtggttgccgactctttcctcttccccacggtccagtcagcgggttaattaggccatcggccctcgagccgagacttgtcccttatttagttctggggagcgcctcgtcgacatgagtgatgtggaggaaaacaacttcgagggcagagtgagtacaaagccgcgggagccgtctaggcggcggcccaatgctcggggtttcacgggaacaagcgcggtcgggcggggttgcgggtagtcccgcgaggagcaacctctggagccatcgcgattgattcctcccatcccaagatggcttctgggttccactccttccccaaacaccacggataacacccctcccccttttttggaggctgactgatacctggacttctgggtcctcttccctccccgcccccgcattgcttcctcccttctccccacccctgaggcttccttatgtctgctccgaggtgtgggtccccgtcgcggttgggcgggaggaggcggcagggagctcccctccgtccggatagtggtaggtgcttcctgcggtggcatttctggcgaccccgagcatcgtagagggtctcgggatcgaaagtgcgcggggctgctttccgggcggggagaagctggcgcgggactagctggggcctgtgtctccttggctctctatttcagtgagcggccgcgtctctgttggaaccggcggcgttgcgtctaaaaaggcgaaagcct

SEQ ID NO: 52968 - DNA, 578 bp, Homo Sapiens
ttttttttttttttttttcaacccagagtgtctctatgtattcccctgccagtggaactaccgtcccgatcactgcatgtacggaagcaactgcagagaggctgagcatgaaggtgtgtctgttctgcatggaaaccgaggcgtctaccatgacgataagcaaccaacgttcagagcactctatgaagcaatacgggattttccctttcaagacaatctctttcaatccatgtattacccccttcagctgaagtttttggagactgtgcacactttatgtggacgaatcccgcaagtttttctgaagcaaattgagaaaacaatgaaaagggcttatgagaaacacgtcatcatccatgttggccccaaccagatgcactgaatattttgtcttgttgcaagtcaattaggtgtcttgtgaacaaggaaatactaatctctaagctgcctgggtctttttgtgtgaatatttaatggtgctccatgactgttgagttttaaaaacctcgttaaattttgccaaatcagttgcccccaaaagggaatatgcttttccttatttttttttctcctcgtgc

SEQ ID NO: 52969 - DNA, 416 bp, Homo Sapiens
gggatcaacacgcaggggtcccggacctctccagccttgccctcacgcttatccgagctcccagtgtggttagcacagagctcacccaccttgcctggctcccagctggggcctgtcctcactggtgctccaggggaagaaacgacagcctcacttctgtatggactgctgatgtggcctgccatcctgttcagcgggcattgtctttggagcagcaggagaataggatgcctctcactcacatgccagttcctggctggccagctgctcagggctcaggctggggcctcccattgacatcctccccctacactccctctctgagcctccgtcgcccctcctgttgggtaagggtgttgagtgtgacttgtgctgaaaacctggttcatatataataaataatggtgatgaaaaga

SEQ ID NO: 52970 - DNA, 493 bp, Homo Sapiens
tctctgttggaaccggcggcgttgcgtctaatttggcgaaagccttgaggttgaaggtgggacgagcctaatgaagtggttagtcaacgaccgcaccgacccttaagcgttcttaagacgagagctgtgaggggaaactacgcaaggagcccttttcccttaatgtcccttcgactttcctttcacttcgaaatgaatgtggaaatgctgtcacgccttatttttctaattcctcgatgttgggttttttctcttctttatatctcaacttttaatgctcttcttcctatgacctttcatctaaaaactgaccactcctttacaggtttttacggtaaaaaaaaaaaaaatctgtctttctttaatcttacatagctgaacgaattcattggctcagtatttttaagataactagtcagtatatactgttctgtaacttaaaagatgacctgaaaattaacaggccctctcccatttctcttctcactctatc

SEQ ID NO: 52971 - DNA, 805 bp, Homo Sapiens
gcacaccatgactttgccttatttcaggccaatgaacaacaaacacagtgtacttcactacgctcacaacaaaacagaaataatctcaacccagggcagaattctcttagccagtctaaaaattttatgaatgtttctggtccacatagagtcaatgttaaccacccaccacagatgactaatgcatctaattcacaacagtctatttcaatgcagcaattttctcaaacgtcaaatccttcagcacacttccacaagtgtagcagtcatcaagaaggaaattttaatggaccttccccaaatatgacttcttgttctgtcagtaattcacagcaattttcttcacattattccttttccagtaatcatatatcaccaaacagtctacttcagtcctctgcagttcttgcatctaatcatacaaatcagactttatctgattttactggcaagtaattccttttcacctcatagaggaatcaagcaagaatctactcagcatatccgtaagacccaatacatcattgaattcaaataatttccaaatattgcattcatcacatcctcagggtaattatagcaattcaaaaattatctctgtgcacatgaacttcccagatcctgttgactcaggaactcaaaatgggccatttcacatgatcatgtaagaaactaatgggcttttcatcttagcacgagaatttacttcatcaagtggaatctcaagtgagacattcacaggattgacccggaggactcttcaggaggggtctctcctactttgctgagtcaacatcggacagat

SEQ ID NO: 52972 - DNA, 860 bp, Homo Sapiens
gggattgaaccgcgcggccgaaccctccggtgtcccgacccaggctaagcttgagcatggctgagcaggagcccacagccgagcagctggcccagattgcagcggagaacgaggaggatgagcactcggtcaactacaagcccccggcccagaagagcatccaggagatccaggagctggacaaggacgacgagagcctgcgaaagtacaaggaggccctgctgggccgcgtggccgtttccgcagaccccaacgtccccaacgtcgtggtgactggcctgaccctggtgtgcagctcggccccgggccccctggagctggacctgacgggcgacctggagagcttcaagaagcagtcgtttgtgctgaaggagggtgtggagtaccggataaaaatctctttccgggttaaccgagagatagtgtccggcatgaagtacatccagcatacgtacaggaaaggcgtcaagattgacaagactgactacatggtaggcagctacagcatcaagtcccgcttcacagacgacgacaagaccgaccacctgtcctgggagtggaatctcaccatcaagaaggactggaaggactgagcccagccagaggcgggcagggcagactgacggacggacgacggacaggcggatgtcccccccccccccccccccskscccatamaaaagtgctgaaarggcckccgsssscbbccaccctggtccgcctycctggcctkgctcaamcgarttcmtycvamcmcctyctmagscctccccamccamaggccagcttctyggtctctgtctcgttstgttytgctktgtgtggggrgrrggcgcgcaggctctstgccttytgtgccc

SEQ ID NO: 52973 - DNA, 466 bp, Homo Sapiens
  misc_feature (49)..(49): n is a, c, g, or t
cctcctcggtcacctgctcatggagttgagggaattatctggccaccanaagcctgggaccacaaaggctactgctgaatagaagtaaacagttcatccatgatctcacttaaccaccccaataaatctgattctttattttctcttcctgtcctgcacatatgcataagtacttttacaagttgtcccagtgttttgttagaataatgtagttaggtgagtgtaaataaatttatataaagtgagaataagagtttagctataattgtgtattctctcttaacacaacagaattctgctgtctagatcaggaatttctatctgttatatcgaccagaatgttgtgatttaaagagaactaatggaagtggattgaatacagcagtctcaactgggggcaattttgccccccagaggacattgggcaatgtttggagacattttggtcattatacttggggggttg

SEQ ID NO: 52974 - DNA, 601 bp, Homo Sapiens
aggaaataacatgaggaagcaaaccccagtacctgataaaaaggagaaagatccctttgaggtggacctttctcacgtgtatcttgcctatactgaggagagtctgcgtcagtctttgatgaaactagaaagaccacgaacttcaaaggggaaagcaaggccaaagacagggagaagaaagcgttctgcaaagcctgaaactgtaattgactctttactgcagtaaatgttacagacttaaagtcacaataaaaattagtgatattctcatgcctggacaaaatctttaattaaaacagtgaagacttctctataatttcaattaatggaagttgtagatcaatgaataagactggaaataataatttgcttaagaacttttagtctacatatattaatataacattaaaattgtacaactggtgattgttcaaattgttgtactactactcttcaattgtactgtgcagggaagttgggggaacagttcatactatagagagttacagtttagatgtatgtgtaaatcgattagctatttatccaactactgtatatttaggtaaactagaatttcaaaatagaaaaaagcaaacaaaag

SEQ ID NO: 52975 - DNA, 551 bp, Homo Sapiens
tatgttcagaggtttaagaacctcagtgaattcattttttaaaatctgctattctgagaagcattgaatgaattcttaacaagaagactcatctgtagctgtttgctgactcctatgagcccataagggttctgtgcttagcattaacaaaataaggtttataggtaaagccaatgtattaatttttttttgcatggagggctttaaaatttgtgctctttttcatattttattcatattcaatttatggtttgtaactgctttttagggagataattatatgttataaattagttttggggggaataattgtgcaaagaggataatttaatttacgtgcttctgttattcagaataaagagagaagactacgctgcatattcaagagttgtaccttaacattggtgaaacattttttctaagattttcaaaaggaatatgtgtaaattgagaaatcataaccactgtcctaacttggtaaacaaactgttcttaaataaagtatttaatgattttaaaaaaaaaaaaaaaaaaaaaaaataacaaaaagg

SEQ ID NO: 52976 - DNA, 682 bp, Homo Sapiens
ggtctctaagctaaagctcctcgactgcagcatcaacagatcagtgccgacctgttaaggccgtcgagagcatcaaatgctactgttcagcaggtgcctgacacatagtaggtccacaagcaaatgattttcctgcttgcatcatttctagcacagagctggaggaaatggcgaggtgcaggtggccgctgggccctgctgttctacatgggagcaagacagctgctaggtgaaggggaatgaccaggcagccacagggaggacatgtggcctcaggaagcctgggtgtgtatcctggttctgctaggaacacgtgtggggctttgtgtgggtgactctctggctccccaagcctccctttcctactgttatatccttaaagtgcctctgaggccaaagcctttgtggcaattgtcaaatgagtccatatgcagtgagtaccgtgttgagggaggacaaggtcaccaagagctgagaatgtttctccgactgatgagacctagatattgggtacatggaggtccccggtccctttgtgattcctgcagcctgttgcctccttgcctggaccccgcctcagctcagaaagcaattccctagattccaaggccttccagacaattagctgtctgcactgtcactcctgtgctagctggactcagctctgctagcaccgtctcca

SEQ ID NO: 52977 - DNA, 658 bp, Homo Sapiens
  misc_feature (580)..(580): n is a, c, g, or t
  misc_feature (588)..(588): n is a, c, g, or t
  misc_feature (591)..(591): n is a, c, g, or t
  misc_feature (649)..(649): n is a, c, g, or t
cggccattatggccggggaggtcttttattgtaaactgtgtcaagggaaaaatcatcttatactaaacgtctttattgccaaactagaataccttcacaatctgaactttctctagatgggcacagatcatgaataactcagaaaccattagcatattgtgtgcttaattaaggctggaaagtgctgaggctttttgcaggcgcagttagcaggcgaactggtcagcagggtttctggggaacgtagatttgcgtgacaggggccctgtgttgctaaggaattaatgcaggcactgagaaaagtctcagcgtcagacactcctccacctcccgggtcctgcttccctccctctcccctttccaggcaactcacagtttaggggtgtggttgtgtgtgttcaagctcttgggttttacatataaatgcctgagacttttctgcagggtttaaaaactaacatcttgtcttacagctcttttaggatttgtcttttagaatctccagtcctcacaggaaaaccccccaattaaaaaaataaaagaataaagaataaaaagaataccactactactaaaaaanaaaaaganaanaaataaaaatgcggccgcaattcgagctcacttggccaattcgccctatagtgagtcngattacaaa

SEQ ID NO: 52978 - DNA, 865 bp, Homo Sapiens
ggatcagagtctgaggtgcctcccagaccagcctcccccaaggtcaccaggagtcccccggagacagctgccccagtggaggacatggctcggaggaccaagcgcccggcgccagccggcccaccatgcggggcccccaggtctccggctcccgctcckcccctccagccccgccctkgccccctggctctggcagccctgggascccccaagccctgccccgacgtctggttggcagcagcctccgagcccccacagtgccasccccgttaccccccacaccccctcagcctgcccggcgccaaagccgggcgttcaccagcctcccccagcccggcctccccaggtccagcctcccccagcccagtctctttgagtaaccctgcacaggtggacctgggggctgccacagcagaaggaggagcccctgaggctatcagtggggtccccactcccccagctatcccccctcagccccgccccaggagccttgcctcagagaccaactgagtggctggtttctctcctaagcagccctcagcaccccctccctccccacctggccctcccaggacagctctcgccccccacaaaggggcatgggcctccagcctttgcccacaagtgcctcagtgcccactgggtcggcccccatggccaggagggctcaggacaatcctctatttcctgaccttttcctcgtccaccctgggcttggggaccccccaccggactctccactctccggcaggtcctaggggagccaccggaaggaaggagaggtttgcctgctcctacgggactgattcttctcttgccgacatgttttttgtaaggcttggtaaataaattattttggacaaaa

SEQ ID NO: 52979 - DNA, 590 bp, Homo Sapiens
aattcggaagtgttatttcttaaagaaaataatcaaaatgtatatggtttagatgattcagaacatatttcttctatagttgatgtacctcccagagaaagccattcccactcagaccaaagttctaagacttctctaatgagtgagatgagaaacgcccagtctattggccgcagatgggagaaaccatctcctagtaatgtgactgaaaggaagaagcgtgggtcatcttgggaatcaaataatctttctgcagacactccctgtgcaacagttttagataaacaacacatttcaagtccagaattaaattgcaataatgagataaatggtcatactaatgaaacaaatactgaaatgcaaagaaataaacaggatcttcctggcttatcttctgagtctgccagagaacctaatgcagagtgcatgaatcaaattgaggataatgatgactttcaattgcagaaaactgtgtatgatgctgacatggatttaactgctagtgaagtcagcaaaattgtcacagtctcaacaggcattaaaaagaaaagtaataaaaaaacaaatgaacatggaatgaaaactttcag

SEQ ID NO: 52980 - DNA, 525 bp, Homo Sapiens
gcaggtgtgagccaccacgcccagccttattctctttttctaatagttgcactttatcatattttacaaatgtgtgagtctgctatggattagaaattaataagagatttgccacagatagtttgagaagcccagcactgccactcaacaaatgctggtgcattcagatggtgaaatattctgcagctattaaaggagttaaaactgcctccacttacctggaggcccatctgtgacacctttttaggttaaaaggaaaagaaaaacttgcttaggactgaatatgagcggttgcaatttgtaacaatgatgtatatatacatatacattttcatgtatttgtatgaacataaaagtattgaaggatattcatcaaactgctaaaagggttgcttcagagtaacggactcggagaaggcagattaattttctcttaatggaactctgtatcgtatcacttgtaaaaataagcatgtgttatctttatgataaaaaagtaaaaacctaaaaaaaaaaaaaaaaaaa

SEQ ID NO: 52981 - DNA, 505 bp, Homo Sapiens
ggcaaaaccgaatttgcctgcaaagaaatctatttaactgaatcagcccataatatttgaggcacgaggttactgtgattgataggaaagataaaaatgatgtctgtttttgtagacgaataaccatcaacatgacaacaaaattcactggggtctaccagcgtgcattccatttcccactgaccatgcaggtgcacgtcgcggaaatactggtttaactactagtgtgttactgcctcatttatctacataacattattaactagaacataatgctttcaaagtttaagttaatgttatatattatgtataaatatatatattcataatgagatatatgtaatggatagtacaaagtttggagactcaacaaatgctctaaccttctagagacaaaagtcctatttctgttttcttttgtctttttattttcaattagtgacccattgttaaatccaaatccacttttactgaaaaatactgtacatgtgtaaaatgttcagtt

SEQ ID NO: 52982 - DNA, 931 bp, Homo Sapiens
  misc_feature (729)..(729): n is a, c, g, or t
gaagtcccagctactcgggaagctgaggcagaagaatcacttgaacctgggaggcggaggttgtggtgagccgagatcgcaccactgcactccagcctgggcgacagagcgagactctgcctcaaaaaacaaaacaaaacaaaacactcacccatcaacgaatatagactcttctctcatttatcgatgatcctctttttccattttttaagtacttatgtggaagctagtctcccaaaacacaatctttagagagaaaagacatgaacgaactccaaaatatccatttaatcaatcatgtttttggctttggataaagaactttgaaccagtttttttctcaggagctgtcaaatggacacttaattatgacatgagaatgaagaaattattttggaaaaaaaaaatgacctaatttacctatcagtgaaagctttattttctggtgccttttgaaagtatatggagtcatatcattcttctgtttaaaatgttagtttggtttgactttccactttgtcctttctgctcttgtgaagaaaaaaaaaaagcattttcgaggaaagaattatgcaatttcttttgttttctgtgtcattatttattgctttttcaatgtgcagccagtggatggttttagttctttcagatgaactgccatttgtgtttcagctcacagttctttgctgggtaaaagaaatacttttctgacagtcaccttgagccttnaaatgtaaggattacatggacatgcattctggtttctttccagaggttctgtctggcaccacgaaaagagaaatatttgctttaactggataaaaactttgggcattttccaccattccttttaccttaacccggctttatgggcatggatttccggggaacaaatttggaaggaaaaaaatatactccaattggaatggcg

SEQ ID NO: 52983 - DNA, 861 bp, Homo Sapiens
gctctgttgcccaggctggagtgcaatggcacaatctcggctcactgcaagctccgcctcctgggttcaagcgattctcctgcctcagcctcctgagtggctgggattacaggcatgcaccaccatgcccagctaatttgttgtatttttggtagagacagggtttcaccatgttggccagtgtggtctcaaactcctgacctcatgatttgcctgcctcggcctcccaaagcactgggattacaggcgtgagccaccacatccagccagtgatccttaaaagattaagagatgactggactaggtctaccttgatcttgaagattcccttggaatgttgagatttaggcttatttgagcactacctgcccaactgtcagtgccagtgcatagcccttcttttgtctcccttatgaagactgccctgcagggctgagatgtggcaggagctcccagggaaaaaggaagtgcatttgattggtgtgtattggccaagttttgcttgttgtgtgcttgaaagaacatatctctgaccaacttctgtattcgtggaccaaactgaagctatatttttcacagaagaagaagcagtgacggggacacaaattctgttgcctggtggaaagaaggcaaaggccttcagcaaatctatattaccagcgctggatcctttgacagagagtggtccctaaacttaaatttcaagacggtataggcttgatctgtcttgcttattcgttgccccctgcgcctagcacaattctgacacacaattggaacttactaaaaattttttttactggttaaaacaaccaaacacacaaaccaaaactaaactaaacacaaaaaaaaaaaacgaca

SEQ ID NO: 52984 - DNA, 556 bp, Homo Sapiens
gtagactttttaactatacattgatactttgtactaattagttgattttaatttaataatttaataattaatgacagcaacttcaagtagtgctgccagtctgagcagtacacaatgcctgtgtacctatttacttaaaactggcaaatttaatatctctgttctgtctgaaaactattttacaaaaacaattatgtttttatttggttactccattccagtaactgcaattactttacctttagaagttatatagcatgaaataatagtgattggtagcatgattcaattgaatttatttcctacaggaaattttgttagaagttatgttaatatgctaatgacttaagagtttctccctatctttttgaaaatcgacaagaactgttttagtcctcatatgatactggttgttgagactttttgaggaatgttttgagtagttttcttggttgtgtggattgtttggaattatgtggtagcttagaagcatggtaaagatgcttttaatttgcgtatttttatatagtaatgtctaacatggaattatccttta

SEQ ID NO: 52985 - DNA, 653 bp, Homo Sapiens
  misc_feature (599)..(599): n is a, c, g, or t
  misc_feature (652)..(652): n is a, c, g, or t
caaactaaatgcctgcctttgaattgtgtacagcgcagagaaggactgttttccagcatggttgctcttggttggtgtacagacacagtcttaccattcacactctggtgaacagtgtcctctgttgggaatagtgatacttggatgtttctctgagccagaaaaaagaaaatgtaaggagagagagattgacttctttttaaatcttgcccaccagtgtcactgcctttcacccagcattcctgcattttagattaaagagcctggttttcacttgaagtttctctgccttagctgcacgttgcaattttctgagatattttaaaaattagtgatgccgggaccctgaccctagggattttgatctcattggtcttgagtgctccttgggcttcccagctgtttgtactgggcagccagggtcacttcttacccaggctgtctcgaatctagtggaatacagtaaaagtgttagctaaatttttggcttgcttgcagagtaagaaaaacatcacaaacaaactgctttttcttgatgcctgtgatttgtacttttcagccttaggtactttttttttgaaaaaaaaaaaaaaaaaaangaagggataaattgtagaataaaatttttagatcctaagtaactacaaaattnt

SEQ ID NO: 52986 - DNA, 455 bp, Homo Sapiens
actccatacagttcacactgattgtgacacattcttagtagctagtgtctgttctagtcactgcactggagtctacgagccggaactcgctatatgcacgtgtgtgtgtccgtatgtaagaaagtgtgcaccgagtgactgaatggttgagatgaattggaatgctgaagactaaccgaagaaactagagactgatatcgagcattctgcccacctcgctctgtatttaattaattgtgctatatgttgctttaacaacccattgagcagtcagggaatgtgagtaagcttgctgccaaaggtaactaggaaagcattcatctgctgcctccttgtttttgctcctagagagtgaaaatacaggcaattttactgtgagtgtttcactggaaatgtacaatctttgtgtgttagagtatttgttttagtaagaaatgtttacacagcttgtggga

SEQ ID NO: 52987 - DNA, 494 bp, Homo Sapiens
aaggaactggaaaattatgctgaaaacacacagagctctcttctttacttaacactagaaatattgggtataaaggatcttcatgcagatcatgctgcaagtcatattggaaaagcacaaggcattgtcacttgcttgagagcaacaccatatcatgggagcagaagaaaggtgttccttcccatggatatttgtatgctgcatggtgtttcacaagaggactttctacggaggaaccaagataaaaatgtgagagatgtaatatatgacattgccagtcaagcacacttgcacctaaagcatgctaggtcctttcacaaaactgttcctgtgaaagcatttcctgcttttcttcagacggtttctctagaggactttctaaagaaaattcagcgagtggattttgatatattccacccatctttacagcagaagaatacattacttccattatatttgtatattcagtcatggagaaaaacatattaaaataa

SEQ ID NO: 52988 - DNA, 544 bp, Homo Sapiens
  misc_feature (232)..(232): n is a, c, g, or t
  misc_feature (455)..(455): n is a, c, g, or t
  misc_feature (512)..(512): n is a, c, g, or t
gcttttatattatacctgtaccaagggattgtattttgagtttaaggccactctagaattacaaggctgattttaggacttcctggggaggaggcactggggttttaggggcggtaatgactgtcttttcattggtttggggggctggactttataagattttggtgaatagagcacttagatttgtgttatcttggagtcttaaccaaatgaatcttttgtgcctggaggnagcatgggtgatatgtggattgtcacttcatttggaagcatctcaaatccccagcattttgaatgcctacatgttgctcaaaggaaatgcttgttagagcatttttggattttgaattttcagatttgggatgctaaaatggtacgtagaacgcaaatattccaaaatctgaggtctgaagcaacagtggcagttcaggggtggtgatcatgggtgagttgcnatctgaactcctccttcacctcctttggggttcccagtgtccaaaagagtgggtggnccctttttagcctaaattaagccgggcctgga

SEQ ID NO: 52989 - DNA, 928 bp, Homo Sapiens
  misc_feature (755)..(755): n is a, c, g, or t
  misc_feature (766)..(766): n is a, c, g, or t
  misc_feature (768)..(770): n is a, c, g, or t
  misc_feature (777)..(777): n is a, c, g, or t
  misc_feature (785)..(785): n is a, c, g, or t
  misc_feature (804)..(804): n is a, c, g, or t
  misc_feature (823)..(823): n is a, c, g, or t
  misc_feature (825)..(828): n is a, c, g, or t
ctggaccggtccggaatttcccggatcggaaaacaagacgctcatgaagaaggaaagtacacgctgcccggcgggctgctggcccccggcggcaatagcatggcgagcggggtcggggtgggcgccggcctgggcgcgggcgtgaaccagcgcatggacagttacgcgcacatgaacggctggagcaacggcagctacagcatgatgcaggaccagctgggctacccgcagcacccgggcctcaatgcgcacggcgcagcgcagatgcagcccatgcaccgctacgacgtgagcgccctgcagtacaactccatgaccagctcgcagacctacatgaacggctcgcccacctacagcatgtcctactcgcagcagggcacccctggcatggctcttggctccatgggttcggtggtcaagtccgaggccagctccagcccccctgtggttacctcttcctcccactccagggcgccctgccaggccggggacctccgggacatgatcagcatgtatctccccggcgccgaggtgccggaacccgccgcccccagcagacttcacatgtcccagcactaccagagcggcccggtgcccggcacggccattaacggcacactgcccctctcacacatgtgagggccggacagcgaactggaggggggagaaattttcaaagaaaaacgagggaaatgggaggggtgcaaaagaggagagtaagaaacagcatggagaaaacccggtacgctcaaaanaaaaaaaaaanannnaaaaaanaaaataanaaaaaaaaaaaaaaaaaanaaaattaaaaaaaaaaaanannnnaaaaagggcgggccgcctctaaaataatcccctcaagggggcccaagctttaagcggtaccccagctttttttggaacaaaagggggcccctaaaagggg

SEQ ID NO: 52990 - DNA, 689 bp, Homo Sapiens
ccaagctctaatacgactcactatagggaaagctggtacgcctgcaggtaccggtccggaattcccgggtcgacccacgcgtccggaggcctcactctaagttattaccgtccccttcattgttttcaaagacatgtggtgatatagtttttaaaaataactattttgttatagatcataatatgcataaaactgtacagaaatattttgtaatgtgttgattttaaaaaaaatctgtaaataaagttttaaaaaaagaattcaaatggcacacgctgaaatatgtagatattttgctatttatttaaaggagtattttaagagatattgaactatctgaaattgaccagtaatcaaagttccaatcatctgaatgcttttccttgaggtagaatgtgagtctcagaaatgactgcattacctgcccttttttgcaccttttctgtctttttattttgcagaacaacaacaacaacaaaattgtgccttagctgtatttttttgtctaggggagtttgtttctgtctgacaaagcaacattttttgcagaaaacagtggatgtattaaatactgtatcataccaaaaacactgcaggtgtatatagatgctttctgtcatactgtgttttcagatgcagaattttaaaattaaaaaaacactgcctttatggaaaaaaaaaaaaaaaaa

SEQ ID NO: 52991 - DNA, 872 bp, Homo Sapiens
cgcgatcttggctcactgcaagctccgcctcctgggttcatgccattctcctgcctcagtctcccaagtacctgggatgacaggcgcctgccaccacgcccggctaatttttaattttttgtatttttagtagagacagggtttcaccatgttagccaggatggtctcgatctcctgacgtcgtgatcagtccgcctcgtcctcccaaagtgctgggattacaggtgtgagccactgcacccgaccgatactcacatttttaaactttttttttaattttattttggtagctaggttttatattgttcttaaatttattttactctattttatttttccatcacttctttgtcccagattcatgaaatttgctgatgtccattttatgtctacttttgaactcttctctttgtgtttgttttgttcttattacaaactccaagacatttcttagaattgtctacagatttcgtgtagctacttattggtagcttcttaatttcatacttgtccagaccattagacattattacatgctctgtcttgggcctatcattaacattagcttagggattctgatttcaaagacataaagaattggcaaaactcttcttacagaacttaaaacaagttttaaagttacatttctatacatctaatacataataccttcttagccattaatgtaattcctctggataaagataatatattcaaaaaatattgggaccaaaaaatgcacttgtttcttgctcatatatatatagatgtatattttttttaatttcttgtttgtttattttggttacattgaatacagatttgctgaacagttttgatgtttattttttaataaaatttgtattgttaaa

SEQ ID NO: 52992 - DNA, 801 bp, Homo Sapiens
  misc_feature (697)..(697): n is a, c, g, or t
tacaatacaaatcagattctggaaagccttactattataattctcaaacaaaagaatctcgctgggccaaacctaaagaacttgaggatcttgaaggataccagaataccattgttgctggaagtcttattacaaaatcaaacctgcatgcaatgatcaaagctgaagaaagcagtaagcaagaagagtgcaccacaacatcaacagctccagtccctacaacagaaattccgaccacaatgagcaccatggctgctgccgaagcagcagctgctgttgttgcagcagcagcagcggcagcagcagcagcagctgcagccaatgctaatgcttccacttctgcttctaatactgtcagtggaactgttccagttgttcctgagcctgaagttacttccattgttgctactgttgtagataatgagaatacagtaactatttcaactgaggaacaagcacaacttactagtacccctgctattcaggatcaaagtgtggaagtatccagtaatactggagaagaaacatctaagcaagaaactgtagctgattttactcccaaaaaagaagaggaggagagccaaccagcaaagaaaacatacacttggaatacaaaggaagaggcaaagcaagcttttaaagaattattgaaagaaaagcgggtaccatcgaatgcttcatgggagcaggctatganaatgattattaatgatccacgatacagtgctttggcaaagttaagtgaaaaaagcaagcctttaatgcctataaagtccagacagaaaaaaaaaaaaaagggcg

SEQ ID NO: 52993 - DNA, 460 bp, Homo Sapiens
atgttatttggggaactgggtatacacactgtcctatttttggaactttttggaagtctgaaattattttgaaatgaggaaaaaaaaatatgctttgtatgaaactatagtggaatagattgagtcgattctcgtttcaaaataacttcaaagagtttccaataggcatgatgccggcatgaatggtttcagcaggtcacaggcagagaagccggaatcccaaaatagcgccattgtgtggacaacctgactccttacaaacgtgcagtggcttcccaacgctgcctttgagtttctgggtctggctgctgaatgtgttgtgcttaagaatccagacaccctgctgttcctgccagagcttctcacgagatatttcgggtagttcatcatctgtcatgtgcagaatgcattttatttctcatagacgcttgtcatgattagctggccacattattaaaag

SEQ ID NO: 52994 - DNA, 782 bp, Homo Sapiens
tcttcggtttcctaggcaagatcgacgaactgcgcctcttcccgccggatgattcgcctttgccagtctcatctcgtgtctgctttgttaagttccatgatccagactcagcagttgtggcacagcatctgacaaacactgtattcgttgacagagctttgatagtcgtaccatatgcagaaggtttgtgctttgtttaactacctatgtgggcatcctaagatgaccatctacctcagtagatgtagagtgagcattagtagcatgttaaatctaagctattaacatttttaaacccttgttatactgcagtccgtaatttttgcttgcagattttttttaattctaaaaattagaaattaggtctgttattataaggtatttaccttttgttttcttttaaaacatttttaagttgtttaaaaccatgtcccttattgtaactccctgagatacatctacttagttaatttaatgttaagttttatgaaaaagccctgaaggtaaatgattcactccatgtatgcttacagagccttcaaataaatgcatgatgttatttctgttttaaataaatgagtaggttgattttattttcttaaagcttcctcacattgataatctggaaaaaaaaaaacacattgaatttcagtataccaagggttgcagtgattaggttttcgtgaaagtcaagattccctgtagcttaggtgccaaatgggcactgggtgttgaattttatgccagatttctggtccattcttgctatatgtctagaatat

SEQ ID NO: 52995 - DNA, 743 bp, Homo Sapiens
  misc_feature (733)..(733): n is a, c, g, or t
  misc_feature (739)..(739): n is a, c, g, or t
tattcttcctatgtagataagtaatgtcctagatttataccatagaaaaacaggtagagacgtttagctgtgagtgtacaagtataaatcaattaagtgccagattttgatcatcaccagttgctcattcaagtcctatgttgcaaagttactcttacccttttttacattacttgataaaggcaatgtttaattacatatttcctgttaactagctggtagagtacatactgtaaagtcagtaaataatgttacaaattttttccagctgagtaagtgaatatgtatctagttgtaagaaatcaagaagaggataaaaaatataatcaggatgtggactctaaaacggaataaactctatgtcctgtaacttttctcacttgtaataatacagcattctcaccctgttaaatggaaatttagagcacccttaaattccggaataaaattgctatttggatagaaaaaacccttaggcaacatttattgaatattaggaaataacttttatgggattagaatccattttttatagaaaccaaatttaaaagtatacatattttaatataagtgttgtgataatacagtaaccaaaattgaacacacagttttatagctttttatatttagtagcagttgaatatatatggcatgttttacatagattaattttactatttttctttgtttaaacaagaggaccaaattgaaagccaacagatactgcaaatgnactggnattt

SEQ ID NO: 52996 - DNA, 598 bp, Homo Sapiens
gcactccagcatgggtgacagagaaagactccgtctcaaaaaaaaaaaaacaaactcttatttaatttttagttaaaattaaaacactagtacttcagaatatagatacaagtacaccatcttgaagaatttggagtttttcagggcaattcaaatgacctcattttttgttctttttgtattccagacagtgtttctgtcattggatctctgattggtagtgttaataaatattctttcagtgtgagccagattcataaaattaattttcttcattttagtagtaaaaagtagtctaatagctttttgtcagcttgatttttgtgtgtgtgtaatattcaagggcagaatgacaggacagataagcaataagaaatgtatagaattagaaaatatagtagttccctcttacccatgggacatacgttccaagacccccagtgaacgtctgaaaccatggatagtatagacacctctatacactgttttttcctatacatatatacctatgataaagttctatttataaatcagggacagcaagagataaacaataactgcaaatagaacaattataacagtgcactgtaataaaagt

SEQ ID NO: 52997 - DNA, 571 bp, Homo Sapiens
tattgagaaagatgttttttcctcctccctcaaatatgttatctcttcatatataaaaaaataagttattccatgcttttcaggaactgtaaaaattatttcaaaaagatatttgaaaaagttttctctattctggacacaaatgcttccatttatttcaaaagaagaagaagaaaaatggaatcttaatttaaaaaaatatatgtggtagtatctgctatgagatattcagtctctataaaaaaaaaaagggacacagcttcttttaaaacccttgtttcagtccatattcaacttcatggaacttctgaaacatcattcaattttgaactttatttaagagcatttttgtactgctgtctctgactgtcatggaaagttctgtaattctaaggtgtttctggttttatttttaatttcttcatctgtaccacagtcaaattagcaaccatctcccccatcccttgggctttctgtagatcagtggatgttaggtttaaacttctgttttctttgatgaagctttcaataaaaaatgaaaataaaatcaattgaaaaaaaaaaaaaaaag

SEQ ID NO: 52998 - DNA, 612 bp, Homo Sapiens
  misc_feature (557)..(557): n is a, c, g, or t
cggccagctgcctccagggaccgcccgtccatatttattaatgtcctcagggtcccttctgccatctaggccttaggggtaagcaggtctcagtcctggcaccatgcacatgtctgaggctgagcaagggctgagaggagaggcttgggcctcagtttccctctgtgaagtggggggaggcaggccttcaaggagggatagaggtacaaggcttcgtctcatctgctgtctgagcatccaggcccaaaggcactgagggagtcaggagctggggctcggcacatgcagagatgacagggcagggggcagtcttcctccccctccccgaccaaacctcggggagccctcctgtgcccctccctccttgttgtccagtgctgggctccccaccccgaggtcaggctgcccaatcctctgactggatcaccgggggcttcttgcctcagttcttccctctgagcccccaggccctcccgcatctcaggttggggatggggacatggagaggaaggggccgcctactcctgcaaatgcttgtgacagatgccaggaggtanatgtgtgctggccaataaaggcccctacctgattccccgcaaaaaaaaaaaaaaa

SEQ ID NO: 52999 - DNA, 455 bp, Homo Sapiens
tcatctagaggatcccatccccggttctgggtatttgctttggcttggagcctcagtcaaaactgaggaaaggtgtcattttcacatctcgtcacacgtacagtgactgcaactaaaagcacaggctttgtagaaacagacatgggttcaggccccagctccaccattcacaaggtgtgtggcttcctgcaaggtaccttcatctctgagttacctgactccatctgagtttccttcttgtaaaactggcatccatgaaagtggctacctcgaagggcgtgaagatgaaatgaggtggaaagtaggtagcccccgaatgagggaagcattgagtgagagctggccctctgacccttctaaaagaacacagccaactttttaaactgtctttccagaaagagatggaaaacttcgaagcccctttccactgccttgcaaagcagttccaccagctg

SEQ ID NO: 53000 - DNA, 613 bp, Homo Sapiens
actgtactgactcctagatggagcaagagcataggccactattggcgaaggactctatgtagctctaagctacatagagactccttgataaaaaccactgggaactgctcttcaaagactgggacagtgatacgaagtgtaccctgaaagtcaggacaatttgagaggaaatatcagatgaaagcaaaacattcaaggaattattggatgaatttccagttgttactataattatagataggcatacaagagcttcttgtgtcccaaaggaaatgtgcctgagaaatttttagaattaagacagaattaaggcaacaagatggaagataacagaagagagccaggcaggacagtgataaatggaatccaagctcagatcagctgttaatccaattagaaaatgcaagccagttaagattatctaactcagaaaggtgagggcggccaagattttttggacaatggttgcttttggcagaccaaaacctactgacttatctctcacaactgaagtccccattagataaatctagaaccaaatgttagataagcacatgtccggcccagaaaagagagaaagttaaaaaaaaaaaagaaaaaaaaatatgcggcc

SEQ ID NO: 53001 - DNA, 893 bp, Homo Sapiens
  misc_feature (643)..(643): n is a, c, g, or t
ttgggaggctgaactggctaccctcaaaggaaataatgccaaactcactgcagccctgctggagtccactgccaatgtgaaacaatggaaacagcaacttgctgcctatcaagaggaagcagaacgtctgcacaagcgggtgactgaacttgaatgtgttagtagccaagcaaatgcagtacatactcataagacagaattaaatcagacaatacaagaactggaagagacactgaaactgaaggaagaggaaatagaaaggttaaaacaagaaattgataatgccagagaactacaagaacagagggattctttgactcagaaactacaggaagtagaaattcggaacaaagacctggagggacaactgtctgacttagagcaacgtctggagaaaagtcagaatgaacaagaagcttttcgcaataacctgaagacactcttagaaattctggatggaaagatatttgaactaacagaattacgagataacttggccaagctactagaatgcagctaaggaaagtgaaatttcagtgccaattaattaaaagatacactgtctctcttcataggactgtttaggctctgcatcaagattgcacaaaaaaaaaaaaaaaaaaattgaatatcactcctccangaggaggatcttttgaaattggaattgtatatttcactgtaaattttagaatccagcttgtagctagttggggaaaaaagatgaaaaacttgaactacaaattacctccatgtatattattggccatagttaactagaaagttataaatagacacttaatgcaatcttttttcctgatattagccaatggggagaattaacaatgtctaggtcacatccccctttttgtggtcaacacagtgaaggattt

SEQ ID NO: 53002 - DNA, 821 bp, Homo Sapiens
ggggtgtggtgcagcccagcccacggtgcctgttccatgaatgctggctacctatgtgtgtggtacctgttgtgtccctttctcttcaaagatcctgagcaaaacaaagatacgctttccatttgatgatggagttgacatggaggcagtgcttgcattgctttgttcgcctatcatctggccacacgaggctgtcaagcaaaagaataggagtgtagttgagtagctggttggccctacatctctgagaagtgacgttacactgggttggcataagatatcctaaaatcacgctggaaccttgggcaaggaagaatgtgagcaagagtagagagagtgcctggatttcatgtcagtgaagccatgtcaccatatcatatttttgaatgaactctgagtcagttgaaatagggtaccatctaggtcagtttaagaagagtcagctcagagaaagcaagcataagggaaaatgtcacgtaaactagatcagggaacaaaatcctctccttgtggaaatatcccatgcagtttgttgatacaacttagtatcttattgccctaaaaaaaaaattccttatcattgttttcaaaaaagcaaaatcctgggaaaaattttttgtttgtcccaggccaaataaaaagggtcatttttaattttaggctgccaattttccggtgttccctcactaaggtggccattttaaaatggtccccctggatggccatttaagccaccccatccccaaaaaaggcctggcctttcactaaatccctaattttttcccacgaaactttgggggggaaatttctgggaaaaaggt

SEQ ID NO: 53003 - DNA, 1033 bp, Homo Sapiens
  misc_feature (884)..(884): n is a, c, g, or t
  misc_feature (893)..(893): n is a, c, g, or t
  misc_feature (938)..(938): n is a, c, g, or t
gaattctcgggatccgccatgaagagagaagggggtgccgcccacctctgctccgacagcctcccggagtcccagcagcaagacggcaaccacgcacccaacttctccagccacggctcatgccgccgtcgccagcggcgccgacatgacaaggcgctgcatgcccgctaggccaggtttcccctcatccccagccccggggtcgtcgcccccgcgctgccatctgagacccggtagtaccgcccatgctgcagcgggaaagagaacagagagtcctggggacaggtaccgtgcagagggcttgagaaggggccgggtcgcgggggcaagggtatgaggggagggctgcagaccgccgctcttccagttcccgccatcctccgcgagctcaggcgttggcatttcggggcctggcaaatccccgccccgcctccgcgcaggggctactgggagttggagtttgcttctctgtagttgggcagctgctcttggtctagtgaccaccagcctggacagctacggagaacccgccttaggtagaaagaaagtgatttttttcctttgcaagaatttgacccgggaccctaactgcttaatgcatatttagatcgttttctgtacgttgtcagttctactgatcctagtggtttagtaatataaaccttttctatgttgtgggtgaaattatgtaacctgtgatgagggaatcccttccacgaattactttgtagtccagcgtgcacgctagttcatacttaaaagaacttgcagatttggaatgtgacgtgttttctctttcagtaacttcacgcctctccaagaggctaatttttttgtaaagattttgtggggagctatgtaaatgagatggggagtttcatctnaatgacatncctctgaccataaaacatgttttaaattcccctacgaaacttggnaactgcctttttattttaaagttaaaatggtattaaggttttaacaatatttcatggtaactaataactggggggtaccgggcccacccaatccc

SEQ ID NO: 53004 - DNA, 598 bp, Homo Sapiens
agtataaatatagggaagaggttagcatgaacttacaaattgttttaagtaatcctcttgaatgccagtcattaaaggactttgcccttctacatcaaattacatccttttcacaaatccccatttctgtaataactggtgcaaacctaaaggtgctttatagttttactactttgcagatttgcaatgctgcatataatgtattaagagcattaaaaacttttgtaaaaactcatgattttgataaacttttaaagtagcgtttatatgtaaatagaactacacatggcacacacacttgcacaagggcttcagaaaaacgtgcaatataggtgagaaaaatgtctattgaaactttctcacaggctgcccttataattaaactagtgttggggcaagcaacatctgtttcaagtagatcagggactagcaaacctaaaaggcagcaagcagcctgcagtttgctcaatccttaagaatacatggttcatacaacatgcttttactatgtcttaagtgtgacttttgaaagatacaagtgttctgtgcatatttgtgtaaataaatacataattttccaccttgaaaaaaaaaaaaa

SEQ ID NO: 53005 - DNA, 678 bp, Homo Sapiens
  misc_feature (630)..(630): n is a, c, g, or t
tcaagtttgtaagaacttaaaagtacaaatcatgagtctttgggaaaaaaccgcccaataatgaaattcaactaaagaagaaatgaatcaaattaaggacttaggaacaaagaatcagtaaaaggagtgttagtaaacacttcagaaactttaaaaataatgggcaatgattataaagtcaaatattatgaacactgtctatatagaaataacaagtagagtgtgctggtttcatctttcatagcaggaatcacgtacagtctctaattaaaacatacatgaagctagaaaaaaaaatagcctctttattgttttccgtaattgtccttaattttaggagaaatcttacaagactagattctcttgtggggaaaaaagtatttaaattgagcattttttcagtttcacacttgttttccttttgttaatttgctatatttgttaaatatagcatatgagcccacttttgtaaaactatttgtatatatgtgcctgtatgattaagagagatggttggaatgaatgaagttcaccagatagtacttctttctggctgatgaacttttgaatgatttttaaactttgtacttttatataatgcttattttctttttacaatcaaacattggntaattttctaacccaacggaaccacgaccacacacacagcaacacaaa

SEQ ID NO: 53006 - DNA, 606 bp, Homo Sapiens
tgtagccatcctccttctttgaagtctcatatgtggaaacatgcaagtgaccaaaattacaactacgaacaagtaaacaaggctattaacgacgcgatttcacaaagtcggcagagttctgcgggaaatcccctggaaagactcaattaaagagcagtgaagagagtgcagatcccgtcactggaagttcggaaaatgcagtgtcatcttcagaactgatgtcccagactcccagtgaagttctgggtaccaacgagaatgagaaactgagccctacaagtaatacctcatatagtttagaaaaaatctccagtctggcccctcctagcatggagtactgcgttttactcttctgctgttgtaattgtggttttgaagtcaaccagcaaagaaaacctcttggatcatatgaaagagcacgagggtgaaattgtaaacatcatcctgaataaggaccacaatacagctctaaacacaaattaggtggaataatgactcgagcaggaaagcagtagaagaggattccttcaccacagtttcacctttacgctgtcagacaacttcctgccacagaagaagtcgttgatgtgatttttgaggaaatgg

SEQ ID NO: 53007 - DNA, 593 bp, Homo Sapiens
tttttttttttgtactttggtagagatggggtttcaccatgttgcccaagctggtctcgaactcctgagctcaggaatccgcccacctcggccttccgaagtgttgggattacgggcgtaagtcaccatgcccagccaagaaagctattcttgaagtgtaaaacagccaggtgcaaaattattttggagtactttagtttgcttttgtttttagccaaagggatttcatactggtttaattatgttcatccttgagaatttttgagaagtttccaacagatttgtagttcattttgctgttgttacaatgtaaagctatatatagttgacccttgaacaacacaggttggaactgcaaggatccacttatacatggattttcttctgcctctgccacccttgagacggcaagaccaggccctccccttcctcctccttctcagcctactcagtatgaagacgacagagatgaaacacttatgatgatccacttctacttaatgagtagtaaatatattttcttttccttatgattttcttactattttctttagcttgctttattataagaatatagccctcgtgccgaattc

SEQ ID NO: 53008 - DNA, 922 bp, Homo Sapiens
agtggctggggagacattaggtggtggggcccagcccgacctccaggttcttccttctccctagctgttgctttggtctggccactcccagcccccttgtccccttggaagcttgccctgccctcatcttgcccatgccttctactgccaggagacttgcacccatttcaaccctagggcgggggcaagtggggcaaggatggaccagcagaaggggggtaaggctctgttcacttccccctgcctccacagaacgaagccacggattccgttatcttcctccagttttgttccttctccagcctcagttccaccaggtgtcaggactgcatgggggcctggggcaggcagaggagtcaggccagggtccctgacggagcagcactcagcatgtgagtgaggccacagaaaaactctgccccactgcttcttacctcacgggggtggctttcagggattctttagcgcagcagattaaaatcttgccacagtcgagaaattgacaacaagcttccatgctgtacatggttctctttttctctcttttatttttaaaaagaaaacccagaaagatgtaccagatttgtgtaaatgagggtatgccagaaggtggccagttttgctttatgatcttatgaaggaagatttgtgaccctacgtatatatatacccacacatacatatatatatatatcccgaaccaacaacgggactttgtttatattgcaaataaatattatttttttctttaaagccggggcggcccccccgcgggaagccgcacaccacgaaagccgccgcctgacccgacgtataacaacaccacaaaaggaggagcgcgcacgggacccccacccgggcaacccaccgcgggaagggcggcgcgcgcctcaaaagataccccccgcggagcgcggcccaa

SEQ ID NO: 53009 - DNA, 560 bp, Homo Sapiens
ccgggcatggtggcttacgcctgtaatcccagcactttgggacgccgaggtgggtagatcatttgaggtcaggagttcaggaccagcttggccaacatggtgagaccctgtctctactgaaactgcgaaaaattggccgggcatggtggcgcgcgcctgtgatcccaactacttgggaggctgtggtgggaggatcacttgggcccaggagacagaggttgcggtgagttgagatcgagattgtgccactgcactccagcctgggcacagagtgagattccgtctcaaaaaaaaaaaaaaaaaaaaaagtagaaagcaagaaagtgtctctgtacaggtaggcatgaaatgaatccttctcttcctcccctttactcctttaaccccttctcctgcaatgtcttgaagtaaattactgtcattacagaagagcaatgcactgcatccccccaaaacctttctatatgcttttgctaccccgttaacagaagaatatacagaactgtcttaggcgaaagtatgtacagtagtccctctcttatccactgtttcgcattctg

SEQ ID NO: 53010 - DNA, 872 bp, Homo Sapiens
cggacgcgtgggctgtaatcgcagccctttcaggaggctgagacaggagaatcgcttgaaccctagaggcggagtttgcagtgagccgagatagtgccattgtactccagcttgggcaacagagtaagactctgtctcaaaaaaaaaaaaacaaaaacaaacaaacaaaaaaaacacctcaccatgagtgtgctacattgtgaattagattttaagtgccatattttaattagttctcagaagaagggagaaatgatcataggactgggaattgtttggcaaacgttctaggagatgtgcagagaaattttgtaaccacttcttagtggcccaagaaaatacaggcctgaagggataagatggtgtctctatagagcttcaaagcatacaggtcaattaagaaagcccctctctctccagagccgtttccctagctttgggcacctggttgccacagtcctccattaggctgatgactccaaagattgtactctagcctcttgcctgagcttcagactcgcgtccacttgcccacgggacacatccacctggatgtgactcacaggtacctccaacccatcatgtggagatactcatcctgttccccctagagctgctcttcctgctgaattctctctctccattcctgggacccgcaagctaggaacctgggagtcatccttgatactttctcttcctccttaatcctgtggttttccggcacgtaactaaagggttgggtgtctggcccaggcattgaggcccattgcctgttatcccagcctttgggagcgccaagcaggcggatccttgacgcagagcctcagacaggctggccacttgtgaaccccttttctcttcacacacaaaga

SEQ ID NO: 53011 - DNA, 371 bp, Homo Sapiens
tcatggaacatctggaccctgatgaagaagaagaagaaggggaggtttcagctagcacaaatgctcggaacaaagcaattacctcactgcttggaggaggcagccctaaaaataatacagcagcagagacagaagatgatgaaagtgatggggaggatagaggaggaggcacttcaggggtgaggcggaggaggagtcaacgtatttcgcagcgtattacgtaaaatgatttttatgtgcttatatatgtcagtctattaaatgtacaccaagtaatgtaatacttaaaagagaaaacattttgtagatagagattctctacttacccgtttatacatccttttgtaggaaagtttaaccttaaaagacat

SEQ ID NO: 53012 - DNA, 564 bp, Homo Sapiens
ggaaatcctgataaaggcaaacctgttgagccatttggtcccataggatcccaggacccaagtcctgtgtttcatcgttactaccatgtgttccgtgagggagaactggaaggtgcctgcaggactgtgagtgatgtcagaattctgcaaagctactacgatcaaggaaactggtgtgtgattcttcaaaaggcctgattatttacctgaacacatcatatataaagaagaaatgctcacttaaaaaaaaaagagagaataaattaattacccttttaattaaagagaaaacttgtgggaaagtaccaaaggaaagctgagaaaaatttggaagtagggattcattaggagacattcaaatgtctcctgttggctgacatcacagatgtggtgttggctcctcctacttccctaggagaggtggttttctaaagtgattgaagcagtttgtgcagtgtttgtaattcttgggtaagagcccaggattttgaagaaaatagttttttagtaaagtgctactaaatgtaggaaaatatgtaggattttagggatgtaattatatgt

SEQ ID NO: 53013 - DNA, 471 bp, Homo Sapiens
caatgctttggactgtgatttgagatttagaaataaattagatatattattgaggcttagaatcctcaaactttgtattttatacatttagccaataaggaattaatatctggggaaataaatttaggcaaatatttcttttttaatgttttattacctgcttctcctgtgttttagttcaacatttgggcttcttggcctgattttcatacaatctcaatttacgaagctgtaaagaggaagatatttgttctaatctcactcttctaataggaatcaggcaaatgaaagtctaccagacttttaaaatgggctgtttttatactctctaggtgttttgtgttgtaaagaccttattaaggtcaggtaaattggtctgcttgctgttgaaatttgccttctagcaaacatatgtgctttctgtttgaccttgtgtttgctgccaaacctaatacagttgaattgggaaac

SEQ ID NO: 53014 - DNA, 836 bp, Homo Sapiens
  misc_feature (9)..(9): n is a, c, g, or t
  misc_feature (696)..(696): n is a, c, g, or t
  misc_feature (764)..(764): n is a, c, g, or t
  misc_feature (769)..(769): n is a, c, g, or t
  misc_feature (778)..(778): n is a, c, g, or t
  misc_feature (810)..(810): n is a, c, g, or t
  misc_feature (813)..(813): n is a, c, g, or t
cccctgggnacctgggccgccttttcttggctgagttccctgctgttgtgcgtggtgccattttttttttttaaacacatattaaaaacaaaacactggttctgtgtgtatcaacttaatttgcatatgaatgagtgttgtgttgtgatttgcagtgttttgacaccgtgattggctttgtttgggtctctcttctttctgtgaaattaactgctgtgcgttttcactgttcttagagaagaccctgagctcctggggttttcttgtctcacttctaccctgacctgctgggagcccaccccaccccagtccagccatgagggtatttccagcctattccaatgactgaaacccttcttggaagaaaacgtctaatgtcggggacgtagggacgcttccagacttgccctggccggaaccctgcagcctggggcccaagcccgcctgcagctcagccttccccaacaccctcaggacccagccccagccccggcagaccttccctgggagctgcttaggtggtctccacagcgccctctaggggccaagcagggttccagattctccagccttctgccagctttaaaacccttcactcaagcagcattactgtacatgcaatgaaaaatactatatatgacagtcaaaacctgtgtacatatttccatgtacatatttatacatacacacaccttncctattataatatataaagcatgacatctctttggcattccaaggttgtgtttttttaaatcccttgnaatanccgctttgnaacctttttcttcctttccctcttttctatgntgnaataaacattcatgtgacctttc

SEQ ID NO: 53015 - DNA, 546 bp, Homo Sapiens
atttactcctacattgtaaatacattgatgccaacaaaattccaactgctactaacaaaggtttggttggtgataagctaataacagctactttgtgtaggaggtaaatatgtgtactggagggggtaaaaatccatttaggttatggcaaagatgggaatcaaactgtaaaactcatagccccataaaattaatattctttgttaagtgccagagggtttaagagaacttcttgcttagagtttattgataataataatgcttcagaatatcccatttaaatgtacagtgtaaatatgtaaaatattttacttcccaggcaagtttgtggctgtattgccacttagtggctctttgtgactggcagttctgtatatctgaaacaaataagctgtaagcacttttgttaaaactttgtcaaataatccttttatgtacttgttctcagacctgttctctggttatgaaatgtgttaaagacaaggtgcaaatttaaaacaatgcctgtattgaaataaatgacttaaacagaaaaaaaaaaaaaaa

SEQ ID NO: 53016 - DNA, 688 bp, Homo Sapiens
cgcgtccggcgcagctagctcagcaggcggcagcggcggcctgagcttcagggcagccagctccctcccggtctcgccttccctcgcggtcagcatgaaagccttcagtcccgtgaggtccgttaggaaaaacagcctgtcggaccacagcctgggcatctcccggagcaaaacccctgtggacgacccgatgagcctgctatacaacatgaacgactgctactccaagctcaaggagctggtgcccagcatcccccagaacaagaaggtgagcaagatggaaatcctgcagcacgtcatcgactacatcttggacctgcagatcgccctggactcgcatcccactattgtcagcctgcatcaccagagacccgggcagaaccaggcgtccaggacgccgctgaccaccctcaacacggatatcagcatcctgtccttgcaggtaagacctgctccggggtccccgccccgccgccgcacactcccgcggtcgtctgggctgtcactaggagatccgtagcccagacggtgactttcgtatgagctatttaactttattttcttcagaatctgctgtagattgagctgtgcgtgaaattgctagtaagttctgacatgttaatgcgtctgtctttaaatctgaattgttaccataaacgtgtttaatggaacttgctggtctgtggac

SEQ ID NO: 53017 - DNA, 790 bp, Homo Sapiens
ccccgcgtccgagaaacctttcaatgtatggaatgtgagaaagcattcagctgtagttctaactatattgtgcaccagagaatccatacaggagagaaaccctttcagtgtaaggagtgtggaaaagccttccatgttaatgcccatttaattcggcatcagagaagccacactggggagaaacccttcagatgtgtggaatgtggcaaaggcttcagctttagttctgactacattatacatcagacagtccacacttggaagaaaccctatatgtgtagtgtgtgtgggaaagcattcaggtttagcttccagctcagtcagcatcagagtgtccatagtgaaggaaaatcctaataatgagaaagatatagaaaactcttaaggttaatgccaaaatggatcaagtatcatcagattcatccattgaaaaacctccaagagggcatgaatatggcagagtcttcatatggaaacagtttttattctattcagtttaaatcaggaaaggatgaccagttaaagagaaacatccaaaaatagctttgttttgtaccaacaggaattagaaaatataatgaaaagatttcgttcccagcagcatcaagaaaagtagattttctagaaataaacagttatggaggacttgtatggagaaatttaagtcttcactgagggccactttacaaaggaaatttgaataaatggagagagagagaagccttgttgttggataggaaaacccgtactaaagatactctacctacattaatttatttggtttaatttt

SEQ ID NO: 53018 - DNA, 626 bp, Homo Sapiens
cgcgtccgaggagatagagtatgtgaaattaaatgggagaagtatctgatacataacaggcaatacaaatattatcacatagcgtcaacttatttgtgaatattgaaagctccaaaaaaagaaaaaaggttttttttaattcccgtaatcacttattgcagtattgtgtacatacaaagtgctcaatcattttggaggaataacaattttttttcctcatcatgaagtaaggtatgctcactgcaaaaaatctagaaaataaagaggaacatactaaagaaaagaatactcctatataatctctgtcttcataaataatcttttgtaacacttatacactgctggtgggaatgtaaattagttcagccattgtgaaaagtagtgtagcaattccttgaaaaacttaaaatagaattaccgttcaacccagcaatcccattattgggcatatacccagtggaatgtaaatcatcctgccataaaaacacatgcacatgtatgttcattgcagcactattcacaatagcaaagacatggaatcaacctatatgcccatcagtagtagactgaataaagaaatatggtacatattcaccacagaatactaagcagccataaaaaaaaaa

SEQ ID NO: 53019 - DNA, 511 bp, Homo Sapiens
  misc_feature (454)..(454): n is a, c, g, or t
cacgagggagacccagaaatttgaggcctggctggctgaggttgaaggccggctcccagcacgcaacgagcaggcgcgccggcagagcggactgtacgacagccagaacccacccacagtcaacaactgcgcccaggaccgtgagagcagcccagatggcagttacacagaggagcagagtcaggagagtgagatgaaggtgctggccacggattttgacgacgagtttgatgatgaggagcccctccctgccatagggacgtgcaaagctctctacacatttgaaggtcagaatgaaggaacgatttccgtagttgaaggagaaacattgtatgtcatagaggaagacaaaggcgatggctggacccgcattcggagaaatgaagatgaagagggttatgtccccacttcatatgtcgaagtctgtttggacaaaaatgccaaagattcctanaggggagtgcctgcgagcctcgggtgagccttcctggaggagcctccgtctgcttgt

SEQ ID NO: 53020 - DNA, 695 bp, Homo Sapiens
gacaaggttcagggtgccctgctgaatggtgtgaacagcaggatctcaaggatgtaatggaaagaactaccacactgaccatccagaatctaagagaccatctgggtgtttgggaaaccatctgacgaggcctgactctattccagttagattgacaataattgagcagcaggcatttttcatttctggtcaggaaagcattgtgcctttagcaaacaatcagtgtgcaacagtgatgtggtcatctagccagggaatggctgctccatcccctgcataatatattcctgcttcaaacacctctcagaaaaccagttccgcgagggtttttatatccccacaaagttgttgagagacaatgatgaccctggaagtggggaggaggacttctgagaaacagcaacctctctcctgattggggtagccatgagatttctctagctatatccaacttggcatctgtacatcatctttggaggaacatcttatttgtggaaggaccttgacaagccgtttgagatggaatgtaggccctgatgttatgcttcagtaaaaaaagatggaagcttccctgctataccaaaacatggagcaaaatttgcatttttctcaagaaggagagaaaaggagtaggactccagcaaagtttgtcagaaggaaagctagaaaagatttaaaagaaaaaaaaaaaaaaa

SEQ ID NO: 53021 - DNA, 808 bp, Homo Sapiens
  misc_feature (605)..(605): n is a, c, g, or t
aaactaccccgcattcagttttcacattatctgcaagctgaaacttatttttaagttttgtgtacaagttgactgctgtaaagatatatatttttgggtcagtttttttccttcattaacttggtggtagaaaaaatatatacttagaaatccttaaattaaagccatgttttatatataagtcaggtaacattggtgtatagatgagaatgcaattaaacctgatgagaatctacttgagaatatagaaagtctttctctaaaggagatactgactccctggtttattgcattaaaatttatgtttgaggttacctcaacttgttttaaaagattttgttttgtgaatttgtactgtatatttgagtaactgtcaggcttttatttaaaaattgtttaacatgtaccatgtacatgtcattactatatttcaatgcatcatgcttgtaacaggcatttcatttataataagaatgagttattcatttgtaagccgttcagtaatttatctactattcctaaattggcataatgttagataatctattttgaatcacctttaattacatgttcagaatgccttaacttaccctaacttgacaaanacagaattcttttggtagacgcggtgggggcgggggtggggggtctggacggagtctctatttcaaggcagaaatcatcatgctatgataaaacacagaaagcatgagtggcaaagtggcggggtattattttgcacaaactatttgcagccctggttttcacaagttaacacagtggcgtcccgaagggttggtcccatgac

SEQ ID NO: 53022 - DNA, 463 bp, Homo Sapiens
cttatcaaagaaataacccagacttaatcttgaatgatacgattatgcccaatattaagtaaaaaatataagaaaaggttatcttaaatagatcttaggcaaaataccagctgatgaaggcatctgatgccttcatctgttcagtcatctccaaaaacagtaaaaataaccactttttgttgggcaatatgaaatttttaaaggagtagaataccaaatgatagaaacagactgcctgaattgagaattttgattttttaaagtgtgtttctttctaaattgctgttccttaatttgattaatttaattcatgtattatgattaaatctgaggcagatgagcttacaagtattgaaataattactaattaatcacaaatgtgaagttatgcatgatgtaaaaaatacaaacattctaattaaaggctttgcaacacaaaaaaaaaaaaaaaaaaaggccacat

SEQ ID NO: 53023 - DNA, 777 bp, Homo Sapiens
  misc_feature (687)..(687): n is a, c, g, or t
  misc_feature (716)..(716): n is a, c, g, or t
  misc_feature (730)..(730): n is a, c, g, or t
  misc_feature (744)..(744): n is a, c, g, or t
  misc_feature (746)..(746): n is a, c, g, or t
  misc_feature (751)..(752): n is a, c, g, or t
  misc_feature (754)..(754): n is a, c, g, or t
  misc_feature (763)..(763): n is a, c, g, or t
  misc_feature (769)..(769): n is a, c, g, or t
ggtggtgaaaccctgtctctattaaaaatacaaaaattagctgggcgtggtggcgcatgcctgtagtcccaactactagggaggctgaggcaggagaatcacttgaacccaggaggtggaggttgcagtgagccgagatcacgccactgcactccagcctggcgacagagcgagactccctctcaaaaaaaaaaaaaaaaatacaaaaaattagccgggcattgtggtgcatgcctgtaatctcagctatttgggaggccgaggcaggagaatcacttgaacccaggaggcagaggttgcagtgagtcgagatcgtgccactgcactccagcctgggtgacagagcaagactttgtctcaaaaataataatagtaaaatgttacatgtgcatgaagttttaaattactcatttttattaatgaagaaaataaggtagtttagacattccaagagttaactatagtttacaaaaatatattaagcaaaaatatgcttgatatattaagcagaaatgttgtatattaagcaaaaatgtaaaattcagcaattataaactgttccttacagacagtgtacttgaagtcttttggtagttctgagaatgtggtcattgaagttggatctaagaggaaagtggttatcggttgctttttatttataaaggatgcaaaaataaaattagattntttggcagtccttaaaaaaaaaaaaaccnaaaaaaaaaaaaanaaaaaaaaaaaaananaaaannanaaaaaaaanaaaaanaaaaaaaa

SEQ ID NO: 53024 - DNA, 563 bp, Homo Sapiens
cttatatgctagtttggatccaatgctgtaaaagctctcaacgaaatgtggaagtgtcagaacatgcttcggagccatgtacgcgaactattggatttgcacaagcagcctacatcagaggctaactgttctgccatgtttggaaaactgatgaccatagcaaagaatttgcctgaccccgggaaagcacaagattttgtgaagaaatttaaccaggttctcggcgatgatgagaaacttcggtctcagttggagttattaattagcccaacctgttcttgcaaacaagcagatatttgtgtgagagaaatagcccggaaacttgcaaatcctaagcaaccaacaaatccttttctagagatggtcaaatttctgttggaaagaatcgcacctgtgcacattgattcagaagccataagtgcactagtgaaattgatgaataagtcaatagaggggacagcagatgatgaagaggagggtgtaagtccagatacagctatccgttcaggacttgaacttcttaagggtctgtcttttacacatcctacctcgttccactctgc

SEQ ID NO: 53025 - DNA, 773 bp, Homo Sapiens
gatgaagaaggccatgaagaaaggactgcaaaagactacagggaaacttttgggagtgatctatatattcatcatcttgattgtggtgattgttttgtgagtcaaaatgtatcaaattatatgttttaaatatgtgcagtttagtacacttcagttatacctcagcaaagctgaaaaatccattcaactctgatttgaaatgccatcttgtctgatgctgtttacatgtctctgagtgtgtttctaggctctcttcaagtctactaaacaaatatatttgactttatgtttctatattgacataaatagttagacagtatcttttcagtaaaagtgttgggagaactgggaagccacctgaaaaaaaatattgatagattcgtattcatacaccaggataaattccaagtggaacagtcatgagctccaaaccactcaagcccctgccttggcattacacttaatgacctatacttaagtcaggccatgacatgaactaaacactggtactaatatcagaatctttttcatagggggcttcctggaacttgacttggacctatgggctagaatttaccgagagcagctgacccgtgctttgcttttactattccaggaatgcagataaagtctaacttccagctagacatggtggctcgtgtctgtattcctagctactcgggagcctgagatgagaggattccttgagcccaggagtttgagtccatcctgggcaacataggaagccaccatctcttaaaaaaaaaaaaaaa

SEQ ID NO: 53026 - DNA, 742 bp, Homo Sapiens
cgtccggtggacagtgccacacgccctcctggacaacgacggctcttgcgtgcattttccagtgttgcttttgtcagagaggccagcagagccacggttcttccagaaccagccctgagctgagtgaggagtgcccaggagagatggtgaaaatgacaaagtccaaaactttccaagcgtatctgccgaactgtcaccgaacgtacagctgtatccactgcagagcacacctggccaatcatgacgagctcatctccaagtcctttcaggggagccagggacgcgcctacctcttcaattccgtggtgaacgtgggctgcggccctgcagaggagagggtccttctcaccgggctgcatgcggttgccgacatctactgcgagaactgcaagaccacgctcgggtggaaatacgagcatgcctttgagagcagtcagaaatataaggaaggaaaattcatcattgagcttgctcatatgatcaaagacaatggctgggagtaatgtgcgaactttcccttctcctttgaatgctgttttgtgaaagaaactgtgaatgtaatggaaacgtaggagcatctggtgacagcctttcttgccctctgacctcaaaggctagctgcgcatagctcttgacactctcggccatctctgtgggtaaggtgtccctcggatctgtcctcttcgtgtacacagttgtttctgaaaattttcaatgagctttttctaacttctcaagttct

SEQ ID NO: 53027 - DNA, 625 bp, Homo Sapiens
aaaggatatagagagaccaagttgttgaggacaatagctggagtttagtcttccagaagtatttttcttgccagaattgatcaaaggaagagccaacggcactggataggagattctagcatttggctgcttctccaagacaagcgaggttagaagggagttgagaagttatgtcatcttccactgcagcagataccccttttttagtacttggagatcccccgaatcacagcatttctaaatcagccctggattccacaagtgaagcagcggaggaaccaggaggtcagcggtgtcactcaaatctgtggcaatcaagtgggagttctcaaaaggctatcaaaggaagggggttatgataaggaaaggctcaagacctgcctcagaaggagtgagcagggaagagcaggactgactccactcagtgcaggatccagtacaaaatgaagatgtgaggcttttgtgcaaacagcaggaaaacattacctttacaggtactaaaatgtaatgtttttcctttcttccatagtgtctttctcaacttgttatggctgtgttttttatttgctacttaatgctgttctaactaaaaacttaaatgttaaattccaaaaaaaaaaaaaaa

SEQ ID NO: 53028 - DNA, 456 bp, Homo Sapiens
ccttctggccctggagcatgggtagctggcatagaggggtatgggttgcctgccccattctgctgctatagctgaacagtcctttccccttccctcgctgggcagcttggaggtaccctaacccaaaactctgtcctctcctcccgccagtggctgacagtagctgtaggtgtagtggagaacttttctgcctctgctgtgttcttgctgcttaggtttgggtgggggactaacagctgctgggaggggagctaggggcatggagaactggtcagactcaaggtggctcctctgcaaactgaccccagggttggttgctgtgggcatgttcccgcttatgctacctttgcagtctggtagtcccctggcccttggcgtacccctccacagccctgttccctggctcatcccacctttcctttccacagagctcgtccgcatggtgctgaatggctg

SEQ ID NO: 53029 - DNA, 626 bp, Homo Sapiens
gattattttaaaaactatgtttatatataatacctaacaagctgtaaatattgtatattattgatttttaattttatataagcaattttttatttcccaattcatgtacaaatctcattatgtatatagcataatttcctggagaacacaaattttgcagtgaattttaagtaattttaattgctgtaagcatcagtttagcctagagatgttgatctttattttaaattatttttcaccattctcattttcttcaaagggcagcaataaacatatgcaagttatttttaattatagaaagtaggtctacaaagataagatctaggttccaattcattgctttaaggaaaagatgcacaattactatcattcagtgtctaatcacaggaccatttctgaggtccacatgtggctctcctctttgtaatatacagggtgaactctttactgatacacacaagacaactgttaaaaagtgaatccagcacttaaatgtcattacacagaatttattggattaaaaatttgtaatatacagtattttaataaagtttctgtattcaatttcatgcacttatatataaataaacctgtctttgaaagcttaaaaaaaaaaaaaaaaaaat

SEQ ID NO: 53030 - DNA, 709 bp, Homo Sapiens
cgtcgaccccgcgtccggcaaaagagacatttaatatttcaagaaatgcatatgtatgtatacatatatttgtgtatgcgtatgcaagaattcttgtataaagagaattcactccatgaatgatctcttctgtaagtcagtgtgaatcatgttagattttctgagagtgaaaacacctgccatctacaaattacaaggctggataacagctcactccatttgaaattcagtggaaacccaagagctaggttcttactgaatttgcatctcaatttgggaaactgaacttagctttcaaagatcataggaagtctggttggagaaactagggattattctggcaatgggtggaggaaggtggtcagaataacccagtcgccattggttttgagaaacggaactatcttatgcagagcccggagggcaagtctcaaacccatgggttgaagccatggagaaggaaatttggatccaatgtaatgaagctctttctaagtcagaatttccctgcaatggtgtggcctgattcaataaaaattaagaataataaatataatggaaaaaaatctccactgattgagtgtttacttggtgccaagcactatgctaagttgttcattattttatttaattgttacagcaattttgagtatgcatctttcactattttataagtggaaaagagaagtgcccccaaaaagttagagct

SEQ ID NO: 53031 - DNA, 725 bp, Homo Sapiens
  misc_feature (650)..(650): n is a, c, g, or t
ccacgacgacagaaggcgccgatggccgcgcctgctgagccctgcgcggggcagggggtctggaaccagacagagcctgaacctgccgccaccagcctgctgagcctgtgcttcctgagaacagcaggggtctgggtaccccccatgtacctctgggtccttggtcccatctacctcctcttcatccaccaccatggccggggctacctccggatgtccccactcttcaaagccaagatggtagctgccatccctgggagcctggaaccaggcaatgttcgggggaggcaggggacaggctggaacctggtgaagtcttaaagtagactcctcctatcggggtgtagaagggaatctgttaatcaaacagagcaatattagaaaggctacagaggtcaactcagtggaacacggttctcccaaacagattttgtaattccgaaaatccacgcatgcgcaaacatacgcatacactcccatgttcctggacagtttatagctaccataacctggcattttccaaaacataccatgtagactcttggatacacaaggtaattttagagccacattaggatgaaccttttaaaaagttatgcatttatttttatgttcccccactggctgtattataggacaatttttatatngtgatatgtatttacccttagtgtgttaaataaacactggcattccaagtgtgaaaaaaaaaaaaaaaaagggcg

SEQ ID NO: 53032 - DNA, 444 bp, Homo Sapiens
gcacgaggtgaaaaccgcctccaccaacacccccgtttgcctacaccaccccccttttacttagtatgtttattttttgtgtgtctcttgccttcctcccacgttttatttcccctcagagctgtgaatgggcaggtctgtctctggtttggcatcactgagtttttcccatgcattggccccagggctgctaggatgtgagacaaatctccctacaatgggcttgctcccattgtctgtacagtttaatagatgctggcatgtcggaggttacccatgagtcaaaatccgctctccatgcttactcttgacaccccattgaagccactcattgtgtgtgcgtctgggtgtgaagtccagctccgtgtggtcctgtgcttgtactgccctgctttgcagttcctttgcacttactcatcgagtgctgttttgaaatgctgacat

SEQ ID NO: 53033 - DNA, 616 bp, Homo Sapiens
tgccgactgggtcccctgccgctgtcgccaccatggctccgcaccgccccgcgcccgcgctgctttgcgcgctgtccctggcgctgtgcgcgctgtcgctgcccgtccgcgcggccactgcgtcgcggggggcgtcccaggcgggggcgccccaggggcgggtgcccgaggcgcggcccaacagcatggtggtggaacaccccgagttcctcaaggcagggaaggagcctggcctgcagatctggcgtgtggagaagttcgatctggtgcccgtgcccaccaacctttatggagacttcttcacgggcgacgcctacgtcatcctgaagacagtgcagctgaggaacggaaatctgcagtatgacctccactactggctgggcaatgagtgcagccaggatgagagcggggcggccgccatctttaccgtgcagctggatgactacctgaacggccgggccgtgcagcaccgtgaggtccagggcttcgagtcggccaccttcctaggctacttcaagtctggcctgaagtacaagaaaggaggtgtggcatcaggattcaagcacgtggtacccaacgaggtggtggtgcagagactcttccaggtcaaagggcg

SEQ ID NO: 53034 - DNA, 1294 bp, Homo Sapiens
ttttttattttttagaaacaaaacagtaagtatttgctttattgacatactaggcttagacctgtgtgtgtaacaagcaagcctaataatagcaccatggttagactagcctgcttttccaagccatcattttataatttattaagcaaacaagggatcaaatgtctctccatccacctgatgtgatctttttatatgcacacagctaatgagttccattcagctgaaaatcttttagtaaaagctttaaagatgagcccatgaattcactttaaatttcaccagttaaattaggtcaaatggaaggaactcaaatgagtattgcccaatcagagcccattattggtaagtcatcagtaaccttaaaactccacttagacctaattattgaaaacttgcatataatgaagtgaaagaatttccattcatcaacctctcaatcccaggttttcaaagaaaaacctatctaaggaatacttaccaaaatcagataagaaaatttaaacctgcatagttatcagattggtcccactacaaccagtctgcatacagttacacatcaattcgttctgtatacactctagaactgaacagaacaaagtttagcataggaacagctgtacgaacaccaggttcctaattacggaaggctggcaaaggttcacacacgggttctcgaccacacaccctacatggtcaacaatcgaacacgtacccttcagcttccacacaaacataggaaacatccctggtacaacgttcaatatccacgttctcacagagatacgattcaaacagctgtgcttaagaacatggagaaatccaaattcaaaacataaagtacagagaccccttccgcacacaggcataaaagcgacgcaaaacacacaacgccaaagacaacaccacacgaccactgcgagaccacagcaacacaagtcacaacgaggatacaacgacccgacgcatgacctctggcgcgtctctcaacaacgaaaccataggcgacagcggacaccaacaaacgagcagaaactccaccagctgaaacgcagccatgcagagcaaacacagagcaaccacgcatcatcatacaaaaagccagagccaccacggaacccatacacgaaacagtaacaacaagcagcacaacaacaccgccgtccgacacacacgtcgatcaaatacagacaccgatagcaaaacatagcaacaacgagagcgaatcgaaagcctcaacgcctcaaccccctagtcagtcccacgccacatatacgtcctgccgcactccatc

SEQ ID NO: 53035 - DNA, 598 bp, Homo Sapiens
  misc_feature (481)..(481): n is a, c, g, or t
agttattctgtattgtaatttaaaaataaaatttcttctatttgaatttttaaagttaaaaacgtaagtaaatcctgtcattgctaacagggccacatatggactcttactctttcctctagacccccagagtgtagaatgtgatacacttttgtccttttctctgaggatgtgctgcctagtgtcgtggaatctgcctgaccattgcaagcatccaattttgtgaccagttcttttgcaggaaattgtttctgagaagactggaagacaagaaatatcccacctcttctaacaagatctgaattgttcgaaaagcagccagtgcctaacttgtagctccacttatgccaactgtatatatacctctcgtgagcatagcaagtgatttaatattttgaaaagatggctaaaatccttttaatgaacagcactaaagttatatgtattagaggagaattattgaatgagatggagaaagagntctgaaattaatatttacattttggcttttttacagataatattatatttctgagtgaccagacgaaagagaaggagtagaaaggatgattcttcctttggccatcatttggtacag

SEQ ID NO: 53036 - DNA, 525 bp, Homo Sapiens
ggaagcagcaatgtgcttgtctaggttcgctattgtgagaatcaagttgatatttacctaacctatatcctccacaaaagcagacagtctggctctgctcttctttcctccatccttagcccacagcacagaaactggcacattgcaggtgctttttgctatgtcagttcctcacctgcttaaagaggtcagggaggacagtcttcctgggcgactcctggcctcaggaactcagatgtgtgagcctcgcccataagaaacaaggtggaggaccctgtagggcaggaaaatcatgttaacagctttggcgtggggcactccccaggataggcacaggagctgtgcaggcaagtagaaaagagcactgggagaacggcccagttcacagaagaggaggcagcaagtctgcacactttgtactatgctgaaattgttcaatcactcgacagttcagaaataaatataggaagattttgaaaatcctacctctctgctctgctccacagcactcctggaagcctgcac

SEQ ID NO: 53037 - DNA, 746 bp, Homo Sapiens
atggaacgcctgacccaggaagtcttacttcttcgggaaaaagttgcttcagtagaatcccagggtcaagaaatttcaggaaaccgaagacaacagttgctgctgatgctagaaggactagtagatgaacggagtcggctcaatgaggccttacaagcagagagacagctctatagcagtctggtgaagttccatgcccatccagagagctctgagagagaccgaactctgcaggtggaactggaaggggctcaggtgttacgcagtcggctagaagaagttcttggaagaagcttggagcgcttaaacaggctggagaccctggccgccattggaggtggggaactggaaagtgtgcgaattcatcacaagcatgcctactgagcactggcgggtcagactgcagcccaggatggaaaaccttgtttgcactaaccagaaagatccttgtctgattttggcagaattaaacggtgacttactaatgatagaactggtacaagtagcatcaactacaaagtgaaactcactttagcctacatggatctcactgtacatacatatcaatccctaaattgaatggtggaggttgcaaagtgtatttgcacattttaaatcattctgttttagttttccacttttattcatttcttatccctagccccttctcgttccctcatcccttctgtgggcaataaagttattccttcccccaaaagaaaaaaccgtagcaaacaaaacacctt

SEQ ID NO: 53038 - DNA, 440 bp, Homo Sapiens
attttgatgaacagaatttcttctttttatttttaaaaatatagagacaaggttttgctgtgttgcccaggttgttcttgaacgcctggtctcaagtgatcctcccaccttggcctcccaaagtgctgggattataggcataagctactgcacccatctcagaatttgtctatgtttacaatattatcaatgggtagacagctaattgcacagaatataaatgaggagaggtagatttttattaatgtgtacattttccttaattcctgatttactcaggcccaggcttctttgtttctggtcttggatctatgggcctgtgtaaatctttgtcacttagctaaaaggatttcttgaaaatccttgtagttgtttattgagcatttactgtgtactaggcactattgtaggtactagggatacagcagtgaaaaaaaaaa

SEQ ID NO: 53039 - DNA, 1062 bp, Homo Sapiens
  misc_feature (719)..(719): n is a, c, g, or t
  misc_feature (787)..(787): n is a, c, g, or t
ttctatgtaaggtgggttttatttttcttttaagggatagtttgtaatagtaagaactgtcccatatgttagtaaattacatatgtacaaattgaaactgtaaattgtgaacactggaaagcaccattgtgacatagagtaaacatcttagtaatatattaaagtgaatgtaaatggtggttaaaattacattactgtgaaattcatcttccaactctaagttaagctttggagatacatgttagtggttaactgttaagagctttgaaaacactgcacatatctgtacaagccagaattactatttctttgacttattattagcttggcagttgcttttgatttgattgttttatgacatggtatactactatatttactcagtttgaaactattcatttctacacactatttttaaaaattgcctactaggtgaaacataacaataaaactacctgtgctgaaatttgggggaagtttaggtcctttaaaaaaacatattaatcattgactacatctatgataaaagtgcttattttggtttactaagataatgcagttggtggaaatgataaacgttttaagtgttaacatcctttgaatgcgttggatttcagagaataaacattttgtaaaaatcacttggtaaggattataaacttaattactgcacttaaaatgaaacattactttttttaaacaatgtgtcacaaatgtangtctgtattacttgtatgcttgtgtgacttactgttagtccagctctaaaatttaaaggttgtaattngaatacaagaaaagagccttcttttagaagaaagccagtatattttttgcttttacttcaaatgttatttaaagtagaaaatttaatttgtagatataacccctttaaaattttcttcattaagaccaatgtttttaaatttaatttgcctcattacatctaattagttcccatttgatggccagtatagggaaaatggaaaaaaagggttggggggcgggataggggggggaaacatttaatatatcccccagaatggatttggccattttttt

SEQ ID NO: 53040 - DNA, 761 bp, Homo Sapiens
ggatcttctgccaagtgaaactgcacataaacctgacttgtcttcaaaaactcccacttctccaaaaactcttgtgaaatcgcacagtttggcacagcctcctgagtttgacagtggagttgaaactttctctatccatgcagagaagcctaaatatcaaataaataatatcagcacagtgcctaaagctattcctgtgagtccttcagctgtggaagaggatgaagatgaagatggtcatactgtggtggccacagcccgaggcatatttaacagcaatgggggcgtgctgagttccatagaaactggtgttagtataattatccctcaaggagccattcccgaaggagttgagcaggaaatctatttcaaggtctgccgggacaacagcatccttccacctttagataaagagaaaggtgaaacactgctgagtcctttggtgatgtgtggtccccatggcctcaagttcctgaagcctgtggagctgcgcttaccacactgtgcgtccatgactcctgacggttggtcttttgctctaaaatcatccgactcctcgtcgggtgatcctaaaacctggcaaaacaagtgtcttcccggagatccaaattatctcgttggagcaaactgtgtttctgtccttattgaccacttttaactcttgaaatataggaacttaaataatgtgaaactggattaaacttaatctaaatggaaccactctatcaagtattataccttttttagagttgatactacag

SEQ ID NO: 53041 - DNA, 450 bp, Homo Sapiens
ctgttgagcctaagagggtccgaataaatactggaaagaataccactttaaaattcagtgacaagaaagaagaagccaaacgtaaacgaaagaacagcactggcagtggccactctgcccaggagctgccgaccatcaggacgcctgcagacatttacagagcctttgttgatgttgtgaatggagaatatgtccctcgcaaatccatcctgaagtctcgaagtagagagaatagtgtgtgtagcgacactagtgaaagcagtgctgctgaatttgatgataggcggggagttttgaggagtatcagctgcgaagaagccacttgcagtgacaccagtgagagcattttggaagaggaaccacaagaaaatcaaaagaaacttttgcccttatcagtaacacctgaggttttgcggctagttggctattcaagaaacctcgcccctctga

SEQ ID NO: 53042 - DNA, 475 bp, Homo Sapiens
cctgggatggagcccctgcctcggccatcgggatgaggtccctcaagtccctgcacaagcaggtcagagacccacccacatgccgttcctgggctacgccacgcgccatcccccggggctgtggacgcacccagcccccgacagacaggcgccctgagagctccgaaggcgcgatccccatccccaccagtggagaagccagaaccgcgattgttgcatctgggaaaacccagctggagccgaacggcccgtgcccccactgtaattgtgctgaaaatgtttctcaaatgacccaaattggctcttattttttctaatggccctttcaaagtattcatgaaattgatgctgtgtcataaaacaaaaataaaagatttcacagcaatgtctgcttcaggcaaaaaaaaaaaaaaaaaaaaaaaaaaaaaaaaaaaaaaaaaaaaaaaaaaaaaaaaaaaaaaaaaaaaaaaggggg

SEQ ID NO: 53043 - DNA, 611 bp, Homo Sapiens
gcgtccgcagctaagcgcgaaggtgttgtttcttcctgaggtgcgctggggctgggacccggtctgcagaaggtccaggggatggcgtcgggggattgaggagaggagaccaagccggccttgcctccgggaccagcgcttccaaattctctggggcgtcccggcgcgcacacgctcctgaggcctcggcgttctgaggaaaggggctggcgtggcgacccgggtcctcgaggccgagatctggctgtggcccgcgaagccccgcttgcccgcgccagcgtcttgtcaccccgagccgagggcctgcgcgcggccgacagatatgggatgctggaggacatctgggggccacaaatgctccttctcctggagacgcaactcaagttctcatggagttttcattgtctcgtgcaatgccatcgaccttgaatttcagcataggacccatatgaagtgccactgttaatgctgggagcactccaggaagcagagaaaagttatgacatttcaagaaaaatctgaattgcttgatatgttccacagattgaggtctgtacctatggttgcccactatttcaatagtcagtgtaaggactattgtaaaaaaaaaa

SEQ ID NO: 53044 - DNA, 653 bp, Homo Sapiens
  misc_feature (617)..(617): n is a, c, g, or t
tggtagttactgccaagaattgccatccagaaacagtgtagccattcataaactcaacaacaaggtatgagagtgcctgtttcctcatatcctttgtgacaccggattttatcaagcttaaagttttttcattctaggtgggtgaaaatggtattccgttattgataatgtgtggaaatcaagttctaataagtttggggggaggttaattctttatatgtgctgtatgaattaatgccaactgtatgcctttgagagtgaaatcagaataatgtctctccactaaagcaggacttagagcactagttttccaaatgttgtctacagatggaaacactagcatcacctgggtactcgttagaaagtgcagattctctggcggtaccttagacctcctgaattagaaactctgggggtagggttagacatttgtgttttaaacaagccctccaagtggtttcaatgcacattcaaagttgagaaccaatcactgatagagaaaaagcagcttgggtagaaacagttgattatttgcaaatttatattttaaaaagataggattcttaacagtaagctctttataattcaacaatgtgatctttactcctacccccganaaactaatatgattttagtgtgtggtagctggatcg

SEQ ID NO: 53045 - DNA, 716 bp, Homo Sapiens
ttgttagtttctttgcctcagttgtagtctgatccttacagcttttaaacaacagtagagttcaccgtcaagaactaaggatggttggcaggcagatagaaaggtagcaagttgacccaactatctctggggaagtgggaacaaagaaaggttacatcagcactgtcatcacatagctctatagttctaggcctgcaggctcaatcaagtagccttgtataagattctctggaggaggtgctgaaagttgcttatacttgctatggaatttgattttacttcggatatctttttaccataggtacttctccctccaagccacacatcctcttggatttgatgatgttgtacgattagaaattgaatccaatatctgcagggaaggtgggccactccccaactgtttcacaactccattacgtcaggcctggacaaccatggagaaggtaacccagaacttcaaacgtatcaaactacaagaagttttattggtagaactcataaaatataaggtgggaaaaccaagcagaatagcacagtggaaattgaagcagtccagcaaagtgattaagagcagaggccttgagtctggcctggtatgtacagtcacgtgccacataacattttagtcaacagtggactgcgtgtacgatggtcctgtacgattataatggatcaaagctggtagtgcaataataacaaaagttagaaaaaat

SEQ ID NO: 53046 - DNA, 617 bp, Homo Sapiens
tttccccactccattttttttctttattggtgaactataaatatgtgggaatgctatggtataagatgaagagaattcagatataaaaatgaaaacttcttgatagcctttcatgccttataacccttgggttgtgggtggcaggcgatgacgggcagagagataatttaaatacaaaattaggatctagaacttaggcaagaatttattggctggagatataacttagagtaatcactgttataagcaaaatcctggaagtagccaaacatgtagggagaaagtacacaggataggaaagatgagaagggatagaatcttggagacgctgacgtctgaggacaagctatgccttcaagaggcataaggcaaaaatgcatgacccaatgaacccagccctgctgtgaaaggcctcctttcactgagtcatatctgtgggctcctgcactttgttccctggcttcttgccttaattcccttggatttcaggacttttttgttagggaatcacaatctgtgcctgacttcccatggatcccccaagatagatcttgctcagcgaagacatgggcaataaaagcttaaaaggaatggtcagagttaaaaaaaaaaaaaaa

SEQ ID NO: 53047 - DNA, 546 bp, Homo Sapiens
caagcactaccacacatggtctccccacctggtttcagctagtgcattagttttatcttgttttttaccgctgggcaaaccttgctggaacaacaactgacttcatgatttgcacatttggagggcttaacgtctttgcaaatgaaaaatccactgtacaataacaagctcaaaggaactcggagcctttttagaagaaatcgtgctgaattataatgtggcttactgcaataatgtttctttgatcaggatggaaaggaaaatactgagtttagcagaaaacgatgtctaaatgtatttgtaatgatacaattgtttataaatgttttactattaggttgaaccataagaaattgccagtgtacaatttcatctacaaaatgactggcttaacctaaattctgcattttatactccaagaataagctcttcgtggcagctttctaagtgtgaaatgatggaactttctatttgccagaatgacctacacttctctaatagtttatctcatattgttagccaaacgctgattaaaatgcaaatttc

SEQ ID NO: 53048 - DNA, 677 bp, Homo Sapiens
ggaatttgtgtttttactttacacttcaattccttacacggtatttcaaacaaacagttttgctgagaggagcttttgtctctccttaagaaaatgtttataaagctgaaaggaaatcaaacagtaatcttaaaaatgaaaacaaaacaacccaacaacctagataactacagtgatcagggagcacagttcaactccttgttatgttttagtcatatggcctactcaaacagctaaataacaacaccagtggcagataaaaatcaccatttatctttcagctattaatcttttgaatgaataaactgtgacaaacaaattaacatttttgaataggaaaggcaacttctgcacaatcctgtatccaagcaaactttaaattatccacttaattattacttaatcttaaaaaaaattagaacccagaacttttcaatgaagcatttgaaagttgaagtggaatttaggaaagccataaaaatataaatactgttatcacagcaccagcaagccataatctttatacctatcagttctatttctattaaaagtaaaaacattaagcaagatataagactacctgcccaagaattcagtcttttttcatttttgtttttctcagttctgaggatgttaatcgtcaaattttctttggactgcattcctcactacttttt

SEQ ID NO: 53049 - DNA, 582 bp, Homo Sapiens
gtggccgttatggaacgcagcagcagcgtgcagggtcaaagacagccggccccccatgtcagtggtctaggatggccagtgaaggcaccaacatcccaagtcctgtggtgcgccagattgacaagcagtttctgatttgcagtatatgcctggaacggtacaagaatcccaaggttctcccctgtctgcacactttctgcgagaggtgcctgcagaactacattcctgcccacagtttaaccctctcctgcccagtgtgccgccagacctccatcctgcccgagaaaggggtggccgcgctccagaacaatttcttcatcacaaacctgatggacgtgctgcagcgaactccaggcagcaacgctgaggagtcttccatcctggagacagtcactgctgtggctgcgggaaagcctctctcttgcccaaaccacgatgggaatgtgatggaattttactgccagtcctgtgagactgccatgtgtcgggagtgcacggagggggagcacgcagagcaccccacagttccactcaagggatgtggtggaacagcacacaggccacatgtgctcgagctgcagg

SEQ ID NO: 53050 - DNA, 621 bp, Homo Sapiens
gcggcggggcgcgggcgcggctcggggacgcgcttcctggtgctgggccctggcgctgctttggctcgcggtggttccgggctggtcccgggtctcgggcatcccctcccggcgccactggccggtgccctacaagcgctttgacttccgtccaaaacctgatccttattgtcaagctaagtatactttctgtccaactggctcacctatcccagttatggagggtgatgatgacattgaagtttttcgattacaagccccagtatgggaatttaaatatggagacctcctgggacacttgaaaattatgcatgatgccattggattcagaagtacattaactggcaagaactacacaatggaatggtatgaacttttccaacttggcaactgtacatttccccatctccgacctgaaatggatgcccctttctggtgtaatcaaggcgctgcctgcttttttgagggaattgatgatgttcactggaaggaaaatgggacattagttcaagtagcaactatatcaggaaacatgttcaaccaaatggcaaagtgggtgaaacaggacaatgaaacaggaatttattatgagacatggaatgtaaaagccagcccagaaaa

SEQ ID NO: 53051 - DNA, 620 bp, Homo Sapiens
cctgcagtgccaaccaaatcctaatatcaatccacaggatataaagcctgctgcctccccagaggacacccctgagctcagcgcctttttgcgaaactctactattcctcatcttgtcaggaagagggatgtacatgtggtcgaattccacagacagagccctgcaaaaatactgaattgtacaaatatcgagtgtttacaaatctcctgtgcagtgggacgactcgaaggaggagaaagcgcagtcctgaaagtcaggtcacgattatgggcccacaccttcctccagagaaaaaatgatccctatgctcttgcatccctggtgtcctttgaagttaagaagatgccttatacagatcagccagcaaaactcccagaaggaagcatagcaattaagacatcagttatttgggcaactccgaatgtttccttctcaatcccattatgggtaataatactagcaatacttcttggattgttggttctcgccattttaaccttagctttatggaagtgtggattctttgacagagccagacctcctcaggaggacatgaccgacagggaacagctgacaaatgacaagacccctgaggcatgacaagaaaaaaaaaaaaaaa

SEQ ID NO: 53052 - DNA, 452 bp, Homo Sapiens
aactgcactcatagggtgctctgaggtcaataaagcagagccaaggccacccagttgcctttttgcctttggtaacataactctgggagtcttggtttatcctgtgtgtcagagagtgggcagaaataacggcctgaaggttactgaggaagaagcactggatgggagactgaaatggacagtctcggagcctgttaatcagctgatcaccttacacatttaataataaaagagctgtacctacacgttgcctttacactgccccccctccatggtcaaatgacctagttcagtcagtgatggggcttccccaggtttggctattgaactgtcacttcaggcccatcctacactgaaagctcttgggtctggctgttctctgtgaaatgctgtagtctctccctttccagaattcaggttcagggcacagaacccaggcttgtaccatggtg

SEQ ID NO: 53053 - DNA, 404 bp, Homo Sapiens
gccgtcccagaggactggcaaacctggcagaatggatgcaataagttatgcttggaaatcagacagactagggtctggctccgtgactccaaattggatgacctcagacaggttacttcccctccctaaactgtttccttagctgtcaaagaaaggcagagagtggtgcctacctcatttaatcattgtgaggattaagtaagatactataagtaaagcacttagttagtgcttagcaaatgggaggcagttttgtatttaagcattagcttcacccactttccccaccttctcaggccgacttggccatgtgtttagcgtgctaaagtcgctggaactcatctgtgtgctcattgtcctctgttctgttaccacattctgtcctgtttgacaggggctttagg

SEQ ID NO: 53054 - DNA, 481 bp, Homo Sapiens
atacgtgtgggtagaactaaaatggctttttggtataatactgttaatgattagtatgcagaaaaaaatgaaaaccccggaagtgtcagttactgtgaaagaggcatattttcagttgtgcttattgtgcagctatacttaaatacatttgctagatgtaatcaagctgctttacccccagggaattgaaggaaaagatatatctgctggtgagcttcaggctttttatgatgatggcatttcacccttctgtttacagtgtcaactgatggagataaattccataaaattgtcattaactcagagatactagccttccatgttaggtgctattcacaaatactggataaaagttaatatgggaatgaaaaactaaatgcaagagtttcttgctataaatgattggttaactgcattttgcagcatggaaatcaacacactatgagagtgaaaactttgtgctgaataaattgactcagac

SEQ ID NO: 53055 - DNA, 633 bp, Homo Sapiens
ggccgcgccgcctcctacccccctgcgcgccgacggcgcccccaggcgcgttggggccgccgcgcctggctgcgctcaaggacgagccacagacggtgcccgacgtgccgagcttcggcgagagcccgccgttgtcgcccatcgacatggacacgcaggagcgcatcaaggcggagcgcaagcggctgcgcaaccgcatcgccgcctccaagtgccgcaagcgcaagctggagcgcatctcgcgcctggaagagaaagtgaagaccctcaagagtcagaacacggagctggcgtccacggcgagcctgctgcgcgagcaggtggcgcagctcaagcagaaagtcctcagccacgtcaacagcggctgccagctgctgccccagcaccaggtgcccgcgtactgagtccgcgcgcggggcgcatgcgcggccaccctccccaaggggcgggctcgcgggggggtgtcgtgggcgccccggacttggagagggtgcggccctggggaccccccctccccgagtgtgcccaggaactcagagagggcgcggcccccggggattccccccccccgagggtgcccaggactcgacaagctggaccccctgctcccgggggggcgagcgcatgaccccc

SEQ ID NO: 53056 - DNA, 600 bp, Homo Sapiens
caatgaacatctcatgtgtgctcacaatgttctggcactattataagtgcttcacaggttttatgtgttcttcgtaactttatggagtaggtaccatttgtgtctctttattataagtgagagaaatgaagtttatattatcaaggggactaaagtcacacggcttgtgggcactgtgccaagatttaaaattaaatttgatggttgaatacagttacttaatgaccatgttatattgcttcctgtgtaacatctgccatttatttcctcagctgtacaaatcctctgttttctctctgttacacactaacatcaatggctttgtacttgtgatgagagataaccttgccctagttgtgggcaacacatgcagaataatcctgttttacagctgcctttcgtgatcttattgcttgcttttttccagattcagggagaatgttgttgtctatttgtctcttacatctccttgatcatgtcttcattttttaatgtgctctgtacctgtcaaaaattttgaatgtacaccacatgctattgtctgaacttgagtataagataaaataaaattttattttaaattttaaaaaaaaaaaaaaa

SEQ ID NO: 53057 - DNA, 441 bp, Homo Sapiens
ttttcaagcagcaaaatgagaactttatttggtgcagtcagggctccatttagttccctcactctgcttctaatcaccccttctcccagccctcttctatttgatagaggtctgtccctcagatcagcaatgtcttagcccctctcctctcttccattccttcctgttggtactcatttcttctaacttttaataaacatttaggtataatacattacagtaagtgctatttagatacaaacttaaaacatactatatattttaaggatctaagaatcctttagagaaggcacatgactgaagtacctcagctgcgcacgctgtagccagtttttttaatgtaaaagtaagaatgccagccttaacctagccctgcagataaaagctaacttttattaataccagcctgaataatggcactaatcacactcttcttagagc

SEQ ID NO: 53058 - DNA, 638 bp, Homo Sapiens
gctaaaactaaagacttctagtatttggctcaaataagtactgttgtataccaggatatgtgagatgtaaatgtagtaggtcacttttcacccttgtagctataaaataaaaattttgtagaacagaaatagcttgtactactgaattaacaaaagttatactaaagtatcatgtttatgaaaagtgtgctgatttatatatatatattacacacacacacacacacacacacacacacacacacatacacctaaaatggcctaaagcagacatccatgtaattacagttgcaaaatgaaaacattttggaaagaacatagtatcatagttcattcatttgcagtggatctttgttcctttttactgtggtaattttagaaatgagtgtcaagtttgaaattagatctgctaagtaggggtttcgctgcttgaactctgcactgggtcctcaaataaaccgatgtgaatgtagttttttccccctgtgtgaagaagcagttacaccccaacaataggaggaaaatctagaactcattcagtttcatcttcgggtctatcaacattcactactataaaccatctggtcttcttaaacaatgcacttcggggggcccggtacctggcctatgggatcgtc

SEQ ID NO: 53059 - DNA, 330 bp, Homo Sapiens
tcttcatcactgcttggtgctgtgtattccaggtcctgagcaggcatctcctggggagcatgcagttcaccggcctttgccagcccaggctgggaccctccaggtggtggggcaggtgcttccatagcccctcctggctccttggcttcccactctgccaagcttttccagcagcattgactctcctggggctgaatgtgacaggcttgtggtgttcctgtgccactccacaatggcctcctttaagagggcccccctctcactccctcctctccccacagaccctacgtccgctccaagggccggaagttcgcgcgtaagggccagcag

SEQ ID NO: 53060 - DNA, 559 bp, Homo Sapiens
ggagatacgctctgcgcggggaacccgggggtccgggggccctaacttttgagttttgcacgccccgcagcctgagatgggaaggtagctcgtcgcgctccaaactcacctgcgtttcagaacgacatctacccactggtttcagctcctagagcaacaactgcagaatctccatggtccaaagtcctccagaacactcaatgtcggaacgttccgaagatgacgtcggagcgttctcgaatcccgtgtctctcggctgctgctgccgaaggaacagggaaaaagcaacaagaaggaagagcaatggcgacactggatcgcaaagtgcccagtccggaggcgtttctgggcaaaccctggtcctcctggatcgacgccgccaaattacactgctccgacaatgtagatttagaagaggctggaaaagagggtggaaaaagcagggaggttatgaggcttaataaagaagcatggaaatacggtacctgaaatgggacacactgagtagataggtcatcccagaccaagatatgcaagagaagccacaacctgctgcaat

SEQ ID NO: 53061 - DNA, 351 bp, Homo Sapiens
aagcaactggccctggcattattcctccacctcttgctccagtcagaggaccattgtttccagtggatacacggggcccgttcatgagaagaggacctcctttccccccacctcctccaggaaccatgtttggagcttctcgaggttattttcaccaagggatttcccaggtccaccacatgctccatttgcaatgagaaacatctatccaccgaggggtttacctccttaccttcatccgagacctggattttacccaaccccacattctgaaggtagaagcgagttcccttcaggattgattccgccttcaaaggagcctgctactggacatccagaaccacagcaaga

SEQ ID NO: 53062 - DNA, 685 bp, Homo Sapiens
ttgaatttaggtgacactatagaagagctatgacgtcgcatgcacgcgtacgtaagcttggatcctctagagcggccgtctactactactaaattcgcggccgcgtcgacccaaggctagcaaaaatccagacctgattgaagtgcagaatcacatcatcatgtttctgaaagccgctggatttccaacagcctctgtgtgtcacactaaaggagacaacacagcttctctcgtgtctgtagatagaggctctgaaatcaaaagctacttggtgaggctgctgacttacctcccaggaagacccatcgctgagcttcccgtcagcccccagctattgtatgaaattggaaaactagctgccaaattggataagacactgcagagattccatcacccaaagttaagtagtcttcatcgggagaacttcatctggaatctgaaaaatgttcctcttctggagaaatacctgtatgccctgggccagaatcgaaaccgagagattgttgagcatgtcattcatctgttcaaggaggaagtaatgaccaaattaagtcattttcgagaatgacctagcaccgtgccaggcccctagaagacccagtaaagatctgttgaataaactgtaggaatgaacacaccaaaaaaaaagtcgacgcggccgcgaatttagtagtagtaggcgacc

SEQ ID NO: 53063 - DNA, 680 bp, Homo Sapiens
aaagcagcagctgcagaaacagcaacatcccaagaaggcctccttccagaagctgaatggcatctccaaaggggcagactcagaattgtccactgtaccttctgtcacaaagacccaagcttcctccagcttccaggatagcagtcagccagctggaaaagccgaagggatcagggagccaaaggtgactgggaagctaaagcaacgatcacctaaattacagtcctccaagaaagttgctttcctcaggcagaatgcccctcccaagggcacagacacacaaacaccggctgtgttatccccatccaagactcaggccaccctgaaacctaaggaccatcatcagccccttggaagggccaagggggttgagaagcagcagttgccagagcagccttttgagaaagctgccttccagaaacagaatgatacccccaaggggcctcagcctcccactgtgtctcccatccgttccagccgccccccaccagcaaagaggaagaaatctcagtccaggggcaacagccagctgctgctatcttagatggttgaaaactagacgggtggctcactgccattgtcaccaggttggaactcttgcctctgtgaggatgccttctctactgtgcatacccatgaaatttaatacacattttaaaacctcaaaaaaaaaaaaaaag

SEQ ID NO: 53064 - DNA, 593 bp, Homo Sapiens
ttttttttttttttgtttaaaagttttgtattatgtcatacaaactgtcttcacatacaagtgcattaaaaaaattatccccccctcctcctccccaaacatcacagtagaccaattcttgctaatatatgacaaagttaaaacatatgtcccctctgaattctaaacagctaattctagacactaacatctggatcttataatttaccggtctggtatggacatgaacagttccagtgcctttcaacttatccctgaatttttctcttctcaaagttctaggcagtaattttaatgccctcaaattagataaagctgattacttagagcttataaattagctacactttatgacactaagaatagagctatgacttatgcatatcatacctgtcaagctacctagcaccacgaatagaactaatattaatggatggactaatacaaggatctaatatatgacagtgatagtcttaaaaacaccgatttgttattttccttatatataatccaaattcctttctatccttctggcaatgtttctactgcctgactaccttaaataactatatagtgtcaatttcttgcttggg

SEQ ID NO: 53065 - DNA, 954 bp, Homo Sapiens
aacggtggtgtgcagctgcttgcgctgtgggtcgttgtgctgtgttgctcgtttgtggttgagcgatttctttctaacaaaatatagtgagagagggatgcagagatccgaggctcctgtgtagagagcgccctttaggtcctctcggtcgtgtctgttgatttagcgtgtcctaaccgggcgagaggtggtgctcttcccaagggcccctgtcggccgtgtgccccccttctcctcttcctccccctgattttagataaggccggatagtcactgacacgtttctaccttgggatatcttccgggccctggtgtcggacccgtactcagtggccccggcatattatctgatcttcacgtttctgggaagcagaatcatcaaggctttcctttgtaactgccctttccgtacacagcaggcatgaataaatgctgagtaacagacaagttacagacaggaggggaaagaggaggaaccatacaactgtttttgcaaaatgatggctgagtccagattatagaggttgccttacccttagaatgttatttagaccaagtttagcttttagagtccaggtctggttaattgccagggtagcaaagaatcgcatgcaccaatgtaaacaggagtcagaatgcattattagtcaaagatcgaatttcacattgtagagatgtatagctgtgattaagctgcatatgtatgctgggaaacggcttgagtggatggctaatataaaagttgttggccataatgccacacctctcatctgcttgaaatatggaccagtattctaaaatatcagctactggggtctcattcactacaagataaattcaaacttcacagaactttgcagcagttcaccaccagacgggactgtgtctgcaaactctcttgtcttcacagacgcctaataaagcaaaactctgaatctcaaaaaaaaaaaaaaa

SEQ ID NO: 53066 - DNA, 816 bp, Homo Sapiens
tcagggctcatcttctaccggaaaggggtgaaggctgtggaccccaagactggccgggagatcccttacacatttgaggaccgaatcaactttgccgtgttcccatccctgcaggggggcccccacaatcatgccattgctgcagtagctgtggccctaaagcaggcctgcacccccatgttccgggagtactccctgcaggttctgaagaatgctcgggccatggcagatgccctgctagagcgaggctactcactggtatcaggtggtactgacaaccacctggtgctggtggacctgcggcccaagggcctggatggagctcgggctgagcgggtgctagagcttgtatccatcactgccaacaagaacacctgtcctggagaccgaagtgccatcacaccgggcggcctgcggcttggggccccagccttaacttctcgacagttccgtgaggatgacttccggagagttgtggactttatagatgaaggggtcaacattggcttagaggtgaagagcaagactgccaagctccaggatttcaaatccttcctgcttaaggactcagaaacaagtcagcgtctggccaacctcaggcaacgggtggagcagtttgccagggccttccccatgcctggttttgatgagcattgaaggcacctgggaaatgaggcccacagactcaaagttactctccttccccctacctgggccagtgaaatagaaagcctttctattttttggtgcgggagggaagacctctcacttagggcaagagccaggtatagtctcccttcccagaatttgtaactg

SEQ ID NO: 53067 - DNA, 584 bp, Homo Sapiens
  misc_feature (579)..(579): n is a, c, g, or t
aagctaaataactccagtccaaattccagtggaggagttaaagaggattgcactgcctccatggaaccttcagcaattgaactcccagattatttgataaaatatatcgctatcgtctcctatgagcaacgccagaattataaggatgacttcaatgcagagtatgatgagtacagagctttgcatgccaggatggagactgtagctagaagatttatcaaactagatgcacaaagaaagcgcctttctccaggctcaaaagagtatcagaatgttcatgaagaagtcttacaagaatatcagaagataaagcagtctagtcccaattaccatgaagaaaaatacagatgtgaatatcttcataacaagctggctcacatcaaaaggctaataggtgaatttgaccaacagcaagcagagtcatggtcctagaactctgcttggaccagaagatgtgaataaacttaagcttatttatttaaaattccaaatgagttgctctagattctaaaaaggtgaaactttggctgttgaaagtttcagtattagtaaacttgagttactttttcttttccattntactt

SEQ ID NO: 53068 - DNA, 973 bp, Homo Sapiens
  misc_feature (735)..(735): n is a, c, g, or t
  misc_feature (947)..(947): n is a, c, g, or t
gaacctttaatccagtgtccctgtgggccaatcccaagtatgtaagagcctggaaaggtggaactggggactgcaagatgggagggaattacggctcatctctttttgcccaatgtgaagcagtagataatgggtgtcagcaggtcctgtggctctatggagaggaccatcagatcactgaagtgggaactatgaatctttttctttactggataaatgaagatggagaagaagaactggcaactcctccactagatggcatcattcttccaggagtgacaaggcggtgcattctggacctggcacatcagtggggtgaatttaaggtgtcagagagatacctcaccatggatgacttgacaacagccctggaggggaacagagtgagagagatgtttggctctggtacagcctgtgttgtttgcccagtttctgatatactgtacaaaggcgagacaatacacattccaactatggagaatggtcctaagctggcaagccgcatcttgagcaaattaactgatatccagtatggaagagaagagagcgactggacaattgtgctatcctgaatggaaaatagaggatacaatggaaaatagaggataccaactgtatgctactgggacagactgttgcatttgaattgtgatagatttctttggctacctgtgcataatgtagtttgtagtatcaatgtgttacaagagtgattgtttcttcatgccagagaanatgaattgcaatcatcaaatggtgtttcataacttggtagtagtaacttaccttaccttacctagaaaaatattaatgtaagccatataacatgggattttcctccatgattttagtggcctccttttgtacttcactcagatactaaatagtaggttattcctttatataaggtacatttctgctcctcaaacaaatgcaaatttttttgnggggggttttgaaagcctatttgaaa

SEQ ID NO: 53069 - DNA, 804 bp, Homo Sapiens
  misc_feature (8)..(8): n is a, c, g, or t
  misc_feature (759)..(759): n is a, c, g, or t
  misc_feature (765)..(765): n is a, c, g, or t
  misc_feature (794)..(794): n is a, c, g, or t
cccaaagncgcagaagaaagatggcaagaagcgcaagcgcagccgcaaggagagttactctgtgtacgtgtacaaggtgctgaaacaggtccatcccgacactggcatctcttccaaggccatgggcatcatgaattctttcgttaacgacatatttgagcgcatcgcgggcgaggcttcccgcctggcgcattacaacaagcgctcgaccatcacctccagggagatccagacggccgtgcgcctgctgcttcccggagagctggccaagcacgccgtgtcggagggcaccaaggccgtcaccaagtacaccagctccaagtaaacattccaaggggagacaacagcttttagacatatcttttccaacagtcgtcactgctggacactgtttcatcttgcaaataaaccaatgaaaatgagtgatcctagaagaagataaatggaggtattttgaacaatcaaagaaggacaaatgaacacctggctgagaaaaattagctcttttttctatgcataaaactattaaaatattcttcatagaaatttatgacacaggaaacataaagacaaaattaaaataactcctagtatctcctattctttttatatgtatattatatatactcatattcatatatacatatatctcacatcatgtatcatatataaaataaatttaggtgtcatgatatatatttagataaatatacttagaaacttttttatggatgtataatttatggatatattgataantatggnatttggtattgactacttcaattggattnccatttttat

SEQ ID NO: 53070 - DNA, 584 bp, Homo Sapiens
aggtcaggaggagttcaagaccagcctggccaacgtggtgaaaccccatctctataaaagtacaaaagggcatgatggcaggtgcctgtaatctcagctactcagtaggctggagcgggagaactgcttgaacctgggaggtggaggtttcagtgagccaagatagcgccattgcactccagcgtgggcgacagcaagagacttcatttcgataaataagtaaataaataaataaagtctgaagctccactggtcactccttttattgattatttgcagctggtctaaccagttacgtatgtctggcttgattacatggccagagcaacataaaagccctgctgggaacttctgatttgagctcttccaaaaccaggatggatgcctcacatagatcatgatgattcaatccaaaggcactttgcagtgcagtccacatgtgcataaggaccatggggagcttgtatttgggaattctgagattcctgatgtttacctacctagtctttctcttgctgccctgtatcctttgcctttaaataaaaatcttaagtgataaaaaaaaaaaaaaaaaaagggcggcc

SEQ ID NO: 53071 - DNA, 421 bp, Homo Sapiens
aaattaattggctaatcgttcagaattaatccctttctatgagaacaactaaaaagggaacaactacaaaagagtacaactattgagcctactatggttggaaaatacttgaaagtatcatttaaagatggttactttaattagatctccgtactaaacgtgggaggatagctttatattttactttttgaagagcattaagttctggtctgtccatttcctgaaattctgagctatgttattcatctctgttgttggctctataatgtatgtatctgtttgctgctattcataataacaaaggtcttagcgaagacctagcaatcttagggtaataggaagacagaggaatttcatattggaatttttaacttgcagatcacaacttgttagtgttttatgacatcagtgtagtgggtca

SEQ ID NO: 53072 - DNA, 391 bp, Homo Sapiens
agactcctcttgctcgtcatgtctggccgcggcaaaggcgggaagggtcttggcaaaggcggcgctaagcgccaccgtaaagtactgcgcgacaatatccagggcatcaccaagccggccatccggcgccttgctcgccgcggcggcgtgaagcgcatctccggcctcatctacgaggagactcgcggggtgctgaaggtgttcctggagaacgtgatccgggacgccgtgacctatacagagcacgccaagcgcaagacggtcaccgccatggatgtggtctacgcgctcaagcgccagggccgcaccctctacggtttcggtggttgagcgtccttttctaccaataaaaggcccttttcagggccaccctaaaaaaaaaaaaaaaaaa

SEQ ID NO: 53073 - DNA, 582 bp, Homo Sapiens
  misc_feature (540)..(540): n is a, c, g, or t
aatttgatccatgtcaagaaatctgattttgaggtgttcgatgctttaaagttagattctatggaaagttctgagacatcttgtagagacctttccagctcacccccagggccttatggtcaagaaatgtatgcgtttcgatctgaggaaagattcaaatccccacccatccttcctcctcatctacttcaagttattcttaacaaagacactaatatttcttgtgacccagccttactccctgagcccaaccatgttatgctgaaccatctctatgcattgtccattaaggacagtgtgatggtccttagcgcaacccatcgctacaagaagaagtatgttactactctgctatacaagcccatttgaagggatcccttcttgcctctaaggattcaggagaagcatctcccttgcatttctggactgaaccagtcttacctgagactggaaggctgatttgctttgaggctgatatgtgtgtttcagagcctctgagtaggatgctctgcttttgcatttgattgcagatgagagctntatgagttcacggaatttattttaagaaaaaaaaattacata

SEQ ID NO: 53074 - DNA, 502 bp, Homo Sapiens
cttcaggagatatgcaaagcagaaaccctcatgcaagcccgaaagagaaagcgaaccagtatccagaaccgagtgagaggcaacctggagaatttgttcctgcagtgcccgaaacccacactgcagatcagccacatcgcccagcagcttgggctcgagaaggatgtggtccgagtgtggttctgtaaccggcgccagaagggcaagcgatcaagcagcgactatgcacaacgagaggattttgaggctgctgggtctcctttctcagggggaccagtgtcctttcctccggccccagggccccattttggtaccccaggctatgggagccctcacttcactgcactgtactcctcagtccctttccctgagggggaagtctttcccccagtctccgtcatcactctgggctctcccatgcattcaaactgaggtgcctgcccttctaggaatggggaacaggggaggggaggagctagggaaagagaacctggagtttgtg

SEQ ID NO: 53075 - DNA, 411 bp, Homo Sapiens
tacggccgggaactacttctgtattgcgtcttaaccacttctgtattgtgtggtcttaactgcctaaggcggcaatgggcagtgggcccctttcccttaggatgggtatcaattcaacaatatttataaggcatttactgtgtgctaagcatttggaagacccaggctacaaaataagacatagttcctgccctccaggccagcagagggaggcacaaatacccaggaatctctgatgggtgtgaagtgcggtcgtgggccacagaaaatgaccgtcatggagaccctgctaaaggtcggaccctgagcccaaaggggtattcagaagtggagatgattttggccccactcatagatgggtggcaaatctaagatttgtataaagcatataaaatagggtgatcacccgcg

SEQ ID NO: 53076 - DNA, 910 bp, Homo Sapiens
gcagcctatctttgatgacatgctccactttctaaatcctgaggagctgcgggtgattgaagagattccccaggctgaggacaaactagaccggctattcgaaattattggagtcaagagccaggaagccagccagaccctcctggactctgtttatagccatcttcctgacctgctgtagaacatagggatactgcattctggaaattactcaatttagtggcagggtggttttttaattttcttctgtttctgatttttgttgtttggggtgtgtgtgtgtgtttgtgtgtgtgtgtgtgtgtgtgtgtgtgtgtgtttaacagagaatatggacagtgcttgagttctttctccttctctctctctctttttttttaaataactcttctgggaagtggtatataagcctgtgccaggtgtaactggggtgaaatacccaccactaaagttttttaagtcccatattttctccattggccttcttatgtatctcaagattattctgtgcactttaaatttacttaacttaccataaatgcagtgtgacttttcccacacagtggattgtgaggctcttaacttcttaaaagtataggtgggctcttgtgaatcctataagcagcctttgtgtctcttaacattcacagcctacttttttaaaaaccaagtatatcactattcttattagtggtgggcgctttaaaaaattgtcttaaagactcagaaaatttagaccccattgatgttctggtagcacccccttgagtttcttagaatgtcttgctacggcccaactctggggagactggccccacatgtggctgttgtggtccccgggccggtaaacggggtattgcccctggaaaagtgcggggggaaaaaacccccccgagatgttatgagtgag

SEQ ID NO: 53077 - DNA, 619 bp, Homo Sapiens
ggagctcaagaagcataagcccaacttctgatgtgccagaaaccgccctgagatctgccggtcatctccatggacttctgcaccccattccatacccttcttcacctggggtaccccttccagttttccccttgcttcccaggcccttgacatggcttacctgccttcactcccagcaccttgcccaacaggataagctggatccccttggccttctgaatatcccagtgtcttcaggtttcccaagaccacttccctgtgggcttccaaaatggcctttatcatttctccagtctgtcaccctcctttcctgctcccatacacccaaggcttgtttcttcccctgtaaaaaccactgcctcaatctctggttcactcaactagtcaccatgtcctgaggcatgaagcctcctcagctcttggaattgctggcaaggggtgactgcctctgagtcattgtgtttttcaaagtgatttcttttctgtagctttttgacctaagatctcagcaatttgaacactaacctctcccctcctggctcaagaattactccgaagtcagtctgcagaaaataaatatttagtatgacatgaaaaaaaaaaaaaaaaacacaaaaag

SEQ ID NO: 53078 - DNA, 1004 bp, Homo Sapiens
tcaggacttgtgtgtgtgtgtgaatgcattcatcacaaagatattgaagacaataaataatctttataacaaactccttgggttggactattaaacaatagcagagccaagaaataggacttttaaaagtcctattattcggccgggcgtggtggctcaggtctgtaatcccagcactttaggaggctgaggaggggagatcacctgaggccaggagttcgagaccagcccagccaacatggtgaaaccctgtctctaccataaattaaaaattagccgggcttggtggtgggcacccgtaatcccacctatttgagaagctgaagcagaagaatcgcttgaacctgggagatggaggttacagtgagccgagattgcgccactgcactccagcctgggtgacagagcaagactctgtcttaagaaaaatttaaaaataggccgggcatggtggctcatgcctgtcatcctagcactttgggaggccaggcaggtggatcacttgaggtcaggagaccagcccggcaacatggtgaaaccccatctctactaaaaatacaaaaattagctggaaatcgcttgaacctgggaggtggaggttccagtgagccgagatcgtggcactgcagctccaaacctgagcaagcagagtgagaaaccagctcaaaaaaactgttttaagttactactaacaggtccctattattccaagtgggttattgtaccttactgggtcgcacggggacgcttcattccagggtcgacagtcccgggaatcggaattacaaagcatgtggtatttcccgtccatgggctgcgttcatacccgtcacgtcacacttgccccgctgtgacatcacgaattaccaggggcattttctccaagggactataaggtgcacacatcgtgaccatagatacaggcctcatgaccagggcgccaccttcgcgaagcggggtcccctgtacatcagaacaacagtgtacttagacccatcgtcttc

SEQ ID NO: 53079 - DNA, 774 bp, Homo Sapiens
aggctttaatctctgtaaaatgtttacaacagcacttagtgagttatttgtaaatgtatataaccataatgatgttattgttgtcttatgttttaccagactggcccaaagtccaaagaacatattattcaagaagtgcaattccatgttaaacatgagtcaaatttagctgaaggagcaagtttggacaagatgcctaaagcacagcagtttttcacaatgttagaattgataagtgctgtaatgtatctgaaaatataagtaataagtaggtttgcagtggtgtgctaaagccagcttatagacatgcaggaaccaattgttagttgacgtgttgatggcttcaaaccagtcagtgaaagtatttacattatggaaatcaggaacttttttcctcacaaagaaagattgttgttaaaaatttacctgctcaccactggatttgggacgtctgagggtatgaggcatttggttggcggaatcatgctactacatccttttgcactcttggcttgggtgtgtgtcttttcatttcatcagctgtcctaaattctggaagaaacctgtcagggtaaagtgtgtattctgtctttggctcaaaaaattataggaatgctgaccccagttacacatgattctctatcagcctaatacctaaacaggaaatgctttaaagtatcctaagttccagctcaaccttctttttagctatgtgatgaaggcaaagctttagccgtaatgactctcaatggtaacattaaaaaaaaaaaaaaa

SEQ ID NO: 53080 - DNA, 389 bp, Homo Sapiens
ttcgacccacgcgtccgcttaaaggcagcagcacactattttattctgagtattacctgtggacaagaagattaattctgctaagagcatgctttcaaaactggaaaacccttcaggacaagtcacattttgtgacagtgagacgccaacaaccctgagaggtagtacagaaagaaaaagatggaggcagggtttgggaagttctggtgttgagaagtttattttcatttctcatggtttccagggagggacagcaagtggtagaatacctcattggtgagctctgagtgtttgagggactttatattctcgtgcatcacaaaatttataggcatgtgcagagaattttagaaccaggaacctcaggaattttgttgagactgtcgttg

SEQ ID NO: 53081 - DNA, 834 bp, Homo Sapiens
  misc_feature (488)..(488): n is a, c, g, or t
  misc_feature (494)..(495): n is a, c, g, or t
  misc_feature (497)..(509): n is a, c, g, or t
  misc_feature (512)..(555): n is a, c, g, or t
  misc_feature (557)..(566): n is a, c, g, or t
  misc_feature (569)..(576): n is a, c, g, or t
  misc_feature (616)..(616): n is a, c, g, or t
gggcctcctttagcctgtcgactccttataataatgcctaaatattccaaattaatactgcctctttaacctgctaattgttttcacaatgttacaagaaaacttggatctgtgcattatcaccatctagtggctaaactcaggcaacacgaacttctaccaaactcaggaaattgctctggaaaaactacaggattttggatttccagaactgccttgaagagacaaagattcttgtaccaagttttggtcaactgcaaatcaaagaacttggttatgcagggaaaacaaatgaggatatctgtacctggaacttttaaacaagattctaatagttatgtgaaaaaagcattcaagatttttgagtaggcacagtggcttacgcctgtaatcctatcactttgcgaaactgaggtggtggaaggatcactgaaggtcgggagttcaagaccagcctggccaatgtggtgaaaccccgtttctcctanaattannannnnnnnnnnnnnaannnnnnnnnnnnnnnnnnnnnnnnnnnnnnnnnnnnnnnnnnnntnnnnnnnnnnatnnnnnnnnaaaaaaatttttaaaaaattttttttttgggcggcctggncccttagaagaaaggttaacaaaacgccttccttttggcccccggggacccaccggggaaaaaagaaaaagggggttaaaacctccccccaaaaaaaaaaacacccggcggggggacccaagggggtgggtggttcccccacccctcaaaaagaccccccccgggggggcccacccggggggtttctttacaaaaggggcaccatggggggtgttctt

SEQ ID NO: 53082 - DNA, 687 bp, Homo Sapiens
ctctgtgtaactggtctacattttgatggttgtctatactcaactggatatgtgtatgtaaattagaaaatacatacctatccagacataaatgctaagtaacatttttttcttcctccaactacataatttgtagctcatcatttttccttaatcctttcctaacttgttgcagcagtttgaatttcccagatatttatgtttgaacataatggctcagaatacatatttgaacatcatagttgtatatatttttaaagtagaataaataatggaaagcaacttgatatacaagtttatactaaaatttcaactgtgtgaagatacattttaaggcattactttgctaataatctacacattcttttttctattaaataaacaaatggtttgtggttcacagctttcatccaagcttggtgataatcaattttgaaaatacagtggactgaaaagcaaatttattctttcgaagatttcatttaaatctctgtactatgcatttttgtttcagtttgtaaatgtgtaacatttatagttaaataggacaaagcaggccctatgactattgttttcaaaaaattaatatataaataattcagaggggtttttcatttacttttgaaaagaaatttctttaacaggattgcacctatcaatttcttgtagaataaaaaaaaaaaaaaa

SEQ ID NO: 53083 - DNA, 375 bp, Homo Sapiens
ttttttttttttttttttttttaaagaatgagccgatattggcttagtgctcactaggggacatgcacatggaagctcacctctaagaaagggctgggcagatggatttattttttcccacctgtgaatatgtaaaacaaaaccattatctttgagggagtttttaataccaatgacagaacagagatttgtgtgctcatcttaagagccagagccatataagcatcttgggaaagcaagtttgaaccagctgctggtgtaatgtacagttatatttgtctataaatggagctgtttatggcaatttaataccattctctttgtaaagtgaataaatattcatcttttaaaaaaaaaaaaaaaaaaaaaaaggaa

SEQ ID NO: 53084 - DNA, 702 bp, Homo Sapiens
  misc_feature (647)..(647): n is a, c, g, or t
  misc_feature (649)..(651): n is a, c, g, or t
  misc_feature (655)..(659): n is a, c, g, or t
  misc_feature (661)..(679): n is a, c, g, or t
  misc_feature (681)..(681): n is a, c, g, or t
  misc_feature (687)..(687): n is a, c, g, or t
attgactgttgtgtcattagctgcctggttacattagctccctggcttcttgtttagaccactgctaatcccttaaaaacaagaggtctggcactagtagcacaacctaaggtggcattacagatctttgagcgagccacagcaacttttctgccaagtcagcttagtttagacttcagtgaatcaggctattgctatcctaatgtatgtctctatgagtgtatttagccacacatctgcccttggttgactttctgactcattgcttgcttgcttgtttccttgctttggaaaactattgaagattgctaaaaaataccactgcaaagtgatggaaaagggtggagaacaggggagtagccaggctggatggctcaaatataaatgaatgaggaattctttatgaagtatcagtcagattttatgattaagtgatgtaatataggaattatgtaaaagggaagaatgtctgatactgatctattagagaggtactttagaggcttcttgattggcataaagttcctaaggttatagattttccccccttttggctgtatagcaaagtgttttaatccacggttgtgccttattgttccattaaaattgtatcttcgatccatcaataaatacttgtggttgaaacnannnaaannnnnannnnnnnnnnnnnnnnnnnanaaaaanaaaaaaaaaaaaagg

SEQ ID NO: 53085 - DNA, 1072 bp, Homo Sapiens
  misc_feature (767)..(767): n is a, c, g, or t
ttataatgtaaaaacacttaaatgaaagtggaaatgtattaattttaaatcctataaaattaatacagaaaatataaatgattgggtcatttaactatatttttttaaataaactgaaagataaagaacacaacacttcacacattttatatttctcttacatactccggaatcatacacagttctttttaaagcacaacattaaaacctttaaaaggtatttaagggtttggtcaagtgaatatgataaaacatacttgtctgtataaagagaaaatgaaattgtagtcactgttatgtactgacattagttacaacctagttttaattcttaaaacaattttgattagcaaagctaaaaaaaaatggatgtttcagttaaatgttttaaagaggtacagatttttacaaggacataatataagttattgttctgtagaaatatcctattaaatattgtatgtccctccctctgtacactttgtaaagaaagtaaaatacataaaaagaaaatcatatagggatgtgtgacattattgtaattgtgtacttgagaataacgtgcaaaaataaaaatcagaatattttcctgttattgaatgtttagtctatttgataccagtactaagttaatgctttttctcaaggaaaaaaaatgtacagtttttgtaaacctaataaacatcaaaagcagtggattattttcatccccccatttcttaatttctttttcacagcagtgggatgcaaagtgcttgattgctttngaattttgtgactcggatgcaaatactgggaatatttcagttctgtgaaattgcaagtaatatttcagagaacttaaaaggtggatgggctgagccctttgatgagcatgtccttggaaaatcatttttccttttatctccataaaggatttggttttattaagcatctcccaattcccctggagataaattactcatggcataaaggggtttttggaaaacaccttaagattatttccggaattaatttaccgcataatttaatccaggggggaacggtttaccaccctccccaacgaaaatct

SEQ ID NO: 53086 - DNA, 629 bp, Homo Sapiens
  misc_feature (496)..(498): n is a, c, g, or t
  misc_feature (502)..(506): n is a, c, g, or t
  misc_feature (512)..(512): n is a, c, g, or t
  misc_feature (546)..(546): n is a, c, g, or t
cagaggtaggtgttgcaggcccagggcaggggtgcctgccccaggagagtcccaggcagtggttctcgtgccagtggcacccaggggcaaggacagccaacccccacccttgccacgtgtggggccacgtgggcatgtggggtgtgtgtttttaccttggtgaatctcacctgccaacgatttctcgtgagtgccgaccaccttctccgaccatgttacgcccgggcggcagcagcccccggccactgcaaacccatgccctgggtccctcggctcccccagggaggcatccccgtgccaatgtcccccagtggtggcagcagatcctgtggccggcctggcggacgggacccagtgatacttgtatattacacagtcctgatttcagacaatttcaaccttaatctatttaaaaaagaatattctatacaagctgtttttaagccttttaccatttgaaatgcatgtgttgtgcgcgtttgggggtggtagaggnnncctnnnnntttctnttttttttttttggggggttggtgcttttttttntctggggggggcgggtttttctttggttccttggccccccctctctgggcggtgtttgtttttgcttggtctggaccccccgg

SEQ ID NO: 53087 - DNA, 676 bp, Homo Sapiens
aaagaaggcatgcggatgagagactgtcagcataaggaatgtgggaaaacctaaaggtgtccctgttctctctgaagacatgaaaactcactggggagaaaccctatgaatgtaaaaatgtggaagcaactttgtatctcaggtcttaatgaacacatatgaattcacagtggagaagaccctgcatcagggaatgtggaaatgactttgctgaattctcaagccttaccaaacacatcagaaatctcactggagagaaactgtatgaatgtagagaatctgggaatacctttctgaatcccacaaaccttaatgtgtgtatgtgaactcacattggagagaaaccctgcaatttaaatggtatggtctggatgatgccccactccatatttgtaagccctaagtcctagttccttacactataactgtatttggacatagggttttcaaacaggtgagtaacttcaaatgaggttgttgggttcgatccctaatctgacatcactggtgtccctataagggaaactgaaggaaggatacacatggagaagactgtgtggatccaccagaagatggccatctacaagccaaggacagagacctggaacagatgctttcattatggcctccagaggaaaccaaccctgtctccaccttgatattgcacttccaggct

SEQ ID NO: 53088 - DNA, 691 bp, Homo Sapiens
atttttggtaaggtcttcttttagaaaaaaattaatctcaagggttttttgtaccactataatctctaatacttactcagaattactgtgtatttacttaatttcttattatgtgccttattatgtgcttaagatacaataggttagagtttaatctaaatatcttgaaagctatattgtgggcttggtaagcattttgttttttctttctctgttttggtaaggatttaaaatttttttcattgcaattttaagtggttttcaataagtaatagtttttatcaaatttttggtgcttggtgcagagacggtgtggggaagggtgaatggttttgggaataattcagtgcacacctgtaggcctctttacattgtgactgataggggttattgcatatcaatttggggctgtagagtgcaatctcagtttcatctttttcacccatcagaatttgtctcaggattacttggtttttctcagtcctcaagcgagaacttgcttttctttgttaatgtgactttcattactgagtacccacgtatttggagtatgagaaggtgggttatttctcatactctgtccctctctttttcattgaatgtaagagtacattttaatgttgcttcagtgattgtataatgtaaaattgtttctttttaataagaaactttgctattatttcttcaattg

SEQ ID NO: 53089 - DNA, 763 bp, Homo Sapiens
tccgaggtgcggctggtggtgtatagagatgaagcacactaccgggatgaggagaacttggagattttccctgtggatctgcagaagaaagctggccggggcctgggcctgagcatcgttgggaaacggtaaagacgtgctgtgggagttgggatctgcctttttcatccagagctctgatgcctgtgaacactgaaagagaaagcctaatgtaaagtagtgatgggatttctaaaaataagatatttatgaaaatttgacaacatgggtcatatttctgagcaaggtcttaccagaaaaattgtcatatcaagatagaactccaagtccaatcaatccagactgatatatttctgtacagagtaagaacaactagcaaggttctttcacttggaattactaagatcggagttttgcagaggttgattaaagcaaccatacccaagaaatagctagcatcaagaatgagatttatccaatgttgggtcaagaacattgcttcgacatggaaattaacatggaacattgcttttcgtgatactgttaatttcatactatgttgaaactagttgagtagacatagttaagagataaacataattcttcacgatagtagttttctattaagaaaaatgtcctgctgggcacagtggcatgtacctgttgtctcagctatgtgggaagatcacttgaggccaggagttcaaggctatagtgtgctatgatcatgcctgtgaatagccactgcacttgagcctcttgg

SEQ ID NO: 53090 - DNA, 720 bp, Homo Sapiens
cttaaatctatatacaaagccttggtcccgtgaaaacactcgtgtgcccaccagcggccttgaagaggcaggtctgggccagatgctgggcaggaaaccccagcggcagatgggcctgtgtgcacccaacgtgatgctatgcatgtctgaccgacgatccctcgaccagaatcagattcaggagctcagtttctttttcacttgggtctctggattcctgtcatagggaaggtatatcaggaggggaagaggcctttctagaattttctttgagcaggtttacaatttagcttacatttttcgactgtgaacgtgaataggctgctttttgctttcttctttccagaccccacagtagagcacttttcacttatttgggggaggcttcaggggactgttctcaccttaactcagccagaaagatgccctagttgtgatcaaaggtaactcgaggtggagggtagccctggggcccctcgacatcaccgtcattgatggagcctgaaccgtgtgctcctcggcagatgctgttgttgttacttccctccaagaggctggaaaagggctcagagctgctgagcaggaaccggagggtgacccatttcaggaggtgccggtaccagcctgactaggtacaggcaagcttgtgtgggcccaacaggccctttggtagagctggtgccagatgtgggctcagatcctgggcatgatgggccgagc

SEQ ID NO: 53091 - DNA, 573 bp, Homo Sapiens
ggcctgccctgacagaggctggggatgaaggaggaagagacagccggtcccctggataaagaggtgagggggtgtgaagtctgggagcccccctcccagggccaggctacagggggacagcagggctataccaggagtgccacagagcttgcatttgggtgtgatctaatccccagtcctgccctgacctcctgggtgctcttagccaagccctcttccctgtgtgtgctagaaagtgagggtcactcccttccacacaagggagtgaattgagggtggggatctgagctctctgagcagcaaagctggacacaggccaaattgccaatcctgagtccctctgtcatgtggacctgggaagcttgtcctcatcctccatccttccccaggctcgagtgatcctcccacctcaggtcctaaaggaagagtcgctacattggggactgtttggacaaggagatccacggggtagacttagcgggattgtcccttggggcagcctggatcctgaggctgccccgcctccttcctcagcccctccctggtcaggcgctcctggtgggtggggggggg

SEQ ID NO: 53092 - DNA, 1080 bp, Homo Sapiens
  misc_feature (653)..(673): n is a, c, g, or t
  misc_feature (675)..(680): n is a, c, g, or t
  misc_feature (682)..(684): n is a, c, g, or t
  misc_feature (686)..(691): n is a, c, g, or t
  misc_feature (693)..(693): n is a, c, g, or t
  misc_feature (696)..(698): n is a, c, g, or t
  misc_feature (707)..(707): n is a, c, g, or t
  misc_feature (718)..(718): n is a, c, g, or t
tttcctatgtttccctctttgttcagaagcccagatgcatttttataactcagttttaaaaactttaaaatagttaccttgccttttaggatgttcttatcccacccataatgagagttgaaaggggatggatagctgctccccatgcccttcccactttttggaataggccgtgagggtgtgaggaagaaggctgtcttttgtacataaggacaaaattgtttgttttacataaattttgttacatatttttgctaatggctttgtatgtaacaagaagcgagttgccaaactacctgttgtacttttgaattttctgattgaattacagactgcgaacaacggctttcagaatgagggacttccatcagactctaatgataatagtagcacaaattgaaaacttccccaaagctttcacagaatattttctcataataaaatccaagtgaacagataattagaagaaacccttttccttcagggaaccaagcaactctattttagtactgacatgcattattttcactgtgaattcacttttttattgcatgttcagatgtccctctttgttttttttttttgtaacattaactgcaatgatgttcttcctggaattcatgaaaatataattaaaacacatttttaaaccnnnnnnnnnnnnnnnnnnnnnannnnnnannnannnnnnanaannnaaaaaaaanaaaaaaaaaangggggggggccgcttaaaaatccccccggggggcccaagtttaaccggcccccctttttttttgaaaaaggggccccctaaaggggggcggatataaaactgaggggggggcgggcggttttaaaaccccggggaggggaaaaactggcacttggggaaatttttggagaagaacccttttttccggggggggggaacaaattgggggaaaacacccccccagaaatttaaagccctcagggaaaaaaaaaatatttttaggggggaatagagggtggaaaaaaaaacgcaaatgtgtgggggtgttaaaaaaatttttctcttcgcgggcgggtgatttttttgagaaaatatatccccct

SEQ ID NO: 53093 - DNA, 458 bp, Homo Sapiens
ggtcgccctgggctccccaagcacctcccagacccagcccttgggtgggtcctggcccacaaacccccacgccctgcccctgagatgagccccaccgcccacctgccctccagccctggagacctttctcccccttggccatggctcccatggggaggctgcaggccctccctgggctggaccagaggggacagactgtctctcccctgcgacttctgggggcactggagtccttggcctggttaccttcagcatttatagccctccagtgagttattcctcggagttctcacagagcagcatgcgcctgcggcaaagccctcacctccagcccctggaccacctgactgctgcctcccgcctggcgccaaacacggccaccgcctcttttgttaacaggacagttgatccattaaattaaaaatcattcaatagattcaaaaaaaaaaaaaaaaaag

SEQ ID NO: 53094 - DNA, 428 bp, Homo Sapiens
ctccaggatatttgtatttgaagtggcaagtgctttttatgaggggttagaggctgttatgtcagaatctatgaggagccaagtgtggtggctgctcatgcctgtagtcccagctactactcgggaggctgaggtgggaatatcacttaggcccaggagtcaagcctgggaaatatagtatgaccctgtctttaaaaaaaaaacttgggaggaaatacacagtagttagaaaaagcctcctaggtgattttgatgaatcccagtctcaaatttcttcatttggaaatgataatgtaggccacacgtattactggagaaaaatgtgctcccgagactttccagagcagcagagctgggactaggcaggtgaggcagctacgtgcaagtgtagccctgagaatgagcacctctttaaagaatgtaccttg

SEQ ID NO: 53095 - DNA, 623 bp, Homo Sapiens
  misc_feature (600)..(602): n is a, c, g, or t
attaacgctgcccgtctcccttataacctggacgtgagctgtcagagcagaagccactaggccactgcgcgtctgaggctcagaccctgctgtggttggcttggggtggccaatgggctgggaccctccatgagagttttggacacttgggtcacctgacccgtgcctctctgacacatgtctccggggggcagccacctggccaatgtgcatttttgcacatgctggaaccttccatgggggtctgggctattggctggagccaggacatgagtcaggggcaccatggacctcacgtgccagggagacttgaatgtggctgtcactcttccggacgccaagggctgcaggaggctgcttttggcactacccaccccgtgtgacagaataggagccagcgactcaggactgctcacgggtcaggagggcaacgcctgaagtcagacctccctataggtcaacagggacaacctggggatctctggagcagggccctcctctctcaggcttggcccactcccccagacacctggacacgtggccacaaatctgggacaaggggcccccgcacagcatgaaataaaaagtgcctgagaaaannnaaaaaaaaaaaaaaaaatggc

SEQ ID NO: 53096 - DNA, 567 bp, Homo Sapiens
  misc_feature (522)..(522): n is a, c, g, or t
gcgacctcctcggttcttcaatgaagatggagttatcagaccgtacaggttgagggatgggactggaaatcaaatgttacagaaaattcaattctacagggagtggattatgactcacagtagcagtagtgatgatgatgatgatgatgatgatgatgatgagtcagatctaaaccattaaaattcatatgttctttattttacttggaatgtttcattaacatgttttgtatgacttataccataatgcccatatgtccatttatagggaggtaaaacacattttcttttaaaatgttttcctacacattttcataaagcaaaataattgtattatttaagcacagaaaaaaatgtatcttacatccaaagtagggagggcatccaacatattatagatttgcttttatatattttatagctttgtattgcatagtttgtctttaagagttcaagttagacttaaatataattttgatgttcactggttttattttaaattgccttcttatttgttagcanaatgcctttttttaatggtctctggtaattttctgggctttaatg

SEQ ID NO: 53097 - DNA, 849 bp, Homo Sapiens
gatctccctgcccccaccccagttccccaacccactcccttccaacaacaaccagctccaactgactctggtcttgggaggtgaggcttcccaaccacggaagactactttaaatgaaaaaaagaaattgacataataaaatcaggagtcaaaattcatcgtcttcaagcccctctttctagccttttctactactctctgcttggtcaaggtttgtgccccactacagaacagggctaaattagccaccaccactgaaaactcagccgaatttttttataccactctgatgtcagcattttttccatctgttggggctttttcctcttttttccattctccccaaatattttatctggcttcaaaattaagaggattattttcagatgtttttattcagtgtggccgattcctcatctgattcaggctgtccagtcaggcccctcccattttaggagctggagccttcatttatgagggagattctcatctatgaaatggatcctcatttgtaaatcttttttcttccattttcaccaaagctgtaaagaaatatccatctcaaccttaccctttttcctctggagtcagtggggtctttcctcgctccatcttaccacagacctgaggctggaagctcaactgggtttgtccctgttctgaaattattgggatctcccttccatgaaaggaaaaccagaaccagagggtagatggctgagaccactcctgttttgaaccaggactggtgatgcggcgttgacacaaggggaaatttgccctcgtgtggtcagagaaaaggccccaatttgggttcacctcgaggcgcgtacaatggtgcgccacaaa

SEQ ID NO: 53098 - DNA, 539 bp, Homo Sapiens
ccttatcatcccagggctctgattagccaggcctggtcagggtcctggggacggcacccagatatgcagagtcaccctgacactggtgccgggctgacctcagctcccgaaggctcgcacagcctccccatccttccttcccggcccttgtggctctgtccacctgatcccaataccagcttcccccagcccctgccaccccagagggcggccacgacagggagaggtgtagatgccaccatctgagggagaggaacgtggaacaggagcaggctctgatgctgagaggcttgcctccgggggctggaagcctgggtggccggggcccctgaagaaggctcccctctgtatcccccaggtctcctcaacactgggctgatcctgaatggcacaggccaaggggaggccagcctcgcctttctacccaggccccctgccctgcccacctcaggcccccaccctccgctcctccccacggtactgtgaacgtcgtgtgactcagtgcagagacagataatatatttaattcatgtacaaaa

SEQ ID NO: 53099 - DNA, 437 bp, Homo Sapiens
  misc_feature (352)..(352): n is a, c, g, or t
  misc_feature (427)..(427): n is a, c, g, or t
acctgccctgacctccgacagtgctgggattacaggcatagcacccgtgcctgaccagggctcttttagcaaggaaaacgtgaggaatgaatggctgttggtgtgcaacaaatcatacttgctacatgttgtgaaacctgaagttatttgttagtctgtatgaagaatgtaccccagagatgcaccctgtatctgccttatgtctcttacaatggaggttctctcctgttatattgctgaataaactatgtgaactgctaaattgactgaagactagttagtttatcactaactctttaatgaagaatttcactatcctacaactcctcctaaaaagtgaaaatttactttngagagagtgctttcgagaatagtattatgatcagtattattgcccctaaattttttaattattagagaatgcctnatgttacaag

SEQ ID NO: 53100 - DNA, 475 bp, Homo Sapiens
acaaacaaaaaataagtaaaaaaatacaaaaaaattaaaaatgttctgttttcatacgcacatgtctgcctcactcatagttttatttttataaattcaagcacacagtagagactctctttctgactttatttgcagctacttttagaaaaaagaatctgactggctcagcacagccaatggttttgcttccctagtgccaagtgttcattcctgatccaagtagctgtggtcaagggagcaggatcacaggggatgagcatgtctccagggccacactgctgggtccaagtgggggaagttttcagaagagaggggtgtagattggacagtatcataaaatgaatgtagtacagagggaagccagaagtgaaagtaagagagagggtgtttctagaaaagaaaagtagttaacattgttattctgctaagagaacaagcaagataagtactgaaatttatagaagacttagaa

SEQ ID NO: 53101 - DNA, 745 bp, Homo Sapiens
caactcggagtataattcaaaattgtccatcccttgtcctctgacattaaatatgtagagaaaggcttccagagtgcttatgccttaccaaccatggctttttcatttctctgccatacctcaatattgcccatatactgtgaacttcaaagtccttcaaagaagagaatgcagaatgttaccaatacagcaattgctttaagttttctcatttattttatatctgcactctttgggtacctcactttttatgacaaagtggagtcagaattactaaaaggttatagtaaatacttatcacatgatgttgttgtcatgactgtgaagttatgcatactatttgctgtgcttttgacagtccctctaatccacttccctgccagaaaagctgtaacaatgatgtttttctccaattttccattctcatggattcgccattttttgatcactctagcactcaatattatcatcgttttacttgcaatatatgttcctgacattagaaatgtatttggtgtagttggtgccagtacatcaacatgtttgatttttatattcccaggactattttatcttaaacttagcagagaggattttctgtcatggaaaaagcttggggcattcgttttgctcatctttggaattttggttgggaattttagtttggcactcatcatttttgattggattaataaataaaagaaatattttcctacttcttacaagaataacaaaaaaaaaaaaa

SEQ ID NO: 53102 - DNA, 341 bp, Homo Sapiens
  misc_feature (282)..(282): n is a, c, g, or t
  misc_feature (312)..(312): n is a, c, g, or t
gcacagaatgagcttgaagtgctcccctctgctcggttctagttctgcctctgacagttttgctctttggttcacaaggcttcctaaactcaggattgctttgtgggtctgttctttgggatgagaggccagggcaggtgcaagctatgccttcactcctttgtccctgccttcctccttcctgtaccccagctacagccccgttgggaaggaatgtgtcgttagtcacaaaggcattgcaggatgtgtctaaggaaatgccacgctgggggccggggcgtnggtgcttcacacctgttaatccccaggcantttcgagagggctggaaggcagggcggga

SEQ ID NO: 53103 - DNA, 658 bp, Homo Sapiens
cttattcaggggtctctgcatctccacacttgcacaggttgtgtgtacatacattttcctgtctttctggtaagcccctggggtggagctctgggccacagggcaggaaaactcagtgttgctaggaactgccagacattttcccggagtgagtgcagcatttacattcccaccagaagtgtgccaggttcttgtcatactgcgtcctcgccagcgcttggtgctgtcagtcttcttagtttccatttagagattcagtgtttaaattttgaacgtcttgggtgaacactttggtttgagaaaagtaagaaaaagggtctgtctggctatgggccatggagacccaggcagtgctccacgtgccaaccctggggcagggagcccaagctaggactgtgactgtctgggctgtgggcatctgaccatctccagtgtccccgtctttgatttccctggcgatggtgctagcttagtttgtgcgcatcggcatttgtgggagaaatgaaggattaatacattttgttttatgtcagactctctcagtgagaagttctcagggacaataatagcagggggtcctgctgaagaaaaactgggagatggctgagctctggtccatctttcattgattcattcatttcttcattcattcaaccat

SEQ ID NO: 53104 - DNA, 544 bp, Homo Sapiens
tttctctgttttagagatgggatctcactttgttgtccagactgttctcaaactcttgtgctcaagtaatcctcccaccttaacctcccaaatgctagtattataggcatgagccaccatgcgtggcccttcccaagcttggaacttccttacctgggtcgtagatggactctaggagatctccaaacctcctgaaattgtgtgcaaaatattgtgtctgtatatgcattttctagggatgcggtttaatattttcatgtgattcctaaaagaatctgaggctcaagaaaagagggcatcttaatatcctgcactttcagtcattgagggcatgatcacaaagatcaaagccatttttaggcaggtgagttggagtggcagtcagaagtaggtaagattttctatttgtgaggcaggaacaagggattggaccattgttcttaaatactgctttcttacccaaaatgcaaatctgtgcgtaatcagtacacagcaaaaatatttactgtattttgtttttccccttgggtacatttggcaagtg

SEQ ID NO: 53105 - DNA, 722 bp, Homo Sapiens
  misc_feature (461)..(461): n is a, c, g, or t
gggatgcagccgcttttctttttgaaatgactttgggatttttttaagcttttatttactttttttttaactgttatctttctggatgaaacttgggaaggggattaggagatctagcattttatttctagcattgctattcaccggcttccttattttatatgtaaaaattaagattttatattttatcttcttgtttctcatagatattttgtgagcatttttttgtttattttgaagaaatgtggataagatacttggtagtataaaatagactctctgagagtatttgaaatgtgtttggagatttacttaaacgtactttcaggagtgagcaagtcctacttataaacctatattaactttatttttgagatacctgttttgaatttaaaggagataagaggcgtaaagtaggatgctcactacaaccataggtggggtttcagctcatatcttanagataaaaggtactattatataacctatacacaagatacaggagaaaatatgcttgatttttatttggcaggggggctaggttgtatgggagtaaaaaaaacattgaaaatttttaaattgtccaaagaaacatttttagactcttttaacaaaaaggccatgagtaaatctctatattaacattactatttattttggttttgggaactgggaacatgattctatttgttataaaaataaaattgattgtgattgtcaca

SEQ ID NO: 53106 - DNA, 673 bp, Homo Sapiens
  misc_feature (662)..(662): n is a, c, g, or t
ctgatgttggagctctgactaaaatgcaacaaaaaataacaaaaactgaagtagaaactgacttaggaaaattctgcctggctgtaagataggcctctaatatccatggtgacaaccgccccttctgtgataggagctctcatttgtaaatccaccgtgggccctccggtttggaaactctgtgtaggaattccagtatctggcattgttggaaggcaatgcattattcctgtcctggtttctgttcattctgcttggcttttctgcatgaagcacactgtgaaaagtaacatcgtgttcataccgttctttcattcggtggattttttctcttgagacaccatgaatgtttcttcttgctaactcttgaacgttgaatttccagcgagtgtcaggttctcggaatataacttcatagttattttcaagtgccatgactgcatagggcttcatttcccaggcgtggaggttggtattatcaataataatgggggatatgccattcctcattgcttttcttgctctttttttggttccattcatgagcttcctccaggaagtcaggattgaactcataggcaccatcttccctgaagaaaaaatcatccgtgctgaaaatcagggccctgggaaagtcatgctgtcattgtctggccagtgtnattttcctaaa

SEQ ID NO: 53107 - DNA, 851 bp, Homo Sapiens
cagcagttcctggatgccgccttgtttcttacagaggaaggcatctacaaaaccgtgtgttgagtgccatgcctgacggtacagaacgatcgcgtcttcgagaaagaacagccaccctggaacggttgtcaaggcccagcacaacccacacgttccggcagtcggatacgcctcgaaaaagttcattgacacaaatggaatttgctgctcacacatggacaggtcaaagtattttgacaggttcacaatatgtgcctaaatcttttcagaggacaactttgactttcaagaggagattccaagtgacatcttgaaaccacctcaccagaaccattggagcacctgtggcctcggcacactgcttatcacttgaaaaatggaggaacaagtgttatatttatctgtgtgtctgacagtgtgagatgttagaccgagagaaaagcaaacaaataaatcacttaatcttgaacactttgcactgtaaagagagtgaaagtcaaacccaccaagctgccttgctgaaagcatctccaaggttctgtaggctttgttcagaagcccctgatgtgtgtttgcagtccgtcattttatcaatgatacgcaaacataattagcatgtgtatgtactcacacactaattacatgtaagaatatattatctaggaatatgtcatttgtaactttgtactctgacgtattttctagtctcaccctattagtaattctgtcaaaatcctagacgctagtagatattagtatttgagaacatatgtcagagtcttgataagactcagcttgttctagtcatgctgaagtttctcatatattttttaaaaagtgctttccgccat

SEQ ID NO: 53108 - DNA, 847 bp, Homo Sapiens
gaccggaccgaaggagtagaaagcctctctcggatcctccaatcctcacgtccttctcctggtctctggccctggttcttattttctctcaattccctactgcctgtttcttactttgaacctggaggcagcctgcagccccatcccatctcctgccctctcctgatctaactccctgctgcatctcttgctctcattccttagacgtcctccccttttgaccccgttccttcatccatcctgcaccccagtcccccagccctaaatcctccctcctctcctcacatcctggtacctagcaaggtatagatagcctctgtgtcttaggataccccgggtgctgttccctcggtcaccctgttgcccagttccccgtttctcttgctctcattccttgtatcctttccccttttgagcccgtccattcatcggttctgcccccgactcccccagccctaaataccccagctgctgttccccccatcaccctgctgcccaattctttattctccacccctttctctcacccctggagccctgcgggtgggggcagggcatgagttccccagtccccaaggaaaggcagccccctcagtctccctcctcctcattcccttccatctccctcccctctgccttttaaacccatcccctccgattcccctcctcccccctctctccctggtgtcacctggattcctgcagtaattctgagcccttgaaatcctcagtcgccttggccggggaagatttggctttggggacagggaagtcggcacatctcccaggtcttcatgtgcacaatatagaatttattgtaaaaagcaaaaaaaaaaaaaaaaaaccc

SEQ ID NO: 53109 - DNA, 776 bp, Homo Sapiens
  misc_feature (722)..(722): n is a, c, g, or t
aagcttgcggccgccccggccgcccccgcgggggacacctcctcgccgccacagctttaggaaacacctctacctcctgcgaggcctcccgggctccgggaaaactacactggccagacaattgcagcatgactttcccagggccctgattttcagcacggatgattttttcttcagggaagatggtgcctatgagttcaatcctgacttcctggaggaagctcatgaatggaaccaaaaaagagcaagaaaagcaatgaggaatggcatatcccccattattattgataataccaacctccacgcctgggaaatgaagccctatgcagtcatggcacttgaaaataactatgaagttatattccgagaacctgacactcgctggaaattcaacgttcaagagttagcaagaagaaacattcatggtgtctcaagagaaaaaatccaccgaatgaaagaacggtatgaacacgatgttacttttcacagtgtgcttcatgcagaaaagccaagcagaatgaacagaaaccaggacaggaataatgcattgccttccaacaatgccagatactggaattcctacacagagtttccaaaccggagggcccacggtggatttacaaatgagagctcctatcacagaaggggcggttgtcaccatggatattagaggcctatcttacagccaggcagaaattttctaagtcaggttctacttcaanttttgttattttttggtgcattttagtcagagcttcaatttcagtgtaaatagg

SEQ ID NO: 53110 - DNA, 493 bp, Homo Sapiens
  misc_feature (84)..(84): n is a, c, g, or t
ctcaaaaacaacaacaaaacagagagtgaaaaaacggaggcagcctacaggcccttctcatcgcgggggtggttaaagtaagtncattagggtttctccataccttggctcaataggctgctgttaaaatgaagctcctttcatatgtatcagtcatgttgaggggaaacgttgcaaagcaggactgttggtaaattcccacttttttttttaaaatactgtgtgtgcatggttgtgtctgcgtagccttcatatttacacggttgtgtgtgcttgtggaaagttctaggaaggatacaccatgctgttactagtagctgactctgtggagttggtaggagggtcactggagaggaacttgcaacatatatacacttcagtggtgtcttttttgggcagacggggcaacaagtaatatatactagtaataaggtaatacacgttaaaaacagcctgtaatcccagcactttggaaggccaaggcgggaggatt

SEQ ID NO: 53111 - DNA, 685 bp, Homo Sapiens
  misc_feature (25)..(25): n is a, c, g, or t
  misc_feature (643)..(643): n is a, c, g, or t
ttttttttttttttttttgaagttnagaaatcttttaatgtttattcaaaggacaaaataaagactatgaaccaatgagacacatagtaaaaaagtacaattttaatatagtgaatgtaatatatatgtaattactcataacaaaatggtcaaaacctttaaaagatacacaataggcatctaaaaagctcagcaatgctaaatatataatatatattatatataaatatataatatataaatacatacgtttttaccaagaaatgttttatttttcttgcagtagctttgttaattgcacaaaattatgttttgtttttgccatttaaatattatcacagaatcctattctgaaagacaaatgttcattaaaaacaaagcaaaaatagaaattcacaaccattaattacctaggtttgtcatttaaaggtttaaagaaaaaaagggaggagctttcctacaagccttttcacaagtgtcacattttctctttaaaagggaaggatttccaaacaaaggtgaaatagcttaaacagaaatatttgtaaaaataaactttacagcattatcaaggatattaagacaacactgactaaccggtttcattaccgcatcttcccccacccccaaccccagtgtgtcncaccaggactagaacaggctttacattcagacagaaatgctt

SEQ ID NO: 53112 - DNA, 518 bp, Homo Sapiens
ccgggcattatatttaacgtttcttctttttccttgacaaatcttgataagtttttttatattagttttattttctagaaaacgtcttatgaatttctcccatttgctctagcatgcttatagaaaatgtcagtgtttctctacagctcaaatttgtatagttgttttaaaatgcggtctctttcttcttcccctggtacttttttctttctgtctactgaagttagttcttatacatggtcttatattttggctgtcttttttttccctaggaacattcatacaggttgaatattccttatctgaaatgcttgggactggaagtgtttttgattttggagtttggaatacttttttttttttggagatagtgttttactcttgttgcccaggctggagtgcaatggcgcaatcttggctcgctgcaacctccgcctcccgggtacaagcgattctcctgtttcagcctcccaagtagctcggattacaggcatgcgccaccacgcctggctaatttt

SEQ ID NO: 53113 - DNA, 784 bp, Homo Sapiens
agaggtaatcccttatggctaggctactgtaacacttgcctgtaatcagtgaagggctgtgcaccttgtactatttcacaatgggttctgctggacagataatgggccagtgttattgaggtgatcaagatctgttccacagggctaatgccaccatctcccctcaaaattttgtagaggttctaaaaagaaagtggtatgttgtgtgatgatcagcactaagtcctgcattcctgttaaagccacttgggtcataagaagggagtaaaaaatgaagtctgactagaattctattgcagaggccaagtacatttagtatggcattgagttgtgatatagttttactttgatgtgcattttgaatttcagctacacctagatagacgtaaaatgataattaaaatgctgtaaccaacttatctaataaaattggcaaccagccactattttgttgactatgagaaagttaaaagtttatgttaatttttagggtctgatagaatatttcatgtgtattacagtggtattcatatgctatgtctctaaactttattttcaaaagcttaaggcccaaatacaaacttctctggaataaacgtggtgttttattttctgggttataaagtgaacaaatacttagatactattatttctttacccaatgcttttgatttttaagcacttttattttaaaaatgtgaattatacagtccccccctacacatacatacacatacacacacacacacacacacacacacacacacacacacacacacacaca

SEQ ID NO: 53114 - DNA, 702 bp, Homo Sapiens
ccgggaattcggccttatggccggggtactggggaaggctgggcccccgggagaaggctcgcggctctacttctcgagtgccgggcaggcttcttggagaagaaaccttcgagctgatgactgagggatgagtaggagttcctgtgcccggggagtggcgcgggaggcgcctgtgtctcggagccttgaacgccaccacacttagtacgaggaggccgcctgtacacagaggtgaccctcttaaaggagtagggggctttaaatacgtttagtgcgatcacgggactgacaagacgttgaagacgttgtgactcgagggattctgcgaccccacgtgtgtagcagtcaccttggccaggcagttgggggcgccaggagagggagatggccccgtggccaccgtcctggcaggagaggcctggctggagaggcacatcttgacagaaaccaaattctcagaatctgagatgggggaaagcggtttagggaagtcaaggacgactctgaggtgccagatttggtgcctgggctgttatcccaggggttctgttaattgatcttagccttagggtaagtaaaatgggtctttttatataatagtgtgaaaactattttcatctaatagtactctttttaataaaagtcagtagttggaatgtgattcatttttgctgcttcgaatacctctcattgaactgtgtc

SEQ ID NO: 53115 - DNA, 546 bp, Homo Sapiens
agacacacttgtccacataggtttagagataagagttggctggtcaacttgagcatgttactgacagagggggtattggggttattttctggtaggaatagcatgtcactaaagcaggccttttgatattaaattttttaaaaagcaaaattatagaagtttagattttaatcaaatttgtagggtttctaggtaatttttacagaattgcttgtttgcttcaactgtctcctacctctgctcttggaggagatggggacagggctggagtcaaaacacttgtaattttgtatcttgatgtctttgttaagactgctgaagaattattttttttcttttataataaggaataaaccccacctttattccttcatttcatctaccattttctggttcttgtgttggctgtggcaggccagctgtggttttcttttgccatgacaacttctaattgccatgtacagtatgttcaaagtcaaataactcctcattgtaaacaaactgtgtaactgcccaaagcagcacttataaatcagcctaacataa

SEQ ID NO: 53116 - DNA, 660 bp, Homo Sapiens
ggtaacgtgcttatcatgggagtgttttgagaaacttagccaaagcttcagcagaaaaatccccgagaaagaccagagagttcttcaccacaacaatgttcctgctcatccctctcatcaaacaaggccattttgcaagagttttgatgggaaatcactaggcatccaccctacagtcctggtttggcaccttctgactttttgtttcctaatcttaaaaaaatttttcagggcagtacatttttctcaagttaatgtataaagaaactgcattgatgtagataaattcccagaactctcagttctttagggatggactaaatagctggtatcatcacttacaaaagtgtcttgaatgctatagagctaatgttcaaaaatatagtttatattttttatcttttaaccatttttccacaaactttttgaagtctccttgaatatgtaccatttataaaggggaaaaattctgtgactactcatgttgacttaatgctgacttaattttctgttttgtaaatatatacaaacaagttgatacaaattttgtttatagcccttaaacaaatttgtgaaataatgcattcagaaacaaactaaaaaaaaaaaaaaaaaaaaagaataaaaaaaaaaaaaaaaaaaaaaaaacagggggcaaaa

SEQ ID NO: 53117 - DNA, 646 bp, Homo Sapiens
  misc_feature (619)..(619): n is a, c, g, or t
  misc_feature (624)..(624): n is a, c, g, or t
ggtgattggagaaccatgagagcaggcagacatctgggtgagagggcacgaggggtgagtgacggcagagccagacttgctggagaggcagaaagggaaggattcaagtagcataaccaggaaatagaattgataggatttggtccctgctgacctgtggaataagggggaaggcagaggagttgattctagtatttctaagttgggccacttagtgatattggggtaccaggaacaggcttagtggacccacagaagtgaccggacccaggagtctctctgagcgcccaccctggcttctctgtgttggcttaccctttcttggttgggggtcatggggtggtcagcttcagtggtgtggtctgaggtgacaggtgctcaggagtgaggacagggagtagacatcaccaatgtgaatgtggaggtaggcaacaagagttattctagaactgacaaatttaatatattttgctgactgctgagttccatttggacaaatacctaatgcatttggggcttaaaacctagatgacgggttgaagggtacaacaaaccaccgtgatacatgtatacttatgtaacaaacctgcacgttctgcacatttgtcccagaacttanagtanaaaaaaaaaaaaaaaaataggt

SEQ ID NO: 53118 - DNA, 396 bp, Homo Sapiens
  misc_feature (178)..(178): n is a, c, g, or t
  misc_feature (219)..(219): n is a, c, g, or t
  misc_feature (292)..(292): n is a, c, g, or t
  misc_feature (305)..(305): n is a, c, g, or t
  misc_feature (341)..(341): n is a, c, g, or t
  misc_feature (369)..(369): n is a, c, g, or t
tgggaatggagtggttcttgccctctgagcttacagactaagaaggcagaaaagctttacaactacagagtacatgtgtatacacacaaccaacctaaacacatcagagaatacatacttaaatcaattcacttcatatacacatctcattagaagaccaagctaaacttcacttagngggcgggcaaaggactagaaaagaatttttctcttaaaaanaatgagtactagagcaaaattatgagtgtctaagtatcttagttatgcttcataagatctgactggggtaagngataaagaggtanatagggctgggcgcggtggctcacatctgttaattnccaggcactttggggaaggccgaggttnaaacagatcaccttgacgttcagggag

SEQ ID NO: 53119 - DNA, 647 bp, Homo Sapiens
tgtttttatggaaactctgagaagctgaatgatacatgcaggggatattttttgagatgatttaaatgtaaaccaaaagatggaagacaaaaagacaaacacacccacacgcagtctttgcagtatctgacagagaactcacaggaagttacttcaagcacttgccagtactatgatattcaagtaccttgcagcatttctctgccattgctttcaatgaggccagaggcatcctggatattagacctattatactgtaagaatataagtataaagtgcgttcatatacatgtgaggttttcttttgcttgagtggacagtagcacctgtatcattgaactcattttgtatcagagcaattttgcttgcagaaagctatgaaataaaacacgtcccttaactgcattgctatggaattaattttttttccccagggaaaactagtgtatttttttatgagcaatatcaatttggagtgaccaaaagatacttaaaaatgggtttattttgatttctcatctgaaataatcatgttctggtattatatctatctatatttaataaatatatacattttaatttattatgtgtactcacatactatagaaagatattagtatgcatttaataaaacatattcacttgaa

SEQ ID NO: 53120 - DNA, 426 bp, Homo Sapiens
ggcacgagcgcccaagtgggaatcaaggactttagacctaacaaagtctccgaaactagtaggactactaccacatctttatcccctgagctgatccgcttcacagcttcctcctcgtctgggatggtgcccaaattgccagctggcaaaatgaataaccgtgatctcaaaccccagcctgatatagtcttgcttccgttgcccactgcctatgagctagacagcaccaaactgaagagcccactaattacctcccccatgttccgtaatgtgcccacagcaaaccccacggagccgggaatcagacgggttccgggggcctcagaggtgatccgggagtcgagcagcacaacagggatggtcgtcggcattgtggctgctgccgccctctgcatcttgatcctcctgtacgccatgtacaagtac

SEQ ID NO: 53121 - DNA, 686 bp, Homo Sapiens
tatgaactgtgacctatcttacctagtcagtctcttacacatttttttcaaactgtgcctctgctttttcccccagacccaccgctctgtgcccttatcatgtttttcccttctatttgctaatcccaaaagagtaatttcaagtctcttatccattagctgactaacctgcccataaaaaacgctgttctacttaaattccccggccattcaatgttgtataaccttatgtacaggatgagataatgtttgcaaaagtccattttaaagaaccctcaaagacaggcgccatagatggccacttgcagtgatgttttgttcttccctagctcctgcagatacctaaagatagtccataatctttttgggtctcacttctgcaaattggagttcatacttgcgctatcttttgttgaagaaccctcaagatagttgcaaaaagtattttgaaaagtataaagtgatgggtttaatgtaaatgttttattcaatactactatcctctagactaatttggttgtagttcacattacagtagctgcttcgtaagtgatttttgggctgggcggggtggcttgtgcctgtaatcccagcacttcgggaggccatggtgggtggatcaagagaccgagaccatcctgggccaacatggggaaaaccctgtttctactaaaaatagccgggcg

SEQ ID NO: 53122 - DNA, 563 bp, Homo Sapiens
  misc_feature (558)..(558): n is a, c, g, or t
gcagccatccaccctttgcagttgaatgtgttaccctttaattagtctgaaaattaaagggcaactccgggccaatgtgaatgattatgaaaatacatgtgcatcccatgcaatcttctcatttaattaatagtcttgtaaactatatggctcactttaagtcagtcaagaggtataacaactccattttaaatatccacttaatacttaacaggatgtgaggaacacactatagcatacggtcccttctcaagtttcactgtctgaaatttttcaaagctgacccaagtcaacctgaaaaatgtttaacaccctgggcttgaacacaagaaactctgtgatgaacagacattcaattacattttttaaaagtgagaagcatttttgtaaaatagcgactctggaaactaattggcagccgcaaaacttgtgagcaaaggccaaatcttgtggggaacttttactacagtaacacgactcaaagaaaatgtgaataaaaggcatctttgtttcccagtcaaattagctgattaagaaataaaacatcttaacatgttnaaaaa

SEQ ID NO: 53123 - DNA, 631 bp, Homo Sapiens
  misc_feature (580)..(580): n is a, c, g, or t
ggactttttatagcttgtgataaaatgggtaaagaaaaacctccatttaaataaggaaggggagacaaaatggaaggtcctggccttaagtcaaattccagatagtgctttcaatatccaaagcttaggccttgtttacttatagtaatgctatatttttctttatctgccctgtgatttcgcttcgtgtccttcaaagtttttttattgtaattttaaaggaaaaaaacaatgtatttttatttgataactaggcaaaatcatttgccattttttatttcataaatatttatttttctatctcatacaatgatcagttttactttaaaaattctgcatttctcttgcctctcatgtacttcatccagttatttattattgtaaaatgttaactggagatactgcattcaaaaaaaagtcggaccacttaacacttaccaggaatgttagtgtttcagctgttttagtaagtgaccaagtaagctatcaccttgtgatagctaattcaacatctttattgaaaatttgttactttttttaaaggtttttaaaagattacaattttaaaatattttatgtntattttatttttgtgtaaagcaaacactttttaaataatatcagagtaatt

SEQ ID NO: 53124 - DNA, 597 bp, Homo Sapiens
cgcgtgggagctactactcttggtatcgcaactacgcagcagacaagggggctctgtatgtggatgtgatccgtgtgaacagctactactcttggtatcgcaactacgggcacctggagttgattcggctgcagctggccgcccagtttgagaattggtgtaagacatcacaatcccattattcagagcgcgtatggagtggaaacgcttgtagggtttcaccagtctttcccagggaactccgatgaagtgttccaacaaaatgagcgagtgaaccaagaagaggatgacattagatccaggagatacaacagaggagataatctccaggatgcctgtgaagaaagatccctggatcccaggatgattataggacaagttgttcataatccagcaggccagaagacttccagggaaactcatttcaagatgaaaatggaccagccgcagtggctcacgcctgtaataccagcactttgggaggctgaggcaggcggatcacttgaggtcaggagtttgaaactagcctggccaacgtggcaaaactccatctctattaaaaatacaaaaattagccaggcatagtggtgcatgcct

SEQ ID NO: 53125 - DNA, 749 bp, Homo Sapiens
gaaggagcggcgggaggatgtcacggaggagatgaccagtgccttggccacaaatgcgcgttgactacgagcagatcaagataaaaaagattgaagatgcgtccaagccctctgctgctgaaggaggcggaaagacaagctcgggccctggaggctgcggctctggcccactgagccagcgcgccctcctgcccacgggaggacaagcaataactctctacaggaatatattttttgaaacgaagagacagaactgtccacatctgcctcctctcctcctcagctgcatggagcctggaactgcatcagtgactgaattctgccttggttctggccaccccagagtgggagaggctgggaggttgggaggctgtggacgagaagtgagccacagtgctcttgaacctgtgctcatttctgcaattttatcaggtaatttgactgtagagtgtaggacgaaaccgtcttggttgtccttgccccactcctctccaccagacgccttcctctctggatactgcaaaggcttgtggttgttagagggtatttgtcggaaactgtcatagggattgtccctgtgttgtcccatctgcctccctgtttctccacaacagcctggggttgtccccgtggctcacgcgtctgggagctcaggcaccttggaggaggatgccacgcacttcctctctcggagccctcagacatcttcagtgtgcagacaatacgaatgagtggatgtgtgtgcgtgc

SEQ ID NO: 53126 - DNA, 481 bp, Homo Sapiens
caccagggcgcagcgtatcatgctgccggcctcagttgaccgttctcacctacctatccttgtacgtcatcttccttctgagatgccggggtccaaatattatctccgtaaaaggatgccagtcattggatcagagaccaccttaatccaggatgacttcatcttaactaaattacatctgcaaagattctatttctaaataaacccacattctgaggttctgggtgggcatgctatttggcaggacaaagtcaacacaggacactcattttcaggattgatcgcatggtttgaggaagctgatggtgacatctcttcttaaatctgttttcaggaaaatcatactggtagccttcaagtggccatggtgggagcattgacccagggaaatccacatttcccaacacatgctggatacctgaggactccagagctactatctgctcatatctgctcaacattaaaaaaaaaaaaaaaaaaa

SEQ ID NO: 53127 - DNA, 690 bp, Homo Sapiens
  misc_feature (424)..(424): n is a, c, g, or t
  misc_feature (551)..(552): n is a, c, g, or t
  misc_feature (673)..(673): n is a, c, g, or t
ttacatcataggattgttgagaaaataggattgttaagagtgactgaatataaattacttggctcagtacctttcacaaagtaagtattcaattaatatgttttgggttattaattagttataattctaatgtttaaatgttcagatatgaaaaggggcaaatagctcaagcatggtggttcactcctgtaatcccagtactttgggaggctgaggcgggcagattacttgaggccaggagtttgagaccagcctggccaaaatggcaaaaccccctcactactgaaaatacaaaaattagcccgggtgtggtggaacacacctgtaatcccagctacccgggaggctgaggcatgagaattacttgaacctgggaggtggaggttgcaataagctgagattgcacctctgcacttcaggctgngcaacagagtgagactctgtctcaaaaaaaagaaataaaaataaaaaggggcaaatagaaaaaaaaatacagaaattttatttataaaattgcaaatgaaattagatgaaaaaccttgttaatggannatgttacattctcaattctctcttttgtttagacattactactggatgggaatccattccgagttctcgagcagcctattatgaaagaacagctggtttcctggattttgagagaccgaancctactaacttgaagtg

SEQ ID NO: 53128 - DNA, 906 bp, Homo Sapiens
  misc_feature (834)..(835): n is a, c, g, or t
gcgctcctggggacttctccctctctgtcaagtttggaaacgatgtgcagcacttcaaggtgctccgagatggagccgggaagtacttcctctgggtggtgaagttcaattctttgaatgagctggtggattatcacagatctacatctgtctccagaaaccagcagatattcctgcgggacatagaacaggtgccacagcagccgacatacgtccaggccctctttgactttgatccccaggaggatggagagctgggcttccgccggggagattttatccatgtcatggataactcagaccccaactggtggaaaggagcttgccacgggcagaccggcatgtttccccgcaattatgtcacccccgtgaaccggaacgtctaagagtcaagaagcaattatttaaagaaagtgaaaaatgtaaaacacatacaaaagaattaaacccacaagctgcctctgacagcagcctgtgagggagtgcagaacacctggccgggtcaccctgtgaccctctcactttggttggaactttagggggtgggagggggcgttggatttaaaaatgccaaaacttacctataaattaagaagagtttttattacaaattttcactgctgctcctctttcccctcctttgtcttttttttcatccttttttctcttctgtccatcagtgcatgacgtttaaggccacgtatagtcctagctgacgcccataataaaaaaccagaaaccaagtggggctggtattcctctctatgcaaaatgtctggttttagttgggaatgacttgaaagaagaaacagctggtccctgtgggtccttcgnnatataccccaccaaaaaaggagcggggccaagggcccggcttcgaatgcccttttggctggttttagcctt

SEQ ID NO: 53129 - DNA, 726 bp, Homo Sapiens
  misc_feature (687)..(687): n is a, c, g, or t
  misc_feature (708)..(708): n is a, c, g, or t
ggacgcgtgggctgggacagggctcaaggacatcaaaaccgtcaagcacaagctccagacccacataggccttgttcactccaaagtgcctttgaaggaatttgatcatagtaactgcaagacagagggctgggctgaccagatcgttctgcagtgggagcgtgtgactgcggaagctgtgaagccacgggagacctcggagcctagagcagcagctcagcgcttctatgggaagcggtctcgagcagaagccccactgaagtgtcccctggcagacacccacatgaactcttccgagaaactccagttctataaagagaaagccccagattgccatgggccagtgttgaaacacgaagctatctcaagccaggagtcaaagaagagcaagaagagaccttttgaggagtcagagacagaacagaataactcttcacaaccttcaaagcagaaatatgtatgtcttgctgtggaagactgggacttgttaaattcctattgattagtagatacaagttgacctttctctggcccccagctctagtgtttgagtaaaggagactgaggatgatttactttttgtttgaatttacctatggcattagcatagtaagcagatatttctacttttgtggtgtgggaggggaatgctatggaagtatgtaataatttctaatgtatattttncatacatagtaattttttcanataaaaaaaaaaaaaaag

SEQ ID NO: 53130 - DNA, 324 bp, Homo Sapiens
acatagttagattgatctccaactagattgtcatctctttggtggagagattacgttcttgtgtatcttcagtgcctgacacagaagtgtttctaaaagtaacatctgcacacccctcaaacagaatcacaaggggcgaggccaagaaatctgctctccaagtgataacttaaactttttaacatgctcttcaggtgacacttaaacttgtttgaaaacctctgtgtcataaaactaaatattagctggatgaatgtatttgtatctttttctgtgttggcctttgtgaggagaaatgctgtctatgcaccaaatcagagctga

SEQ ID NO: 53131 - DNA, 698 bp, Homo Sapiens
ctcgaggagtctgggctcatgaggatgccagaataagtggcagtaagaagaaaaagaacaaagataagaaaagaaaaagagaagaagatgaagaaacccagcttgatatgttggaatctggtggacagtaacaaactttggtgaaatttcaggaaccatagccattgaaatggatgagggaacctatatacatgcactcgataatggtctttttaccctggggagctccacacaaagaagttgatgagggccctagtcctccagagcagttttcggctgtcaaattatctgattccagaatcaccctgaaatctggctatggaaaatatcttggtataaattcagatgaacttgttgttgggcgttcagatgcaattggaccaagagaacaatgggaaccagtctttaaaattgggaaaatggctttgtcgacctcaaatagctgctttattagatacagtgaagcagaggacatagaagcaaaaagtaaaacagcaggagaagaagaaatgatcaaggctctcctaatctctgtcagaccttcacctttatgaccttgccttatctaccagaacacagatccctcttactaaagattagatcctgtgctgaaagagaaacaagaaaaagatgaattccagaagaagacaaggaaatataaacaatgtgaaatcaaaaaaaaaaaaaaatcgctaatc

SEQ ID NO: 53132 - DNA, 630 bp, Homo Sapiens
gaggtttgcagagatgaatccaccacgacaaggtacatgaccagtagacaatattttattgcatatatgttataaaagttcttttgagagacacccctttctcctcttctcttctccctccttacctactctaccacccaatcatagcaatagaggtctggttgccgtggccctcttaatgtctgcctgtcgctttcttcctttctcactggttcttcatttttgtccatttctctgctgcctggactttttgttagtgatttactattgggactgacccagttgctaatgccagaagcttgtatttatagcacacattgccacaaagacctaggttaggatgatagaattttccacggctgtgaattcctgccctaccatcaatacctgccactctgtacatcacaaagttgaaatgcatgttggtttctcatatttcatggttcaatcacgaatagaagaatattattaaaagttctgtatcttctaaatgtcttgtgaagaataaaagctgatacaaatggcattactgcttttttggggcttcttatataagtgtcaggtgggtgcaagtgaaccttttcaccatgtgcccatggaagctctcaaactgaacattttccgaggaac

SEQ ID NO: 53133 - DNA, 582 bp, Homo Sapiens
  misc_feature (426)..(426): n is a, c, g, or t
gttgtagacttcgatgtttcatgctcatgtacttcaaataatgcatgttttatagttagtccctcatcacttgaagtgacttctgagaattatgcagagtcaacatggatcatttcacagtgagatgctttatggattgaaggatatggtaaaatgtttatagtttactttgaaagtaaaatatactatgtcttggttttgaggatattggatacaaaactctcttcctttagggctactgagtcttgattcctgatcatcagaaatttcaccagaaacaacttgcttccaatatacccaattctatatgaagaattcatggagagtgtactggcactggaagagtttagtgtttcttgtatgcttgaaaataaagtatgtactgttttgaatgtgttccaagtcctctgcataaacgatgtattntggggtctggttgggcctggaaaatggatgagcacttcagaacaggtcattttcctgaatggggaagtgacatgtggccctataggaggcatgatgttagttaattacacatttgcctacatctgtgggaaatggccacatgtgctcgagctgcag

SEQ ID NO: 53134 - DNA, 500 bp, Homo Sapiens
atagattttaaagatagcaaaatttctggcaagaaacattatatctttttttcatgggtttagcacttagttttagaagaatttgtgattgtttagtctgtgattctgattcagagggaaacctgtctaaaccctgagcaaagaaagaactgtatttgagcatagttctttacatgttttattctgtagccaaagtatatcaggatatcttagccatgatattcatcaatagaattaactcctatgttgtgttagtggtataccagatttgtatgtatatagttgtagaatacattatttgatctctaaaacatagttctgaatgcctttgattcacagaaagaagtctgtgatgaaataaacttgttttgatttttctgtactctaaatcttttaagtaagtcttctatatttgctgttttattttaatgcaaataaagctttcctttgacagtgaccttggctcagtttagggattgattctgaatataggagacggt

SEQ ID NO: 53135 - DNA, 546 bp, Homo Sapiens
  misc_feature (467)..(467): n is a, c, g, or t
cacattcaaacctgttaattcgctgttatcattctcattttgccatttagattttaaaatgaagagcagtgttttgttagaaaaaacaaaatgtttaccataacaagaaagatgtgtagacaagaaagatatttatgtagactctttgtttgttaaattttgaagccaggtgatgcattgttagctttgacaactgacttaaatttttgtataattatttatctttgcattttgctcaggtaaattatcttcccagagtctagaaataaagatatccctgatcctgtttaagagcataaataatactctcaatgtaaattgttttgaaataagatcttaaaaatacaaaatgtagacaattaatattcaggtgcttacttttgagccaatatgtagcagagaaaaactaatttctctgtggcagtatttttatttttggcatttcccaggaattaactgaagactanaactcatatgtgaagtgtaatgatactaatcaaagagtcagtaaaatttccatttggctaccatgtatgtgtgtatata

SEQ ID NO: 53136 - DNA, 542 bp, Homo Sapiens
ctccaccacgtggccctggcctcttctctgccctgtctgtgcttgcagccatggtgcccagtctggccccaccaggagacaccagaacgactgtccatgtgtctactccttggcaccttccccgcatggtgggtagatgggcagggaggggtgggaatctgtgtaaccgtggaagggaacggccctcagacccagagggtttggagcctggggtattgtcaccgacagtggccttagcctagctagcacagttagtgctgtgcatcacagcatagcttttagaggcaggatttgtagtcagtatagttgggaggcaccatggagcagggatcaccctccacctcacttgacaaggagatacaaaactatcagttcatagacaccatctgatagggaactggctcagcataggccaactgggacccaggttgccatcttgaagactttccatcacccaaatatcattcagctcttccaggtggtgagggagtaaaccagaggaggagagttgcaccaccagatataccactatggccacatcg

SEQ ID NO: 53137 - DNA, 883 bp, Homo Sapiens
  misc_feature (695)..(695): n is a, c, g, or t
  misc_feature (698)..(698): n is a, c, g, or t
  misc_feature (830)..(830): n is a, c, g, or t
  misc_feature (864)..(864): n is a, c, g, or t
agttcatactggagagaaaccctacaaatgtgaagaatgtggtaaagcctttaaacggtccacaactcttactaaacataagagaatttatactaaagagaaaccatacaaatgtgaagaatgtggaaaagcctttagtgtattctcaacccttactaaacataagataattcatactggagcaaaaccttacaaatgtgacgaatgtggcagtgcctttagggcattctcaacccttactgaacataagagagttcatactggagagaaaccttacaaatgcaatgaatgtggtaaagcctttaactggtcctcaactcttactaaacataagagaattcatactggagagaagccctacaaatgtgaagaatgtggcaaagcttttaaccggtcctcaaaccttactcgacataagaaaattcatactggagagaaaccatacaaacctaaaagatgtgacagtgcttttgacaacaccccaaacttttctagacataaaagaaatcatatgggtgagaaatcctagaaatgtgaagaatgtgacaaagcctttaagcggttgtcacacttgattgtatataagataattcatactggagaaaactcccagaagtgtgacaaatgtgacaaaacatttaattaattctcataccttattgcacaggaaagcatttatacttgagaaaaattgnatnaagaatggaaaagtcattaatatctgctcatatcttaacatcagcgagttggtatttaataaaagcattatcaatgaaattactggcaaaagatctttcagaccatataagcctgcaaagtgcaccagagtnttattttggaagaggaacatttaaagtccaaganggttgtagtacctttggtt

SEQ ID NO: 53138 - DNA, 593 bp, Homo Sapiens
agtcggacctgccaatgggacatgcagggcggtgtggcaggtggagaggtcctacaggggctgagtgaccccactctgagttcactaagttatgcaactttcgttttggcagatattttttgacactgggaactgggctgtctagccgggtataggtaacccacaggcccagtgccagccctcaaaggacatagactttgaaacaagcgaattaactatctacgctgcctgcaaggggccacttagggcactgctagcagggcttcaaccaggaagggatcaacccaggaagggatgatcaggagaggcttccctgaggacataatgtgtaagagaggtgagaagtgctcccaagcagacacaacagcagcacagaggtctggaggccacacaaaaagtgatgctcgccctgggctagcctcagcagacctaaggcatctctactccctccagaggagccgcccagattcctgcagtggagaggaggtcttccagcagcagcaggtctggagggctgagaatgaacctgactagaggttctggagatacccagaggtcccccaggtcatcacttggctcagtggaagccctct

SEQ ID NO: 53139 - DNA, 525 bp, Homo Sapiens
cacgcgtccgatccacttggcaggtagcattttgcacccagtaatccacagattccagagacattaaggatacatcctagtgccatttttataggatgctggggcccaaaccaaaagttccacagattggcttcctgtatctctctcccagaaccttattttatgttttcactgattaaaaaaagaattatggaaatcaaaactttacaaattcataatggaagaggaaatgtccatgttaatacatcatagatcatagaccactcctgtgtaagccggttttcagtgtaagggtcatcagtgggaactggtcacataggtgacatccattgagggcagtattctgcatggacctccagaaagaatgagattgctctttgtgtcctgttgcggaaaaattactaacaattaaaaagcaaagtacagaacagtatatagagagaaggctacatttgtgtgaagggaacaggaaaaattggaatatttgtatttgatggtatgctcatgaacattgtgtgagctgca

SEQ ID NO: 53140 - DNA, 582 bp, Homo Sapiens
acgatggcaacaagtatggcggctgctagtggtagatttgaaagtgcgaagagtatcgaagagcggaaagaacagacccggaatgccagggccgaggtgttgcgccaggctaaagccaattttgaaaaagaagaaaggcgtaaagaacttaagcgacttcggggtgaggatacatggatgctacctgatgtgaatgagagaattgaacagttctcacaggaacactctgtgaagaaaaagaagaaaaaagacaagcattcaaaaaaagcaaagaaagaaaagaaaaaaaagagcaagaaacagaaatatgaaaaaaacaatgagtcatctgatagctcatcaagctctgaagatgagtgggttgaggctgttccatcccagactcctgacaaggaaaaagcctggaaagtgaaagatgaaaagtcaggaaaagatgacacccaaattatcaagagggatgagtggatgactgttgattttatgtctgttaaaactgtgtcatcatcatcactcaaagctgaaaaggaaactatgaggaaaatagagcaagagaaaaaccaagcgcttgaacagtccaaactg

SEQ ID NO: 53141 - DNA, 773 bp, Homo Sapiens
  misc_feature (623)..(623): n is a, c, g, or t
  misc_feature (711)..(711): n is a, c, g, or t
ccaaatttgagtccctctttaggacgtatgacaaggacatcacctttcagtattttaagagcttcaaacgagtcagaataaacttcagtcaaccccttctccgcagcagatgccaggctccagctgcataagactgagtttctgggaaaggaaatgaagttatattttgctcagaccttacacataggaagctcacacctggctccgccaaatccagacaagcagtttctgatctcccctcccgcctctccgccagtgggatggaaacaagtggaagatgcgaccccagtcataaactatgatctcttatatgccatctccaagctggggccaggtgagcagggccctcgggtgggagggaggcagggggagacacagctgctgccctgcaccagggagcagtaccaccactacccccgtagctctcctgagcccatgccggcatgttttgtgagcttctctgtattcttctgcgccaccgtcccttgtgctgggagcatgcctgcctcttggcaccacctgcagtgttagagagactgcggctgatcgtggggaccctgcatcacgcccctccaacccccgcagtgtcccaggaatccattcctgtgtccactgagcacagnctgcgtgggaggcctgagccccggccccaggttctgtcgctccggatagggatgagtgattggactttggaaagggaaaatcgatgcncactttaagacatgttattttaatcaacaataaattctccctttccttgtgattctcactgg

SEQ ID NO: 53142 - DNA, 471 bp, Homo Sapiens
gcggcccatgttacatatggccagggttatcattgggattcaaaggggatatgggcaaaggaacggttatagatcaaaggagactaaagagacttgacaactaaatgcagggagtaacaggattctgccctgagttgaaaatgaaggacgctgagacaaatgtggagatataaatatgcaccatattagatattattgtggcagtggaatttctctaatgtgatcactgtggttctataggcgaatatcccactttctttggcatgtatctcctaagtacttagcggtaaagtatcattcaggatatctgcaacttcttttcaacacagaaaaaagagaaagcaaatatataacagcaaaatagtaacaaattagtgaatctaggtcaaaagtttaagtgttcataatactattctttcaactctgtatttcaaaataaagttcacaggaaaaaagcaatagcaatacagc

SEQ ID NO: 53143 - DNA, 673 bp, Homo Sapiens
cgaagcctcaacatgtcaagaagagactcagaaagcacccgccatgactcggagactgaggacatgttatgggacgacctgctacatggcccagagtgccggtcatctgtcaccagtgacagtgagggggcccatgtgaatacccttcactcagggaccaaacgtgaccccaaagaggatgtttttcagcagaatcatttattctggcttcagaattcaagtccttcctctgatcgagttagtgcaataatctgggaggggaatgagtgcaaaaagatggatatgtctgtgttggaaataagtggcatcatcatgagcagggtcaatgcctatcagcaaggagtaggttatcagatgctgggaaatgttgtcactattggattagcattttttccattcttacatcgacttttccgtgagaagagccttgaccaactaaagtccatttcagctgaggagatcttgactctcttttgtggggcaccacctgttacacctattattgttttgtcgataattaatttttttgaaagattgtgtcttacttggatgttttttttcatgatgtgtgtggcagagagaacatataaacagagatttttatttgcaaaactcttcagccatattacttctgccaggaaagctaggaaatatgaaatacctcatttcagac

SEQ ID NO: 53144 - DNA, 617 bp, Homo Sapiens
  misc_feature (561)..(561): n is a, c, g, or t
  misc_feature (612)..(612): n is a, c, g, or t
ttcatgcataatgcccaggtcctggagtatttcaggatgtatgccaaagaatttgaccttctaaagtatattcgatttaagaccactgtgtgcagtgtgaagaagcagcctgattttgccacttcaggccaatgggaagtggtcactgaatctgaagggaaaaaggagatgaatgtctttgatggagtcatggtttgcactggccatcacaccaatgctcatctacctctggaaagcttccctggaattgagaagttcaaagggcagtacttccacagtcgagactataagaacccagagggattcactggaaagagagtcattataattggcattgggaattctggaggggatctggctgtagagattagccaaacagccaagcaggttttcctcagcaccaggagaggggcttggatcctgaatcgtgtaggggactacggatatcctgctgatgtgttgttctcttctcgacttacacattttatatggaagatctgtggccaatcattagcaaacaaatatttggaaaaaaagataaaccaaaggtttgaccatganatgtttggcctgaagcctaacacagagctctgagtcagcatccaaccttanatgat

SEQ ID NO: 53145 - DNA, 696 bp, Homo Sapiens
  misc_feature (19)..(19): n is a, c, g, or t
  misc_feature (74)..(74): n is a, c, g, or t
  misc_feature (638)..(638): n is a, c, g, or t
  misc_feature (669)..(669): n is a, c, g, or t
gggaaacaggaacttcagntggagaggcttaaatgcctctggttagagtgggggtttttgtttgtttgtttatntgttgggtttcaacactgagcatcatttctgtgatcaagtttctaactggcatgtgttttgatcatgaggtttaccatatcttgcccatacagacaaatgagagatctagtttcattttgttccctaaagaaagaacactctctaaaattaaatcatacctgtaaatttcttcagcatttgtttctgttcaatgaaattgagacccttaatgttgctttaatgtaaaattgaatattttgtctgtgatatactttaataatttaaagtaagtaatagttctaaagtcttcactgttgctactaagagaaaatagaattttaaaggtgatgataaagatgctataatgtcagttcactccagtccaatcaaatgtagtaagaaaaagtccttgaatagttctctagggacaatttctcacttgccattgacattaatctttggtgtattctcagaaaaaataaaaagaaattgaaactggtccaaggttatagtcatatcctcgataacttttgaaaaaaaattttattaggaaattaatactagcctttttcattctggctganagaaattattaaaggattagttgagtgtganatcaacagtattttgctcatacatact

SEQ ID NO: 53146 - DNA, 602 bp, Homo Sapiens
  misc_feature (542)..(542): n is a, c, g, or t
  misc_feature (558)..(558): n is a, c, g, or t
tttggccctctttccttctaagacatgaaaggactcacactggagaaagaccctatgaatgtaaacactgtggtaaagccttagtcgttccagtttctgtcgagaacatgaaagaactcacactggagagaagccctatgaatgtaaggaatgtgggaaagccttcagttctctcagttcctttaatagacataaaaggacacactggaaggatattctataagtgtatggaatgtgggaaagcattcattggttttatcacattcagatacttgaaagaaataaatcctgtgaatgtaaacgtggtaaagccttaagaagtttccaggctgggcgcagcggctcacacctgtaatcccagcactttgagaggccgaggagggcagatcacgaggccaggagatcgagaccagcctggctaacatgggaaaccctgtctctactaaaaatacggaaaaaaaaaaaaatagccaggcatagttgctcacacctgtagtcctagctactcaggaggcttgagcaggagaaacccttgaaccccngagggtggaggtgcantgagcccaaattgcactactgcacctcaacttggggtgcttgag

SEQ ID NO: 53147 - DNA, 853 bp, Homo Sapiens
ccacgcgtccgcccacgcgtccgcccacgcgtccgcccacgcgtccggggaaaacaagcagttacctgagaggaatctcacttctgcttccaacccaaatcatccaccagaggtcctgactctagatcctacgttacacatgaagccaaagcagcagatttcagggattcaacctcacggccttccgaatgcccttgatgacagaatatccttttccccggactctgttctagagcctagtatgtctagtccctctgacatagactcattttcacaagcaagtaatgtcacttctcagttacctggatttccaaaatatccctcacacacaaaagcttctccggtggactcttggaaaaatcagacattccaaaacgaaagtaggaccagttccacgtttccgtcagtatataccattactagtaatgatatctcggtcaacactgtagatgaagaaaacactgtcatggttgcttcggcctcagtcagtcagtcccagcttccaggtacagccaacagtgtcccagaatgcatttcattgacttccttggaagatcctgtgatattgtctaagattaggcagaatctgaaggaaaagcatgctcgacacatagcagatcttcgagcttattatgaatcagaaataaatagtttgaaacagaagctggaggcaaaagaaatctctggagttgaagattggaagataaccaatcaaattcttgtagacagatgtggccaattagatagtgctttgcatgaagctactagtcgcgtgagaacactttgaaataagaataacttactgggaaattgaagtgaatgatttgagagaacgcttcagtgccagccagca

SEQ ID NO: 53148 - DNA, 577 bp, Homo Sapiens
  misc_feature (109)..(109): n is a, c, g, or t
  misc_feature (484)..(484): n is a, c, g, or t
  misc_feature (521)..(521): n is a, c, g, or t
  misc_feature (561)..(561): n is a, c, g, or t
caattgtgtagcattttagtagtctggcaagaagttggagtgtctaatgtgtaattacgagaacagtgagaaataaaattctacagattgttttattctggtgtgctgntgtgttctcatatggttgtctttttggtcttgatagtgtatcagtaacagagtacgagtaacaaacagggatctcttctgaacggcgtgacattagaaaagctgtttacggcctcaactttgctgtggtttattaagacacagatatgtgttcattctggggccaagcagtaactggagagtggcacttattgaggccagtatggaggcagtacagagattattgagattaaaagaaagaaacaggtggaacggatctatgtaatggaaagctaaacagaatagttcgtggtacacagtagaaaagcattacatgtttattaagatatggtcatcttccatttattaaagttacatgttttataatttttagagnatatagaaattctctaccctatcatgtttgccaaagncagaacactaacttcatttattaaatataaaaaaaaaaanaaaaaagttggcggcc

SEQ ID NO: 53149 - DNA, 576 bp, Homo Sapiens
ggatgggtaaatgcagttctacttttatctattaaaaattagcagttgttctttaaaaagaagcaaattttataatttctaagtgccacctgcctgctgtttgcatttgtgcctcagggcccaaagaagcaagagataagcagtaatgtgtatgttttgcaatggttcttgtcaccattaaacaacaactggaaagaagggaaaataattgggggatcagatatactctcttttctcttgtctttattgttcctaatatcaggtgcccctccagtgtgtgaaaatggtatgaagcctggaggcctggcaaaggatgaagaacagagaatgggaatataaagggacagaccatttttgctcagctctagactttttttttttaatcagctgtcatatgtgaaataatagcagaacagtgtaatgattaagaacatgatcctcggccgggcgcggtggctcaagcctgtaatcccagcactttgggaggccgaatcacgaggtcaggagatcgagaccgtcctggctaacacggtgaaaccccatctctactaaaaatacgaaaaaaaaaaaaaaaaa

SEQ ID NO: 53150 - DNA, 688 bp, Homo Sapiens
gagtcgcagctggacgaggatgagcatggcttacatactaagtacattcatcgaatggagcatgtgcccacctggcttcagaacactcatgtctacagctggcccaagaataaaaaaaacatcctgctgcggctgctgagagaggaagagtatgtggctcctccacgggggcctctgcccacccttcaggtggttcccttgtgacaccgttcatccccagatcactgaggccaggccatgtttggggccttgttctgacagcattctggctgaggctggtcggtagcactcctggctggtttttttctgttcctccccgagaggccctctggcccccaggaaacctgttgtgcagagctcttccccggagacctccacacaccctggctttgaagtggagtctgtgactgctctgcattctctgcttttaaaaaaaccattgcaggtgccagtgtcccatatgttcctcctgacagtttgatgtgtccattctgggcctctcagtgcttagcaagtagataatgtaagggatgtggcagcaaatggacaatgactacaaacactctcctatcaatcacttcaggctacttttatgagttagccagatgcttgtgtatcctcagaccaaactgattcatgtacaaataatacaatgtttactctttcgaacaaacaaacacacccaaaa

SEQ ID NO: 53151 - DNA, 471 bp, Homo Sapiens
catatgtggccccaaaatttcaataaaagctgtataggaaagcactttgtaaaatagtaaagcaaatacaaataaatgttacctcacaattgttgaacagtatctcggcttcattaagtcgtatgcaagaagactttataaatgaagcactttccattctagcccatgatgatgccatttggtcagttgcttgggggacaaacaagaaggaaaactctgagacagtggtcacaggctccctagatgacctggtgaaggtctggaaatggtgagtgcctctcccctaacatacagccttggaaaattgggggctgaggttttgcttctgaactctccagttgcagtccgggaaatacttttttctaggcaagaaagcaatagcaatatggtggtataaaacagcagcttatttttcccacttgttttcctgttactctgtattaaagccctaaagttaaaaaaaaaaaaaaa

SEQ ID NO: 53152 - DNA, 771 bp, Homo Sapiens
gctgtctctacacacgtggccctcggggcctacgccccgctcacaaagcatgggacactggtggtggaggatgtggtggcatcctgcttcgcggccgtggctgaccaccacctggctcagttggccttctggcccctgagactctttcacagcttggcatggggcagctggaccccgggggagggtgtgcattggtacccccagctgctctaccgcctggggcgtctcctgctagaagagggcagcttccacccactgggcatgtccggggcagggagctgaaaggactccaccgctgccctcctggaactgctgtactgggtccagaagcctctcagccaggagggagctggccctggaagggacctgagctgggggacactggctcctgccatctcctctgccatgaagatacaccattgagacttgactgggcaacaccagcgtcccccacccgcgcgtggtgtagtcatagagctgcaagctgagctggcgaggggatggttgttgacccctctctcctagagaccttgaggctggcacgggactcccaactcagcctgctctcactacgagttttcatactctgcctcccccattggggagggcccattccatccatctttaggcccctttgggtgggcttgcgcctcagtttgatgctgctaaattcccctgggagccagcatggatctggtggaccgatgctgtcagaactgggaaggcaccagggtggggcagcatcccgggcattctgaggtatgacattcc

SEQ ID NO: 53153 - DNA, 829 bp, Homo Sapiens
  misc_feature (698)..(698): n is a, c, g, or t
gggtgccacattggaagaggtggaaatataagttctgaaatctgtagggaagagaacacattaagttaattcaaaggaaaaaatcatcatctatgttccagatttctcattaaagacaaacaaagttacccacaacactgagatcacatctaagtgacactcctattgtcagggctaaatacattaaaaacctcatgtgtaataggcgtataatgtataacaggtgaccaatgttttctgaatgcataaagaaatgaataaactcaaacacagtacttcctaaacaacttcaaccaaaaaagaccaaaacatggaacgaatggaagcttgtaaggacatgcttgttttagtccagtggtttccacagctggctaagccaggagtcacttggaggcttttaaatacaaaacattggagctggaggccattatccttagcaaactaatgcagaaacagaaaatcaactaccgcattttctcacttataagtgggaggtaatgataagaacttatgaacacaaagaaggaaacaatagacattggagtctatttgagaggggagggtgggagaaggaaacaggagcagaacagataactattgagtactgggcttcacacctgggtgatgaaataatatgtacaacaaatccctgtgacacatgtttacctatggagacaaaccttcatgtgtatccctanaccttaaaatacaaggttaaaacaagacaaaaggattaaaccgcaaacattcatgccctaacactgggtctaatgaaccaattagttaaaactttccgaaactaggaggccaggtattttgaaaagtcccc

SEQ ID NO: 53154 - DNA, 497 bp, Homo Sapiens
gggtaagaccattgcaattggaaaagttctgaaactggttccagagaaagactaagcattttcttgatgaccctgcacaatactgtgaggaaaattgactgcagaagcctacttcacaccgccttctcttattttctgcccattgataaacctctccccatattttgcaaagaggaaattcacagcaaaagtccacattatgtcagctttctcatattgagagctctgctatgccactgttgaatttttcccaagattcctgtccctagccctcacttcaaactctgcttccttggacagatttggcaatagctttgtaagtgatgtggacataattgcctacaataatgaaaacctacaggaatttttttatttttcattttccccttaggcatatttagtatttttcccccaggcagatcattctgagtgtgcgagtgtgtgtgcacatgttacaaaggcaactaccatgttaataaaatattcaatttgaaaaa

SEQ ID NO: 53155 - DNA, 604 bp, Homo Sapiens
aaatcagacgcaccggcctttattattatatatgctacatctgttgagtatttttaaaataccaataagaggacttgtttatttcataaaccacttcttccctctctttcaaagaaaatacattattaccatacttttacattagtctgagaatttttgctaaatatgattaagtattccaaaatataatggcgtcattattcttgacttttttagagaatatacatcttaagactgtattagttctcagagcaaggcatcatctactcccctgcacctgagagtctggccccagattccagatgtgcggacagcccatgaccgaggtgcacacagtgccctcttgaataggaaggtcagccagtgaggcggcagcataacttgcaggatggacttatatcttaccatctcttcctgctaccaaaataaaaaaataaattgaaagacaagacccaccagtctagttttgtagacctgtgaaatgtgtctttatttcttggcattagaagaaagatatttttaatccatatcgtggttttagagttgaagtgaattgatacccaattttccatcttagatctcctttatcaaaaaaaaaaaaaaa

SEQ ID NO: 53156 - DNA, 500 bp, Homo Sapiens
agggggatgagttgtgtgaataccccaagactcccatgagggagatgccatgagccgcccaaggccttcccctggcactggcaaacagggcctctgcggagcacactggctcacccagtcctgcccgccaccgttatcggtgtcattcacctttcgtgttttttttaatttatcctctgttgattttttcttttgctttatgggtttggcttgtttttcttgcatggtttggagctgatcgcttctcccccaccccctagggtaccagcaggcagagccttgccctctgctcaggctggggtccagtgggaggggcccaagatctctgctcagagaagtgcagggggagccttccagctcactctccctgaggactggcttgacaggggctatgggtttgctttggtgttgtttttaaaaaaagaaaatatatttttttgaaaaaacgactgcccatcccgggtcctttccctgatgggttggggcagttacctggttgc

SEQ ID NO: 53157 - DNA, 626 bp, Homo Sapiens
  misc_feature (43)..(43): n is a, c, g, or t
  misc_feature (420)..(420): n is a, c, g, or t
  misc_feature (540)..(540): n is a, c, g, or t
  misc_feature (549)..(549): n is a, c, g, or t
  misc_feature (573)..(573): n is a, c, g, or t
  misc_feature (581)..(581): n is a, c, g, or t
  misc_feature (608)..(608): n is a, c, g, or t
  misc_feature (615)..(615): n is a, c, g, or t
  misc_feature (625)..(625): n is a, c, g, or t
tctcacctatacgtgcaagaaaggaacagttgcttgcggccancccctgttgtagaaaatgccaagacctttggaaagatgaaacctcgttatgaaatcaactccctgattagataccacatgcaaagatggtttcattcaacgtcaccttccaactatccggtgcttaggaaatggaagatgggctatacctaaaattacctgcatgaaccgtaagtggtcctttagaaagaatggactaccgtgctataacaactactagacaccttcattttaccggctgtggtatcggcagtttagggtatggagcaagtaatattgtgtgttttctttttttctttctttccttccatgtagcatctgcataccaaaggacttattctatgaaatactttaaaaattcctcatcagcaaaggacnattccataaatacatcccaacatgatcatcgttggagccggagtgggcaggagtcgaggcgctgatccctaaaatggcgaacatgtgttttcatcatttcagccaagtcctacttcctgngcctttccnatcacccgggaagtattttcagtnggttggantttgggccccggtcaggcatttgggtnccggggncccaaaattng

SEQ ID NO: 53158 - DNA, 850 bp, Homo Sapiens
caaaaccaacatgaagcacatggctggtgctgcagcagctggggcagtggtggggggccttggcggctacatgctgggaagtgccatgagcaggcccatcatacatttcggcagtgactatgaggaccgttactatcgtgaaaacatgcaccgttaccccaaccaagtgtactacaggcccatggatgagtacagcaaccagaacaactttgtgcacgactgcgtcaatatcacaatcaagcagcacacggtcaccacaaccaccaagggggagaacttcaccgagaccgacgttaagatgatggagcgcgtggttgagcagatgtgtatcacccagtacgagagggaatctcaggcctattaccagagaggatcgagcatggtcctcttctcctctccacctgtgatcctcctgatctctttcctcatcttcctgatagtgggatgaggaaggtcttcctgttttcaccatctttctaatctttttccagcttgagggaggcggtatccacctgcagcccttttagtggtggtgtctcactctttcttctctctttgtcccggataggctaatcaatacccttggcactgatgggcactggaaaacatagagtagacctgagatgctggtcaagccccctttgattgagttcatcatgagccgttgctaatgccaggccagtaaaagtataacagcaaataacattggttatctggactattttggactagtgcacaggtgagctaaacaatctagacatctgaatacttgctggatctctgctctcacactaagtcatactatgctactataaatcaactataagaatcattagaacgaactcgcagt

SEQ ID NO: 53159 - DNA, 760 bp, Homo Sapiens
  misc_feature (6)..(6): n is a, c, g, or t
  misc_feature (21)..(21): n is a, c, g, or t
  misc_feature (23)..(23): n is a, c, g, or t
  misc_feature (459)..(459): n is a, c, g, or t
  misc_feature (553)..(553): n is a, c, g, or t
  misc_feature (630)..(630): n is a, c, g, or t
  misc_feature (666)..(666): n is a, c, g, or t
tggacngccctggccattgancnccctttgtcgggaagcgcgccattgtgttggtacccgggaattcggccattatggccgggggatttagatttagtattttacccaaggataaaattcaggatttcttaaaggatagccaattgcagtttgaggctataagtgatgaagagaagactcttcgagaacaggagattgttgcctcatcaccaagtttaagtggacttaagttggggttcgagtccatttataagatcccttttgctgatgctctggatttgtttcgaggaaggaaagtctatttggaagatggctttgcttacgtaccacttaaggacattgtggcaatcatcctgaatgaatttagagccaaactgtccaaggctttggcagtgagtattttacttgatttctgtatctgacatgttcacactttcagttatatacccctggtagttntattctgtgtttctctaggaaataagttaattcagttttcataatgatattcagattacatatgatgttgtactgttaatcccttcctaggttnttatttgttactatccatagttgggttttaaagtttttttcttgatcctactaataccaatgctgagtgattaattntgtgagtaacctctgtgggtttctttcatggccatngtcttttttccttagtagacttccgtatatggctcttaacatttagtgtggccctgtgtaagatataacttctaagatttctgttctgttagtt

SEQ ID NO: 53160 - DNA, 547 bp, Homo Sapiens
ctgctgtattttcaggaaaaaaaaaaaaaggggtgtttctattgaaactgtactaaatttttgcctacaatttaccttgttaaatattgtagataaattgctaatactaatagccaaatagataacactaatgctttgtttaaaaaaacgaaaaaaacaaaacaaaacaaaaaaacatgagcagtggtgttctaatgaagttatgacatctgtcctaattagtttcttaaatacatttactacttaatggttttgaagcaactgtttaatttttaaaatttttgaaaacttgctaataaccttttgttcagaatttagtagattgtttaatgcaggacatcaactacataatgaaagatgcttgaaatgcttttgttatttcaggcaaatcaaattaaatcagactatcaaactacaagagaaccttagtcttttttgtttttgtctaaacatgttagtttagtgatgtcttggtgaactgtgagtgaactgtattgatttttctaatctttagagaccttcacacagcatgagggctgttggcatt

SEQ ID NO: 53161 - DNA, 776 bp, Homo Sapiens
ggaatgcactactcaccagcacacagtgcaagaggaggattccagatctaacttggggtggctttgtcttcttcttttgccattccactaactgttgggtgaagagaaaggaagtacagaaaacatgcagaaagcacagaaaggaaaaccaaggttctcatgaatctccaacctttaaatcctgaaacagtggcaataaatttatctgatgttgacttgagtaaatatatcaccactattgctggagtcatgacactaagtcaagttaaaggcttgttcgaaagaatggtgtcaatgaagccaaaatagatgagatcaagaatgacaatgtccaagacacagcagaacagaaagttcaactgcttcgtaattggcatcaacttcatggaaagaaagaagcgtatgacacattgattaaagatctcaaaaaagccaatctttgtactcttgcagagaaaattcagactatcatcctcaaggacattactagtgactcagaaaattcaaacttcagaaatgaaatccaaagcttggtctagagtgaaaaacaacaaattcagttctgagtatatgcaattagtgtttgaaaacgattcttaatagctggctgtaaatactgcttggttttttactgggtacattttatcatttattagcgctgaagagccaacatatttgtagatttttaatatctcatgattctgcctccaaggatgtttaaaatctagttgggaaaacaaattcatcagagtaaatgcagtggatgctaaagtacc

SEQ ID NO: 53162 - DNA, 619 bp, Homo Sapiens
agcaagagcacctggctgatcctgcaccacaaggtgtacgatttgaccaaatttctggaagagcatcctggtggggaagaagttttaagggaacaagctggaggtgacgctactgagaactttgaggatgtcgggcactctacagatgccagggaaatgtccaaaacattcatcattggggagctccatccagatgacagaccaaagttaaacaagcctccggaaactcttatcactactattgattctagttccagttggtggaccaactgggtgatccctgccatctctgcagtggccgtcgccttgatgtatcgcctatacatggcagaggactgaacacctcctcagaagtcagcgcaggaagagcctgctttggacacgggagaaaagaagccattgctaactacttcaactgacagaaaccttcacttgaaaacaatgattttaatatatctctttctttttcttccgacattagaaacaaaacaaaaagaactgtcctttctgcgctcaaatttttcgagtgtgcctttttattcatctactttattttgatgtttccttaatgtgtaatttacttattataagcatgatcttttaaaaatatatttggctt

SEQ ID NO: 53163 - DNA, 385 bp, Homo Sapiens
ttatacatgataaaaacagcatttgaatttgtgaggacatgaagtatcactccacgttgtcaaaacacccagtagacacgtgcagtgaagccagtagcctctctcgtgagcttacatgagctgtgtggactgatccttcctcacacgccatgctgtcctcagctcacacgtgcactcaggaagcttgcccatactcaagcctcactctagcattgcagacacatcaggttttatcttcagaaagacaccttaaaagtatcagaggaaaatgtgaacacatttttttaaatggtcttggaatgaagagacaaaaaccagaatccatgaaggaaaatagtttgacttctatacagaaaaagaaaataccgtatacaaagttaaaaaa

SEQ ID NO: 53164 - DNA, 656 bp, Homo Sapiens
  misc_feature (656)..(656): n is a, c, g, or t
ggtatctttctaagtgtgtgcaaacagataggcagttgatagtgaagtcattatgttaaatttctaaaagtgagccgggtgtggtggctcacacctgtaatcccaaattgctgagattacaggcaggagttgtaatgcactgtgcctggctacatttagatctttaatctacttggggttcatttttgcatatggtttaaggcaaaagtccactttatgtggctatccagttttccaagcaccattttttgaaaagagcatctttcctctgttgagtagtcttggcacacttgtcaaaatcatttgtccatatatgccatggtttatatgtggattctctattttattggtcatatgtctgtctttatgtcagtaccacacattttaggtgtgtgtgtgtgagactcagtgttgaggacaaggctagtgggctttcacactccagactgctgtattccagcccaaattactcaaattagccaatccatggggaacatggaaaacgtagctaatgcaatccgcttgccttacctaagttgtcccctgcagcctcaggttgctgttactgtgtttcagatgcaaccctctgtgggaccctacccaagttctctcattcttagctataggtaataaattgttctgattttgtgtaaaan

SEQ ID NO: 53165 - DNA, 736 bp, Homo Sapiens
  misc_feature (729)..(729): n is a, c, g, or t
aactcagcataggactcttttgagtttatcctacgtggagtttgttgacctttttatatatccatgtcttccctcaaagttggggagttttggccattatttcttcaaataagctctctgcctctttctttccggtataaagattagtgtgggggtgtctccattgttcttttttttcccctcaaacttagagctggaagaaaccttagacatcctgtgggccagaatttcatattaccttccacaaaactaacttccagagaggtcttcaggaagttggcaaattttagttacgtatttttaaagtgtctttgaacttttaagaactacatctcgttaattatatgtattcgtatatattattatccaaattttaacaaattagagtgcattggtgctttaaagtgctgtcaactactctgagaatgcaaaattcttgttttaaaatgtgtatcttacaactccttccttggatgaattagatttttttagatggagaaaccaaaatcaagtacagccataccttggagacattatggtttggttttgttttaggaacccaggctggtcttgaattcctgggctcaggcagtcctcccacctcagtctcctaaagtgctaggattacaggtgtgagccgctgcacctggcccagcatggggttcttttccataccaccacaataaagcaaatattgcactaaaagaagtcacatataaaaggttctgntttcact

SEQ ID NO: 53166 - DNA, 461 bp, Homo Sapiens
  misc_feature (359)..(359): n is a, c, g, or t
  misc_feature (371)..(371): n is a, c, g, or t
  misc_feature (383)..(383): n is a, c, g, or t
  misc_feature (406)..(406): n is a, c, g, or t
  misc_feature (428)..(428): n is a, c, g, or t
  misc_feature (442)..(442): n is a, c, g, or t
  misc_feature (452)..(452): n is a, c, g, or t
  misc_feature (460)..(460): n is a, c, g, or t
agccaactgaacctgctaattgccagaattaggcatattcggctgatctgtcacaggaaatgctgggctggagcaggcctcccatgttttacaacctgcctacataagacataagcatctaggagcagagaatccctcctcctttcaagcagctctttcccaacagaataaagggaagtcactgagctgtgaatgcctgttctattcagatttacctcttagataagttgttccagctaccccgggaaggaggggtaaaggggatgagatgtttgaactgtaacaccctgtacatgggaggagacaacatgagttgttgatgggagcatccttccattcttacctttttgggcttttanaaaaacttttantggcagtgcagnaaaatatttgaaaattgtttttnacagggtttttgaaggccattncccaggctgctggnaaatcctggnaaaattgnt

SEQ ID NO: 53167 - DNA, 1467 bp, Homo Sapiens
tggcgggggacttacaaaatggtgcagattggactttcttgccttctactttaatataaaaggaagaggggcgttgttatctggctgtttcctgtcgaattaggggcactgtaaccagggtttgggttttgaagtagtgggtgttcgactttagagttgttttcctggaagcgctgatactggacttagtggaggagaacgacggtatcaatgtgtttctggatgactgcctggacaagggagttcagcttttgggagactgactgggctatgaagtgtacctttctactctgcagaggctggaaaggcaaaaatgatggctaaggcttccttgcagccgctgatacagaagcctgagggaacacactcccccctacgtccttctccaacacagcagagccaggaaggacccggatggaagttaggacaaagaggcccagaattggcacagataccaacagaccattcgttgaagaagaaatccaaatggccataagaaccccagagatgaaaggcctcctcccactggcttggttcctggcttgtagtgtgcctgctgtgcaaggaggcttgctggacctaaaatcaatgatcgagaaggtgacagggaagaacgccctgacaaactacggcttctacggctgttactgcggctggggcggccgaggaacccccaaggatggcaccgattgggtctcgctctggttgcccaggctggagtgcaatggtgcgatctcagctcactgcatcctagaccttctgcactcaggtgctgttgggcgcatgaccactgctatgggcggctggaggagaagggctgcaacattcgcacacagtcctacaaatacagattcgcgtggggcgtggtcacctgcgagcccgggcccttctgccatgtgaacctctgtgcctgtgaccggaagctcgtctactgcctcaagagaaacctacggagctacaacccacagtaccaatactttcccaacatcctctgctcctaggcctccccagcgagctcctcccagaccaagacttttgttctgtttttctacaacacagagtactgactctgcctggttcctgagagaggctcctaagtcacagacctcagtctttctcgaagcttggcggacccccagggccacactgtaccctccagcgagtcccaggagagtgactctggtcataggacttggtagggtcccagggtccctaggcctccacttctgagggcagcccctctggtgccaagagctctcctccaactcagggttggctgtgtctcttttcttctctgaagacagcgtcctggctccagttggaacactttcctgagatgcacttacttctcagcttctgcgatcagattatcatcaccaccaccctccagagaatttttacgcaagaagagccaaattgactctctaaatctggtgtatgggtattaaataaaattcattctcaagg

SEQ ID NO: 53168 - DNA, 591 bp, Homo Sapiens
  misc_feature (533)..(533): n is a, c, g, or t
  misc_feature (554)..(554): n is a, c, g, or t
ctcttcccaaaactgtgcctgtccccagcttctggggagggacacagcttccccttcccaggaattgagtgggcctagcccctccccccttttctccatttgagaggagagtgcttggggcttgaaccccttaccccactgctgctgactgggcagggccctggacccctttatttgcacgtcaggggagccggctccccccttgaatgtaccagaccctggggggggtcactgggccctagatttttggggggtcaccagccactccaggggcagggaccatttcttcattttctgaaagcactttaatgattccccttcccccaaactccagggaatggaggggggaccccgccagccaaaacattccccccattcccgacccccctctcctcttctagcccatgcccttccccggtggagggagggagcagggagccctcactctccacgccccttgcttgcatctgtatatagtgtgagcagcaagtaacccttctcctccctcccccctcccccctcctcaatgtagnggccttggatatcctgtttgntaataaagacaattcaaccagcaaaaaaaaaaaaaaa

SEQ ID NO: 53169 - DNA, 693 bp, Homo Sapiens
ggaatgagtcacatcctataaattctgtattcaagcttgtaatgaagctggggaaggtcccctctcccaagaatatattttcactactccaaaatctgtcccagctgccttgaaagcccccaaaatagagaaagtaaatgatcacatttgtgaaattacatgggagtgtttacagccaatgaaaggtgatccagttatttacagtcttcaagttatgttgggaaaagattcagaattcaaacagatttacaagggtcccgactcttccttccggtattccagccttcagctgaactgtgaatatcgcttccgtgtatgtgccattcgccagtgccaagactctctgggacaccaggacctcgtaggtccctacagcaccacagtgctcttcatctctcagaggactgaaccaccagccagcaccaacagagacactgtggaaagcacaaggacccgacgggcactgagtgacgagcagtgtgctgccgtcatccttgtgctgtttgctttcttttccattttgattgcctttatcattcagtactttgtaatcaagtgaaaatataactttattttttaactctattacattttattttgtcatgtactaaaattatttctgtattgcttttataaaaaacagtggcatttagcactggcattgagactatagcacatcatttttgccatttt

SEQ ID NO: 53170 - DNA, 493 bp, Homo Sapiens
  misc_feature (416)..(416): n is a, c, g, or t
  misc_feature (432)..(432): n is a, c, g, or t
gccgagcttgaaggtttcagaggaagccgagtcccagcagcagtgggatacttcaaaaggagaacaagtttcccaaaacggtttgccagctgaacagggatctccacgggttagttaccgctctcaaacctaccaaaactacaaaaactttaatagcagacggacagccagtgaccagccatggtctggactgtgaagttcactaccatttgtcaagaatcaccctttccaaatcctctgggttttgactttttggcttccacttcacccaaaatgttaaaatttttacttaattcatagccttccttggtttcatatttgtttgcatttaattcatgtttgagtctcttaactgatggatgcccacttgccttaaagcagcatacttattttttgtttatttattgtgagctttntactttattaagattntacagcgaaacccttacatgagtaattgaaatgaaattaaatgagattacagcataatgaa

SEQ ID NO: 53171 - DNA, 672 bp, Homo Sapiens
  misc_feature (612)..(612): n is a, c, g, or t
gtccgcaccgggctgacccacacctgacacttccagccagtctgctgccaaatggtggttcagggaattcatattggactggcctcagctctaacaaggattggaagttgactgatgatacacaacgcactaggacttatgctcaaagctcaaaatgtaacaaggtacataaaacttggtcatggtggacactggagtcagagtcatgtagaagttctcttccctacatctgtgagatgacagctttcaggtttccagattaggacagtcctttgcactgagttgacactcatgccaacaagaacctgtgcccctccttcctaacctgaggcctggggttcctcagaccatctccttcattctgggcagtgcccagccaccggctgacccacacctgacacttccagccagtctgctgcctgctccctcttcctgaaactggactgttcctgggaaaagggtgaagccacctctagaagggactttggcctccccccaagaacttcccatggtagaatggggtgggggaggagggcgcacgggctgagcggataggggcggcccggaagcagccaggcagttttattgacatctttttaaatcccccaaccncgccccgaccgagcccctaaccgaccccccacgaaaccccaaaaaccgacaaacaacaag

SEQ ID NO: 53172 - DNA, 594 bp, Homo Sapiens
  misc_feature (431)..(431): n is a, c, g, or t
  misc_feature (446)..(446): n is a, c, g, or t
gttcctgtgatcagaggcaagatttgcccaggaacagaataaaggtgcttctttggatagctctcaatgttcgccctcccctgcctcccaggaagaccttgaatcagagatttcagaggattctgatcaggaagtggacattgagggcgataaaagctattttaatgctggatgatgaccactggcattggcatgttcagaaaactggatttaggaataatgttttgctacagaaaatcttcatagaagaactggaaggctatataagaaagggaatcaattctctggtattctggaaacctaaaaatatttggtgcactgctcaattaacaaacctacatggagaccttaattttgacttaacaaatagtttatgtactgctcttaggttgttttgataaagtgacattatagtgattaaattctttccnctttaaaaaaacagntagtggttttcactatttataaataggaccttcttgaacgacttttctgaatctgttatctccacctattggaaggcaaagggttccccaattcagagtgctacatttatggcagctttgcgattttaaaggaaacattcttactttt

SEQ ID NO: 53173 - DNA, 606 bp, Homo Sapiens
  misc_feature (251)..(251): n is a, c, g, or t
  misc_feature (439)..(439): n is a, c, g, or t
  misc_feature (568)..(568): n is a, c, g, or t
  misc_feature (581)..(581): n is a, c, g, or t
  misc_feature (603)..(603): n is a, c, g, or t
ggataacacagagccctttttgtaaattggcattggagtgttttaccctctagctgttttacttagaatgtaacatatgctgcctacccacctcggccagagttgtagtcccaaagaagagcatgggtggcagatggtagggaattgaactggcctgtgcaatgggcatggagcacaaggggtcacagcatgcctcctgccttaccgtggcagtacggagacagtccagaacatggtcttcttgccacggngtgttgttgtctctggtggtgctgcatgtctgtggctcacctttattcttgaaactgaggtttacctggatctggctactgaggctagagcccacagcagaatggggttgggcctgtggccccccaaactagggggtgtgggttcatcacagtgttgccttttgtctcctaaagatagggatctactnttgaagggaattgttcctcccaaataaatttgctttaccttggtcctttcttttgtgccagtattcaagtggtatagctctgagcagggtcacatttggccaaacctgacacttgcctgctgcattctnctttggccatcanggtcagttcaggatagcccttnctg

SEQ ID NO: 53174 - DNA, 914 bp, Homo Sapiens
tttccattttctcacttttataaaataagagggttgaatcggatgatctctgataacctttttatagtaagagccctatgattttatgaccctgtgaatagcatgattatagctctaggattaacatcttcaggaaatttaacagcagacttccagttaaacttcgtgattgaacacatgtttttccatgttccttcctagtaagggactaaaaattttgagcaaaagactaaaaaatatataaatccacaggcataaggaagaggaagcaacatattaaagagacacaacttttggaagatgtaaaggaggaactggcagaaatgggaaagccgaatacatgtgactggagagtgttgtgtcaatgagaaacaagacagttcatactccagaacctgtttaagaattagaggcagtatgtcctgtagaaaacagtagctgaagtagaaataaagtataattaatatactcagagagatagcagaagatactgctactatgaaacatgacaagattatataaaaagaagaaataaccagagaataagcacttttataataactgaaataagcttttatatgatagaaattttcctgaaaatagagcaaaaaaaagtcaaataaatggaaaataggagagaagagataaaaatcaaacaaacgatccaacaagctgaacatctgattaatgggaagttcagaaagcaggcgaaagcaaagaaaatgatagggaggaaactgttataaaagtatatggtaaaatttttcagccccaaaagttccagttttggaaggatcttctgagtgcccataaaaatgtgaaaagcatttccccaccaagatgcataattgggaaaaatttcaaaataaccgttaataaatagatgataatagaaaggttccccgagagaaata

SEQ ID NO: 53175 - DNA, 1070 bp, Homo Sapiens
  misc_feature (828)..(828): n is a, c, g, or t
attcccgggatgggattcccaattggtaagggctcgccttggcctgttgccactcttgctccctagcctgcagggctagctcccctgtggtcttcaggaaaggttttgaaaaaggatgggtcccaccctccctccagagccaccagtgttagagcggagcccaaaggaaggatgggagccctggagtgggcaagaccaggccacctgctgaggtcgctgtggagcaccctcgctcctctcctggctactagctctggccctgcacctactctcactggccacctctggaggctctgcctttcccaagggccctggcagagggtggggcactgcaccttaccccacccatccatgccagcacttctgcactacggccattctcctcttgggcgctcctcagcctcactgtgacctttctgccagagctcccagccaggcctactctgctgaggtggcgcttcctgctaagggcccttctctgccctttctgccctccttcccatcccacatgctgagccgccacaaagaccaaagaagtgatggcttttctctgtcccctgctgctctgaggggagaggggtgggtctcctgagccactcagatgggaaagtcccttactcggcccctccctccccagcagccccaagctttacactggatgcagcgatcaacccaccactcaccaggcctctcctcccctctgcccccggctcttagctccagctgctccaggtagttggttcatccttccccctctctccctccctgcttccccttcagtgcttacttggctccagccctccagctgcagcccctggggaaaagcangcctccttctcctctccctccactccctcgctccctccctcagcccgtgtctctgccaggggcctccctctcagtcaggcttcagagcagccctgggagacaggaggccatgttaaaacttttttacaggtttaagaagacaattggaggtggaggataatgggtgggggggtcttggcacactttccttgccttaatcccaacaaacacggggggaagttttttccccttttctttccccc

SEQ ID NO: 53176 - DNA, 431 bp, Homo Sapiens
  misc_feature (332)..(332): n is a, c, g, or t
tcgagttttcttcccagaaatatgtaatcccctggctgactaggactgttaaacatagtgtggactggatgatgccttcgacaaaccagagaagccaagttggggggagctggtgcctggagtgggccctgtgcacctcacctggcggaggctgggggggctctgtcagcaggaccctagaggagactctcattcgattttaaagaagcacaacgggtcattttcctttgtatgttcctagcgcagaactgtttctaaaacaacttgaagtatagttttgttatctaagcaatttttgttttaagtaagtaagtgtactagaatgcgacctngttatggttcaggtttttaaaaactggtacagtattgtatttgtctcatctgttgcactgtatttcaatcatctgtaattaaaatgatcatatgtttgc

SEQ ID NO: 53177 - DNA, 921 bp, Homo Sapiens
gatggcagaaactcagggaggggcttggggcccattgtatctggagagcctggattcctcttggcagtcttaggcccagccacttctgctacctttgcgctgctgtgagcctcaccctgggcccctgggccctgcttctctgctcccctgggtgatgggtgggcccagaaggtggcagtcccacaccttgtcctcccacctccctgaactgtccattgcttttatagggtgaggtaagtgacagcctcccaagcccaggctttggcactcagaatgggcccagtgggggctgggcaggcccattgagggccaccgccgaggtttctcctagggctgttcctgggcctggctcttacaggctcgtcccccaggcctgcccttctccactgccccctcctgtgtctgggtccacacacccttcaggaagggggagcactgagaagcacagcacaggggctcagcctgggatccggtgatggtctgggcagaggctgggtcaggagtcccaaaggtcagtgacagtttctcagaagaggcccagcgtccacctctctcccagggccagacaccccttccctggctcccccatccccctatgggttcccagccccttgcaccctcattgctgttcaaattaaagcctctggttttgcacctgtaaaaaaaaaaaaaaaaaaaaccaaggcatcttttgtcggggggggaaaaaaaagggaatggaatgggcccttgggccataagctgttttcctgaacccaattttttttgggaaaaaggggggaaattctggcccggtttccccatataagggagaccccaatttaaatttccaaaaaaagcccggggtaaaccccggcaatttaaagaaaaacgggtggtgggaaaaccccggggaaatttataacccgcccccttatagag

SEQ ID NO: 53178 - DNA, 569 bp, Homo Sapiens
tagcggtaccccattccattccagcgtatcgggggtgctggtggcgccgtgctcactctcgggacggggcccaagagatcatcgggtagaaaccggcctttggggtctggcagggctctagtcccaaggacactcttcccaccccgctgaggtctgaaggatccgcccagcgagatcttctgtgaatgatcaagggccgctgtctacagccatggtctggagatggttctgatctctccacactccaggaagagacccccaaaacaaccagttccaccaccctctcaccccaatttcctcaccacacttcatagggagaagagcgctgcttgtggcagggtggcgtgtggctgtcattaaagtgcgttcctttaatgagcgctcagggctcccaggggcctgctgctatgccatggggtggggctgccagcagggcagggggttgatcccatcacatctccccagacacatcctcaggaaaccacctcaaaaccacctaagaacaaaggaagttatcacactggggacagggacacgggtcagagttcagctacgctggaatggaattg

SEQ ID NO: 53179 - DNA, 649 bp, Homo Sapiens
taaaaacgtaattttaccaatctttcataatgatttgctttttctggtttttgtataggaaatgtcataaaaatagtcctattcagccttccaaaagttacaaaatttttgtttttaacatttagatgtttagtccaactgaaatttgttttcttttatggcatgattttggaatcttgttttaattatttttacatatttatagctgttcctccaagtatcaatttttcaagtgcaacatctgtcatgcagttactatgtaagggccagattctgacctttctgttctttttatctgaaggaaatttgaacatgccacccccaaatatgccgatttggcatactgattatttcgagctaaaggtgcttgactaacagtagttgcagaaatggctattttaactgtcctttcctacctgtagcaagccatacaaacttctttgataaagatgctttcctgataccaagatgagaagatggctctaatcagctgagacagcaccagaggaatctacaaacaagaaactattaggttcttaacatatatttaccttccacagtttctgcctctggaagcctaaaactgctttccttcgtcttgtcacacttctctgaaatgtattctttgtggaagatgctatatagtcca

SEQ ID NO: 53180 - DNA, 567 bp, Homo Sapiens
ccatttcacgttcagctggattaagtggagtaaatgggctggcagattactgtgcatgtaaatttgcagcctttgggtttgctgaatctgtatttgtagaaacatttgtccaaaaacaaaaggggatcaaaaccacgattgtgtgccccttttttataaaaactggaatgtttgaaggttgtactacaggctgtccttctctgttgccaattctggaaccaagatatgcagttgaaaaaatagtagaagctattctacaaaaaaaaatgtacttgtatatgccaaagttgttatacttcatgatgtttcttaaaagctttttgcccctcaagacaggactgcttatagctgactatttgggcatccttcatgcaatggatggctttgttgaccaaaagaagaagctctaaagaccaactctatggctaaggtcatctgatacacagtgttacataatgcgtacttcaatgaagaaaagtatttttgtctgacagtggaatatatctggagaccacaagtaccactcctattctgctatctggactagaattttcactcactgtgttc

SEQ ID NO: 53181 - DNA, 580 bp, Homo Sapiens
ggggcaatttgacagtttatgtagactatagcattaattgttcccaaatgttcagtgcatcctggctaatgtgttattgaaggtgttttcacgtaagcagttagaggaagcacttcacccctattactaagttattaaaatgcctcctaaaggtagcattttaaattagtatacataattgattagtaatttgtcttctcccaagcataaaacagcatagcagagttaagtgtgaccagtgaagtataagatattagggattgatggtgacaatgatcatagcaactaaatggattttttttttcttttagattcagccgttggtctttgaaatttcctgtgatgtgtttcaatctagatgcaaagaacatggaaaaatcaaagtgctcgagtggtttaaatatgttttgggtattcctgtttatagactataatacttttccaattaaaatcctcagttgtcacgcagaagaaggttaagctgtatttgattgccagttttactgaaaatgcttagtattttacagtatcaccaaatatattttgtttagccaaggtataggaaaaataaaataaattg

SEQ ID NO: 53182 - DNA, 592 bp, Homo Sapiens
ttcagtatctctgatattgacaatatctctgatatgacaatatcatcttccagagatttctactctgcataccaacattgtttctttgtgtcttaccaaatgcaacttgttactagaatatgacttactaaaaatgcatttccacactgcaaacattttttagggctatcttctgccctttggaagcagtcttggcagcaacctctttagtaatcaatataaggcacacttcatgtgtttgtgtagcctggaatctattctaccttcacaggttagaacatcttgatttcctcttaacgaaacattccctaacggtgtatgtagccatgagggaaccaccattcaagatgccctgctcaggacttggcatgagcactatggtcagctgaggctcagaactgtacattgttaatgggtttttcaagttcagaaaagcaacatgagcttttgttctgtggtagcatgttgatgtaataagtagctatttcaatagaggttcccagaacagcttttgttactgtcattttcttaactttgttcacttgtcttttattttgagctattgggtgtgcttttaatacattccttgttt

SEQ ID NO: 53183 - DNA, 596 bp, Homo Sapiens
  misc_feature (592)..(592): n is a, c, g, or t
aaaaaataatttgtaccattccttgcccaccctgccgaacttattgaaagagcatcgctttcctcacttttctcctctaacagaaaagcacttagatgaagctacagggagccagaattcttttgacttggtgggtaccggaggattggaagaatctagattgagtattccttggcctttggggagcttgctctatgcaaagtcacccaggaaatgatactccccccactgtgaaacactagctagagatgatagacaaaaagcacatttgttgtaatctccctttgacgggattcaggttgggatagatgtcgaagcagctgcttctaggtagtcaacgaagatgtcaactagtaaatgacaacagacaaggatgagcacagcagagctgtaagattctagatatcaaaaagagcaagcagtctgttgtactcaccatcgcatcctcagcagctgcccagtgcccggttttaacttagtgctcagtgtatgtgtcaggtttgaatcccaattctgatactacctgtgctactctcttcacctctctgagtctgtaaaggattatttaagaattaaatgaaacaacatacanaaaa

SEQ ID NO: 53184 - DNA, 536 bp, Homo Sapiens
ggcaggtgcagagcgggcactgagctctgcaggtgaaagggctcggcagttggatgctctcctggaggctctgaaattgaaacgggcaggaaatagtctggcagcctctacagcagaagaaacggcaggcagtgcccagggtcgtgcccaggaggctgagcagctgctacgcggtcctctgggtgatcagtaccagacggtgaaggccctagctgagcgcaaggcccaaggtgtgctggctgcacaggcaagggcagaacaactgcgggatgaggctcgggacctgttgcaagccgctcaggacaagctgcagcggctacaggaattggaaggcacctatgaggaaaatgagcgggcactggagagtaaggcagcccagttggacgggttggaggccaggatgcgcagcgtgcttcaagccatcaacttgcaggtgcagatctacaacacctgccagtgacccctgcccaaggcctaccccagttcctagcactgccccacatgcatgtctgcctatgcactgaagagctcttggc

SEQ ID NO: 53185 - DNA, 839 bp, Homo Sapiens
  misc_feature (720)..(720): n is a, c, g, or t
  misc_feature (836)..(836): n is a, c, g, or t
tcatccagactatcgacaacattgtcttcttcccagccacaagtaagaaagaagatgcagaaaacttagctgcagcacagagagatgcggtggactttgatgttcgcgttgatactcaagaccaaggaatgtaccgctttttaacatcacaacaactttttaagctactggactgcttattagagtcacatagatttgcaaaagcgtttaattccaacaacgaacagaggactgccctgtggaaagcaggattcaaaggcaaatccaagcccaaccttctgaagcaggagaccagcagcctggcctgtgggctgcgcattctcttccggatgtacatggatgagagccgcgttagtgcctgggaggaggtccagcagaggcttttgaatgtctgcagtgaagcactaagttacttcctcactctaacatcagaaagtcatcgagaagcctggactaacttactgcttttgtttctaactaaagttctaaagataagtgataataggtttaaagctcatgcatcattctactaccctctcttatgtgaaattatgcaatttgacttgattcctgaacttcgtgctgttcttagaagattttttctgcgaatcggagtagtttttcagatatcacaaccacctgaacaggaacttggaaataacaagcaatgatgggaacttaatatttttgttggcatttacatccctctgctcttaaaangacgctggagctgaagttccctactgaaaatgattctctggatgcatgtctgagtactgtaagatgctagagtctactcaactgcacactcatcctttatgtgtgattgtggtaantgc

SEQ ID NO: 53186 - DNA, 603 bp, Homo Sapiens
cagcggtacttggaccctgctcagcagcgacaacttcgagggctacatgctggccctaggtattgactttgccactcgtaaaatagccaagttgctgaagccacagaaagtgattgagcagaatggggattcttttaccatccacacgaacagcagcctaaggaactactttgtgaaatttaaagttggagaagaatttgatgaagataacagaggcctggacaacagaaaatgcaagagtttggttatctgggacaatgacaggctcacctgtatccagaagggagaaaagaagaacagaggctggacccattggatcgaaggagacaaactccacctggaaatgttctgtgaaggtcaagtgtgcaaacagacattccagagagcctgatccacatccagcagcagagcccacttgtggctgcagctttatgccaaattatattgcagactgaacagacgtttatctatcccatttggcgacgaggactcgtggctggagagagccacacagcgtgtaacctgaagtcatctagattatggggaaactgctcagcttcaataaacctgtccaaatgaaaaaaaaaaaaaaagggcggccgc

SEQ ID NO: 53187 - DNA, 447 bp, Homo Sapiens
gactgcatctgtgcctctgtatgacaggaggaggtgagacaggtctccttataccctctccctttaggagtttacatgcagcaactgacgcacattcatgtaaaaacagacattatctgactggaaaaacagactccttgtggcaacaagataccaaattacaaacaagacctaaggccacgcaaggcaaaggtaaagttacgccttagtattcataaaatctcgagaaacaggtctgtttttgggctgggatggaatgaagtggcagataacagacccccttccttcagcattccttcctacctacccaaactttagacaaagattcaacactctcaaccagctgccacctacagaatccctcaactacctgtgccttctaaccccccttccgcaggtcccacccttttctgcaatggaacttacacctttcaggcactgattcat

SEQ ID NO: 53188 - DNA, 468 bp, Homo Sapiens
accctgtgcctaggagagccagctacgtgtctacctgagtctgacctgggccaggggctgttatcttgggaaagccagaatgtcattaagaaagggacaaataggcagttgcttgtgtagcaaggcagccaccaggttgctcaaagggggttctgcataaaccaacatattttgttgttgcttccagggcagcagaagaagcctttgtaaatgacattgacgagtcgtccccaggcactgagtgggaacgggtggcccggctgtgtgactttaaccccaagtctagcaagcaggccaaagatgtctcccgcatgcgctcagtcctcatctccctcaagcaggccccgctggtgcactgaagagccaccctgtggaaacactacatctgcaatatcttaatcctactcagtgaagctcttcacaagtcattggattaattatgttgagttcttttggaccaaacctttt

SEQ ID NO: 53189 - DNA, 673 bp, Homo Sapiens
agccctgcccccacctgccctcccgggcagtactggggaccttccctgggggacggggagggaggaggcagcgactccttgagacagaggcctgggccctcagtggactgcctgctcccacagcctgggctgacgtcagaggccgaggccaggaactgagtgaggcccctggtcctgggtctcaggatgggtcctgggggcctcgtgttcatcaagacacccctctgcccagctcaccacatcttcatcaccagcaaacgccaggacttggctcccccatcctcagaactcacaagccattgctcaacctcccccctgcctcggttggtgacagagggggtgggacaggggcggggggttccccctgtacataccctgccataccaaccccaggtattaattctcgctggttttgtttttattttaattgtttttgtgttagattatttttaataagaattttcattttaagcacatttatactgaaggaatttgtgctgtgtattggggggagctggatccagagctggagggggtgggtccgggggagggagtggctcggaaggggcccccactctcctttcatgtccctgtgcccccagttctcctcctcagcttttctcctcagtttctcttaaactgtgagtactacttccagctggcttcctcctca

SEQ ID NO: 53190 - DNA, 627 bp, Homo Sapiens
aaacacgcaatctgccatcgaacagaaataagaatccttctaagggactcatatgaacgagcaaaacatatcttgaaaactcatgcaaaggagcataagaatctcgcagaagctttattgacctatgagactttggatgccaaagagattcaaattgttcttgaggggaaaaagttggaagtgagatgataactctcttgatatggatgcttgctggttttattgcaagaatataagtagcattgcagtagtctacttttacaacgctttcccctcattcttgatgtggtgtaattgaagggtgtgaaatgctttgtcaatcatttgtcacatttatccagtttgggttattctcattatgacacctattgcaaattagcatcccatggcaaatatattttgaaaaaataaagaactatcaggattgaaaacagctcttttgaggaatgtcaattagttattaagttgaaagtaattaatgattttaagtctggttactctactagatttgataaaaattgtgcctttagccttctatatacatcagtggaaacttaagatgcggtgtttgagattgcggtgtttgggattgcggtgtttgagattgcggtggttggggtaccgagc

SEQ ID NO: 53191 - DNA, 712 bp, Homo Sapiens
tttttttttttttttttttttagttgggtgatgaggaatagtgtaaggagtatgggggtaattatggtggaagcccctctggctgtgtggctatggactcacgcagagcactgtcggcatcatcgggctggggcgcataggccaggccattgctcggcgtctgaaaccattcggtgtccagagatttctgtacacagggcgccagcccaggcctgaggaagcagcggaattccaggcagagtttgtgtctacccctgagctggctgcccaatctgatttcatcgtcgtggcctgctccttaacacctgcaaccgagggactctgcaacaaggacttcttccagaagatgaaggaaacagctgtgttcatcaacatcagcaggggcgacgtcgtaaaccaggacgacctgtaccaggccttggccagtggtaagattgcagctgctggactggatgtgacgagcccagaaccactgcctacaaaccaccctctcctgaccctgaagaactgtgtgattctgccccacattggcagtgccacccacagaacccgcaacaccatgtccttgttggcagctaacaacttgctggctggcctgagaggggagccgatgcctagtgaactcaagctgtagccaaacagtagagatggagggccgggaagcaaaccgtgccctggtattgtcagacacacccaggcttgatttggatcc

SEQ ID NO: 53192 - DNA, 792 bp, Homo Sapiens
  misc_feature (758)..(758): n is a, c, g, or t
  misc_feature (768)..(768): n is a, c, g, or t
  misc_feature (785)..(785): n is a, c, g, or t
  misc_feature (788)..(788): n is a, c, g, or t
gcctttttctatttcattgtaccttgatgggctgtcagttctgaagagaaaaaatacactaggaatccattcttcctccaccattctccctggcagagggaagtgactacacccctatggtgtggacatactgacgctcctccatgaagcagcaaagttctgttgtttcaggagactgtgggccttgaggatgtggtagtgacctcaccagaggagttggcaattcctaagtgctgcctggaggcctctacagagacataatgttggagaacttctgccacatggcagtgctgggtaagacccctctgtccccaccagtgcccttgaggttatgggtgttggtaggtctgtggcctccatttccatgacgatggtgttaaggactgcatgtttgtgtccccccccaaagtttatatgttgaaaccctgacccccaggagggtggtattaggaggtggggcctttgggaggtgactaggcttaggtgagatcgtgagggtggggctcgccgatgagatcgagtccttataagaaaaggaaggaactagagcgaggtcactttgtgctgtgtgagcatacaagaaaactgccatcttcaagctgggtgcagtggctcacgcctgtaatcccagcactggaaggccaaggcattaggattgcatgagtccaggaagttcgagaccagcctaggcatgataagaccttattgctaaaaaaaaaaaaaaggaaataaaatagaaaaattgccatctgcaaatngagaaagccnttcagcccgacacccanaantgcc

SEQ ID NO: 53193 - DNA, 490 bp, Homo Sapiens
ttttttttcctttttttttgacccatttacatttataggagaaacagtggaccagggagcgacacactctgctttccaactgcctgactgcttgttcgtctcactggtgtgagctccagcatcccctttgctcgaaatggaccccaactgctcttgcgccactggtggctcctgcacgtgcgccggctcctgcaagtgcaaagagtgcaaatgcacctcctgcaagaagagctgctgttcctgctgccccgtgggctgtgccaagtgtgcccagggctgcgtctgcaaaggggcatcggagaagtgcagctgctgtgcctgatgtgggaacagctcttctcccagatgtaaatagaacaacctgcacaacctggatttttttaaaaatacaacactgagccatttgctgcatttctttttatactaaatatgtgactgacaataaaaacaattttgactttaaaaaaaaaaaaaaaaaaatggtggagcg

SEQ ID NO: 53194 - DNA, 497 bp, Homo Sapiens
gaacaaaattactaactaaatccaagagatgttcttagactaagtgattctttgcgcactgtctcacctcaggaatgagccatgcagctgccttaaggcagcggctgtgttggaagcatgttatgacgctgcaccgagagcccagcccgttaccatgaggtcctcgtggtacttcactaattaactctctttggatcagatccagaaaaagaccagccctaaacttaatttcactagtaggaaaggttgttgtaaagaagttccattgtagtttgattttcttaacggggcctttgaaattaaactcttctgtagtcatgattttccaggtaaaagtaagagtgttagttcagctatgcttgaggaaccttagaaacaaaaattaaaccccaggctttttacttacctttttcatatgtcttttcttaaagtgtgtgtatgtttgtgtgtgggggtgtttaatggatgtaatataaattaatgaacaaagaaattgt

SEQ ID NO: 53195 - DNA, 1091 bp, Homo Sapiens
  misc_feature (682)..(682): n is a, c, g, or t
ggccacttctacaaaaggacaagagcaaagtgcccagaagactaaagacatggcttccctcccctcagaatccaatgagccaaagaggaaacttccagttggtgcttgcgtgtcttctgtgtgtgtgaattatgaatcttttgaagttggcgccggacaggtttctgttgcttacaactcattagattttgaaccagagatattctttgccttggggtctccaattgctatgtttctcactattcgaggagttgataggatagatgagaattacagccttcctacctgtaaagggttcttcaatatttatcatccgcttgatccagtggcatatagattagaacctatgattgttccagatttggacctaaaagctgttctcattccacatcacaaaggcagaaaaagacttcatttagaattgaaagagagtctctctcgtatgggatctgatttgaagcagggttttattagctctctcaaaagtgcttggcagacattaaatgagttgcccgtgctcatacgtcttcaacccagttgcaagaagaatcggagaaggtggccaatcagatcaaagaagaagaagaaaagcaagtagttgaagcagaacaggttgttgaaagtccagattttccacggatgaggactacttaggaaaggttggaatgttaatggagggccncgaatggacttacgttctccaaaaaaacaatagagagtttcatgaatacctttcgctcctcaaagtcctatgctattgcgaatctcgaaatactggctgtgtccactttaggacattttcgcgcccggacatttgttacgaaaaggcccccgggttgggtgatcacaatttcagttaaacgggagatcttggttggcgagaaaaagtcccggatgagaattcatcgcggggagaaaccccaagagagtccccacatccgggtggagcgacagacgagtgttgtataactgtgatgcagaactggattgtgtagtctacaacgataataatacgaaaaacgctggtgtgcgtggtcgtataatcaggcgcacgtccgtcttatttgtttatgtcatggacaagtatcacc

SEQ ID NO: 53196 - DNA, 625 bp, Homo Sapiens
tgccaaactgaaggctactgcaggtcactgagttgcctgccatccaaaggggatgggcgggattggaagaagctgtggcagctcttttccctgttcacctcccgcctgccagggaaggcaggacccgctctgccaagggccctctgcgtattcccttctctctgaggaattgaaatttttgtctctggtgcacgtaaggcagaatgttccctgacaccagtgtgtggatttttaacatcaccgtgagtctgaaaggaccacaggtttttctgcagctattttctagcatttgccagtccctgtgcctggactgattggaacactttgtttttctccctgtgccatttacccttccacctttccatcctgccttctaccacccttggatgaatggattttgtaattctagctgttgtattttgtgaatttgttaattttgttgtttttctgtgaaacacatacattggatatgggaggtaaaggagtgtcccagttgctcctggtcactccctttatagccattactgtcttgtttcttgtaactcaggttaggttttggtctctcttgctccactgcaaaaaaaaaaaaaaaaaaaaaaaaagcctgaagagatgagataggagg

SEQ ID NO: 53197 - DNA, 393 bp, Homo Sapiens
gcaaatctccatttgatttcaactctcagtcttgctcctcagggcaactgctgttactcatttcttgtgtcttcttccagaaatcttctctgcatacaaacactaatgagagagctgtccacattgctttttgatttgctttttgagtatcttggggattatgtttttatcataatattccattttgggatgcaccatagtttgttcagacccatatggatgaccatttagtttatttatagtcttttgctaataaggacattgctgtaatgaaaaatccctatgtatctttatgaatatgtatgtatgtatttttatgtacatatgtgatctgtaggataaatgttttaaagtacattgcaaagtcaaaaaaaaaaaaaaaaaaaaacgcgg

SEQ ID NO: 53198 - DNA, 564 bp, Homo Sapiens
gcatgcctgcagggaaacagaagctacagtatgagggtatcttcatcaaagattccaactcactggcttactacaacatggccaatggcgcagtcatccacctggccctcaaggagagaggcgggaggaagaagtagacaagaggaacctgctgtcaagtccctgccattttgcctctcctgtctcccaccccctgccccagacccaggagcccccctgaggctttgcttgcctgcatatttgtttcgctcttactcagtttgggaattcaaattgtcctgcagaggttcattcccctgaccctttccccacattggtaagagtagctgggttttctaagccactctctggaatctctttgtgttagggtctcgatttgaggacattcatttcttcagcagcccattagcaactgagagcccagggatgtcctacaggatagtttcatagtgacaggtggcacttggctaatagaatatggctgatattgtcattaatcattttgtaccttgacatgggttgtctaataaaactcggacccttcttgtgaaatcagttaaaaaa

SEQ ID NO: 53199 - DNA, 580 bp, Homo Sapiens
cacgaggcgagtagagaggccgcccgcccaccgtgggcagtgccacccgcagatgacacgcgctctccaccacccaacccaaaccatgagaatttgcaacaggggaggaaaaaagaaccaaaacttccaaggccctgctttttttcttaaaagtactttaaaaaggaaatttgtttgtattttttatttacattttatatttttgtacatattgttagggtcagccatttttaatgatctcggatgaccaaaccagccttcggagcgttctctgtcctacttctgactttacttgtggtgtgaccatgttcattataatctcaaaggagaaaaaaaccttgtaaaaaaagcaaaaatgacaacagaaaaacaatcttattccgagcattccagtaacttttttgtgtatgtacttagctgtactataagtagttggtttgtatgagatggttaaaaaggccaaagataaaaggtttctttttttttccttttttgtctatgaagttgctgtttattttttttggcctgtttgatgtatgtgtgaaacaatgttgtccaacaataaacaggaattttattt

SEQ ID NO: 53200 - DNA, 884 bp, Homo Sapiens
  misc_feature (868)..(868): n is a, c, g, or t
gcgaattcggcacgaggctggaactttgacgccctcttccagccccagcagcacccagcccgtgaccagcacgacaccttcttccttcgagatccagcggaggccctgcagctcccaatggactatgtccagcgggtcaagcggacccactctcagggcggctacggctcacaggggtacaagtataactggaagctggacgaggcccggaaaaacctactgcgaacccacaccacatcagccagcgcccgtgcgctctaccgccttgcccagaagaagcccttcactccggtcaagtacttctccatcgaccgcgtattccggaatgagaccctggacgccacgcacctggctgagttccaccagatcgagggcgtggtggcggatcatggtctcaccttgggccacctcatgggcgttctgcgggagttcttcaccaagctgggtatcacgcaactccgcttcaagccagcctacaacccatacacagagcccagcatggaggtgttcagctaccaccaaggcctgaagaagtgggtggaggtcggaaactcgggggtcttccgtccagagatgctgctgcccatggggcttcccgagaacgtgtcggtcattgcctggggcctctccctggagcgcccaacgatgatcaaatatggcatcaacaatatccgggagctggtgggccacaaggtgaacctgcagatggtgtatgacagtcccctgtgccgcctggatgccgagccgaggccccctcccaccacaggagctgcgtgacatgggccactctaggacaggtcatcctccccgagtccctgctgctgcgctcctttgcatccctggccagtgacctttgtatttatgaggncctctgtgaggccagc

SEQ ID NO: 53201 - DNA, 618 bp, Homo Sapiens
taaagtattcaccatactatatatttattagaccatctttcctctttgtttattcaagactatgtacttataaaagagaacctataagaatgtgtagagtgaccaaatagggacaaagtgacatacctagagtttgctgctcaaatttttccactagcgtaaccctaaagcagaggggcatgatgaagggggaaggggttctgagagcaaaatcagaatcagcctaccactgacatgaagtgtgttctgtctttaaaatgtaagtgaattttgcattctctataataaaacttttaatataaaaatgatatgtttaatctttactgaaacttatgccaccacaaaggagcaccatgttcatcacgtggctgctcagttttctcccccagtgccctcacccccagtggaggcaagtccttgagctacacacactggctgtagtgcaagatatataaacataggccgggctcggtggctcatgcctgtaatcctagcactttgggaggccgaagcaggtggatcatctgaggtcgggagattgagactagcctgaccgacatggagaaaccctgtgtccactaaaaatacaaaattagccgggtgtggtggcacatgcct

SEQ ID NO: 53202 - DNA, 558 bp, Homo Sapiens
ataaaatgattaataaaacaattggtaattctgaataaggatctgaataaatccagatcacagactgttcctttaccaatatgtaaaagaatgtgcaaaattagtaaaaatatacccaaaaatttaccagcaacagagaagcaaagaatggagttcaaccttacactataaacatctaatagatatgtatgaaaatttaaaaactagaaaaggttgggcatggtggctcatgcttgtgatcccaggactttaggaggccaaggtgggaaggattgtttgagcccaggagttcaagaccagcttgagcaatatagtgagaccctgtctctacaaaaacaaacaaacaaacaaacaaataaataaataaataaaattagctgggaatggtgatgcacacctggagtcctagctactcagaaggctgaggcaggacgatcacttgacctcagaagtctgaggttacagtgagctatgatcataccagtgcactccagtctgggtgacagaacaagaccctgtctccaaaaattaaataaataaaacaaaaaaaaaaaaaaa

SEQ ID NO: 53203 - DNA, 1032 bp, Homo Sapiens
  misc_feature (15)..(15): n is a, c, g, or t
  misc_feature (790)..(790): n is a, c, g, or t
  misc_feature (832)..(832): n is a, c, g, or t
  misc_feature (838)..(850): n is a, c, g, or t
  misc_feature (852)..(852): n is a, c, g, or t
  misc_feature (854)..(854): n is a, c, g, or t
  misc_feature (856)..(856): n is a, c, g, or t
  misc_feature (867)..(868): n is a, c, g, or t
  misc_feature (878)..(878): n is a, c, g, or t
  misc_feature (910)..(910): n is a, c, g, or t
  misc_feature (916)..(916): n is a, c, g, or t
  misc_feature (918)..(918): n is a, c, g, or t
  misc_feature (922)..(922): n is a, c, g, or t
  misc_feature (931)..(932): n is a, c, g, or t
  misc_feature (935)..(938): n is a, c, g, or t
  misc_feature (953)..(953): n is a, c, g, or t
  misc_feature (968)..(968): n is a, c, g, or t
  misc_feature (974)..(974): n is a, c, g, or t
  misc_feature (1014)..(1015): n is a, c, g, or t
  misc_feature (1032)..(1032): n is a, c, g, or t
ggtccggaattcccngggaattttccatatactcagtttacatccgaacagtctgaacgtctacacaacattgattcccgaagttgggaaatagaccagagtaccttacctttcattccccatctggcctttaccttctttgcttcagtggctgaaaacagttgccatattcaaagtataatagatttcaacctcacacaaatgacaagtcccattttacaatcctaggaaggcccaccaatttcatttcacgcgccatggcggctgcagttggaggccgagggcagccctctgctcactgaatgtcttgcatgtgctgactgctgcccgcagtgctgaacatgccccaccgcccaggcccagcactgcttgttgggtcagcatctagtgctgctgtcacatctttgtctgcacagccagtaggattgcctcagccagggggtttatcagaaggtgtgcaaggcctttgggggaactgagcccctatagtgggcagtctcctttaccttcccacctccctgaaaagcacagaagacagtgccttggtttgtgttttgaagcaaacaagtcagctttctggctttgccccaaaactgtgatggaacataataaaactggagatatggtttttaacactgcaaaaaggaaaaagcatcaagtttctacttctggctggaaagcaaaaccaatctcagctgacaaggctgggcaaactaagttttcctgagcccattttcctttgagccctgacctagcctggccttacctcattaaggtttggttaaagcantggaaaggaagaagaggcagggtgggatggggggggtttggngaaggnnnnnnnnnnnnntntngngttgggggggnngggggggggngggggttgggggggttttttttgtggtggggnggtggngntggntgttgtgtnnggnnnnttgggggtggggggngttggggttgggggngggggnggggtgggtgggtgggtggtggggtgggggtgtgggggtnnggggtgttgtgttgttn

SEQ ID NO: 53204 - DNA, 518 bp, Homo Sapiens
gaaaccctgggtattctctacgcccggcaaaagattgttgtcatagcgaaagcctttggtctccaagccgtagatctggtgtacattgactttcgagatggagctgggctgcttagacagtcacgagaaggagccgccatgggcttcactggtaagcaggtgattcaccctaaccaaattgccgtggtccaggagcagttttctccttcccctgaaaaaattaagtgggctgaagaactgattgctgcctttaaagaacatcaacaattaggaaagggggcctttactttccaagggagtatgatcgacatgccattactgaagcaggcccagaacactgttacgcttgccacctccatcaaggaaaaatgatctgttaaatgaagctgtcatcaggctaaagggtattgaagctgcagagggatcaacttgtgcttgccagaggacgccaatgaagtttgaaacaccaacaatcagagattttgtttctgttcctcattaaatcatgagcttttgtg

SEQ ID NO: 53205 - DNA, 442 bp, Homo Sapiens
ttgcggcttgtgccaccctaccagcacgaggagatcatcggcaaggtctgtgagctcatcaacgaggtgaaggagtcctgggccgaggaggccgacttcgagcccgctgccaagaagccccgctctgctgccgtcgagaaccccgcagctcaggaagatgatcggctaggcaaaaatgaagtgtacgattacctgcaggagcccctcttccaggctacccctgatctcttccagtactggtcgtgcgttacccaaaagcacacaaaactcgccaagctcgccttctggctcctggcggttccggccgtgggcgccagaagcgggtgtgtaaatatgtgtgaacaagcgcttctaatcaaacggaggcggctgctcagtccagaagatatgaataaactcatgtttctgaaatccaacatgctttaagacttgacttcggggg

SEQ ID NO: 53206 - DNA, 554 bp, Homo Sapiens
  misc_feature (172)..(172): n is a, c, g, or t
agcgggattgtctcaatgtccagaagaaaaaaaaaatttagaagagacccaaatcagaaaacaaaagttgggctgaattcaatgcgaattattttctagctcaatattaatactgcttatgtcagctgaatttcagcctttcaataacagctagtcaagtatttttttagcnttgtgggctctcctattgatcgtcatcttattttagtggaatccattatattgaagatgtcaagttcctcatttcccatacaaagaatgtgagattcatctttcttgaatctttgctaagtgttgaaggggacttttggcatcttttcaggaggactataattgggccctctaactaaaaagtctcctatgccccttagatagatgagatttttttttttgaccttgtacccaccaacattggtgggaggctcagaagggactgtgtttgtaactttgtagcactttctaaacagtgacctgttgtatgggcattataggacagtccgtggggtggggcgggggatgggggagatggacaaatgaggtctggtttaaagata

SEQ ID NO: 53207 - DNA, 566 bp, Homo Sapiens
taggattggtgtatgtaggtttaaaattatagtgatgactagtcgaacttaatatacaatcagttcttgcaaatactttacacttagctgccattacacaacaaattggaattttccagctgttcaactatcatggactctgtacaggatagatgtgtataatggaaaatatgtactgcttctttctttgattgccactcaagatggaaacaccatgccaaggcattttggttatacacagatcattctaaacctgttattttggagaggtgtattggtttctttctcatttataaggctattgtatttttttttgtatgtgattcaggtgtatttatttgaagactatttgtagttataggaaaaccacacctacctgtattgccaaattctttgtaaactctccgtggcacttgtgctttcctggctgagagctctcccctgttgatacagctatggcaccattgtaattacagatgcacctttcaggagcatctccattaaatggttcatagatgatttaataaaaagaaacttctcagttgatccagaaaaaaaaaaaaaaa

SEQ ID NO: 53208 - DNA, 1002 bp, Homo Sapiens
gtaccggtccggaattcccgggatgccatgcctggccgtctgctgcggggcctgtggcagcgatggcgccgttacaagtaccgcttcgttccctggatcgcactgaacctaagccacaacccgaggtacagtatatcagaagtatgagccgatccttttccagtccattggaaatccgtttatttttagatgcctggatggggtactcattgatgggaatgacaaagggatatcaaaagttgtgtacagatcttgcaatgggagggatcgactcggccctttagaaatgagtgatagtacatggctaacgtcagaaattcataaccctctggctgtgggacagtatgtcaacaattgttccaatgacagagcagctaatgtctgttatcaggaatttgatgtgcctgcagttttccctatagaactgaagcagtatcttccaaacattgcctacagctatgacaaacaaagcccacttcgatgtgttgttcttgtcgcacttagggacatcaatcaaggagaagagcttttttcaaactactacacaattgtcagctaactctgtgaatcagaaattattaggttttctactcagctattaattctaagtgttttttgttaatcacttctctgagttctacctgtaaaacaaatattttgagacttaattggaataggaatttcttatgtttttgttgatattatatttatgttccaatttcatgataaaagctacttgcttcattacaatttcaaatttgtaatgcaattccaagtttaattggttttcacctaaatacacaatagcttattaaattaaaacctactctttgaacttataatttcaatttttcttttgtttattttgtaagctctgtggtggtttataaaattgtagccaggcatcagcagttcttgtagtactgctgakgtgtacaaacttctgkaaaactttatttttacagaattgagtaaaaatacctmttgtgttgcmtgaaaaaa

SEQ ID NO: 53209 - DNA, 619 bp, Homo Sapiens
  misc_feature (2)..(2): n is a, c, g, or t
  misc_feature (11)..(11): n is a, c, g, or t
gnattttggtntctgcagagggtcctggaacccaccccctacagatatcaagggaccactatacacattaggatgatctatattgaaatctacatggaacagagtgggacttctaattgtatgacttcaagattttgctttgtttaaattaataactgttttcagaattaagtgcttaaaaacaaatttgattgaaaagttcaagacaagaattttgctctctatggctgttccatataaatttgatggttgattctgaatgtaaatgactgaagaattaaaaaataagaaattcctttttaaaaggcatgcctcttgcactgtgaacaagacagtagtcccttaaaccatgaatatgtcagtgttctatggattacgaaattagtaatgttgcttagcccaaacgtgttttttaaaaagtatagttttgtacatctctaagttatcaaacttcaaaattgagaacaaatttaaaagtccatatatgcaactctagtaagcacttaataggttacatagcactggttaagaacaattaattttgtttctatattattactaattattattacaaatcaaaaaacactgtgataagaacttcaaagcatatatacaaata

SEQ ID NO: 53210 - DNA, 888 bp, Homo Sapiens
gtttttataagtatttctgagttattgagggtgcttaaaaatgctgaagaaactttaaaacatgattcttcttataattttatgtgattcttatagcacaatcatttttgaaaaaggaaaactaggctgggtgtagtggctcatgcctataatcccagcactttgggaggccaaagtgggtggatcacctgagttcaggagttcgagaccagtctggccaacatggtgaaacctcgtctctactaaaaataccaaaattatccggtgtggtgacaggctgcttgtaatcccagctactcgggaggctgaggcacgggaatctcttgaacctgggaggcagagattgcaataagccaagatcatgccactgcatgccagcctgggtgacagcacaagactgtctcaaaaaaaaacaaaaaaaggaaaaagaaaactagccccagtccctgtctaaattgttatagtttttgactattatctgaattagtcttatccaaatttcatatgcagattgatttttcatttgtatgtatattacatgatataactattttcatagaatatatttctaatttacaaacactgaattatagctgatagagttcttccaaacttataaaactttggaatgtcttatgttgagctttaaaaattataacaactcttaaccaagttgcggctcataatagccttcacctataatatgtggctttgtgcccgaccgtataccccagaccgtccccggtcatggtgggtttttaactctctccaacgaaaacggcgtcaaaacataacggggcggctatgagcagtgggtacgcccgctaccgctcgctagcgaggctcaacagacggcgaggccgttccccaaccgcatctgcggacatg

SEQ ID NO: 53211 - DNA, 741 bp, Homo Sapiens
ggattgttttggggccctagaacatttcagaagctttccagtatctatgcagtaacagtccaaacccctcaacataacacatttacacctgcaagtatggccccaaatcttcaagtggcttctgtcactactccatagtacataccctttgttacagctgtttcacaaatacaggttgaatatcccttatctaaaatgtttgggactaaaagtttcagatttcagatatgtttggattttggaatatttgtacatgtataatgagatactcttagagttgggacccaagtctaaacaaaattcatttatgtttcatatataccttatacacataacctgaaggtaatttatttttcccttgggaacactgaatagactatatgttgtgcacctacattttgactgtgacctatcacatgaagtcaggtgtggaattttccatttgtggcatcatgtcagtactcaaaaagttttggattttggattttgaattttcagattagagatgctcagcctaatagcaaatgttcccatgttatacacctcaacctcccattcccattggctggaacatctctgcttatattaaatgtcttttatgtgaaatctgtgttctcatagccttttgtatagttctctaccatctcatggctcacattgtattggacttatttgattaaatatctggatcatctactgtgaattattcaagagcattgatctttatacctctggcaccta

SEQ ID NO: 53212 - DNA, 694 bp, Homo Sapiens
ttgctgttagttttaaactggtgcatgaaggtgagttctctccctggccctcaagagatttggaagtttgttttagagagtgctctcagtcacttaaggatgtaaatcttacttacttatttatttattattttttgagacacagtctctcactctgtcatccagggaattagcagcattcccgctgagactggatttgaaacaaagttacagttccttagagccactacagatttctttcctcaatggatacctttagcttaggataaccactaataggaattaatttgaatttacttgaaattatttatgactcttgaccatttgggatacccatttgtcatcttttctactaaaggaaactaaaatattgctctctcaaatactgggtattgttgagctgaagacagagtgcaggggctctctctacctctcctttgtttgcctaaaggtaggacataaatccttttttactgaagacagctactccgcaacccacagatggtgccagtggggcagaggaatctgtgagcagactttaaaccccaaaagactttttaaaaatgaagtttaattcaagccgaatgaagggcttgatcacatcattgctgggactcagagcccccccttctaactatttaaaaaaaaaaaaaaaattaaggggggccgggcccaattccccttaaggagtttg

SEQ ID NO: 53213 - DNA, 1085 bp, Homo Sapiens
  misc_feature (1085)..(1085): n is a, c, g, or t
gggaagtgcgcagtccggtcagaaaccaaatttgactccggttcaggttggccttcattccacgatgtgatcaattctgaggcaatcacattcacagatgacttttcctacgggatgcacagggtggaaacaagctgctctcagtgtggtgctcaccttgggcacatttttgatgatgggcctcgtccaactgggaaaagatactgcataaattcggctgccttgtcttttacacctgcggatagcagtggcaccgccgagggaggcagtggggtcgccagcccggcccaggcagacaaagcggagctctagagtaatggagagtgatggaaacaaagtgtacttaatgcacagcttattaaaaaaatcaaaatggttatcttaatagatatattttttcaaaaactataagggcagttttgtgctattgatatttttcttctttggcttaaacagaagccctggccatccatgtattttgcaattgactagatcaagaactgtatatagctttagcaaatggagacagcttggtgaaacttcttcacaagccacttatacccttgtggcaattcttttctttgagcacatggcttctttgcagtattttccccttgattcagaagcagagggtcatgggcttcaaacatgaaaatagagatctcctctgcagggtagagaccagagctgggaagtgcagggcatggagaacctgcagacacatggcttgaggccgtggaagaaccactaagataaggggagggggaggtaccaggacggtcacctggcgaaagatgagcaaggcacagaagtccacggaaggagttaagcgggcttaagaactccctagtgtgaaatggggccgaacacagggggcacagtcaggtgggtgcaggaagataaactaccacaaggggacgacaacatatgagttacaagagcgtgtgccgaggagacgcacgacgacaccatgtgcagaggggacaaaaacagcagcaggcggaagcagcccgaagacaaacgggaggtgaacatgttgagagaggcacccctgtctcaatcattcgatcttcgtcgctctgcan

SEQ ID NO: 53214 - DNA, 436 bp, Homo Sapiens
ggatgcgggctgaggccccacctggtggctttcacctgacccagccctgagtcctctccaagcctctctccggcccctcccacctggccactgcctcctccagtgctgcgggaggcgggccagggccccacctggtggctttcacctgacccagccctgagtcctctccaagcctctctccggcccctcccacctggccactgcctggcattgggatcgccccaaaatggacccggcccctcctgttatttgctgggaagtccagcggaggagagggtgcaggtcccccgctgagcctccagtctctgtagactgggctgccggcccttcagccccccttggagcccctcccgccacagccgcaccttctgctcccggcccctccctttgtatttggagacaatgtgttgtaataaagcttaaagtggatgttttc

SEQ ID NO: 53215 - DNA, 541 bp, Homo Sapiens
tgttaccattctgatgttggagcggccgccgttccaccattttttttttttttttttattaatgtggagcaacctggcagaacgtagtgtgtatttaaatcaccagacttctgaaggtgcctttgaggacatggagttctcttccaattctctcccttctgcaaaaagatcgtgagacagcgcagggtcgagtgctgtggagactatgagctgcctttctccctgggatgttagaagaatgagtattggctttaaggatgagaggtccttttgagtaaagaacattctgtgaacacagcaggcagtccacaagggttggggtttgaatgaagggggtggctgaggatcttccaggcacctgtgttttgggattagccgtacttggaagcctggtggaagctgcttttctatttatgagtcaaattctctttcactctgaatgtaattataattgccaagcagctgtatcttaatttagggtcttgaatcggtaacgtttcctaaggctttaattttaattttctttattccttggcctttc

SEQ ID NO: 53216 - DNA, 1034 bp, Homo Sapiens
gcgaatgacaacagagctgctcaaggcgggaactctgagctaagcagtggaggtttctctggatctggagagaagagtgaccttggagccaataatgagccatcctgactacagaatgaacctccggcccctggggacccccagaggtgtgtctgctgtggctggtccacatgacattggtgcttcgccaggtgacaaaaagtcaaagaacaggtccacacgagggaagaaaaagagcatatttgaaacttacatgtccaaggaggatgtttcagaaggcttgaagagaggaacactcatccagggtgtattgagaattaatccaaagaagtttcatgaagccttcattccttccccggatggtgatcgagacatttttattgatggggttgttgctcgtaatagagccttaaatggggatctggtggtcgtgaaactgcttcccgaggagcattggaaggtagttaaaccagagagcaatgacaaagaaacagaagctgcgtatgaatcagatatccccgaggagctctgtggacaccatctcccgcaacagtccctgaaaagctataatgacagtcctgatgtcattgtagaggctcagtttgatggcagcgactcagaagatggacatggcatcacacaaaatgtgctggttgatggtgttaagaaactctcagtttgtgtttctgagaaaggaagagaggatggtgatgcaccggttacaaaagatgagaccacctgcatttcacaagacacaagagctttatcggagaaatccctgcaaagatcagcaaaggtcattgcctacagattttctccacgtgtccaaatggctttcacctgagctacttgttgaagatctcgtgtgattcagtcaggactgtatttggtcatttaatcagaaaagttagagcagagaatcataaaaagtgaattaaaaaaaaaaactttaacatwtaaatcsratcmtctcctgccttkgataagggtcaggctttytttgrtkkgggkatgtgattgrgtctgtgtatytt

SEQ ID NO: 53217 - DNA, 580 bp, Homo Sapiens
atgatgatattgtacagcttctaattcacttttcagatcagtgtttgaaatggcaattatcagtgttggatttagttccaactacttgatttacaaaaatgtacatttagagaaggttaaaagaaacagtgagaaatgtaaacattcaaaatgataattgaatctctcagttgtgggaataattatcagagacatgcaactgaaaatgtctcacctttcatctttttttcttaattcataaagttatcttgtagaatttgatgagaccctcctagtcattctcaactggggcggtgctgtcaccgaatggtgtttgagagtgttggggctagggcacatttttggttgtcacagcaactggggtggcatttgctgcccagtgccaggaatagtaacattatgaatgccagggacagtgtgctcagtaaagtcttccatccaaaaggggcagggcacggtggctcacgcctgtaatcccagcactttgggaggccaaggtgggcggatcacctgatgtcaggggttcgagaccagcctggccaacatggtgaaaccctgttgctactaaaaatacaaaaat

SEQ ID NO: 53218 - DNA, 789 bp, Homo Sapiens
gagaatcccggctcctgctgcaataagaggctgttctggaagctctggggttcgggtctttgtccctgcagctatgcttccagagtgctctgtgcattttcacgatcagcaaacaatgaataaatctctgtctgaatgagagttcctgttgctgcacattctcaatatcagttgttgtcagtgctccagattttggccattctactagaagcaagagcaacggctctatatctggatcactgcagtgcctagaagatacaacagcacaatttacaaatccaaatttccaggaagtctctccacatacctctagtacaaaagatgcttcagagactagagggtcagagaggaaagagaggaaatattcaactctcagttcaggacaaaagggaagaaagcctgctgttgaaagaaatccaagaatgactgtgtctgcaactcgctcctttctgtaaagtattcatggtgctttacttaaaatatttgctcttatgatcgtcaatattaatagttatgctttgtaaaagaatttattctttacttataattaatggatgattctaagttattatatgtttagttgctatagtaagatgatgtgaaagatttgttgcctgttaaatatttctgggatctttgctttatttttcatattattgatctgtgctttccaaagttgagcttgtcacttttattgttttataccaacatgtagaaataacaggctttaagtttggggagaaacaatcaaacagctggagttctcctttacaaacaaacaacagaaaa

SEQ ID NO: 53219 - DNA, 524 bp, Homo Sapiens
gcacgaggtcactgccaacaagatcaaacaccgcattgagctcacagtcgatgggaaccaggtggaagcccaaagcccaaacccagcatctacatcagctgacacaaatgaccctgtgtttgttggaggcttcccagatgacctcaagcagtttggcctaacaaccagtattccgttccgaggttgcatcagatccctgaagctcaccaaaggcacaggcaagccactggaggttaattttgccaaggccctggaactgaggggcgttcaacctgtatcatgcccagccaactaataaaaataagtgtaaccccaggaagagtctgtcaaaacaagtatatcaagtaaaacaaacaaatatattttacctatatatgttaattaaactaatttgtgcatgtacatagaattctttctgtattcagatggtgctaattcagactccagactgaattttaattcaagttctttctcaagtctataaatattaaactgattatttcattctaaaaaaaaaaaaaaaa

SEQ ID NO: 53220 - DNA, 721 bp, Homo Sapiens
tccttcccatgttaagctttaacctctgtaatctgcctgtatctataggtgggcatctcactccaccaaaggagcccagcctctctttgtccctctatccatgcaacagtcttctctgtgcatttccccaagctgggccctcttctactctccatttaggcctgttgataactccattacccgcccatcactgctgttcctccagggccagcactcgggcgaggcaggggagctgccttcggtacataatttgaaggggcactccctcttgggcacatgccggccctgagtgcctcccttgcctcactctgatcctggccccataatgtcctcagtggaaggtgatgggggccggtgctgtggggagagtagaaagaggggttggcatgactaaaaataccagtatgtgtattaagtattttgagaatgaaatgccaaggagtgcctactatatgccagctctaggaatggagtagacagtggacacaagaaggacttacgccctgagcacaggtgccaatggtgacaagactggcaagacgtgagggcatgaatggttcattcaggcagctgctgcagatgtggtcacctggtgccatctgctgctcccttttccacttttctatgtcctccttccacccaagtcccggatcactcgctgtttctggctagctcttggatctccatctgagctaaagttgcccactggcaccaatagatc

SEQ ID NO: 53221 - DNA, 495 bp, Homo Sapiens
  misc_feature (61)..(61): n is a, c, g, or t
  misc_feature (438)..(438): n is a, c, g, or t
acgccttctgatagtgaggagccctcgcccgcagctgccagtctgagaagtgaggatcccntccgccgtgagcgccctgtcttggaggtgtaccaacagctcactgagaacgggtcatgatgacgatggcggttttgtcgaatagaaaagggggaaatgtggggaaaagatagagaaatcagattgttgctgtgtctgtgtagaaagaagtagacacaggagactccactttgttctgtactaagaaaaattcttctgccttgggatgctgttaatctataaccttacccccaaccccgtgctctctgaaacatgtgctgtgtccactcagggttaaatggattaagggtggtgcaagatgtgctttgttaaacagatgcttgaaggcagcatgctcattaagagtcatcaccactccctaatctcaagtacccaggnacacaaacactgcggaaggccacagggtcctctgcctaggaaaaccagagacctctg

SEQ ID NO: 53222 - DNA, 870 bp, Homo Sapiens
gcgtgtgaacagggagtggtacacgggccgtgtcacagccgtggaggtgggcaagcatgtggtgcggtggaaggtgaagtttgactacgtgcccacagacacgacaccaagagaccgctgggtggagaaaggcagtgaggatgtgcggctgatgaaacccccttctccggaacatcagagccttgatacacaacaggagggcggggaggaggaggtgggccctgtggcccagcaggccatagctgtcgcagagccctccacttccgaatgcctccgcattgagcctgacaccactgccctgagcaccaatcacgagaccatcgaccttcttgtccagatcctccggaattgtttacggtacttcctgcctccaagtttccccatctccaagaagcagctgagtgctatgaattcagatgagctaatatcttttcctctgaaggagtacttcaagcaatatgaagtagggctccaaaacctgtgcaattcctaccagagccgtgctgactcccgggccaaggcctccgaggaaagcctgcgcacctccgagaggaagctccgcgagacggaggagaagctgcagaagctgaggaccaacatcgtggcactcctgcaaaaggtgcaggaggacatagacatcaacccagatgatgagctggacgcctacattgaggacctcatcaccaagggggactgaaggcagggagagaaaacaacttccccctgcccactggcccctcaaccctgtaacctgcagggggaaaggggaactcctttcatgggttgggtgggccgccccctggggttggacttacacgggggacttttgtggtttttgggaggaaaaaaataacccctgaatttttgaaa

SEQ ID NO: 53223 - DNA, 1043 bp, Homo Sapiens
tgatcagtggtgggaaggaaagctgctataatatgatgcagtgcattgctgctgggcatcagatcgttgctttagcaaatctaagaccagctgaaaaccaagtggggtctgatgaactggkktgctacatgtatcagacagtggggcaccatgccattgacttgtatgcagaagcaatggctcttcccctctatcgccgaaccataagaggaaggagcttggatacaagacaagtgtacaccaaatgtgaaggtgatgaggttgaagatctctatgagcttttgaaacttgttaaggaaaaagaagaagtagaggggatatcagtaggtgctatactttctgactatcagcgtattcgagtggaaaatgtgtgtaaaaggcttaatctccagcctttagcttatctttggcagagaaaccaggaagatttgctcagagagatgatatcatctaacattcaagcaatgatcatcaaagtagcagctttgggtttagatcctgataagcatcttgggaaaaccctggatcaaatggagccttatctcatagagctttctaagaagtatggagtacatgtttgtggagaaggtggagagtatgaaactttcactctggattgccctctatttaagaagaaaataattgtggattcatcagaagtagtcatacattcagctgatgcatttgcacctgtggcttatctacgctttttagaattgcacttggaggacaaggtgtcctcagtgcctgacaactacagaacatctaattatatatatvatttttgamaagtgttttggaacattgttcattaaaccaccatttctatacaaaaaaattgcatagtattttctcagttactatgactmgtttmtttttttctcatgmctcttatttttttagagamacatactttcmctagaagaggttagtggaacmattattaattgggaaahrkygacgggmwgttcattaaaatgccmactttcttggaatcmyctttytcttcgttaaamawctcccwatvacyttttttytttwtt

SEQ ID NO: 53224 - DNA, 469 bp, Homo Sapiens
  misc_feature (37)..(37): n is a, c, g, or t
  misc_feature (51)..(51): n is a, c, g, or t
  misc_feature (430)..(430): n is a, c, g, or t
  misc_feature (444)..(444): n is a, c, g, or t
gtcttcctgtgccttgccttgccttcaactattaggnactatatgtcaagntaatgtgcaaaacaaagacagttcctgccctgatggagcttgtagatcagaagggaagatgagcattaaggtaattatatagattaatgtacaactgtgatgagtggcaacaaaagagaggttcatgggcactatcaaacatgcaatgggacggattttgtttttgcctataaactcttgccatagaaagcttgaaaatcagtccagggggacagcattaatcaccatgttctttccttatccctgtcttccccaaaattcatgtgttgaaacttaacaagaggtgggaactttaggatgtgattaagtcgtgagggcacagctcttatagatggggtcacggtccttctaaaagggcttgagggagtggttttgtttncttccatcccttcngccacatgaggacacagtcttcgtt

SEQ ID NO: 53225 - DNA, 552 bp, Homo Sapiens
ttttttttttttttttttagaaatcccacattttaatacattgccatgcacataaggagtcaagtaatgctgaatacaaaatagtcaaatatacaaaatgataaagcagattttccagcctgatagagatcatgctcacagatacaagggaggcaaacatctgtacagtttcatttttatccattttataagagtcatgcccccctcaactctttttgaggacaactggaaacagaaggaaacataagaatatacaaaggagacccaaagggaattggcaagttgatagctgctgaagatatggaaatcggtggttcaaaattgtggtacacaataattcttatgtttagagaaaaaaagtttctaaacatcttatgccctggaagccaggaaactaaagtggatatccaacagaaaaggcactcttgttttaccacataacttgattgcctcctcctaagtctagtcctgggagtttttctaggatgcacagaggaaaaaaaaaaaaaaaaaaagcctacagccgcggccgctccaacatcacctcgtgcc

SEQ ID NO: 53226 - DNA, 483 bp, Homo Sapiens
catcctcccatgtcctaccatttataagagaatgttaatgtgagaactgctcagtctcctgacagacccgggggctgcaggcacattttccctaggggtaggtctgttagcttttcaagatcatgaagtatttttaggtccaagttgtcaccagcattcaaagccaccgtgcatcctccagctgttcccagcgcataccgggctcttgcttgtcatagcttggatgtcccctggatcatcagatacagactgactcctgcacttgttttcccccgtaagcagatcacgtgtcagtgtgtaaaatgtatatcacgctggtcttcatgtaggtgttgcaagtttcgttcattttatacacatccattagcaccacacatgaatgccatcctcttcaagaagtaagcagatagggctgggcgcgggggctcatgcctgtaatcccagcacttcgggaggctgaggcgggcggatcatgaggtcagg

SEQ ID NO: 53227 - DNA, 854 bp, Homo Sapiens
  misc_feature (10)..(10): n is a, c, g, or t
  misc_feature (848)..(848): n is a, c, g, or t
tcatgtatantcggtgttccatccagtgagtattgagatttcaatttgctagtaagatttttttagtctattctattatcatttattttaaaatcttttaaattattgtttaaatttaaagggctcggacaaaaatagtttattctacatatagtcgaaaatctgccaaagaagtaagagataaattgttggagttacatgtgaattattatgttttagaagaggcatggtgtgttgtgagaactaagcctggttgcagtatgcttgaaatctgggatgtggaagacccttccaatgcagctaaccctcccttatgtagcgtcctgctcgaagacgccaggccttacttcaccacagtatttcagaatagtgtgtacagagtattaaaggttaactgagaaggatactacccattttactatggcacaatgccgtgtgtcaaaaacaatcaccctttggcttattcacattaataaaaatcacaagctttaataacagacacttaaaaataagataaaaatggattggaaatttttctgattactaaaaggtaaattacttttctgttcattgaatgtcagccttattaagcttgtcatataagttattaaatcattcatgtcatactgcataaacaaatgttcatttcagaattttaaagagaaatgtatataaaagaacaatgaattttaataaatcaggggtatgtaagtccttttttcatccaactaggtgaattgcttcagattttctctagtaccagaaggtacctcctcaaactctttgaaccacttaaagcagaaaaatgcaagctctgaaaatgacatccttaaaatgctgatactggntcacag

SEQ ID NO: 53228 - DNA, 637 bp, Homo Sapiens
taactgatcatccaggaagaacaggtagaccaacccttcctggtaaagtaactgaggaaattgtctcaagtgagcatgatgagggtttatctttctcaggaaaggtgcagtgctatggtagggagttaaaccagcctgcctcagctgccaaatgcacaggtgacttcagtccttctcctgaaaaactggtaaaatcaggaaatccattgcagccagttagtatagagaatagaaatttggacttaaaacatcttgtcttggagtccagtgaacctccatttggtcctagaaatgttattgaaaataagtctttgtctgacacattggtttccacaactgcaccaagtggtatagtgaatgtgtcagtaaaacagcagactagccctaaaagcagtcagaaccatctctttcccggtgatttgaaaacagatgaaggcatttatctgcaggtgaagtccttgacagctgcctcggttgatggagcttattctacacagggatgcatgtgctcagtggtccccacgctttgttcttcctcagacaatgctacattaacccattatgtaagaccaataaatgcagagccagcgtttcaagcacagaataaaaaccatatgaatgcaaaaaaaaaaaaaaa

SEQ ID NO: 53229 - DNA, 640 bp, Homo Sapiens
ctaatttccgtttcagaatctacttcccagggaatccaacctgtgatgccccttgagaaaaactatacctggaggattagaatgtgtgtcccctgtggccagcagccacgaggaggaagggtggcagaaactagcatgcccagtttgtcctttccaaatttacaaatcataggtcattccaccttccctgagatagaatggttaagtatgtggacatatgccaggatttacaccacctgtgtttcttcaataaagtgggaaacattgagataatatccagtgatattaaggagctagattcactaggaataaatgtattagatatagttgaggaaaaatagcgccagtcaagaattaccgatgggtcttaggtaactgagtaggtggtagtgtcgtttaccgagattaaaaaaacaagcctggagggatctatgagtttcatttgaaatgcctttgggatgtcaaagcaacttgttcactaggcaattaaagatataaatctggagtccaggaacatgacctagagaactgatatgaatgtatatacatacctatcagcatacacccagtaatgactggtatcccgcaaggccgacagatataacttagggaacagaagtcagttaaaaaaaaaaaaaaa

SEQ ID NO: 53230 - DNA, 501 bp, Homo Sapiens
cacgaggtaagaaataaagctgttcaacttgaaaatgagctggagaattttactaagcagtttctaccttcaagcaatgaagaatcctaacaatagagattgctttggtgaccatgataggaggaaacgaaacttgtaagattggaacagttgttatttttatgaaattactttaaatatgaattgtactaactgtacctaaatagcaaagccctgtgtagattctggtaatgatctgtctcagggtatgtgtatttttgaagagtgttatgtccttagttttaattttgagtaaagaaaaggctaaaatcatgaattagttacaagcaacagtaccaacttatgtgacccctgaggggtggggctgtgagctcttaatttgtttttgattctgaaaaactctgcttcctggcatccaggagttagagattgagcctttcatcttctttctcaaaactagtttttgatgctttctttcatgggaatagtcacttttttatt

SEQ ID NO: 53231 - DNA, 566 bp, Homo Sapiens
  misc_feature (541)..(542): n is a, c, g, or t
  misc_feature (550)..(550): n is a, c, g, or t
ctgctattctgtgtcatcactctattccttctctactggatcattctcatcaacctaggatctcttttttttttttggagagggggtctcactctgtcactcaggctggagtgcagtggtgtgatcatagctcactgcagcctcgaactcctggcctcaatccatcctcctgcctcagcctccagagtagctgggaccacaggtgtacaccaccatgcccacctaatttttttttaaaaaaaggccaggcatggtggctcacacttgtgatcccagcactttgggtggccgaggcaggcagatcatgaggtcagaagttcgagaccagcctgaccaacatggtgagaccccgtctctactaaaaatagaaaaattagccgggcatggtggcacacgcctgtaatcacggctactcaggaggctgaggcgggagaatcgcttgaacctgggaggcaaaggttgcagtgagctgagattatgccactgcactccagcctgggcaacagagtgagactccgtctcaaaaatatatatatatatnnttttgtangaacaatctcactttg

SEQ ID NO: 53232 - DNA, 665 bp, Homo Sapiens
ggaaaagaggatctaggatccagttggtgcagcttatggcttgtccctgtgtgtatagttgttaaattattcttttatttttatttttaagaagttattctttagataataataggcatgtagcttaaaaggaaacctcaaaagacacaaaggatttgtctcattttaaattaaaaaaatactgtatcagcatcaagtaattaaacatttgttggaatatcataacttcttttttctttattgtatgttccctttcctgtgcttacgtattttcagaaattttagttggtgtgcataccacaatttgtattttatacttaaatatacatttcatggttgtatatttatttgatcaagttcttttatatcaaataacagagcttggcatttggttgcttgctcataactcggcagtaagcatttttaagcatgaagctattctttggttgaattttattcttgatatggggcttaggagtgagatttctggtctacagaaatgatcatgctcatgaattttgacatttatcgtcatgatgctttgcacaagggctgcaccaatttagatcatctttagcggtgaatgagtggattaattttactacaactactgatggtggtggtggaatttcagttgcttttttttgcgaggttaataggcggcc

SEQ ID NO: 53233 - DNA, 610 bp, Homo Sapiens
ggaaagagaagacatacgtgggtaaaaaaagacctaaccatatgtggcatttttgtaactgagtgccatgtgcgtgctgtccagaatgagtgctatgacagccccaaagcattctggtgggtaagtgtaggttttgaacttgtccttgaaagatggggctttggataagcaaaggagagcagcaagggcattctaggtaggaggaatgatatggggaaaggtttggggataagaaaatacaaaatatttaggaaagatagcagatcacttttgacatagaagaacggaaaataggtcagaactttaatgcttctgatcaaagataattgacaatcttctagaattaaaatagaccatggtgtgattagcgggaaagaagtgactatggaactaatgaatgttaggaccagattgtggagagttttgagtgtcaggtttttgggattcatccacgttgttgtgtatgacctcctcccttgctgaggagtattctattgtaatacacacaatttatccatctgctctcctgttaattaattaacaagggtcatttccaggttagaggtattacacataataaagttactctaaatattcttgaaaaaaaaaa

SEQ ID NO: 53234 - DNA, 730 bp, Homo Sapiens
ttttttctctgtctcaaaaaaaaaaagtgtcagctttgtcttgtcaagaggtgaaggaacttgttttatccttttattttttttttaagatagagacgggggtcttactatgttgcccaggctggcctcaaattcctggtctcaggcaatcctcctgcctcggcctcccaaagtgctgggatcagttgtgagccacactacccagccaaactccagttttagttaaactgtttcacctcatttttatgctgagtttggtaaagtaggtattcttgctgaacagagtcctgaaaatcaaactatacaagtagtaggaagtccattaagctgtttagaggaaaaagtgttataaattggcagttaaattgaacccaggaaagacccatcctccttggtggctttctctgaggccccatgaggccaagcagaagcaaactggctctaggtgcagccagactttgaaaaggaatcccggccaggcttggtggctcatgcctgtaatcccagcactttgggaggtcaaggcaggcagatcacctgaggtcaggagttcaagaccagcctggccaacatggcgaaacactgtatcatactaacaattttgacaattagctgggtgtgctggtaggcgcctgtaatcacagctactggggaggctgaggcgggagaatcgctcaaacctgggaggcagaggttgcagtgggctgacgatctcgccactgttactcca

SEQ ID NO: 53235 - DNA, 951 bp, Homo Sapiens
ttttcgaaaatcgtcgaccacgcgtccggttcctttattttttatttgatgataatcaagaagtgagtagtagtagctaacttaatgtacactttgcttaggtttttaaacatgttactattaagactacgtattgtaaaccttctgtaattttcacatatgaatgacaggagaaagttaaacctaatcgaaggagttttggaataaaaaagtggtgctggggaaattcaccatggttcacaaagtatgcctttgtaaaactgaatcaacttttagcaagaattaatttatgtagttttaaatgttaaattgtgtatatttaacagaaaatacttatctggcacctcagcagttttaatgttaccttatacttttaacagtatgatttatattgaatacttagatgttttcataagattttatcaaatttgataatgtaatgataaaatgtttttttaaatgtgaactatttaacatataaatggggacacaaaacctgaattgtgatttctacataatgtgataattagggttcaaattatgactcatcatttaattgattataaatgagtatatttctgaactctttattgcctccatttttacaatcataatatagcaataatttctatttttatttcataggactgtggtgaagttatttatcatgacacctttatctttgatttctgagggaaaggggtgtatattttgtaattaagataaatgagaaagttcctaatagtacaaatgcccttttccaggtttatctttgctatttgttggccatttttcttaaaaattttgctttatttgcacccggatttcctggaggcaaatagtgctggttttttccaaactcataggttacataaatgatttttatcagagcattctgggcaatcctaattttcctttcccacccgttgaggaaagtaacatttcctggct

SEQ ID NO: 53236 - DNA, 497 bp, Homo Sapiens
gagggatgtgggaaacactttgcatcacccagcaagctgaaacgacatgccaaggcccacgagggtgtgtacggatagcctgggtgtgctccgagggggatgccaaatcctgggcgcctttgaatctgttctgtgatcacgctgaaaagatgggaaccctgtgaacaggggacaccatcctgcttatttgggtcttacactcttgtccaaagaggcactgtatatgtctgtttttccactaccgtatcattgctgttcacatgtaatgtgttgtttgttcacaacaagcgcctggttacacattacactgacgaatgtgctgatgctccagccatggctttgatgcttctgtcatttttaacctcttctattaatatttactgcctgtgccattcttttccttgttggccattcacaaggcttggataatcgtgtgacattttgagagccatcagatgttacgtttctcaaaaaaaaaaaaaaaaaaggtatacgcg

SEQ ID NO: 53237 - DNA, 587 bp, Homo Sapiens
  misc_feature (561)..(561): n is a, c, g, or t
ttttttttttttttttttaaaatttatttttatactcagaatttaaagataagatctaaacttcctgataggttttttcatatttgtttgccaaaatggtagctgagtggaggttgtctcgaggtgttgaaaaacagacacaagctttctttgaaggctttaatgaaattcttccccagcaatatttgcaatactttgatgcaaaggaattagaggtccttttatgtggaatgcaagagattgatttgaatgactggcaaagacatgccatctaccgtcattatgcaaggaccagcaaacaaatcatgtggttttggcagtttgttaaagaaattgataatgagaagagaatgagacttctgcagtttgttactggaacctgccgattgccagtaggaggatttgctgatctcatggggagcaatggaccacagaaattctgcattgaaaaagttgggaaagaaaattggctacccagaagtcatacctgttttaatcgcctggacctgccaccatacaagagctatgagcaactgaaggaaaagctgttgtttgccatanaagaaacagaaggatttggacaagag

SEQ ID NO: 53238 - DNA, 630 bp, Homo Sapiens
caagttcaagtcgcatatgctgtactgttcctcctgcaaatgtggggaaagaagagggagatactagaggaactgaggctccacccattcattcagttgctctaagcaccagaggacttgtttcagaaaaggggagtgggaacgccctcgactttgccctcctccggagcatctctgggacgcagggagtctggctagcgttaataggaaaggttgctcggcagagctgccctggagtactgacttgtctctccctcctttgtcaaggtccatgtttttctggctcttcctgcacactcatccctagattatgagcgttaatgtacgaaatgtgcagagcaaattgaggccaactgtggcatcaatactgcaacttaaacttgacaatcatggtttgctggtcctcaaacaggcactgaaatctcagtatgggtatacgatttaataatcgggcctcccttctattgtcggttttatgtttctatccttcaatagctgcactgttttctaatgtgctgtaagagttttcgaaataatttatgcaagtatctggtttccatggtttacaatttatacagctttccctagcatatttaaactggacactgtccattaaatgctatgaatcgc

SEQ ID NO: 53239 - DNA, 1015 bp, Homo Sapiens
agtatgtcagcctggcagggaccgtggtcttgagtcaaagaaacaaatgggtcacacaagtaagaggaaaggaagcttatcttaaatagttcaattcagtgctaagctgattccctttattaagttttaaatttgtatattatgtatttttaaattgtttaatttttgttttctgaagtctggaagtctggtatcttctacatttttagcattttacatatattttaccattttttctttatgtcatccctcatagagacaatttttggagtagatttcatttaaaagaatacattgggctgggtgccgatagctcacgcctataagcactttgggatgctgaggcaggaggattgcctgggcccaggagtttgagaccaatctgggcaacatagggacaccctgtctctaccaaaaaaaaaaaaaattttaatttagccaatcttggtggcacaaaacctgtcctaaatactcaggaggctaaggtgggaggatctcttaagcccaggaggttgaggcagctgtgagccatgattgcctgtgcacaccagcctggggacagagcgagctctgtccaaacaaacaacgatacaaaaaaaaaaaagggtaccaacagctcattatctcccaagcattgcaacagaggggcttaaaaaatttctcctgatcatgttccccagtagatttgttggcctacaaattcaacccaaattatttcttacatacggggggacgacgcttattaaaaagggtgccttaaagaagttagcatttcaggttttgtactctgaacttgcaacgagaagtcccatgtatcgctggccacatgattatcagcgtgtgaatgataggacataggtactgagtgctgggcatgacagtgttgggaccgagaatatttacgacgcgaggaatgaggatgggacacgggaatgaactgtcagaacgacggtatgataccagagactgcagcatattgtcaccccgttgttcttcgtactttcttgttgggggg

SEQ ID NO: 53240 - DNA, 842 bp, Homo Sapiens
gaatcccgggatgttctaataggagatgggaacacgagaagtttgatggctttgccctgggctgggaatacctcacccacgcccagttccagaaaggcctccagctgagcagacggccccgatcccgccagaacggccttttgcttccagccaaagaacaccgccaacacgcacacctccaacctgggacatcccacgctgggcctcgcacggaggaacctgcagaatttggattctgagggtagtcgggaggcctcggtagccaggcagaacaggatatctgccaaagggtgtctgatgtggggtggggctggcatcctcccaggaaggttctaggtgggaccccgtcttctgggggcgggggtgtcttttcatcttccctggtttcctagaactcacttcctttgacggcgtgtgttggtcccatctctcagaccagctcactgaggcagaggagttgctcagaggctcacatgggcacccccattggttcgtgtgagcagctgcccagccccaggcctgccctcggcctggtccagcatgaaggcgtttccatctgcaaggatgcacggtaccctccccgagagcaggcctgtcccctacccaactgggaataaactggaagctgggtctctttgttgctatgtttttttgtttgaagttcccaggaatatttgaggggttccggtgatgtgtttagggatcttctctgtgggggaaaaggaagaggagggtcttgttctcccatctgtttattctttgggctctgggaacaggggactactttggggctttctccagacttttgtatgttgttattaaaagcgagctattgcatttca

SEQ ID NO: 53241 - DNA, 838 bp, Homo Sapiens
  misc_feature (25)..(25): n is a, c, g, or t
  misc_feature (31)..(31): n is a, c, g, or t
  misc_feature (670)..(670): n is a, c, g, or t
aaacaagaatggacattccgaaggnaaaagnattctctctcttgcctttgaccaacatggtactaaggggtttcttctttcccaatgtatgtacgtgccctgctgggggccttactttatagaatgagagcatccgagcttccctaatgaatctggctagttctgtgtctggctgaggatacaggagtgggacatccactctcggatccctcagagcacagaaaccttcagctttgctgtctctgaagtatttcctccagtttccctgcgggcccctatgtttgagtttgatggctgctggatcctcactcaacgaaaactcggttggaaactgttccgcctggcagtccttttttgttgttttccatctcatttcccttccatctgaaagtggcattcagctgacttgctcatttagactgttcacggagtctgaatctgccaacgtggtgttggaggctccaccttgaaaagggccacagtcagggcaactttccccatacaggaaaacttgaaaattacatcaacagtctacgtcacagccaaattatatttcctttataccaaacaaaactatggagaactaaaagtacatcacacaaaacgtttatagtgttttgcatgtgacctatttcagtatttatataactagattagtgctttctagcanacggttctgttaattagcgagtcactgttgattctgctgtggtggtaagttgataccgtgtaactaatcccgtggatgccttctcgttatttttgtccaaacgaagcagccgtggtagtagctgtctatgattcttgctcagcaaagtaaaataaatgttaaatatgg

SEQ ID NO: 53242 - DNA, 609 bp, Homo Sapiens
cgtaccttgttgttgctctgtttggagggtttggtggtctccactcccgccttgacggggctgccatctgccttccaggcactgtcacagctcccgggtagaagtcactgatcagacacactagtgtggccttgttggcttggagctcctcagaggagggcgggaacagagtgacagtggggttggccttgggctgacctaggacggtgacctcggtccagttccgaagacataacgggtgctgctgcttgtatatgagctgcagtaataatcagcctcgtcctcagcctggagcccagagatggtcagggaggccgtgttgccagacttggagccagagaagcgattagaaacccctgagggccgattactgacatcataaatcatgagtttgggggctttgcctgggtgatgttggtaccaggagacatagttataaccaccaacgtcactgctggttccagtgcaggagatggtgatcgactgtccaggagacccagacacggaggcaggctgagtcagggcagactgggcccaggaccctgtgccctgagtgaggagggtgaggaatagcagagcccaggccatggtggagacgtccgagagcgc

SEQ ID NO: 53243 - DNA, 606 bp, Homo Sapiens
atcgaatcgtatcggccattatggccgggggaccctgtgcaggagtcagacccagtcaggacacagcatggacatgagggtccccgctcagctcctggggctcctgctgctctggttcccaggttccagatgcgacatccagatgacccagtctccatcttctgtgtctgcatctgtaggagacagagtcaccatcacttgtcgggcgagtcagggtattagcagctggttagcctggtatcagcagaaaccagggaaagcccctaagctcctgatctatgctgcatccagtttgcaaagtggggtcccatcaaggttcagcggcagtggatctgggacagatttcactctcactatcagcagcctgcagcctgaagattttgcaacttactattgtcaacaggctaacagtttccccgccactttcggcggagggaccaaggtggagatcaaacgaactgtggctgcaccatctgtcttcatcttcccgccatctgatgagcagttgaaatctggaactgcctctgttgtgtgcctgctgaataacttctatcccagagaggccaaagtacagtggaaggtggataacgccctccaatcgggtaa

SEQ ID NO: 53244 - DNA, 743 bp, Homo Sapiens
ttttttttttttttttttaaagacaaagtagtattatgttgcttcagtttctttaaatacctcgtttcttttgagaccaaaaattcccatcaaggaaataaatcagcctgattttaacattttacatattacattgcctttaagcactatgattggatggctttttttctatttgtttaataatccttggctaaattcacatgtatctaaagtaaaatagctgagttactgaattctataaggggaagaaaaagcatttattttcacatgattaactgaaatggaaaagtaagacatttagcagaataattcatttaaaaataattttaaaaaatcagacatatttaaaaatctaggttgtctatccagtatgtgaatgcttaattataattgttacatgttgaatgggtattaagagtaagtcaccaggtacacaaaactgccatcatagcaaaatgagacagtgttgaaaagacaaaatattttctggaatgaaaatatattcaagttgatccatattcagatgttttctgtttaatacttcagattggtcctttgtccacatttgtttacaacttattgtaatgttaatttatacttttggattgtgcctttgtcatgagttgagaaaagtagtcctacacataatgtgaaagttgttaccaccacagcatgaatgtataattgtattacaattgatcatccacagaaaaaaaaaaaaaaaacctcgtgccgaattcttg

SEQ ID NO: 53245 - DNA, 529 bp, Homo Sapiens
gcttcccaacagaccactaccaaaccaccataacagacagtctgctagaagagaactgatcaggccattatgtcaccggacaacaggacaatcatctgagttgggatgctgaatcacggcaactccaagacatctgggattttttttttaccctcacattggatacaatctatggaatattactacatttagttcatttgtaatttacaatttttgatgactaaaattggaaaaggattagtacattcctactggctttacatattagtattgggctgtcaccattacccagattatttaaaatgtaaattttctttactcactagattggaagctccttaagagcaagggctacttctgtattattcatcttcatgccacgtcacttagaacctagtagatactcaataaatacctattgagctgaactgaccttgtctgagtaaaagtgagtccaatacacaagttactagattgtaagttggtttgacacaaacttaattttgaaactaaaaatgaactaaagaca

SEQ ID NO: 53246 - DNA, 907 bp, Homo Sapiens
ggactgcgctgcaagacccggaccctggacagtgagcccaagtgtgtggaagagttgcctgagtggaatttcgatggctccagtactttacagtctgagggttccaacagtgacatgtatctcgtgcctgctgccatgtttcgggaccccttccgtaaggaccctaacaagctggtgttatgtgaagttttcaagtacaatcgaaggcctgcagagaccaatttgaggcacacctgtaaacggataatggacatggtgagcaaccagcacccctggtttggcatggagcaggagtataccctcatggggacagatgggcacccctttggttggccttccaacggcttcccagggccccagggtccatattactgtggtgtgggagcagacagagcctatggcagggacatcgtggaggcccattaccgggcctgcttgtatgctggagtcaagattgcggggactaatgccgaggtcatgcctgcccagtgggaatttcagattggaccttgtgaaggaatcagcatgggagatcatctctgggtggcccgtttcatcttgcatcgtgtgtgtgaagactttggagtgatagcaacctttgatcctaagcccattcctgggaactggaatggtgcaggctgccataccaacttcagcaccaaggccatgcgggaggagaatggtctgaagtacatcgaggaggccattgagaaactaagcaagcggcaccagtaccacatccgtgcctatgatcccaagggaggcctggacaatgcccgacgtctaactggattcatgaaacctccaacatcaacgacttttctgctggtgtagcaatcgtagcgcasatacgcattcccggactgttggcaggagaagaaggttattttaaratcktgccctytgc

SEQ ID NO: 53247 - DNA, 527 bp, Homo Sapiens
atgaatgagaatctcttgtctactatttgcaagaattgctgcgtattttctaggaagaagtccactgctttagtcctattctgaaaggcatttggtgttagacacaagagaacaggttccctggctgacattttcagaggcccgtgcccttcggtcttcaggtgaggctgggcttgagggaggctttgtggaacggtgagaagaacagcgtgactaaggcacagaaggctgagtgatgccctgcagtgcttttgtagggttggaggccagctgggaaagaaggaacccttgcgttagagaatgggaacatgccttaggatatagaaatggtaaatctgagatagtttgaagtgagaatactagaagtgttcccaccaaacaaggtgtgtcttggtgcctgctgtatcccaggctccgtgaggtgccggagtcagcactgaacaaacagagcttcctatgcttgcggaaatgcatttcgttgggggaagggatttttctgctgactctggctattaatagtaacaatc

SEQ ID NO: 53248 - DNA, 715 bp, Homo Sapiens
aaaaaacaagaaaggaacagacctttggcttggagttgatgcccttggactgaatatttatgagaaagatgataagttaaccccaaagattggctttccttggagtgaaatcaggaacatctctttcaatgacaaaaagtttgtcattaaacccatcgacaagaaggcacctgactttgtgttttatgccccacgtctgagaatcaacaagcggatcctgcagctctgcatgggcaaccatgagttgtatatgcgccgcaggaagcctgacaccatcgaggtgcagcagatgaaggcccaggcccgggaggagaagcatcagaagcagctggagcggcaacagctggaaacagagaagaaaaggagagaaaccgtggagagagagaaagagcagatgatgcgcgagaaggaggagttgatgctgcggctgcaggactatgaggagaagacaaagaaggcagagagagagctctcggagcagattcagagggccctgcagctggaggaggagaggaagcgggcacaggaggaggccgagcgcctagaggctgaccgtatggctgcactgcgggctaaggaggagctggagagacaggcggtggatcagataaagagccaggagcagctggctgcggagcttgcagaatacactgccaagattgccctcctggaagaggcgcggtagcgcaaggaggatgaagttgagagtggcagc

SEQ ID NO: 53249 - DNA, 766 bp, Homo Sapiens
  misc_feature (604)..(604): n is a, c, g, or t
  misc_feature (618)..(618): n is a, c, g, or t
  misc_feature (621)..(621): n is a, c, g, or t
ctggaccggtccggattcccgggatggcgctttcctgcccctcccctcctctgctccttcctgcatggacctctgccgttcctgctcctgctccggaagccgccgccgccgccgcgcttgccttgccccctctttttggcctccccctatttcctaggatccgcattcgggtggactctgccccaggagcttgacagggtgcagggcctcttctggcctctctcctctctctgtccatccactgtgccccttgggccacgccgacgcgctcggtgccacgtgccgtgtggtgtctgtgccgcagacgggccatctgcccgctcacttgtggactttgcgctcccggttgtcgcgccctgtgctcccgaccagcagccccaccgtccacctcctcgcccccgcttctcttacgcccccgccccgggcgtgctcctcgcgccctcggcctctctgtccttgctcttttgtaaggggcgggcccggctcagtgacctgtgctgctctgtatggtgccgtgtgtaagaataaacccgttggaatactcgtggtctcagttccttcccgtcccgccgccccggcccgacccactgctagggctgcccangaggagggaggcanganggaggccgggaagtccaggtgggcagctctcggcagaccctgggcctctttaacacgcctcttgttttctcttccagtctcgggagggtgctgacctggaccggggagaagaaagctgccgagtgcaaggtggacagcatcggga

SEQ ID NO: 53250 - DNA, 847 bp, Homo Sapiens
  misc_feature (676)..(676): n is a, c, g, or t
  misc_feature (680)..(680): n is a, c, g, or t
  misc_feature (784)..(784): n is a, c, g, or t
ttatctattaaaatgaagaacttccatggtttaatagaatgaatgctgtattcaacaaggtcttccatccttcttataaatcttaagactgtgtttaagctttctttcacttttactctatcccttggaagttaattgggaataaaaagatttatcaatttagtcactataatttaaggccaggcatctgcttggaaatacaataaccacaattaatacttagagaaaattgtttcaacagattaactctgctattttaaaaactatagtagtgttctttgaggatgcatttacttttccccaaatttgatagatagttatttttatatattttttctggccacttggcttctaactgattaacatgaaaaacgcacgtgtgcctgtttcactcaaatcatattttacaactttttaaaagctgctacagttatagtttgtgaaagaggagaaaggtgaattgcaacagagggaaattactgttactgtgtcaaatatgtgactgatgcttttggtcagataatctgctgcctgtcaatatttgtaataacagaattttttgttaagagtactctcatctttattttgctgctcactgattttttacactaagatgttctcatctttgtcgactcactgtttttgcttcatatttgtctgtgtacttgtgctctanatanaaatctagttttatgtctagtttattccattgtgtgtataatgtttgcctctgatgtagggaaattttctattgttttttgatgtttggttggtacagccctanaacttatgggaaataagaaaaagccatccaataaaagtcagctaaatggagtggccaaaaaaa

SEQ ID NO: 53251 - DNA, 502 bp, Homo Sapiens
gcacgaggaaacccctccaaagggacgcagcccaacaaaatgagtattgatcttaaaatccccctcccctaccaggacggctgtgctgtgctcgacctgagctttcaaaagttaagttatggaccaaatcccatagcgagcccctagtgactttctgtaggggtccccataggtgtatgggggtctctatagataatatatgtgctgtgtgtaattttaaatttctccaaccgtgctgtacaaatgtgtggatttgtaatcaggctattttgttgttgttgttgttgttcagagccattaatataatatttaaagttgagttcactggataagtttttcatcttgcccaaccatttctaactgccaaattgaattcaagaaaccgatgtgggttttgtttcctgtacaattatgagatataattctttttcccattgtaggtcttttacaaaacaagaaaataatttatttttttgttggtggataaagaagtcaagtatct

SEQ ID NO: 53252 - DNA, 591 bp, Homo Sapiens
gatgagttgcttgcattttcacagagaatgaaggaagacgtaacatggctccagaaacttttcacatgatgatgggatcgacaaaaaaatgctaccctctagactagacacatttcatggagacaagcaaaatggtgccagggctgggctgactgtgggatgggatttggtactgcagacagattttgatttccacagttgagctggaaacaaactgtgccttcaaaaaatgacttttctaacttaaggttggttatatgttaagtgtgctactaacttaaaaaatagtggctgggcgcggtggctcatgcctgtaatcccagtgctttgggaggccaaggcggggggatcacgaggtcaggagatcgagaccatcctggctaacacggtgaaaccccatctctactaaaaacacacaaaaaattagctgggcgtggtggtgggcgcctgtagtcccagctactcgggaggctgaggcaggagaatggcatgaacctgggaggcagagcttgcagtgagccgagacagcgccattgcactccagcctggcaacagagcaagactccgtctcaaaaaaacaaaaaaaaaaaa

SEQ ID NO: 53253 - DNA, 919 bp, Homo Sapiens
  misc_feature (878)..(878): n is a, c, g, or t
aaagtgtgggtgtgtttgaagctttttataattctgttaagcctatccagattatcaacagcaccatagaaatggtgaagccggggaaatttcccagcggcaaaacagaaatcccttttgaatttcctctgcacttgaagggtaacaaagttctgtatgagacgtatcatggcgtgtttgtcaacattcagtatacactgcgctgtgacatgaagcggtctctgttggccaaggacttgacaaagacctgtgaatttatcgttcactccgctcctcagaaggggaagtttactcccagtcccgtggacttcacgattacacctgaaaccttacagaacgtcaaagagagagctttgcttcccaaatttctccttcgaggacatctcaactcaacaaactgtgtcatcacgcagccactaacgggagagctggtggtggagagctcggaagccgccatcagaagcgtggagctgcagctggtgcgcgtggagacgtgcgggtgtgcagaaggctatgcccgcgacgccacggagattcagaacattcagatcgccgacggggatgtgtgcaggggcctctctgtccccatctacatggtcttccctaggctgttcacctgccctacactggagaccaccaacttcaaagtggaatttgaggttaacatcgtggtgctgcttcaccctgaccacctcatcacggagaacttcccgctgaagctctgcaggatatagcccggaggagggaagcatagagaacgggagtggccatctggaaatccagctgggttatcccaatcctaaagggagctacagccagcggcatatacttggttttggtgattattctggatcagaaatgaaacagacccctcaaanttaacttttccttccctcatttcctggaggcttcttgcgtc

SEQ ID NO: 53254 - DNA, 856 bp, Homo Sapiens
tcgactccaattcctatagtaataataatgtaactgttacaccaactttcctcatatttgagagatgagtacatgttggattgcagcatttcttcatgttaaaaacatggaatattattcaaatatagtacttggggcctaaacaactaaaattagtcaccgcataactagttgaaaatggcataggcataaaatgttaataaagaatggcagttatatttatgctcacttcctggagtaattgggtaatattcagaaaggcacatcgtggtagtttaagtgtacaaggccttagggcagtatctagcccagtattattccagattctcctgagctctatataaagggcattttggaggaactcttctgggcaatatctttcccaatctcatctaaattctgggaaatattttccatagcagacaacccagctctgaaactaagcacctggtgatctttagtttgagatgtctatatggtacttttgagttatatcaattaagatacaagctatagacatgataaaacatatgaaatcaagatatagctcagtgggattggattaagacataataatagttctaagaattcacttttgattgtatgttttaccaattcaataattccactaatcaagtattccacaattttttgggactttttggattaacattaacaacaatttggacacttacgaactttagcacgacatcacagactactacagggcacatcaatacaaccaaggcggaacaaacccaaccaatagaacccggacgatgtatcgcgctatcaacaaaacaaagagggggggtgccccataattataccccgggcgcgcaacacgcgccgccca

SEQ ID NO: 53255 - DNA, 605 bp, Homo Sapiens
  misc_feature (599)..(605): n is a, c, g, or t
actgaccggaccgaaggagtagaaacctttcggccggaaccgccatcttccagtaattcgccaaaatgacgaacacaaagggaaagaggagaggcacccgatatatgttctctaggccttttagaaaacatggagttgttcctttggccacatatatgcgaatctataagaaaggtgatattgtagacatcaagggaatgggtactgttcaaaaaggaatgccccacaagtgttaccatggcaaaactggaagagtctacaatgttacccagcatgctgttggcattgttgtaaacaaacaagttaagggcaagattcttgccaagagaattaatgtgcgtattgagcacattaagcactctaagagccgagatagcttcctgaaacgcgtgaaggaaaatgatcagaaaaagaaagaagccaaagagaaaggtacctgggttcaactaaagcgccagcctgctccacccagagaagcacactttgtgagaaccaatgggaaggagcctgagctgctggaacctattccctatgaattcatggcataataggtgttaaaaaaaaaaaataaaggacctctgggctacaagaaaaaaaannnnnnn

SEQ ID NO: 53256 - DNA, 581 bp, Homo Sapiens
aggcggggcgctgtgcgcgccgcgatccggtacgtgggcctccgggctgtcccctctgggggcggcgatcctccctccggagccccccttcaaccctcccggaagtgagcatttgcaggaccagggatgctgtgctgctctcccatgagccagtcaccgagtcggtctgctgaagccctttctgaacctctggccgtctggatgctccactgtgcttgccaagatgaagtgcgtcttggtggccactgagggcgcagaggtcctcttctactggacagatcaggagtttgaagagagtctccggctgaagttcgggcagtcagagaatgaggaagaagagctccctgccctggaggaccagctcagcaccctcctagccccggtcatcatctcctccatgacgatgctggagaagctctcggacacctacacctgcttctccacggaaaatggcaacttcctgtatgtccttcacctgtttggagaatgcctgttcattgccatcaatggtgaccacaccgagagcgagggggacctgcggcggaagctgtatgtgctcaagtacctgtttgaagtgcact

SEQ ID NO: 53257 - DNA, 579 bp, Homo Sapiens
ggggcgctgtgcgcgccgcgatccggtacgtgggcctccgggctgtcccctctgggggcggcgatcctccctccggagccccccttcaaccctcccggaagtgagcatttgcaggaccagggatgctgtgctgctctcccatgagccagtcaccgagtcggtctgctgcagccctttctgaacctctggccgtctggatgctccactgtgcttgccaagatgaagtgcgtcttggtggccactgagggcgcagaggtcctcttctactggacagatcaggagtttgaagagagtctccggctgaagttcgggcagtcagagaatgaggaagaagagctccctgccctggaggaccagctcagcaccctcctagccccggtcatcatctcctccatgacgatgctggagaagctctcggacacctacacctgcttctccacggaaaatggcaacttcctgtatgtccttcacctgtttggagaatgcctgttcattgccatcaatggtgaccacaccgagagcgagggggacctgcggcggaagctgtatgtgctcaagtacctgtttgaagtgcacttt

SEQ ID NO: 53258 - DNA, 516 bp, Homo Sapiens
ggagtttgagaccagcctgggcaccatggtgaaacctcgtctttaccaaaaaatacaaaaattagctgggtgtggtggtgcacacctgtagtctcaactattggggaggctaaggtaggatcacttgatcccaggaggcggaggttgcagtgagttgcagtcacacccctgcactccagcctgggtgacagctagaccctgtctcaaaaaaaaaaaaaaagactgggaagagagctagagggactaggagataatgtgtatgtaggtttatgtgatgggatatcaccctgaagagttgtgtcttttgtggccagtgacaaatccaggaaatgaatgttgctgatagggataaatcttgaggctgagggcgggtggtacagatgtgtatgggaaaccccaacccctatatattgtaaatagatgggctgggctaaacattgttgccgtttcatacttctaccaactcagcttttacacaataaagctctactgtctctggaaaaaaaaaaaaaaaag

SEQ ID NO: 53259 - DNA, 543 bp, Homo Sapiens
aggggacacaagtgtgggcaagggtccgttcgcctctcagcaccctcaccgtctactatagcccggagaccatcggcaggcgagtggctgtgggactcgggtcctgcctcgccatcctcatcctggcaatctgtgggctcaagctccagcgacgttggaagaggacacagagccagcaggggcttcaggagaattccagcggccagagcttctttgtgaggaataaaaaggttagaagggcccccctctctgaaggcccccactccctgggatgctacaatccaatgatggaagatggcattagctacaccaccctgcgctttcccgagatgaacataccacgaactggagatgcagagtcctcagagatgcagagacctcccccggactgcgatgacacggtcacttattcagcattgcacaagcgccaagtgggcgactatgagaacgtcattccagattttccagaagatgaggggattcattactcagagctgatccagtttggggtcggggagcgggctcaggccaaagaaaaaatgg

SEQ ID NO: 53260 - DNA, 552 bp, Homo Sapiens
ttttttttttgtatttttagtagagacggggtttcattgtactggccaggatggtcttgatttcctgaccttgtgatccaccccaccttggcctcccaaagtgctgagattacaggagtgagccactgcgaccggcccatgagtctttattaatagagatttcttactggtgttatgtggcagattctgcatattcctcacccatcatatgtattccactttcctttattatggggaaaactactctttttggcatgatacaatgttgactccattttctttgctaataaggacttggtatcaatttatcagtatgtaaagtttaccatagagtattgtctcatgtgaatcattcccattttttgctctttactctttgtcgttatttctgagtattatttggatggttcattttgacttaaggatagccctgtgatatgacaatatttttatctaatctgatggagaaagcatttagtctcctgatcaagtatgatgttagctgcaggtttttaataaatgccttaattcagtttgaaaaaaaaaaaaaaa

SEQ ID NO: 53261 - DNA, 425 bp, Homo Sapiens
attgaaatcacagtgtcaacaagcacctctggcatgaaatagtcacaggagcgaacacaactatctcttggaagcatgcagtttgactcatggaatcaagcatgtgctgtactataataacttgtctctccatgccgtaatgccatcctgactgagatttacctggcccttcaatatagcattttgcatatctacctatgacatgatgggaggtggctaatggggagggatgcgccctggggagttttgtgaatgtgttaagtggagttaagagacctactgcatgctattgtatagattatacattatatatttaaccatttgttgctgtacagtgaagctttttctagtatttcttttttgctattataaacaatgttgcagtaaatatcctaaatactctaaaaaaaaaaaaaaaaataggt

SEQ ID NO: 53262 - DNA, 389 bp, Homo Sapiens
ggagcatggaataattgtttcacagaagagggaccttcttcagtcaggtttactcctgatgggaagtacttgattgtggcccagctgaatcttagcaggctctcagtcgtagcagcacccccagtgggaagcattggggagtgttctgtgatcagcacaatccaactagcagatcaagttttgccacatctcctagaagtcgacagaaagactggagcagtctatgtagcagaaattggagcaaaacaagtacaatatgtccctttgaatagctatgttccttcatttggttcataatgtttctttcccgggaatatttcaagtggcagttcagattctcaattcactaagtgcttatgatgttcaagcacaagtttatttttctagtt

SEQ ID NO: 53263 - DNA, 1002 bp, Homo Sapiens
ctttcccaaatgtcactgccttaggtatcttccaagagcttagatgagagcatatcatcaggaaagtttcaacaatgtccattactcccccaaacctcctggctctcaaggatgaccacattctgatacagcctacttcaagccttttgttttactgctccccagcatttactgtaactctgccatcttccctcccacaattagagttgtatgccagcccctaatattcaccactggcttttctctcccctggcctttgctgaagctcttccctctttttcaaatgtctattgatattctcccattttcactgcccaactaaaatactattaatatttctttcttttcttttcttttttttgagacaaggtctcactatgttgcccaggctggtctcaaactccagagctcaagagatcctcctgcctcagcctcctaagtacctgggattacaggcatgtgccaccacacctggcttaaaatactatttcttattgaggtttaacctctatttcccctagccctgtccttccactaagcttggtagatgtaataataaagtgaaaatattaacatttgaatatcgctttccaggtgtggagtgtttgcacatcatttaattctcgtttcacctttgtgaaacatgcacaagtctttacagctgtcattctagagtttaggtgagtracacaattacaaagtgaaagatacagctagaaaatactacaaatcccatagtttttccattgcccaaggaagcatcaaatacgtatgtktgttcacctactcttatagtcaatgcgttcatcgtttcagcctaaaaataatagtctgtycctttagccagttttcatgtttgcacaagacctttcaataggcctttcaaatgataatcctccagaaaaccagtctaagggtgaggacccaactctagccycycttgttttgctgtctytgttytytctttctgctttaaatyaataaagtgcmctkascaaaaaa

SEQ ID NO: 53264 - DNA, 594 bp, Homo Sapiens
ctgtggaacgcatctccagtgccatctgggggccagttactgtacctggtccccaggcagagctcttggcctggcagcatccaggcaggtattaagtgcccagtgatggtggcacatgggtggggacggagccacatccaagtctagccctctgattaggaggatgacagtcttggaatttcttgttctctttctcctagggttctcgttctcccagctccagcctttctagtttcgaggcatgaggcaaaccattgctgtgggaatagcagtgaccattggtagggccatggtggccgggagaggaaacctcagggtcaccccagagcctgtggggagacggagggtgagctgttgttggagctgcagaaacgccttgaagggcagcatgggcgatgaggaatgccattgcagcctagaaattcggtttctggaggtttagcctgattttgaagagtatttaagaacagagggctccagaccaggtgtggtggctcacatctgtaatcccagcactttgggaggcagaggtgggcggatcgcctgagatcaggagttccagaccagcctggcccacatggtgaaaccctgtct

SEQ ID NO: 53265 - DNA, 261 bp, Homo Sapiens
ttatagttgtagtgaagagagtagagagctaatagggaaggagaagagagatgtcaagacacttacatgctgatgagctataagggaaagatgaaaggattcgcctgagcaagggatctagaagaatagaaatgtttggatttaagatttcgaagagaccagcctggccaatatggtgacaccccgtctctactaaaaatacaaaaattagcctggcatggtggcgtgcgcctgtagtcccagcaactcaggaggctgagg

SEQ ID NO: 53266 - DNA, 707 bp, Homo Sapiens
tgacctaaactcgtgacttctgaactcccatttcccccacttttggggactaacttaaaaaaaaattcctttaagatttcttcttaaaagctaaattccgggccacgtgtggtggctcacacctataatcccagcactttgggaggctgaggcaagaagatcacttgagcccaggagtttgagaccagccagacccatttctgcaaaaaaataaaaaattagccgggcatgctgtcatgtgccttcagtctcagctacttgggaggctgaggcaggaggatcacttgagcccaggagctcaaggctgcagtgagctatgattgcgccactgcactgggtgacaagagcgtgactctgtctggaaaaaaaaaaaggaattcctaaacaggcttgttgacttcgcagactgctttgggcttctggatgccctcctccagtacacatcgtatggggtgacaccgcctagcctcagtcactctgggaaccgccaggccctcccagtggagcaggctcagtcactccagagaggatggcaagtaatagagatgatttccttttgtggatgttgctgctaaccacaggaaaccatcttcatcggtactccaaggttctggaggcccatttgggagacccaaaaactcgggctctaccagctgtcacgccttgtttgggccagcacagcctttaaagaaaagcggcccataact

SEQ ID NO: 53267 - DNA, 649 bp, Homo Sapiens
  misc_feature (617)..(619): n is a, c, g, or t
ttgaatttaggtgacactatagaagagctatgacgtcgcatgcacgcgtacgtaagcttggatcctctagagcggccgcctactactactaaattcgcggccgcgtcgacgtaagcacttctcagagaatgctattgaagggataacgcccagggaacaatgaagaggataagatgaagaagctgcaattctgcctgggtgccttggggtgtattttacttataacctgtgtgttttccacagtccctgcttcccgaggttgtggtattggtaggggtaacaggccaatcggtgtggcttcagcttctgaggatctgccgggtgctgaggtctctcaaactccttgcacaattccgtcaaattcaaattattattttggtcctggtcagggccctcaaggtgatttgactgttgcaagctaaagcagggggcaaggtagataaatgtgagggcttaacatagaatatgaagcaaattggccgggtgcggtggctcacgcctgtaatcccagcactttgggaagccgagggggatgggtcatgaggtcaggagttcgagaccagcctgaccaacatggtgaaaccctgtctctactaaaaataccaaaaaaaaaaaannnaaaaaaaagtcgaacccgccgcgaatttat

SEQ ID NO: 53268 - DNA, 667 bp, Homo Sapiens
atttgaccggtagcaaaatcgaaagcacgaaatagatcaaggttagggagccagacaaagcccttggaagagaggcagtattgcagatcgaagcaagcagttcagagtctatgaggcctgggaatttaaaagcaggaagagtaagaagcagaaacaagaagctccatctgaacagactcctctctccaaccttcatgagacccacagtgtgtgatgggccaccacagcactggcttctagacttttacagggaagccagtgaacaaattacctcgtcacccagaaaacaaagagctcaggaactattttggaagttccttccagtctaagactatggaactcagaatctagcaggtgtgttcctttggatagcaaaactaaagatataaatatgaataagaaattctttgccacttctcctgggcaaggttatactttatgccatctactgagataaaccagatgagtcagtttgcttctgtcagttgctgtgtcacagatgacatcttctcaaaataatattatctcacagccaagaaatagcgcttcgtttactgtgtttttctatcctgaaactaaatgggcttacgcttcatagtggctaagatactccacacacaactagtacccatagatcttttctcactgatagaaaaaaaaaaaaaaa

SEQ ID NO: 53269 - DNA, 375 bp, Homo Sapiens
  misc_feature (350)..(350): n is a, c, g, or t
  misc_feature (355)..(355): n is a, c, g, or t
ttctttatgtccagaagttgcagcacctttctttgtctctggaatgcccaagatctctactgcatcctgtagacatggagggtttccccccttattctgggtctgattatttttaaagaaacaccctttccttacccatcatggagacactactaaccttgtatatacttttattagagtgctgataacaccatattacagtagcatacttacatatctgttttcttaactgtgagctccttgagagcagggactgtgtgtttttgcttttatttcaccagtactcagaactatccacagtatagaaaagcactcaataaatgggaataaatggaaaatggaataggatnaaatnaaatggattttcacttgtta

SEQ ID NO: 53270 - DNA, 590 bp, Homo Sapiens
tacatggcctgagttcaaattgttcctgctgtgagtactgcttttcagcttcaagttattcttatcggccacagtactgtttattccacttagtaacagttctgtttacagagcactttaacataaattctgatttttaacatgaaagctgactgatgttggtatttttattttaatctttagagatcaagaaatttttttagtgacagaataaggactgtattgatccttaaatccgcccctcaccacaatagaggaaagaagcaaaaacatccttgactcatgtattgaagggtcttttttgagaagggtcagtttttgaaaaattatccagaactgagaacatctgtcatctgtatcacatctaaagattaacagtgactgatgaccaccagttacttcatatgaaggtgggaaaccggatcagttatttgtccactaagttggtgggtgctttttgacaaaagcccgggaaatatgatctgcaatttctatcgagtgatgaagagggggccttgaaataatcctacggctgggaaattattctcctcctttttaacccgggaatttctccggcgtcataaaatttt

SEQ ID NO: 53271 - DNA, 712 bp, Homo Sapiens
ccccgcgtccggcttttgctatacagcttacagttctaatgcctgatgtagagatgatgaatttctcctttttaaacctatcttctgtttactccttttgcattatgaaggccctcttcaatgatgtatgtttctgatggaatcagaaaatttcacactagaaaagtgtacctaacttgattcagtgtgagctcttgggacagggaggggagccaggggtagagcttaaagaagctggctctgtaagagttgtatatcaaagtaccttttgctacaaggtgcatatagaagtctaagataagaaatgtaccctctatactttatttttcatgcccctatcatgtttggtgtgccttaaatcttacctttaaatgaagactctatggattgtttacaaatgaagttttacactaggaccagatcgtccatacatgattggtcttctacaataataatgttcaattctttcattttaaatctttctttagggtcatataaagattagttctttcagaaaagctattgctttggtacatgacttagtctaaccagttgggtaatgctgctttgaaaaatagtttgtccctctccccattccaaaaatgaatccattcagtcagaaaaaaagattatcctactatttgtagatgattgctaaggcttgaaataggaaaggggaaagaagggatagaaaagtttcaagtccagtagt

SEQ ID NO: 53272 - DNA, 449 bp, Homo Sapiens
cccacgcgtccgcccacgcgtccgcttcctgtctcctctcgtggtgtgtacttgactccccttctcgccagatctcacaggactttcagatttaagcaatacctggccaagaaacaaaagcaaaatcattccattcccccagtggattcagatcaaaactggtaataaaatcaggtacgactccaaaaggagacattggagaagaacgaagcggggtctataaggaattgcacgtgagatggcacacatatttatgctgtgtgagcattacaatcgcgttaccatatcaagctgaaaatgtcaccactatctggagtgttggaaatgttttattgggaatatgttttttctctgaatctgctatgaacacgtcagttgggtgggttcagtaataaatatgtgagacttttcatttcaaaataaaaaaggcaaatgatgtaaaaaaaaaa

SEQ ID NO: 53273 - DNA, 416 bp, Homo Sapiens
gtttctgagaatcagcactgctagtggagatgggcgccactactgctaccctcactttacctgcgccgtggacactgagaacatccgccgtgtcttcaacgactgccgtgacatcatccagcgcatgcatctccgccaatacgagctgctctaagaagggaacacccaaatttaattcagccttaagcacaattaattaagagtgaaacgtaattgtacaagcagttggtcacccaccatagggcatgatcaacaccgcaacctttcctttttcccccagtgattctgaaaaacccctcttcccttcagcttgcttagatgttccaaatttagtaagcttaaggcggcctacagaagaaaaagaaaaaaaaggccacaaaagttccctcctcactttcagtaaataaaataaaagc

SEQ ID NO: 53274 - DNA, 466 bp, Homo Sapiens
  misc_feature (453)..(453): n is a, c, g, or t
tgggaagagacaaggtgagcctgcttttcccaatactgggaaaatgaattaaactagacgggggacgtcagagaacagaatgccttgcctttggtctgctttttaatatattttatgatcccaaattttacagaaagtctcaagggtttctgtgttttttaaatggtcaaatatgtgacatacatgtgtacatagatcacagagccccactgtagttttttaaatgagctacatttaccttggggaagagcccctccccccccgccatcataatattgtgaatgtaaagagagattggttcacaatgagaatgtacagtaggctcctataagggtgacaggattatatgcagaatgactttgaagagccaaaattgatttatttatgttaagtagtgctaagaaggaatatttgtcccggagtgaggcatttgagatagagggggaaaagcanaaaaaaaaaaaaa

SEQ ID NO: 53275 - DNA, 1068 bp, Homo Sapiens
ttacggggtttcactatgttggccaggctagtctcgaactcaagttggcctcaagtgatctgcccaccctggcgtcccagtgttgggatttcaggcatgagccactgtgcctggccatgtaatagagacttttaatataggagggtgtaccagaagcaccagtttcctgtggcaaacagaattattcctgctgtatttgtaatctggtgccacgaggtagcccagatcccttcagctctgatggaagagcattgcttcagccgtaaatggacacctgcagaaaccttgcaccgatggatagtctccctcagctccgtgccatcgctgcagaggctgttatggacatcactgcagcccagtggctctctctcctggtctccaccatatgagttggcttctgtttctctcctgttttactttgcctttagctgtggtctttcaaaccaccatccctccttatcttcctctgctggttcctcagatcttcctctgatggcgctgcctccatgccatgccctctgccagttctatgtggtgaacagtgagctgtcctgccagctgtaccagagatcgggagacatgggcctcggtgtgcctttcaacatcgccagctacgccctgctcacgtacatgattgcgcacatcacgggccctgagccaggtgactttatacacactttgggagatgcacatatttacctgaatcacatcgagccactgaaaattcagcttcagcgaagaaccagaccttttcccaaagctcaggattcttccaaaaagttgagaaatttgatgacttcaaagcttgaagactttccgattgaaagggtacaattcggcatccaactattaaaatgggaaatggctggtttaaggtgccttttcaagggacctcgaaggaatattggtcagtctttaaggggtttgggcttggatgccccaggtaaaaagtcctttttggctcaaaaagaaaaagggacttagggcaaaaaatctgttccgggacctatttcagtattaaatttttttaaggagtttcccccttgggaaaatggaacttggggccca

SEQ ID NO: 53276 - DNA, 790 bp, Homo Sapiens
agcagaactcttactggtagaaaaaatagacctgaattatgtgtaactttttggaaggtttaatctgatatcaaaataatcattgaaatacaattccattgtaaagttgtacagaaagttatagagattatattgtgatgctggaacttggagtgagacacacatcatttggcatttgagttgaatggtaattcacagtaatgctgccgttgttcgggacttaaagacacttgacctgtttgggctgttgccacttaaaagttcatgaccacaaatgtccacagtgtcttcctctgaggaaactcgaatcctgaaatggaaattctttgtggcagataactggcttatgacaccttgaaaagttcaagtgctcatataacacaccacactgaaccccctttcctacagcaatatgttcactatgttaccaatttgcaacttgtgcttcaatagtggaatctactttcattgttaacactgagctaaagaaaaaaagccgtgtgttttatgaatgaccttatctgtttcctggataatacctttaagaataatgtcctgagtcaggcgtggtggtgcgtgcatctagtcccaactatttgggaggctgaggcaggaggatcgcttgagcccaggagtttaaagctgcagtgccctgtggttgcacctgtgaataactgcactccagcctgggcaacatagcgagacctcatctccaaaaaagaaaacaaaaaacaaaaaaaggaatgatgttctgtagagatggcctttcacttgaggagtactcagtttt

SEQ ID NO: 53277 - DNA, 833 bp, Homo Sapiens
atgaaaactttcagaagtctttctttatccatggcatgcccagggttttacctgaatctgatacaggatctatataactttactaggacttttgattgttgactccaggcttaggtatatcagaaggttctttttgccatttggcctgtggatgtctgagaagatcattcacaatacatgtaaaattcaggtaggcctaaggaaaggccagcctgtagaaagcaaaatggcagtgtctgttctccactgttggaggcattatgtaatttaagtatcctgttagccactgtctttctgctaattaagtggggctgaacaagtaagcactaataataccagtgaaccacttgggcaccttgtgggtagagttttgctgccacctagtggaatgggatatcattgcttccatatcaggttcacaagcaagttaagtgggcacagtttatttctgtgtagctcaggctgtaatcttgaaagctgaggagatacccatgcctctcagactcattagctgggtgtcacattaccacctgcacattctgacccaccgcatcttaatatgttttgtcctcttggagaaactaggagtagaagtcaggatatggtaggtaagggggaaaaaggaaagacggcttgatagctatgaatgcatgaggagcgaaatgttgactcagttatctagatcatggtctccaaacctgatgctatttccttacaaaaatatttgttgagcatgtgtccataattatatgtattgaacaatgaaaatatgtgtcacaaatgtactgctacactaatgtgaacattatggaacaaaatttgaaagagtgaaa

SEQ ID NO: 53278 - DNA, 513 bp, Homo Sapiens
  misc_feature (284)..(284): n is a, c, g, or t
cgcaccttgaggcccaacttcctctctccttggatgttttgacgggttattgcaatcttttctgaaattgaatttcagtttgcttcaatagcatttcccagtaaataggagtgactctggtatctcgtttgtgaatcttgatgtaataatcggaggtaattgaagcgtgcacaaaccacagagacttatgacatgtttttaaacaaggattgactgatacgaaactaattgaacaaaagctggaaatcagattcctccaagaaaccttgcacagaatacagggnctttcataatggcactgagtttgactttaaaagtggcgtgttcaagtttccttattttcctgaaggagtttaggagtaagttactgacaggcaaggttgtgacccaatgaccagagttaatcatctggcgactggaattaatcttttgtctgtcctgtggtttggattaaccagggtcggtcatcccctcatgccttggtggcccctatgaattaaaaaaaaaaaaaaa

SEQ ID NO: 53279 - DNA, 832 bp, Homo Sapiens
ccaaagaagaccccacagctgtggcctgcacattcagctgcatgatgaagttcactgtcaaggactgtgatcccaccactggggagactgatgacgaaggctatgaggatgagtatgtgctggaagatctggaagttactgtagctgatcacattcaaaaggtcatgaaactgaacttcgaagcagcctgggatgaggtaggggatgaatttgagaaggaggaaacgttcaccttgtctaccatcaagacacttgaagaggctgtgggtaatattgtgaagttcttgggaatgcacccttgtgagaggtcagacaaagtgccggataacaagaacacccacacgttgctcctggctggtgtgttccggggtggtcatgacatcctggtgcgctcccggctgctgcttttggacacagtgacaatgcaggtgacagccagaagtttggaggagctgccagtagacatcatcttggcatctgtgggataagaggccagcctgcataggacctcatacccttccccaacactacctggaagttgtgccttcctcatgaaactggcagaaaccccttcccaagcttctgtattgaaaaacaattaggaatcattgcagatttttttttattctgctcccacctcccacccgggactacttgctggtgactttttttttttttttttttaaataggggatgattttagcttgtcctaaatcttgctgtccacccttccaggaaagggacattgtaaatgaataaaacattctcaactcctcttgaatctatcccccaagaaaccatcttatcccctggtaataaaatcagccatgtc

SEQ ID NO: 53280 - DNA, 1117 bp, Homo Sapiens
gtccggaatttccgggataagaaaaagtgtggaaaggaagagaactgattcctactgaaaattcaaattctattaccattctaactttcataaaaagttgggatcaagaagcagctgatttcctgccagggcttatattaggggggtgattcttaaaggacattaggattggtgctcagaaatggttaatcatgctgtgtgctagccagggccagctggtaccttctttgccatgagcattcaagggacagctaacctttattgacaatctatattgcaaaagtcaggaaagaggttgtgagctgattggattaaagacctggcacttcagtaactcagcacgcttccacttcactcaacttaagagagttcattgacagtgttaggatgtgaaggctgggaaacacttattttgcttcaagagttccacttggctctcccaaataggtacctcaaaaactgttagcaagcggcatttggatgtcttgacaggggctttgcagggatttttagggttttttccacattgtccacattaatggttggcatgattgtgcttgcaggccaagaaatgatcataccccttgccaaaggtaaaaaaaaaaaaaaaaaaaaatgagttgaaaattgaagtgacctctttccagctgacttgcaggcttattttgtaacctttcctcatccagtttttcctgagaacctgggtttatctctagatagctgttcaggttttttagctgaggggtaagtatcctagctgagagttttgcatctttggggctgggtttgcagtgggttgtgtttttgcataaaaagcctagtctttgccacagattagggagctacccactaatgaagcccatgggttttattttcgaaagcacctgagggtggtgaaaaccacccctggtaccctttcctgaaattggcttagcctaatccagcccagtccaaaggataatatattatattccccatcaagaacttcaaaaaaaatccggggaaaaaaagtaaaaatcccccttggggggccccccaggaattccccttaaacatttggaacccttcccctgggggaaggctcacggcctttggtctccaaatgaagggttttacc

SEQ ID NO: 53281 - DNA, 665 bp, Homo Sapiens
acggtttcattcattggctcccatgtactatcgaggctcagctgcagctgttatcgtgtatgatattaccaagcaggattcattttataccttgaagaaatgggtcaaggagctgaaagaacatggtccagaaaacattgtaatggccatcgctggaaacaagtgcgacctctcagatattagggaggttcccctgaaggatgctaaggaatacgctgaatccataggtgccatcgtggttgagacaagtgcaaaaaatgctattaatatcgaagagctctttcaaggaatcagccgccagatcccacccttggacccccatgaaaatggaaacaatggaacaatcaaagttgagaagccaaccatgcaagccagccgccggtgctgttgacccaagggccgtggtccacggtacttgaagaagccagagcccacatcctgtgcactgctgaaggaccctacgctcggtggcctggcacctcactttgagaagagtgagcacactggctttgcatcctggaagacctgcagggggcggggcaggaaatgtacctgaaaaggattttagaaaaccctgggaaaacccaccacaccaccacaaaatggcctttagtgtatgaaatgcacatggaggggatgtagttgcatttttgctaaaaaaaaaa

SEQ ID NO: 53282 - DNA, 577 bp, Homo Sapiens
tgaattcagagcctgaaggtgttaaattggggtatgtggtttgattgataaaaagttacctctcagtattttgtgtcactgagaagctttacaatggatgcttttgaaacaagtatcagcaaaaggatttgttttcactctgggaggagagggtggagaaagcacttgctttcatcctctggcatcggaaactcccctatgcacttgaagatggtttaaaagattaaagaaacgattaagagaaaaggttggaagctttatactaaatgggctccttcatggtgacgccccgtcaaccacaatcaagaactgaggcctgaggctggttgtacaatgcccacgcctgcctggctgctttcacctgggagtgctttcgatgtgggcacctgggcttcctagggctgcttctgagtggttctttcacgtgttgtgtccatagctttagtcttcctaaataagatccacccacacctaagtcacagaatttctaagttccccaactactctcacacccttttaaagataaagtatgttgtaaccaggatgtcttaaatgattctttgtgtaccttttctgt

SEQ ID NO: 53283 - DNA, 884 bp, Homo Sapiens
tgtttcacagagccagtttgggatgggctgcattccatttatgctgtatatagtttgaattatatataaattaccccttcttctggccacccctgctcccatcttagtattttgcaagatctaatcagttgtacacctggtgcccctcgcttgcttcaatcatggttatttgatggcaaaatcgacctcttgtcgctgaaggagagagaaaagatgtgtgtctgattggtcctgggattttttgagctgtgccatttatggtactctttgcctatgcatcccctttttagattttttttaaattttatcttactgtttttataatttctattgggaagaggcttgkgaccgagtaccaatbttgagtttctttttctgtccacaagtaaattaatatctgctctgaaatgtcatttatctactcacacattcttggggaaaaaaatcaaatgtcagtcctagcagatgttgcatgtaaattggtagcaagtaatgattacaacccagaggattaagaattttgtaacagaaagctctatgttttaattttttatatacaattaggataattagcattgtcagactataaacctttgctttttaaagtttatttttactatttctttatcactttattgtatcatcaccattggtttcataatgtaaatactatatgttgaacaaattaaatgtcaaaattttttattaccatagtccatgttaatagtggggctttcaggtgtttagagattttttttgttgttgttaacattcattgcaaaagtactagatggtgtataactctagagttgaattttaagggattcccwaatatgtatactatctttttatctgaagtaataataaacaatgatcttgaagtg

SEQ ID NO: 53284 - DNA, 579 bp, Homo Sapiens
atgatgatttccatatttatgtctacgatttggtgaaaacatcctagatgtcatcacaaactctgccaaatttgtggaactatgaaatgtattatttgtagacataaagacttgattgctttccagtttaatgaaagcttaaatgtccctgcgaacccacaatctctgccagcagaactggttttgttctgaatagtacagattgatgtgaacacaaagcattttgtgtaaggagaacccctttcttttaaaagaagtctgtctatttcgaggggagttacaggcaagtttggtaaaagttaagctagtatcatagtcatttaaaattgtaatagatcttaaccattttccccctcaccctaactctcttattctgccgccacaatgcaagcatagtttgatgttttcgttattgccttttttgagatgtatgtatctgtatctacctatatctatatgtgtgtatacatatataatatatacacacagatacaagtgtacacacacacaccacacaccacacacaccccactggcagtctttgtggattaggatgggggtgacataattttcttgagt

SEQ ID NO: 53285 - DNA, 498 bp, Homo Sapiens
aagttagcagagttattttggccctgagaggctgtgatttaaaatattcagaaaatgtagttgaagtagttgatttggcttcaacttgaattccctatgtaattgcagggaattcaagggactctgaattcaattcagggaattcaaacagacctctttgcctttgagctagttttccccctaggcttttcttagcctgcaaaaatcctggttatctttgaggacccagttgagttggtcttgctcctaaatcattgacaagcccctaccctcaggcagagcagtttgtcctttgtgctccaaatactttttgttgtcactgtagttagggtttgcggtttaatcatctattgctgctgccagaaagcagaatcttggagggtagggagctttatatctttgcgagcctcaaccaacacaaagcttggcgtcagattgaattcaaattcaccttacgttgctagtatgaaaccaattgtgttgttgctttcatacaaa

SEQ ID NO: 53286 - DNA, 748 bp, Homo Sapiens
cgaaggcgggccacctcaggaggcaagtggccgcaggtgctattctttcctgagggcacctgttccaacaagaaggctttgcttaagttcaaaccaggagccttcatcgcaggggtgcctgtgcagcctgtcctcatccgctaccccaacagtctggacaccaccagctgggcatggaggggtcctggagtactcaaagtcctctggctcacagcctctcagccctgcagcattgtggatgtggagttccttcctgtgtatcaccccagccctgaggagagcagggaccccaccctctatgccaacaatgttcagagggtcatggcacaggctctgggcattccagccaccgaatgtgagtttgtagggagcttacctgtgattgtggtgggccggctgaaggtggcgttggaaccacagctctgggaactgggaaaagtgcttcggaaggctgggataccaagggtttggtggacttccgagatgtggcccttgcactagcagctctggatgggggcaggagcctggaagagctaactcgtctggcctttgaggtaatggggggtggcggtggtggggggtgcttagtggctatgctcaccccgctccaggaggcctattttggtatgctgtttccagtagcttctagatactaggcatttggtatccaacctagtgccacagtgcctaaaactgcagacccccggctctatgttgagacctagctgggcacaagaagaaggaagaa

SEQ ID NO: 53287 - DNA, 410 bp, Homo Sapiens
ccgcagctcccttgccaaaccctggggttttaagtgccccacccaacttgattcagcgacccaaggcggatgatacaagtgcagccaccattgagaagaaagccacagcaaccatcagtgccaagccacagatcactaatcccaaggcagagattactcgatttgtgcccactgcactgagagtacgtcgggagaataaaggggctactgctgctccccaaagaaagtcagaggatgattctgctgtgcctcttgccaaagcagcacccaaatctggtccttctgttcctgtctcagtacaaactaaggatgatgtctatgaggctttcatgaaagagatggaagggctactgtgacagcttttgatgccagaaaaggcttctgttcacaacagtggcccatggagaaag

SEQ ID NO: 53288 - DNA, 927 bp, Homo Sapiens
  misc_feature (642)..(642): n is a, c, g, or t
  misc_feature (698)..(698): n is a, c, g, or t
  misc_feature (804)..(804): n is a, c, g, or t
  misc_feature (883)..(883): n is a, c, g, or t
  misc_feature (891)..(892): n is a, c, g, or t
  misc_feature (913)..(913): n is a, c, g, or t
ttagtataaatatatctagacattcagactgtgtctagcagttacgtcctgcttaaagggactagaagtcaaagttccttgtctcactatttgatctgctttgcagggaaataacttgttttttctcatgtttcatcttctttttatgtaaatttgtaatactttcctatattgccctttgaaatttttggataaaagatgatgttttaagttccaatgagtattactagttactcaataccacttattgagtactctgtttctacgtatgtagaatgtatagggatagaagagttgaaaagggaaagcaaaactcctcaagtagcttccttaaaatgtcattcataggagatgtactggaattgctcattctgtgactttatttgtgtcctaaacattcttcagtgaaaataattttatttcagtcaaacatttatgaggaaatgagatcacatctttgtcactggatgctacttgaagagggagtactttgtaaccactttgatatgctgttatcaccaccccctgccctctgctgccataatcacacaaatttaaaaagaaagaaaacagtcttccatagatttttaaggaagaaagggcccaagccaggagatcgcttggttttcttccagaagttanatggggggatctgaagatttgaatgtttggtctgctttgaaatgtatgtcttttgngatgtattatatgcctagctttataatcagtataaattttaattattccaggaatatgcataatattgaaatatttcatgtcctattttaatagaaaaactcaggncccaagtaacaggtgatagaaagttagaaaaacttttacttagaatttgtccacctagtcagagccccagaaagaattntcagtggnnaaaatcaatatataactttantgctaactagcgcc

SEQ ID NO: 53289 - DNA, 938 bp, Homo Sapiens
  misc_feature (714)..(714): n is a, c, g, or t
ttcactaagaacaacttctttgttgagaagaatccaactattgtcaatttccctattacaaatgtggatctgagagaatacttgtctgaagaagtacaagcagtacacaagaataccacctatgacctcattgccaacatcgtgcatgacggcaagccctccgagggctcctaccggatccacgtgcttcatcatgggacaggcaaatggtatgaattacaagacctccaggtgactgacatccttccccagatgatcacactgtcagaggcttacattcagatttggaagaggcgagataatgatgaaaccaaccagcagggggcttgaaggaggcgtctagggctttgctcccaagggctgtggctgatgatggtaaataagaacacagaagctgtagctgaacacaggctggctggtgggcttcctaggccagcccagcttgtatgggttctggctacaccagagcaccaagagcccacttgcctgggatggccccacactgtcactcagctgttctttgatcatttttttctagattgatgctcctttctcccatgcattgagctcccatctagcttcagcagggcagaacccttctccagatgtgtgtaacttatgtctgagtatctgggagtagttgaagaacagataattccttccaaacatcaagccttgggattcttggagcaagcagaaagccagtaacttcgnctctgtagaagggtggagggattttcctatgggttccccccattttcctgatttgccttttttacgagggaataaaatagcctccctgtttttaaacccaaaaaaaaaaaaaaagggccggccccttcctaaaataatcccctcaagggggcccaagtcttaccccgtaacccacgcttttccttggtccccagtgggtcccccatatatgcacccccctattt

SEQ ID NO: 53290 - DNA, 1091 bp, Homo Sapiens
  misc_feature (813)..(813): n is a, c, g, or t
  misc_feature (930)..(930): n is a, c, g, or t
  misc_feature (1014)..(1014): n is a, c, g, or t
  misc_feature (1017)..(1017): n is a, c, g, or t
tataccacaaaattttcatctggccataggaattcactggtgggtgtaaaattaatgactaaagaaattaagtgacaaatacataaaagaaacagacttgtggggatattgttttaaggtgtattaattactcagtgatgataccactcaatagggcatgccactacttttcttaagatgctaattatgaagcagtgctcacaggcattttttaactagcaaattagtagatggacttttggggtctgtcactttttaaaagtatttaagacttaaattctattagcaccacagtctgccttcagtaatacacctaaaatatttttcaggaccagaagcattcagtttgaaaatttgcagatgcaaaccagtattattactaacgctctgggtcaaagattaggtttttaatattaacagtagtctggtaaatatttagaagtctggcattgagaaacaaaagcttgtacctgactagtatttttatttaaaaaaattagttctgttagcttatttaaattgtgttttatttatccgtagaatttatatttatttcattcctttcatctcactgaaaactgtctgcaggccctttgatttggattagatgtgtgaagtactgtcttttgccaaaaacctcaaattacctgttcttttcaacgtagtgggtttgtgcttgtttggagatcagttcaaaaactatctgtactatctgtactgcctctgatgttaagattttatgtatagcataaggaagctagctctgactatattttcctaagaataaagacctatttttgtagcatgtcttangatctcccaggagtccagaaattattgtgggtgtccctccaattcatcactcttcacctaacagcttttaagtagacacttgggaatcttttagagggtctgtcgcccttttgattnatcatacattcgaagtaactaggccaatgggtgaaaaatttctctcagaatatccttccagtttgcaatccacccttacctggnaangatggaatatgaaataaagtgttttttaagccttgggccctttaaatttttgtgaagggaaaaaaaatttcctg

SEQ ID NO: 53291 - DNA, 396 bp, Homo Sapiens
gcgtcgacataaaataaatatccttgtacttctttgtgcatttgtttttttactgagctaattttaatgatttcagcaaaagttattttgttattgagtgatgaaacaaaagatttttgagggtgttcatgagcataagtatcatatagtcacttatggttgttgtgttcctagtacttagtacaaggtatcggaattgttctttagttaatcttttatcttgagaagttaaatcttggtgtaatcttatcctcatgttcatataaagatatgtggagtttgtagtgaggacttagagccgggtacaatttcatggttaaattagaaatgcttttggcagtgttaacagctcttttagaatttgtctagcaggcttttcagtttttgccagaaagc

SEQ ID NO: 53292 - DNA, 343 bp, Homo Sapiens
aaaaaaataataataataaaatgaaagaaacaatcaccaccaccattattaaactgtaacttgtctagtaaattgtcactagaactatttgctgtgggcatttcctctattctgttacgtcattaacagtgccttactgtgcaaggcaccaaaggacataaatacgtacttgcaaagattccagatgagctgttcatgtgggccccttgctgactatattccagccacttcagggttgtttgtaatgaccgttatagagaagggctcgacctgcagaagaaactggggtgtttttattctcattcaacaaacccaaataaaaacagtatatgtaaccaaaaaa

SEQ ID NO: 53293 - DNA, 693 bp, Homo Sapiens
tgaaggtgctgccaaactgctgtggtctgagtggacaggtgcctcattagcttactattgccatccccctacatcttggactcctcctccatattttaatgagagtattgtggtagacatgaaaagcggcttcaatctggaagaactggaaaagaacaatgcacagagcataagagccatcaagggccctcatttggccaatagcatccttttccagtcttccggtctgacaaatggaataatagaagaaaaggacatacatgaagaattgccaaaacggaaagaaaggaagcaggaggagagggaggatgacaaagacagtgaccaggaaactgttgatgaagaagttgatgaaaacagctcaggcatgtttgctgcagaagagacaggggaggcactgtctgaggagactacagcaggtgaacagtctacaaggtcttttatcttggataaaatcattgaagaggatgatgcttatgacttcagtacagattatgtgtaacagaacaatggctttttatgatttttttttttaacattttaagcagactgctaaactgttctctgtataagttatggtatgcatgagctgtgtaaattttgtgaatatgtattatattaaaaccaggcaacttggaatccctaaattctgtaaaaagacaattcatctcattgtgagtggaagtagttatc

SEQ ID NO: 53294 - DNA, 869 bp, Homo Sapiens
tgcctcacactgtgtgtgattttgtttcttttgttaagcagcacttatgtagactgcatttccaaatgtgttgagcactcagagtgtagtcaacagtaagttcttttaatgaatatcagttttaatttatagactgccatggccttaaaaatattctgtacaatatactgcactgtgttgcacagacactacttgcttttctccattcatatttttatgagtagaatctgggcttttaaatttctcttcttattctttgaagcatgttgcatactaccctggtgggatggatggttctgtaaatgaagggatatttaaacttgctactgttgttcaacaccattaatggtcagtgtgaaccattacaaagaatgtggcaacttgcttgtgcctaaaaggaggaattggaactagaatgtgtgactctgtggggactgcataggtttgttaattgacctatagctaaaccttaatgtgtttgtgtgtctatacattgctttccgcatttcaagacatccagacgctattaccaacattttcctgtgcattaacctctgcatgtgaaaacttttaacagttactgaactatgtaaatatgtgaatttttttatttaggtggatgcattttttgtctgtttactgctcttctcagctttattcaataaacttgcattttaagggttgtattggcaattttaacttaaaatgtgcatcatgatggaaggtgcagacttttttggaagtttccgagaagagggtctatagaacatttgtcagaaatcagatcagccctcaaaaaatggggtctgtgggcctagttaaatagaaataaacttttaaaatatcaccaaaaaaaaaaaaaaagggcg

SEQ ID NO: 53295 - DNA, 433 bp, Homo Sapiens
  misc_feature (395)..(395): n is a, c, g, or t
  misc_feature (429)..(429): n is a, c, g, or t
cctctgcagcgcgcaccccggcggggctttggctgtgacgcggtcggggcgcggggctgggctgtggccccgcggcgccgcctcctccctggtccctcgaaatcgtggcatctcacttctgagaacgaaatctcgcttcagtcactctgccgaaggcgctgacggcatcgcggccggaacctctgggcccggcccctcccagggccgccgctccgtgggaaaaaacagctcctccatttccttgaaaactgaacgattattaaaaatagattaaacttcgctggaaatgagtagccaggaagttcaggggagggtgccgggtccttcccgggcctggcgtgtcggagccacccaggtcccgcagctgccgctgagaaaatgcaaatatttgttgngacaagaatcacatacatttactttaaatatagntgcc

SEQ ID NO: 53296 - DNA, 963 bp, Homo Sapiens
attttacctatataaaatatatatatatacacatatatgtatctatattccttgtttctttgcctgcttatactggccataaaagagggagctgccttcaatgtataaagtataagaagagtgccaggaatgccataatggaggctttggatctgaatttggaccatttcactaaagagaacatgagtttgctcagccctttcctcacaagagggagggccccggttccccagacttctccacgcgctggctccataaaggccagctttggccaggctgccacaggggcctgaggagctcactctgggcctacctggtttcagttagagggtcctcctgttatttttccatttaaaaagtatgtcctcagaaaactgtactggaaggatgggtggcaggaactgtatagttcagcttccaacacttggaacagattaaacaagggaatcttttaaataaaaacgtataaaaaatcaccaacaaacagaaccccaacaaaaaaaacaaaaaaagggggggggggccaaaaaatcccccggggggggccccaattatgggcgtaccccccgtttttgtgttacaagagggggcccccaaaataaggagaggcgattttaataacgggcaaggaccagcaggcccggcctgttatacaaacagccgtgcggcaggggggcaacaacccggcgacaccgcgggggaacccttgggggaaagagaagcccgttacacatctcggggggcggggcagcaaacactggggccgcaaacagtcccctcccgcaagaagattttacagccgccgaaggggggcaacacttaacacaacatctgcaacgcgcacaaaaggcggtccacaccacacacgcgcgaattagaggctgccggggcaagaaagactgactcggccacaccgggaacattaccttccggaagacactttcacccgagaaggagagagac

SEQ ID NO: 53297 - DNA, 612 bp, Homo Sapiens
attgaaaagggatgtctagagggatttaaacagctcctttggcacgtgcctctctgaatccagcctgccattccatcaaatggagcaggagaggtgggaggagcttctaaagaggtgactggtattttgtagcattccttgtcaagttctcctttgcagaatacctgtctccacattcctagagaggagccaagttctagtagtttcagttctaggctttccttcaagaacagtcagatcacaaagtgtctttggaaattaagggatattaaattttaagtgatttttggatggttattgatatctttgtagtagctttttttaaaagactaccaaaatgtatggttgtcctttttttttgttttttttttttttaattatttctcttagcagatcagcaatccctctagggacctaaatactaggtcagctttggcgacactgtgtcttctcacataaccacctgtagcaagatggatcataaatgagaagtgtttgcctattgatttaaagcttattggaatcatgtctcttgtctcttcgtcttttctttgcttttcttctaacttttccctctagcctctcctcgccacaatttgctgcttactgctg

SEQ ID NO: 53298 - DNA, 914 bp, Homo Sapiens
aggacaggtaatagggagattaaaatacggtggtttcagtggttttggtcatgtgtccacaggagaaactaaccattcagttgtcttaattttagttcgttctaccctgtgaggagtttgtttccatcagttgttgactttccaaaatgttgcattaagtaatagttgtcactctgttggtctcatggtcaatatcaatcagactttcatgatctctactaattattagtagagtcctgtactatgtctgtaactactaagtttaaagaaaagcacatagtcacttcatctctttttttcttagcctacgctcactccccaacccatcccaacattgacatgctatctgtggacaaatagcagttctcagaatctagtcaagttgccatcatcccccttgccttggccgttcatagtaggtatgcatatgtttgtttctgtacagtactgtgtgtgtgtgtgtatatatatatacatctgtatgcacacatctttgataaaatagctatttgactagcagggttaaagtggcttttaattacttcaatgagtgttattggatacatcttaaaaaaaaaaaatctgaaccagaaccatgccatacttggttgactattttgagcattaaaattgctttactcattatttagacatgatcacaattctggtatctttactgaggaaagatttcacttaaactctgaaaaatccgattctttggcagaatttccatttgagtcaaggtgtctggaaagggagtggaaaatatatcccaaacgaaaatttattgtggaaaagcaccatttttttttagacaaaattcgatttttttaaccccgtaaaaacttttcaagaatcttccaagaacttttttaaaaagacaaattttgaaaaatattttttactaaaaaaat

SEQ ID NO: 53299 - DNA, 963 bp, Homo Sapiens
tttctttcctttcttatcaggagacaatcagcattacaacacctccttgcttgccgctgcagcagcagcagtttcagatgatcaagacctcctacactcgtctcggtttttcccgtatacctcctcacagatgtttcttgatcagttaagtgcaggaggcagtacttctctgccaaccaccaatggaagcagtagtggcagtaacagcagcctggtttcttccaacagcctaagggaaagccatagccacaccgtcacaaacaggagcagcacggacacggcatccatctttggcatcataccagacattatttcattggactgattcccaggccctgctgctcccatccccaccccagatcgaatgaacttggcagaaagaagagaactttgtgctctgttttaccttactctgtttagaaaagtatacaagcgtgttttttttcctttttttagggaaaaaattaacaagaaatgtacagagaacaaaactatattttcagttttacttttgtatataaatctaagactgcctgtgtgataaaacacttgtttaacaacaaacaaacacaggaaacgaaaagaaaaaagaaaaacaagcacccacaaaccaccttcagttcatttttttctggattctgaagatttttcattatttgtcctatggtttaggttatattctgacttcgatggcattattttatttgcaataaccagaacaaggacattgcctgttctcacagttttcaactcgtggggcttctcttcggatgtggggaggggggtcgggggcatagttcgacttccattttctgaaaacgacagactgggatccggtccgtgtgtgcatattttatccaggccttaagttataaagctcatctgtccccgtgaaaaaaaaaacacaacactagagaccacaacacacacacacacacacgaaccggagaaacatcgacatcc

SEQ ID NO: 53300 - DNA, 882 bp, Homo Sapiens
gcctgaattatgaatgttaccgattcggcatttccccatccacaaatgcgctggtgatcggtgccacggtgatggagggcttctacgtcatcttcgacagagcccagaagagggtgggcttcgcagcgagcccctgtgcagaaattgcaggtgctgcagtgtctgaaatttccgggcctttctcaacagaggatgtagccagcaactgtgtccccgctcagtctttgagcgagcccattttgtggattgtgtcctatgcgctcatgagcgtctgtggagccatcctccttgtcttaatcgtcctgctgctgctgccgttccggtgtcagcgtcgcccccgtgaccctgaggtcgtcaatgatgagtcctctctggtcagacatcgctggaaatgaatagccaggcctgacctcaagcaaccatgaactcagctattaagaaaatcacatttccagggcagcagccgggatcgatggtggcgctttctcctgtgcccacccgtcttcaatctctgttctgctcccagatgccttctagattcactgtcttttgattcttgattttcaagctttcaaatcctccctacttccaagaaaaataattaaaaaaaaaacttcattctaaaccaaaacagagtggattgggctgcagggctctatggggtttgttatgccaaagtgtctacatgtgccaccaacataaaacaaaaccaagccttgggctcgttctcttctctcttcaatctctggaaaaataagtacatatagttgataacccctcttagcttacaggaagctttttgtattaaattgcctttgagggtattttccgccagacctcaacctgggtcaaagtgggtacagggaaggctttgcagtatgt

SEQ ID NO: 53301 - DNA, 650 bp, Homo Sapiens
ggacgcgtgggtttgccatgacttttatggcaaaacctgcaattacttttgcaccaacttaatacatctatatacatatatatatacgcgcacacacttgttcagaagttatgttgtggccttggatttgtttttccccttggaaatggttcttaactctgggattttagaaggttagaatattttttcaagagaacagtggtactcaaaagaatgaaaggtggtccctacattttctgtattcatcacttaaaatttttaatttttccgagaactacaagtaacatttgaaccatgctgctgttgtaccttaaacaaaaactcagtgataaccagtatttagtctattaaaaatgctctttttgaagaaaaaagtttggaagtctctgattagccagagtatagtatgagtcttcactgagaaatatggtgacccattttctttgtgaaaacctgggaaaatgcaagtgtgggtatgaagtgtgtgttctgtttgcattgaaacaatgtaattttgtgtcttctttttgctttaactgacttatttcagaaattgtacagtgttgagggggaaagtcttttctgttaatatatttgcaattcattaaaggatatggaaaatccaaataagttaaaaaaaaaaaaaaaag

SEQ ID NO: 53302 - DNA, 750 bp, Homo Sapiens
aactgaagcggaagaaatagtgaagagaaactcgggcatctgtgtttgatcatgggaagatactctcactaactgaaccctctctggctggactgttaaaagcaacgagaggccccggcacacctggaagctggccgcgaattcggcctctgggcctgtgtgtctgtgagctcaacctggctaaaggcagagtcactcccaaatgggtctctttagaacttgatggctgggcactgccatctctagaattgccacgagtctctctcttcctgcccagtccagggccctcctttcctataagttcatattttgctttgagccagctttttagtctcattcccacacatgtggaagccacgttgcctctcgaccgcctgaggcccttaagtacatcgctttctggtggtgcccaggaggctgctgctgggccgctgggtctctctttgtggacttgtacctggagcaggaggaactccagtccgtcccggcatccatggcagcccgcggttaggtgcgccagggtttgctgatgttgtcttgtgctgttccactcttggctccagcagacccactgtcccagaaaagcctgatcctgtagtttatgtagaatgccacatctgcgtcctcaagacctgtttcatccatttgggaaaagatgttgggaaaggccactttgctcgcaggggtgaggggaaggatagagaatctatttttaataaataacattctagaaagaaaaaaaaaaaaaaa

SEQ ID NO: 53303 - DNA, 587 bp, Homo Sapiens
gaaaatttatcacctaaaatatacccatcagtataaggcaagcaaaagtcttaacatggcagccattctgcctttgccgtggccctgtcctgtttagttcttagtgggttaatttttgtacttttgcagaagaaacttcagcaagctagaactggaaggtactttaatttttcatatatatttgttttttttttttttaatgaaggctcatttacttgaaatgtaaaaactttcactgaatacaaatagaaaaagtgatgtgttttatatcatattgctttttgtccatctttgtggtttagtttatttactcacttcatgtttttcacctataaaattgtcaagctagcaaaaaaactcttgtttttttaattgggagagaagagacctgccagattatcagacctcttcatgttaaaagaccatctcctgtaaaactgacctagtggacaagctgaatttgaaatagactgtgaagtaagctgtaacttgtcattttaattttgtttaacacggttactgacttagatgatgtattaaataccaagataaagaaaaatgcacctaaaatctaattagaattctct

SEQ ID NO: 53304 - DNA, 606 bp, Homo Sapiens
gtgattgcaacagcacttatgggattgacagagaaactgattttttccctgagagatcctgcatacagtacattcccgccagaaggtgttttcgtaaatacgcttggccttctgatcctggtgttcggggccctcattttttggatagtcaccagaccgcaatggaaacgtcctaaggagccaaattctaccattcttcatccaaatggaggcactgaacagggagcaagaggttccatgccagcctactctggcaacaacatggacaaatcagattcagagttaaacagtgaagtagcagcaaggaaaagaaacttagctctggatgaggctgggcagagatctaccatgtaaaatgttgtagagatagagccatataacgtcacgtttcaaaactagctctacagttttgcttctcctattagccatatgataattgggctatgtagtatcaatatttactttaatcacaaaggatggtttcttgaaataatttgtattgattgaggcctatgaactgacctgaattggaaaggatgtgattaatataaataatagcagatataaattgtggttatgttacctttatcttgttgaggaccacaa

SEQ ID NO: 53305 - DNA, 592 bp, Homo Sapiens
  misc_feature (13)..(13): n is a, c, g, or t
caaaaaagcaggntggtaccggtccggaattcccgggatctccaaatgattgctttcttttctggtgatatctgtgcttctcataattactgaaagctgcaatattttagtaataccttcgggatcactgtcccccatcttccgtgttagagcaaagtgaagagtttaaaggaggaagaagaaagaactgtcttacaccacttgagctcagacctctaaaccctgtatttcccttatgatgtcccctttttgagacactaatttttaaatacttactagctctgaaatatattgatttttatcacagtattctcagggtgaaattaaaccaactataggcctttttcttgggatgattttctagtcttaaggtttggggacattataaacttgagtacatttgttgtacacagttgatattccaaattgtatggatgggagggagaggtgtcttaagctgtaggcttttctttgtactgcatttatagagatttagctttaatattttttagagatgtaaaacattctgctttcttagtcttacctagtctgaaacatttttattcaataaagattttaattaaaatttgaa

SEQ ID NO: 53306 - DNA, 558 bp, Homo Sapiens
  misc_feature (512)..(512): n is a, c, g, or t
  misc_feature (544)..(544): n is a, c, g, or t
  misc_feature (558)..(558): n is a, c, g, or t
ggactttcttgggtgtgagactgagtgagacacacacaaaatgtgttgacactgtgatgccggcaggcagagcagctactgactttgaacatgggcagagaggcccctggatctcatccagcccactccttttccccttccagtacagtgacactctggtgcccattggcagatggcgacttccctgcacccataactgatgctttgtgaattcttcctccttttcagaactactctgtgctaattgttctgccagtatgggcgcatcagctccatcctgacaaacaagacatttaggtaaaactttgtaggcaccttctgcttctctgcttcattgttcctgtgatagtcctgttgttattacagcatgtacccaaaacagcctcacattgttacaggaggcaggccaggacatcaaagtcatcatctttatgtggcatgactcttaagaggccattactgtatctcatggcctcttgatgtggaaagaagttgacagagggttgcagggntttaaaacatccattaacatgaaagctaatanacctgtcagagaan

SEQ ID NO: 53307 - DNA, 574 bp, Homo Sapiens
aataatttgtataaatatttcccacaacaattttcataattttcaaagactaatttcttgactgaagatattttgctagggaagtgaaactttaaaattttgtagattttaaaaaatattgttgaatggtgtcatgcaaaggatttatatagtgtgctcccactaactgtgtacagatcaggacacatatttttagacatctaagtctgtagcttaaatggaggttactcttccatcatctagaattgtttacttagtaattgttgtttcttttattattatagacttactatcagttttattttgccaagtatgcaacaggcatatcactagtatatgaaaatgtaaatatcacttgtgtactcaaacaaaagttggtcttaagcttccaccttgagcagccttggaaacctaacctgcctcttttagcataatcacattttctaaatgattttctttgttcctgaaaaagtgatttgtattagttttacatttgttttttggaagattatatttgtatatgtatcatcataaaatatttaaataaaaagtatctttagagtgaaaaaaaaaa

SEQ ID NO: 53308 - DNA, 722 bp, Homo Sapiens
cccacgcgtccgagtaaagataaaaggataggaaaagattcaaagctctaatagagtcacagctttcccaggtataaaacctaaaattaagaagtacaataagcagaggtggaaaatgatctagttcctgatagctacccacagagcaagtgatttataaatttgaaatccaaactactttcttaatatcactttggtctccatttttcccaggacaggaaatatgtccccccctaactttcttgcttcaaaaattaaaatccagcatcccaagatcattctacaagtaattttgcacagacatctcctcaccccagtgcctgtctggagctcacccaaggtcaccaaacaacttggttgtgaaccaactgccttaaccttctgggggagggggattagctagactaggagaccagaagtgaatgggaaagggtgaggacttcacaatgttggcctgtcagagcttgattagaagccaagacagtggcagcaaaggaagacttggcccaggaaaaacctgtgggttgtgctaatttctgtccagaaaatagggtggacagaagcttgtggggtacatggaggaattgggacctggttatgttgttattctcggactgtgaattttggtgatgtaaaacagaatattctgtaaacctaatgtctgtataaataatgagcgttaacacagtaaaatattcaataagaagtcaaaaaaacaaaaa

SEQ ID NO: 53309 - DNA, 726 bp, Homo Sapiens
atttctggggtgctaactttgtaatgagtggttctgactgtggccacattttcatctgggatcggcacactgctgagcatttgatgcttctggaagctgataatcatgtggtaaactgcctgcagccacatccgtttgacccaattttagcctcatctggcatagattatgacataaagatctggtcaccattagaagagtcaaggatttttaaccgaaaacttgctgatgaagttataactcgaaacgaactcatgctggaagaaactagaaacaccattacagttccagcctctttcatgttgaggatgttggcttcacttaatcatatccgagctgaccggttggagggtgacagatcagaaggctctggtcaagagaatgaaaatgaggatgaggaataataaactctttttggcaagcacttaaatgttctgaaatttgtataagacatttattatatttttttctttacagagctttagtgcaattttaaggttatggttttggagtttttccctttttttgggataacctaacattggtttggaatgattgtgtgcatgaatttgggagattgtataaaacaaaactagcagaatgtttttaaaactttttgccgtgtatgaggagtgctagaaaatgcaaagtgcaatatttttccctaaacttcaaatgtgggagcttggatcactgttgaagaataattttcatcatagtgaaaat

SEQ ID NO: 53310 - DNA, 582 bp, Homo Sapiens
aatgctggaaatgcagaagatccccacacagaaacccagcagccagaagccacagcagcagcgacttcaaaccccagcagcatgacagacacccctggtaacccagcagcaccgtagcctctgccctgtaaaaatcagactcggaaccgatgtgtgctttagggaattttaagttgcatgcatttcagagactttaagtcagttggtttttattagctgcttggtatgcagtaacttgggtggaggcaaaacactaataaaagggctaaaaaggaaaatgatgcttttcttctatattcttactctgtacaaataaagaagttgcttgttgtttgagaagtttaaccccgttgcttgttctgcagccctgtctacttgggcacccccaccacctgttagctgtggttgtgcactgtcttttgtagctctggactggaggggtagatggggagtcaattacccatcacataaatatgaaacatttatcagaaatgttgccattttaatgagatgattttcctcatctcataattaaaatacctgactttagagagagtaaaatgtgccaggagccataggaat

SEQ ID NO: 53311 - DNA, 1060 bp, Homo Sapiens
ttataggcatcagtctaacaagtcattaggtcactcgggaagggggaaaaagtttaaaatgggggaaaaaaagccatctttttaaacaaaaattattttgcctacagaaaggttgtagttttgagcacatgttaatttttttccctctttccccacttttatttttttaaataagggataacatattctttatagaatagtgcttgttctggaagagattcaggtgaaaagttggcgtggcatgtttgaggactctgcggatcagtgctacaggagtacatctgccctgccacatgactccagaagtctctgaccccatttgtttttaatggcatcagccaatgagttatcacccttttcctcctcttttctctttaatcttctgttgatttacacctttgacatttgtattcgtcaaccctgtggcttgttagcatcagaacctctctgaagaccaaacttccctgtgtggccagcagaggaagccttgaggatagatctcgggtgacgtgggattttctaagcctgagaggtgtccttctgcacacccttgtaacaattaaaattgcttttcttccatgtttctcttggcagagagaaatgccatcatgcttactgctcttttggattcttcatgcagtggcttcccatttgctctggggaacagtgcctctgtgctggttatatgtatgcaccacatgtgcacacacgggtgtcggtgcaactcaccagcaggtgtgcagtaagcaagcttgaagggggcccatgcttctctgttgtcacacaacaccttttccctgtttctctttcattgccctctgatattttcacagcctgttagtggcggctgatctgtaaaggtatgaaaatacagccccccaagggggaattttgtcatggggaaaggggcagccaactggactaatttgatcttgggagaccccctttttacagggaaatgaaagggacctccaaaggcccggcctccctggccaggaggctaaaaatatttggcctgggaagggggggcaatggggcaacccaacttgaaaccaaaaag

SEQ ID NO: 53312 - DNA, 541 bp, Homo Sapiens
ggggcagcgcaagtttcaggcgcacaaacccgcaaagagtaagacggcagcggcagcctctgaaaagaatcggggcccaagaaaaggcggtcgtgttatcgctcccaagaaggcgcgcgtcgtgcagcagcaaaagctcaagaagaacctagaagtcggaatccggaagaagatcgaacatgacgtggtgatgaaagccagcagcagcctgcccaagaagctggcactgctgaaggccccagccaagaagaaaggggcagctgccgccacctcctccaagacaccttcctgaggacgctggccccagtgcaggccaacatcccaccccctacctccatatgggaccttgcaagtcatcccacaggctgcactgtcaggaagaggaccctgtcccccagcactgggcttcacctagaacttcagtgggggccaagggtgctgagaacccagcaatgaccaggaagatacagtcactaacttcatctgtccccgtgccccttcccaggtcctgcctccacaggtttaacccagaacaataaac

SEQ ID NO: 53313 - DNA, 610 bp, Homo Sapiens
ctctgaaggccaggagcccgcgggaggagatcctgtagccacctggtctgtctcctcagggcagggcccagcacactgcccggccagtcctcctacctcccgagtctgcgggcagctgctgtcccagcatctgctggtcatttcgccctgacagtcccaaccagaacccctgggacttgaatccagagacgtcctccaggaacccctcaacgaagctgtgaatgaagaggtttcctctttaaacctgtctggtgggcccccagatatcctcacctcagggcctcctttttttgcaaactcctcccctcccccgagggcagacccagccagctgctaagctctgcagctccccagtggacagtgtcattgtgcccagagtgctgcaaggtgaggcctgctgtgctgcccgcacacctgagtgcaaaaccaagcactgtgggcatggtgtttccctctctggggtagagtacgccctctcgctgggcaaagaggaagtggcacccctcccctcaccacagatgctgagatggtagcatagaaatgatggccgggcgcggtggctcacgcctgtaatcccagcactttgggaggccgaggcgggcggatcatg

SEQ ID NO: 53314 - DNA, 647 bp, Homo Sapiens
gaagagcatcagggccaaggcagcaggcggcaggagtagcagcagcaaacaaaggaaggagctgggtggccttgagggagaccccagccccgaggaggatgagggcatccagaaggcatcccctctcacacacagcccccctgatgagctctgagcccacccagcatcctctgtcctgagacccctgattttgaagctgaggagtcaggggcatggctctggcaggccgggatggccccgcagccttcagcccctccttgccttggctgtgccctcttctgccaaggaaagacacaagccccaggaagaactcagagccgtcatgggtagcccacgccgtcctttcccctccccaagtgtttctctcctgacccagggttcaggcaggccttgtggtttcaggactgcaaggactccagtgtgaactcaggaggggcaggtgtcagaactgggcaccaggactggagccccctccggagaccaaactcaccatccctcagtcctccccaacagggtactaggactgcagccccctgtagctcctctctgcttacccctcctgtggacaccttgcactctgcctggcccttcccagagcccaaagagtaaaaatgttctggttctgaaaaaaaaaaaaaaaaaaaaaa

SEQ ID NO: 53315 - DNA, 987 bp, Homo Sapiens
tgagagggagctggaagagtgccagcgaaaccacgagggtgatgaggacgacagccacgtccgggcccagcaggcctgcattgaggccaagcacgacaagtacatggcggacatggacgagcttttttctcaggtggatgagaagaggaagaagcgagacatccccgactacctgtgtggcaagatcagctttgagctgatgcgggagccgtgcatcacgcccagtggcatcacctacgaccgcaaggacatcgaggagcacctgcagcgtgtgggtcattttgaccccgtgacccggagccccctgacccaggaacagctcatccccaacttggctatgaaggaggttattgacgcattcatctctgagaatggctgggtggaggactactgaggttccctgccctacctggcgtcctggtccaggggagccctgggcagaagcccccggcccctatacatagtttatgttcctggccaccccgaccgcttcccccaagttctgctgttggactctggactgtttcccctctcagcatcgcttttgctgggccgtgatcgtccccctttgtgggctggaaaagcaggtgacggctgcgctgctctgaggaccttgtcgcccctatctgcgcaatatgctccccggctcccgctccccgacccgtgcatccccctgcagcccctcccgctcgcggcttcgatcgtcggctcaattcaacctcctcacctcattcccggccctggccgtctcgccccttttccgcggctgttcttcttatctcaacagcccccctaattccttccccactccaccactgttccgcccgtatggttccatgccccccgccccatccgcgctcctacgtaaaatcaccttgcccgctacccccgccggttctcgcgcccatttctaacccccaatataatcgtgtcagcctccaccccattcgtgttcccgccgcagtcggcgatacctcccacccgccc

SEQ ID NO: 53316 - DNA, 602 bp, Homo Sapiens
ggaaggattaaaagaataggatagtctcataattgtgagtaaacatcaaggcattatattttacaatactgaataaaatttcatctacacacatgttgccattgtttcatttaaggttcagtgcttatagttaactacaatattggacctaacaggatctagattagcaatataaagaagcatagtggtactctgtttcacactttcagtagatttattagaagtcaaattctattcaacagacacttattaggatatacaactaatttaagaataaaattccaggcacaatatattttttttaaatggtatttgttagtagtgcttcttccccttaacatttacagtgtaaatactgcaggtaaccgcaatctaagttagccaaaaagcagctttttttcccatactgtatgtaaataatgtagacctgggtttttttgtttatttgggtttgtttttttttttttgaggtactggaatctaattaatatctcttaggtatcaacaaaagggaacaattggaatgagaatttaggccttagcttccatggtgatttttagttttttatacagtaataattgtgatgctatttgtcaactgg

SEQ ID NO: 53317 - DNA, 551 bp, Homo Sapiens
ggcgccgtgtgctggattcctcagagaggctctggaggacttgaggcatgctgggcctggtgcagtgatggcgctaaggagacccggggaaagacagtatcgtggtcacgtatgcttaggaagcagcacagccgtgtccttagggatgttcgcgtccagtaaagacactggtaactgcggtttcagccaacactcttcatggcagtgtcgacctcgggttagcttctgttgtctttgtggatggttttcctggagcggcctgacgttgacgtgttctctggtcccatgtcttagcggggcatggtacggtttcgtgcctgacgcgtgcattagggtgttctcttatactttcagtagcgtctttccacagcaagggccaaaccctcctggttcccttcagagtctttttggcctgatgatgactcttgagtgataccctgtgatgcagacatgccccagatggattctactttctttaaaactagggactttcaagattaaaaaaaagattgtcactactaatttgacgcctaacttcagaagcttcactg

SEQ ID NO: 53318 - DNA, 904 bp, Homo Sapiens
  misc_feature (661)..(661): n is a, c, g, or t
  misc_feature (836)..(836): n is a, c, g, or t
ggaggctcggtccccagggctgcagaaggaggctgtgcagaaagaggagcccatcccacaggagcctcagtggagtctcccaagcaaggagttgccagcgtccctggtgaatggcctgcagcctctcccagcacaccaggagaatggcttctccaccaacggaccctctggggacaagagtctgagccgaacaccagagacactcctgccctttgcagaggcagaagccttcctcaagaaagctgtggtgcagtccccgcaggtcacagaagtcctttaagagggtttgccttggatccgggcacagttgtgagggctcctctgcatcacctaccaggatgtctggaggagaaaaagacagaacaaagatggaagtggcctgggcccctgggggtgggtcctctctgttgtttttaatctgcaccttatagactgatgtctctttggccggagccagatctgcccctcagtgcattcgtgtgctcgcacgcgcagacatcccttctcccccatacacacatatacactcacagcctctctggcctcttcccttggggaggggccacctgtagtatttgccttgatttggtggggtacagtggatgtgaatactgtaaatagcttgtgctcagactcctctgcgtggagaaggtgggtgcangaggcagaccctccccccaaagccccctggggagatcttcctctctctatttaactgtaactgaggggggatccccaggtctgggggatgggggacaaccttggggccacaggatactgggtttgcttcagggggtacccatggcccccctgccctcggcctgggaatcagtggntactggcatctgaattaaaatgttcttccccgaaattaaagaagtaaacttcctgcccaagaaaaaat

SEQ ID NO: 53319 - DNA, 580 bp, Homo Sapiens
  misc_feature (528)..(528): n is a, c, g, or t
tttttttttttttttttcccttgaaagtgattctcttataaaaaatgaaagtggagtttaaggtatatcaaatcgttgtggaaggtgattaaaaatcaaaattcttttaaatatcaacttaattttttctaagtaagatacaaaaaattttcatctaaagtaatatttcactttatattgtaaagaaggtaggtatattggtggctgaggtctcttgaaattgctaaagggaaatttttctatggtaatgctcttacggatataaacctcagttaaatggaattatctatgggatgtgtggttctggttaactaaaaattaaccagtaaacactctgtagtaaccattacagaaaatacttctgccttaaaaaatatgatatgccagagatgagttagtgtttcttgacgttggagaccttttaaatgcctcatctgttgtactgaacaattgaaactgcatgcagccataaaagggacaagaaacagaactgtttactaactttgggacatcccctggagtttttanaaataaataaatatatatatatataaaaaaaaaaaaaaaaaaaacctcgtgc

SEQ ID NO: 53320 - DNA, 696 bp, Homo Sapiens
  misc_feature (662)..(666): n is a, c, g, or t
  misc_feature (668)..(668): n is a, c, g, or t
  misc_feature (673)..(673): n is a, c, g, or t
  misc_feature (676)..(676): n is a, c, g, or t
  misc_feature (681)..(682): n is a, c, g, or t
  misc_feature (687)..(688): n is a, c, g, or t
gggtgccatctttaaaatttttactattggtcatttgcagaacagtaaattctgtgtgttggtacagagtgctctgtaccagtgctcatcatcccttcttcataccaacggtccctagttataggaatttaatatttttaaaagttttacattgctgtatattcaaagatttgttttattaatatgcaataaaggcttagaaattttagttttattccttaattggtaaatatggttaactatggaatatatttacttcctctagtgaatgtcctttatataatgactaatttgggagtaatgtgtgctctgtaagtttgttttaaattgcactgtttttaaagaaactgtagaggagcaacaaaaatccaagcaacttcataatcagattatgctaatcatttagttgagcagtttttgaccaagaatcagaagcccaaggggtacatttattgctttaatctgcactcattgaagtcatttattaccatatactacagctttgtggtaggccattattttcattttcatttttggctcttcagaaacttgaatacttaagcttgtacatgatcttgtgttttgctatcctttttactgtaaaatgtaaatattttaagggatattttgattctaaatatgattaaataatttctcacaannnnncnccccncancaccnnaaaannaccttggt

SEQ ID NO: 53321 - DNA, 746 bp, Homo Sapiens
  misc_feature (721)..(721): n is a, c, g, or t
ttttttttttttagcctctgtttgccactctgggtatctctcctatgggcaaagccattagaaatgcataaaacctcgagacatggtttttggcaaaaactccatgactttaaactagctcttttactactgacctttcacagagaaaaaatatttcccttgaaaaaaactgggcttgtcattttttcccttgtagctttaagcagagacataagtgccttgcattacacatagtaaactttctttaaaaaaaaaaaaaaaagattttggagactaccagggtaagattccaacttgtccaaaagctttctggccttacatattttattataaaaattctcaagtctggtaatcttctatgtcagagctagtgatttcaaaaggtttcacaattccccaagacaaaagtgattttcgttcattataataaggttaagtgatatgtgattcataacaattttgatgtgaagaagggaaggacatcattgacttaataatagtatcagtcggtgcaacagttggcaacatgtgccttcacactttaccataaagagacgggtttgagggtttgccttctaaagtctgcaacttcaagaaaaaaaatcgacactgtggattgactttcccggtcactatataaagcaaataaacttaaaacactttgtaaccatgtatttactctgccaggtgcctatattccaataaaatgttcatccttganaaaaaaaaaaaaaaaacctcgtgcc

SEQ ID NO: 53322 - DNA, 543 bp, Homo Sapiens
gcacgaggaaagatatcctttgctacagttttgttcagtatctaataagtttgatagatgtattggatacagtactggtttacagaggtttttgtacatttttgagatcattcatgtgtccagagatcttggaaaatattttttcacccacgatttattttgttattgatgatttttttttaaagtggtagtattaagggagagttatctacatggatgagtcttccgctatagcacagtttagaaaaggtgtttatgtcttaattaattgtttgagtacattctttcaacactacacatgaatgaatccaatcttatatccttgaagtgctgtaccagtgctggctgcaggtattaagtccaagtttattaactagatatttatttagtattgagagtaatttgtgaatttgttttgtatttataaaatttatacctgaaaaatgttccttaatgttttaaaccttttactgtgtttttattcctctaacttccttaatgatcaatcaaaaaaagtaacaccctccctttttcctgacagtt

SEQ ID NO: 53323 - DNA, 580 bp, Homo Sapiens
gttttcaatattgccacaatacccagggattaatgctgccacaggggggcaatctttatttgtcttacttcctaccccttccctgttctgcctctttaactcagttaagttgttctgtttgggacctggaaaagaacccaaagaaaacctgagtggacaggttcatttctggaatgcagaaaacattttaaaggctagatttttagaatattctcaactagcattctttccattgatttgaaggggaaattaactattataatctcttgaatccaaaactggatattaagaactttcccccttactaagtttaagacttttgtcatgtggtgagtcaaataagaccattttgattgtaaaccataaaatagttcagcaagtagcccacagttctggcctaacagcagacttgctgttttcacttggtatcctggagttgggttgctaaccttaatttctatgatgttttctaaaatgaaacttgataaagtagaccaccagctgcaccgtgttttctgtaaaagtattgttagtaagtggccaagagacttgaggaaaatacagattttttgtttacctt

SEQ ID NO: 53324 - DNA, 886 bp, Homo Sapiens
  misc_feature (776)..(776): n is a, c, g, or t
  misc_feature (793)..(793): n is a, c, g, or t
  misc_feature (821)..(821): n is a, c, g, or t
  misc_feature (842)..(842): n is a, c, g, or t
  misc_feature (854)..(855): n is a, c, g, or t
tttgaggccgagttactgagtggccggaagatccacagccaggaggaagccttgcgggtgatggacatgctgcactctatgggccccgacaccgtggtcatcaccagctccgacctgccctccccgcagggcagcaactacctgattgtgctggggagtcagaggaggaggaatcccgctggctccgtggtgatggaacgcatccggatggacatcgaggacccagagatcgtcgtccaggccacggtgctgtgagggccccgccgcttgcccgtgacacgcagcgcgttggtgtctccgtgtttgtccctgtgaaaacatgtaacgtctgccttagagccatgaccgaaacttgatatttttttctttcatgagtgtccggcatctgctggtcttcattgtgaaacgtgccagtcgtgctttgtgaaaaataacaaagtggtcacagaaatttgtgatctgaaaacccggctcccttccccacaaggctcctgggcctccgggaagacgggcccctgtttgccatctcgggggtgttccctgtgggagggtgagtgggtgaggccgagcctgctgcgcgtggagcctcgagtgggccctggctgccactaccgcacagaggccgtgtcgcgctgggctgggcctgggtggcctctgtctttgcatctctgagaaggagtcgggtggtaacggttggggtcaggaagaattctgccaagtatctttactgtcattctgaccatagcctctttgttcccgcattcgaaacttttggntcttactttgctgctcncgttagtccctgggggatttcaagatcntagggctggttgtttcaccgntatggggagggnntgatgttgagctttgctttggagacccaccg

SEQ ID NO: 53325 - DNA, 625 bp, Homo Sapiens
ccttgggctattcgatgccgtgtatgcatctgacagggcaacatttcatacaccatttagtcacctaggccaaagtccggaaggatgctcctcttacacttttccgaagataatgagcccagccaaggcaacagagatgcttatttttggaaagaagttaacagcgggagaggcatgtgctcaaggacttgttactgaagttttccctgatagcacttttcagaaagaagtctggaccaggctgaaggcatttgcaaagcttcccccaaatgccttgagaatttcaaaagaggtaatcaggaaaagagagagagaaaaactacacgctgttaatgctgaagaatgcaatgtccttcagggaagatggctatcagatgaatgcacaaatgctgtggtgaacttcttatccagaaaatcaaaactgtgatgaccactacagcagagtaaagcatgtccaaggaaggatgtgctgttacctctgatttccagtactggaactaaataagcttcattgtgccttttgtagtgctagaatatcaattacaatgatgatatttcactacagctctgatgaataaaaagttttgtaaaacaagcttaagaattcaaaaaaaaaaaaaaaaaa

SEQ ID NO: 53326 - DNA, 778 bp, Homo Sapiens
cgcgccgaattcggcacgaggcagtcactctctctgagcgcgtctcgctcgctctcatacacgcccggagcccaggagcgctcaggatcccgagcgccgcgaaaaagttcccccggcttttgctggagactcatcgttttgggaagtgcatttgcttcgtggctccgccgagcctgctgaatcctgtcctcgcggctcgggaccccgggatcgctgaccgctgccgccgccgcctctgcctcccggactatcggcagcctcggcaacaatagtggcggccgcccccagcgaggctccgggagcccttgcctgcgggggtccggggactcgagccggcctccgccccccggacgcacagccagcgtggtccccgcgtgcaacgcgagcgccggggagtggctcctgctttgcccctcgtgggggccgagccaagaccagtctgcaaactccatcccgccggctggaagaagtcgcggagccggctcctatcccgcagcgtcttcccccgcggatcccgggacttataaagctggggctatccctgcccacgacgggtattccggtcagctccatatactttttctttactgtgttacttcctctattgattcaactttttttttctaatcctatctgtttcttttttttcttacatttctccctactttattgattatttttcagtactctctactattcctttattatactttcttctgtattttttactttctttctctagtctcttatgcatttctcgttctctatacttgtttta

SEQ ID NO: 53327 - DNA, 726 bp, Homo Sapiens
taactgagtgcccccgcgtgcctgcgtgttgagtgtgtgggcggcagtgccgttccggaggccgtggtccatctggagtttgaggggtgaggggaccagagcagtgggaccagcatggggatcagcttcccttccccacctggagccagggactgtccgggtagccagttatggtcctgccagctgcctccctgatccctccccactctcgccccttctctatgaacttaaatcaaaaaccacttccctccatctcctcctgctcctgcgtggagggggaatgtgtgctggctagggtggaggactgagcacctgagcctggggctggctccccggggtccccgactcagctggtggctgtggagctgagtcccctccccgtaacctctgcaaggccagcacccaccatcactacctgcacctgctgtggtcccaccctctggaggcctgggaacctggctgcagcctgggaaggctggagaggcagacggtgggacccaccagctctctccccatcccgcttcttccctgggggccaggccctacctgtgtggtggtgggtgggctgtcagacgtgtcatgtacattcgtatcacacataagaagtgacatgaaaaaaaaaaaaaaaaaaaccggggttttattggggggcgaaaagggtttaagggcatggcaagtttccgaccattttgtcaagggaacgggccccaagaggaaacaagcgac

SEQ ID NO: 53328 - DNA, 659 bp, Homo Sapiens
  misc_feature (582)..(582): n is a, c, g, or t
  misc_feature (603)..(603): n is a, c, g, or t
  misc_feature (630)..(630): n is a, c, g, or t
  misc_feature (643)..(644): n is a, c, g, or t
ggagccttggcctggggttttgaccttgccagtgaagtttcggttttgaagtgattaaatgtcacttcctcatcagtttcacttctggaggttttcttatcctactccctggtgccagggacgtacctgggagtttgaatcaggcccatttgagcgtggcagccgtgttgggtgaaggtccggggctcggtgaggcactgggggcgttttcgggaggaaaatgaaaatgcttctagaatgagtgaaccacatcatagctctcactgttctgatttttcaatagctactttttttagcagacaccagagccacactcaaatggctaagtaggttatgacctctctggattatttttgaatgcccaactgttgcattcaagttttctgactaataagaaattaagcattcatccttcgtatcactgcagaagcaacagtgggggcacagggagggaactcttgacactgagccactaaaatatggactaattttttggacaaatcttcaaacggactgtgctactgtatttgtctcaaagctaccaagtttgtgcaataagtggaagggatgtcatccttcttncataaatgctgaatgacattncagctgattttctagaccactgagaanaatcttatttacnnataatttcataaaat

SEQ ID NO: 53329 - DNA, 684 bp, Homo Sapiens
cggacgcgtgggttaatgtattgttgcagtgttttgtgcctgtttaaaggcttttgtttagcagagtgaatgtaaaatacagtaaaatgttaagattgtcatctactttttaaaaaaaaatatcaacttggaattgttttttaaaggctcaatcaaggaagtgaggtgtgcaataaggtagcaagtaaaacgcagttgcgtttttatgtcatgttagagatccatacaattttccactcacgggatttttgttgatggctgaattcttgtggattcataagaggatcatgcccttagcaagtacttttgttttgttttaaattaagagattcccaaatgcctttttccccctcatcttgaaatgagatgagtttttatgtgtaagcaatatttatttaactattctataaaattattgagtgcctactgaggcctttaagcaccgctaacattcctttccatcattcttttaaatgacataaaataattgtgcaatgttcctgatgatgtaccccacaagctgcattcaaactcaaatctgtgggaatgagtgactcgacaaaatgtaattcggatcagatcctcatcccctgactgtgtgaaaaaagtactctccttctagtgaaggattgtcacagagtttcactggatgaaactatgacccagtattcttactggatttta

SEQ ID NO: 53330 - DNA, 545 bp, Homo Sapiens
ttttcctcctatcctcagggacctgtgctgctctgccctcatgtcccacttggttgtttagttgaggcactttataatttttctcttgtcttgtgttcctttctgctttatttccctgctgtgtcctgtccttagcagctcaaccccatcctttgccagctcctcctatcccgtgggcactggccaagctttagggaggctcctggtctgggaagtaaagagtaaacctggggcagtgggtcaggccagtagttacactcttaggtcactgtagtctgtgtaaccttcactgcatccttgccccattcagcccggcctttcatgatgcaggagagcagggatcccgcagtacatggcgccagcactggagttggtgagcatgtgctctctcttgagattaggagcttccttactgctcctctgggtgatccaagtgtagtgggaccccctactagggtcaggaagtggacactaacatctgtgcaggtgttgacttgaaaaataaagtgttgattggctagaactgctgcctccctgactgtgag

SEQ ID NO: 53331 - DNA, 829 bp, Homo Sapiens
ttagttttccttctttatttgaaaaaatacatgacatgtaatctttttttcttgaattctttctcagattttaaagtactatattaaagaaaaaaattaatgtctaaagcctagcattcttgcagaaccctatactaacatgtaatggggagagggtggggcagatgagtagagaaacagattcaagcctcaagcttccaaagcatttttataaatggaaaatccttaaattatgaaacagcttgatatagtgtcctttttttaaaattcagaactttttttattgataatggagattgctgtttgagtttttaaacttaatctagaacagaggagtattaaaagtaatgctgtgctgcattatttaagactatcagcaaattatttgatagattgttcttacaacttgtattctgattacagaaccatcatgagtgtggaataaatactggattaaatcctttatcctgggtcttggcttttcccccatttgttaaactttttttagcatatttatattgtggaaattgatgaaacgtcagtagagtcacactttgtgtacagggatgtcttagtgcccagattgacaagtgaatttcggagaaatgcatagactgggattgggcatgtggtaatcaataatctttattagaatacttgataatggcagttccctttgtcagtggttgttacatgtgtcatctgattacttgttcccatgtcaaagacgtttatgggataccttttaacttggacaatatgttagcattttgcacattggactgaaatcctttagataattccccaatcttttaaaacacgaacttga

SEQ ID NO: 53332 - DNA, 639 bp, Homo Sapiens
aaattggcctcacaacaaagggactcccttcacttgcctcaagtcaggatcatgggaaggggcagatgtctgctgagactgatgtgaggtcttttacctcagaaaattttacctgagtcattaaaataaaacccctttcaaaaaatttctttaagaaaaactagtgtaataaaaagtaggtcctattagagaacttaccaaacaccaagaacattctaacggcggaggctgtcaactagcatattgaggctatggtccttgttgaacaggttttgtcatctgatactgataatatttagaaatctaagatgcctttggagtataatatgttcaaaaaatgtggttatcttggtctgtgattacagcatatgtccatgctaaggagtttgtttcaggacaggaataagtcctcttctgttaagcagtttctcctaaatcagtttggagacatttcaggagcttttctaacacccaagctgaaattattggcttcttctctgattaaaaccatcccagcagttagcaaacaataaccagaaggttttcaatgtagcccctgtgcacccttcagaaaacatcttgaaacagtactgtaaatagattcaagaaaggaatgtggtttggaaaaaaaaaaaaaaa

SEQ ID NO: 53333 - DNA, 863 bp, Homo Sapiens
  misc_feature (863)..(863): n is a, c, g, or t
gcggcgagcccgggatcgagctaccgcggcgagcgcgccggccaccgcctgcaccgcccttccgcccggccccggccccggcaccatgtcggagaaaagcgtggaggcagcggccgagttgagcgccaaggacctgaaggagaagaaggagaaggtggaggagaaggcaagccggaaagagcgaaagaaagaagtggtggaggaggaggagaacggggctgaggaggaagaagaagaaactgccgaggatggagaggaggaagatgaaggggaagaagaagatgaggaagaagaagaagaggatgatgaagggcccgcgctgaagagagctgccgaagaggaggatgaagcggatcccaaacggcagaagacagaaaatggggcatcggcgtgagcccctgccaacaggctgggttgggaggcctctctgggcctggaggtgggggtgggggcagcaagtccagccactcttcacctggctcctgctctgggcctgcaccagagctgcaccctcttctttctcccagcttctcatttccgctctccagacactggcctcacctcaatctggcatttggttccaccttcttgacttgtccatctgagctctccagcttggcccccaattggtcctctctctctttgttctctttctccctcccctacagcctcattcttcctcggtagcttttccaacataactttggattcccagctttatggtctggccatcctatctgctgatcggattttccttagattcctttttagaagggcaggcgggtgggccgggtgtggcgcgagccaaagtgcccccgccccttgtataaaagaagggggttgttaaaaaaaaggggcaaaan

SEQ ID NO: 53334 - DNA, 597 bp, Homo Sapiens
aattcagcaacaaacaatcttcctttgggagaaacctgttcattccaatcttctaattacagtggttcctatctcagggatactggactttctgacgcagatgaacaattaaggggaaaagcttcccttttccctctgtggcagttacgattttgacttcagtcctgagaaaaacttcaggttttgaaaatcagatgatgtcttctccttttccaaacaccacacgttgaaagcatttataaatccaagtctgaaactctgcgctctagtactgctgttaagatacacaacttgtttcttagttcatataatctcgggatacacacacacacacacatatatatacacacacatacgtatacacacacatacatatatataaatatacctgatgccagatttttttcataaatattctgcctactgtaaatatgggttcctctgagttgttttagaaaattagcgcaatgtattaaaatcaagtgttaggaaatttcatggtcttacctacaataacttttattttggaattgaactattattaaattgtatctaatcctggattacagtttaattaattattcttagtgcttaagg

SEQ ID NO: 53335 - DNA, 634 bp, Homo Sapiens
gtgaggcccaggcccggagccccgagaagcaggagcagttcgtggacttgtacaaggagtttgagccaagcctggtcaacagcaccgtctacatcatggccatggccatgcagatggccaccttcgccatcaattacaaaggcccgcccttcatggagagcctgcccgagaacaagcccctggtgtggagtctggcagtttcactcctggccatcattggcctgctcctcggctcctcgcccgacttcaacagccagtttggcctcgtggacatccctgtggagttcaagctggtcattgcccaggtcctgctcctggacttctgcctggcgctcctggccgaccgcgtcctgcagttcttcctggggaccccgaagctgaaagtgccttcctgagatggcagtgctggtacccactgcccaccctggctgccgctgggcgggaaccccaacagggccccgggagggaaccctgcccccaatcccccacagcaaggctgtacagtctcgcccttggaagactgagctgggacccccacagccatccgctggcttggccagcagaaccagccccaagccagcaccttcggtaaataaagcagcatctgagattttaaacaaccacgcaaaacaac

SEQ ID NO: 53336 - DNA, 907 bp, Homo Sapiens
ctggaccggtccggaatttccgggatctggttattatcaagctaatgagcgagtaaaggatgccagtccaaaccaggttgcagagaaggtggcctccagaatcgccgagggcttcagcgacactgcgctcatcatggtagacaacaccaagtttacgatggactgcgtagcgcctacgatccacgtgtacgagcaccatgagaacagatggcggtgcagagacccacaccatgactactgtgaagactggccagaggcacagaggatctcagcctcgctcctggacagccggtcctacgagacgctcgtggatttcgataaccacctggatgacattcggaatgactggacaaacccagagatcaataaagctgtcctacacttgtgctaggcaggcaccgctgtgactgggctccgggcctttccactacgttgaagaagaaaacctatttttaaatgtaaataaaatatctggtagcctgtgtggaaagctgaccgttttaagaagtggcatgtgccttgaaagggggcagaatgttcagtcggtcgtgtttttaacacagagtctctagaagaggtgcagacatcccgtctgactgtccctgtggactctctcagttgtatgttgctataatcctccaaatcaaagctctttctgcttgtgcaagattgttcctattaaacagtttttaactaaccttttataatcgggagagaatactttttaaggcttttgaactatctttttttaaaaaaaaaaaaaagcccacctctttaacttccaatgagtgtggttggtgagtttttatcccggttggaatttttgatgtccttccaggccgtcctggggatcagggtaaaaacacctggaaatgcctggtgcctgaacctgtttgaagaacctcct

SEQ ID NO: 53337 - DNA, 683 bp, Homo Sapiens
  misc_feature (624)..(624): n is a, c, g, or t
  misc_feature (641)..(641): n is a, c, g, or t
ggatggtagcttcatgttgaagtggttttttgtttttgtttttgtttttttaatttgtaaaatctggaaagttagcttgttctaataggggctatgctctgcaattcccttttttttttttttttccttccactaagtcaaatccttatcagatcattgttgtattctaaggagtgacgtatttttcacctgtttggattctatattagtggtctgaggaagagcagatcacattgtaaaactatggatggtctgataaggcttttactgaccccactgacttcagagttatactctgtttgctacatcataatgctggttttgctgactttttgtttttttatatatttataaaaaaagaaaaagttggtgattgcattgggaaattcccagggtattactggacctatgtggtgtattgttaaaccagtgtccttgtgatactgttgctcttgatgttcctgatacaggtaaggaaacagttggtcaactctgatacaaagtatatatacagttcagtattgtctctgttcattttgtttttatttcattgacaaaatcaaaccagcattccccattgtgtaaataaatgattttgctgaataaagtaaagtcttaaattcnaaaaaaaaaaaaaaaanaaaaaaaaaacatgtcggccgcctcgccctcgagagcttcta

SEQ ID NO: 53338 - DNA, 894 bp, Homo Sapiens
  misc_feature (541)..(541): n is a, c, g, or t
  misc_feature (620)..(620): n is a, c, g, or t
  misc_feature (624)..(625): n is a, c, g, or t
  misc_feature (628)..(652): n is a, c, g, or t
  misc_feature (654)..(659): n is a, c, g, or t
  misc_feature (668)..(668): n is a, c, g, or t
  misc_feature (670)..(672): n is a, c, g, or t
ggacgcgtgggtcgtactcaagtgatctattatctagctgcaaagcctggctttgatttgaaattttgtaaaaatttcatggcacccaaggtttctgattctgacccagcagtggtcctgaagagagctgatggcaagtcttgtagtcattttgattttaattgaagggtgagcacaaccttgtgaaccagcactagcttgttccaagctggaatttatctaatctatttttgtgtttaaaaaagctgtacctaccaaataaataaatagtttataaaatgtattacttaaggtattagctgagtttagagtactttctgcttaattaatttttatacttaactcttcagtagaggtttacaaagagtacaaaggttaaattacaaattcattcccagcctaggctctgggcacatttcctgttcttgaattctgctcctgaagagggtgaacaaatggggcattcaagttgtgagctcagaattactttaaaaggaggtaacagccagccattacacctaaatttaatttattttattanaataacataattgagggaccatcagataactgtattttgtcaggtgcaataaaaacaaaattaaaacccaaatcatcangaannaannnnnnnnnnnnnnnnnnnnnnnnnannnnnnaaaaaaaanannnaaaaaaaaaaaaaaaaaaaaaaaaaaagggggggccgcctctaaataatcccctcaagggggcccaagttatacgcttacccagtttttttttgaccaaaggggggccccttaagggggggcccttatttaaaacctagggcccgtggccccttcttttttacaaacctccgggccttgggaaaaactgcctaaccttgggggacctttgtgtgaaaggaac

SEQ ID NO: 53339 - DNA, 578 bp, Homo Sapiens
gtaccacagtttgcagacctacagaacgttgtttggtcccgattccggaaaggtgccaagagcttagtcgaactccttgatgagtctgaatgtacttcagatgaggaaatctttatctcacaagatgaaatacagtcatttatggctaataaccagtctttctacagcaatagagaacaataccgacagcatctgaaggagaaatttaataaatactgccggttaaatgatcacaagaggcccatttgtagtggctggttgacaacggctggagcaaattaaataaataaaatagctctgtctttcaatgaaacactcacgatgactactgcgccttctctttcgaaaaactcttaatttagtgacttatggcaaaattttatcttaaatcaatgtgattctttcttgttttgggagacggtggaggtatcctcattagttctttcttcaggcttgtgtctttagttgcgtggctgcgcaggcctgccatatgatttaagccatctcttttcattaaatgtttctcttcctgtgagacttactaaagcaacttagtggcaaaaagtaatgttgtactt

SEQ ID NO: 53340 - DNA, 1008 bp, Homo Sapiens
  misc_feature (904)..(904): n is a, c, g, or t
atatttgaagcctttagtaaggtggtgcagaaactcattcccaactgccgaccttggaaaacctattaaatatctttatatcaaattcaggtattgaaaaagcttttctctttgatgttgtcagcaaaatctacattgcaacagacagttcccctgtggatatgcaatcttatgaactttgctgtgacatgatcgatgttgtaattgatgtgtcttgtatatatgggttaaaggaagatggaagtggaagtgcttatgacaaagaatctatggcaattatcaagctgaataatacaactgtcctttatttaaaggaggtgactaaatttttggcactggtctgcattctaagggaagaaagctttgaaagaaaaggtttaatagactacaacttccactgtttccgaaaagctattcatgaggtttttgaggtgggtgtgacttctcacaggagctgtggtcaccagactagtgcctccagtctgaaagcgctgacacacaatggcacgccacgaaacgccatctagtctgaatcccagcgtcggggctctgtgccagcttactcttcactccagggtcggatgccacgtgctacaggacatgggagctgctgcttgtgggaatctggtgcctgttccactagagacaaggggtagagtttctcatttggatgaaaaccccttcaactggtggtgtacaactgaagctactatatctttttttgaaaatggcaaaaaaaaaaaaaaaaaaaaattctggaagacacagaactcaaggtgtgtgttttctcctcttttggggtccccttttaagtaagttgggatatttttggacctggaaataacaacaggttacccctcccttaccaggggaatggttggccatccaatttccagtttgaaanatatataggaaaagaactgggaatttttataaatgccttccaacttaagggctttctcatttttgagattagaactcctaaaaaaatttcctggcccttggcca

SEQ ID NO: 53341 - DNA, 492 bp, Homo Sapiens
tgcggccgccaactttttaaaaagctttggtattaaaagaggtaatcttcagtttcctcaaacattttattcatgttgaatgcctttttgcaatgatgactgagttgttatcatagtattttaaaacctgtatagtgttttagacttgttaaaacattgctgtctagtgtacatctagctaaaagtgtggtttatctaaaccgttttaataagcaagatgactgggaaatctctgccccttttctgagcagtatgcctcttcttttagaattaaatgaatgctgcacaggtccagatgtgtgttgatgtagacttgaaatgtctccacattttggaggacttcctcagcccttttcattgagggaaaatatatttgaatttctgttttagattgtatcgggtcccagttgattcatgtgtacaaagttatgctacctaattacagaccattacccaaatatcctaccaggctttccatctgaatagtaaatt

SEQ ID NO: 53342 - DNA, 633 bp, Homo Sapiens
gtgaccatctcattcaaatgttgttgttatgatgcaaatggatatggtttcaatagaagctggatccttaatactgcattttctgaattctgttttaatatttgtgttaaagtagacatagctgaactcacatggaatcctggagtttgttatcagcagctttgcagttgggaaacaaagaaaccaaagctgagtgttttaaagaatgaacatatctggaaatcctggctctcaaaacaaaacaatataatctatcaaaggtgttttactcagtgttctaatttttaaaaaattttatctgcatatttgcatcaaatatttatgtgtaaaatgtatgttttacctccttaaaatgcctaaaagttagttaatagttacttggtttaacctatacacaatgattaagtgcatttaatattggtaatttaatgaaaaccattccttgcccaatggatgtataaatttttgaaagaataagcagaattatataatatgaaatgctatgtaaagttttctatgtaaaaatattatgtataatactattaaaatatcccatgctttgatcaggtggtaccatcaatacaattcaaaaaaaaaaaaattgttgggcggcgggccaaaaaatttttaacc

SEQ ID NO: 53343 - DNA, 603 bp, Homo Sapiens
ctggctgtgtttttggtgttatctgtaagctcctggatcatacttgtgtagttagtgagactctactgccatttctggcttcttgttgctacagtcttctttattttctgctcactatagagaaaggggaagcagaacatctaagaaagagggacaagctgtggggggtctgtgtctccatcctggctctcttgcctcgagtcctcaggttgatgctgcagagcctgcgggtgaacagagttgggcctgaggagctgcctgttgtgggccagctgcttcgactgctgcttcagcatgcacccctcaggactcatatgttgaccaatgcgatcttggtgcagcagatcatcaagaatatcacgacattgaagagtggaagtgttcaggaacagtggctcacagacttacattactgctttaacgtgtatatcactgggcatccccaagggcccagtgcactggctacagtgtattgaagaggccatagtacctcctgtttgaagttgtttattcacatctatcttatttgaagaaaaagactgatgtaatagatctttgtcattaaagctgaacttttaaagaaaaaaaaaaaaaaaaaatagt

SEQ ID NO: 53344 - DNA, 821 bp, Homo Sapiens
attttaatggcttgggatttggtgcaacaaacatgattgatagctggacagacatgctcgtcatgaaaaaagaaccatttctgaagcccgattggggccaaacatttacaccttgcttcatagtaaccagttgagatgaagcacgtcgttagaacgttgttggacaccatgttgaattattcccccatcggttgtgaagaactgtgctacattcaggcttacccattgaactcagtatatatatttttttccttcctgtcttttgtctggcaggataccattcttgttgctcttctgtgtaatgaagtttaaatgcttgtttggaaaactttatttaacagtttagaaggcttgatagaaagagtgcattagtctgaagagtatacattggataggaaagaatttccttcttttgtttctccaaatctttccgccttatttagcttgagatctttgcagcttggttcatggattctagccttgcccgttgcgcagtatatactgatccagatgataaaccagtgaactatgtcaaaagcactctcaatattacatttgacaaaaagttttgtacttttcacatagcttgttgccccgtaaaagggttaacagcacaattttttaaaaataaattaagaagtatttataggattaaagtgacttcatttgtatacatttggaatctaaaccagcttaaaaacagtttcctcaatgacttagatacacagtataactgatgctcttctggaataccacatgagacatggtcagaaacagtgcttggaaggacattacacaagaaattcagagtaatgctttga

SEQ ID NO: 53345 - DNA, 906 bp, Homo Sapiens
gatctggattctcgggggtatttgtttttggaagtgttcttcattgcctgtgtttctttgtcacttttatctgtggtcttactctatttggtgaatcgtgcccagggtgggaacctaaattattctgcaagacaaagggaagaaataaaattttcccatactgaatgagaagttaaaatgaatgtgtcatgagaatgggcttaacacatcgttggtttgaaaacttccatttttaaaaatttagagtttagtcattagaaaaaataatggactggaaagttatatttatatccaaatatacctatttcaaagtgtatttgtgaggcctgttttagcctgtgtcttttgtattgtgtgttgctaaagaattctacttttagtaggctaatcaacaatgaaagggttagaaaattgctgtggaacatccaggtgaacttcaggaaagacagtgaaaaatggaaaacgttggagcttctgttgagataatcttcattaggtatatatcttagggatacagccttttctttatcttatagcaggaaaaaaaaacttttgagggaaatagaagggctgcgttacacaaaataaacaatggcattgtcataggccttccttttactagtagggcataatgctagggaatatgtgaagatgtttttatgaagtctctttctgatcacgaacaatagcttgcgctctactctgtagttatgtggattgccgagcaatgacccttttcaatttcttatttctgtgttactgaggaccctaatcacttagggatgtaattttatagtataaactttctgtacagtttttcttatagtctaataagtaaaaagtgtccttcaaattatgataattgcctatgtacatgggataaattaaaacactgcacacggggta

SEQ ID NO: 53346 - DNA, 767 bp, Homo Sapiens
atggttttataagtatgttccatgatgtaaaaatgtcaacgcttagaaaaagcacatggacatcctgctttattacatgattacacctgaaggttgtgctgccatgcacattaatatgtaatgcgggcgttgtttatggggttctttgcagcaccagatgcctctcttccggaagaagatggtgtgggaaatccttcatcagcagttgctgtgagaaaactttgcctggtccctctagctgctggtggttctttcacagacatttccatatacctcatgcattgtgggttaaaaagtccctgcatcacttctgttctcacaggtactgagctgtcaaaagtgcatgaaggcctctcactgtactctagtcctgacttggggtgcagagggctgcttgcaatcctgtttgtaaggctgtgcctgctcagagctttggactgttcaacccacacaagaacaaacgctaactaatattttttttaagagattcttttccctatgaatgtgggaaatgcaggatttattctgtgaattgttgtttctgtgtgttgtccagcgtattcattcactcactcgttttgcaaacataatgggcagtgggcatttactgctgctctttaacagttagctctaaattacttgttttgaactatttatttctgaaaggacatgttactcaagctgcatccctgtgagaagcaggaggggaattctcactggggcgaaggagtggactggagcgtaactgccacttaagcggcggttgg

SEQ ID NO: 53347 - DNA, 687 bp, Homo Sapiens
ggattgtaaccagattttcttttttcccccttctcagctgtagatatgatatctcctttcagggccccagcttaagggcaaagtgagttaatgtgtagacaaaggcgagggacaagagagagttaacatctagacagtggaaaaagccatggtgtgtggtttctgggaaccaccaacacttgcaggtttagctttttcccagggttgactacaagaaagaaaaccatgtttttgcaagattaaaatgtggttgagtgtgcctaaattaaccatccccatttttatcatatttccaccatcacttcagggttttaagagtcagtgctcacctgggcggagctggtagtacattttgcttcttagaaagctaagtcctgggttccgtctgattttaggttccaggaacttcctgagaacacccgatcgcagagggtaattttctggagtttgttttgcagggatagctgggagtatggccaccctgctccacgatgcggtaatgaatccagcagaagtggtgaagcagcgcttgcagatgtacaactcgcagcaccggtcagcaatcagctgcatccggacggtgtggaggaccgaggggttgggggccttctaccggagctacaccacgcagctgaccatgaacatccccttccagtccatccacttcatcacctatgagttcctgca

SEQ ID NO: 53348 - DNA, 800 bp, Homo Sapiens
cagagacaaaggaaaagtgtttaaatagtaagctgttcttcttaatcagaactatcctattgactaataaataatctgcataattctacttaaggtgtgtaatctctgttctagagttagtttttaagtaagcttgttaatctgccactttgacattttgcttaggatgtcagtagccatattaagatgtgtagaataccttcagaagatgatcatagtgttttgtaatcatttaatgtctgcagccaaatttttaaaggtaatttagacctaatactgctcttgctgtgtcttattaagttaaaattaatgaatgaattctggtaaaaattcaaaaggcactctgtgagtagagagtatcatttaagcttattttagtcacatgtagtatatatctccttaaagctgtcactctcactttcttaccattctcttgatttcttcagaaaccatctagtcatcatctttatactctacctgcttctgcaattatatatcatattatgttttcagagcagttcattgtcaagttggactttaagtgaccattcaagaaaagatgaaatctcacgaacctcaaaacttcattcatgtctttttacaaatgagaaaaacaaatgcattaagatttactactcaacttgacttatacgggaaaagaaacaaacgacagacacagcgacacaccgctggtgggacgcccgtgggccccgagagaaggagtatggaagacacgccggagggagcgcgggcacccaggcgagagacgaacacggggcccaaagacggtcccagaggga

SEQ ID NO: 53349 - DNA, 585 bp, Homo Sapiens
tagttctagatcgcgagcggccccagcgcctggtgctgcagtcttatcttcagagcctgcagagcctctgttggtcaggcatccccctaggccccggaccaccggccccaggccccggcaagatccccacaaggctggactgagccactatgtgaaactctttagcttctatgccaagatgcccatggagaggaaggctcttgagatggtggagaagtgcctagataaatatttccagcatctttgtgatgatctggaggtatttgctgctcatgctggccgcaagactgtgaagccagaggacctggagctgctgatgcggcggcagggcctggtcactgaccaagtctcactgcacgtgctagtggagcggcacctgcccctggagtaccggcagctgctcatcccctgtgcatacagtggcaactctgtcttccctgcccagtagtggccaggcttcaacactttccctgtccccacctggggactcttgcccccacatatttctccaggtctcctccccacccccccagcatcaataaagtgtcataaacagaaaaaaaaaaaaaaaaaaaaaaaaaaggg

SEQ ID NO: 53350 - DNA, 606 bp, Homo Sapiens
agacatcttaacaacaaaccacaacattgcctgcatgtctaaaagaaaatatgggcctggtgtggtggctcacacctgtaatcccaacactttgggagcccgaggcgggtggatcagctgaggtcaggagttcaagaccagcctggccaacctggtgaaatgcagtgtcaactaaaaataggaaaatcagccaggcgtggtggcagacccctgtaatcccagctactcaagaggctgaggtaggagaatcacttgaacttgggaggggtaggttgcagtgagctgagatcacaccaaaatggggtggggcgcagtggctcacgcctgtaatcccagcactttgggaggccgaggtgggcggatcacgaggtagggagatcaagaccatcctggctaacacggtgaaaccccgtctctactaaaaatacaaaaaaaaaaaacaaaaaaaactagccaggcatggtggcaggcacctgtagtcccagctactcgggaggcagaggcaggagaatggcgtgaacctgggaggtggagcttgcagtgagccaagatcgtgccactgcactccagcctgggtgacagagtgagactccgtctcaaaaaaaa

SEQ ID NO: 53351 - DNA, 537 bp, Homo Sapiens
cactcaggacaccataaatcgcatccaggacctgctggctgaggggactataacaggtgtgattgacgaccggggcaagttcatctacataaccccagaggaactggccgccgtggccaacttcatccgacagcggggccgggtgtccatcgccgagcttgcccaagccagcaactccctcatcacctggggccgggagtcccctgcccaagccccagcctgaccccagtccttccctcttggactcagagttggtgtggcctacctggctatacatcttcatccctccccaccatcctggggaagtgatggtgtggccaggcagttatagattaaaggcctgtgagtactgctgagcttggtgtggcttggtgtggcagaaggcctggcctaggatcctagataagcaggtgaaatttaggcttcagaatatatccgagaggtggggagggtcccttggaagctggtgaagtcctgttcttattatgaatccattcattcaagaaaatagcctgttgcaaaaaaaaaaaaaaaaaa

SEQ ID NO: 53352 - DNA, 531 bp, Homo Sapiens
gtccgcggcaagttgctaactgtgcgtttctcccttcttagaatgaatgtctcccccaaaactggctggcaccagcttcatctgtgatacccttcaagaaatgttctctggttttgttttatgctgaaagtagaacacaagtcacatttcagatggaggctgtaaatatctggcattttcttatattgttttatgttttcttgtttttctcttgttgtttttatcttattttctttggggtttttttgtaatgcctttgtacagctcatactttcctgctgacatatctgatcatctctttcatgcagttgccaatattcataactgaaaataatctggtttatcataagtaaaatgggaaacttgcctctgttttttgcaaggggaggtaaagagtgtttagtaattacctatcttaaatctttctgagttggtagtagattcatgttcaaggaacaggaaaaatggaaaaacataagtttaaatcagttctttttaaataactttttattcttttgtataaataaaatt

SEQ ID NO: 53353 - DNA, 775 bp, Homo Sapiens
  misc_feature (667)..(667): n is a, c, g, or t
gggaagaaaattgtctatttcagtgtcttttttagcaagattgaccaaaacaggtggtaggtgtgtaatttttaactgtcatgaaatactgtaatgcgcacctttgctaataaggaaatggtctccctttgaattatgggaagtttcttgtctgtgatatggggtgtctgtgtacatatatgtatatttccttttttaatacaggataataatatggggtcttgtccttcaccttttaagttcagggaacagtttgtcctgaccacacatatgttatcagtgtaatgctttatgaagctttagaaatgagctcatgactcattaaaaaataataaacatgatgctattttaatattttcaaataaataatctgaggatgtgtttcatactttagcatcaacgctgagttgtgccttgtagaattgcattgtctatacatgcaaaagactattaagttaggatgaactagattccctaattacagtgaaattctatcttgcaaatgctatagaataacttgcattttaaagtgtatttgcacattttacatatgctatgtggttgcctttgggttttctgtacagattgtttttgttattaaatggaaaaggcctgaattatgctcttatgtgaagtaaattgatataacctattgactgtattctgngtattattctttattttgggaccttctgtgtaaaagaaaatattacctaaattggttagatacaaagaaatcattaaaaatattaatgtatatatgcaaaaaaaaaat

SEQ ID NO: 53354 - DNA, 551 bp, Homo Sapiens
ccgcgctgtccatgcactgtgagcaccactgggaaatctcagccacaccttttctgtttaatcccatgcatgccaaacacttttcacacctaccgacccattctccttctgcttctcttgccctcttcttcacaccaaaatatgatcgtgtccctgccgcagaatatgtatttcttaattgctgtggccaaacgcctgtgtgccgaatcgcttgcttctgatcccgctccgtgtaacctaagtgcgctgcaggcaaagcccaggccacggctgcgtcactactgatgttcacgatgccacacagtcacacacctaattcattctcaagtcggagcaacacataccaaccttgaccttatcctcaagctccagggcagcctggccgagcagcccctgctccctcctggagacccttgtcacctcccgagctcctcctggagacccctgtcacctcctgaccaacctttcccagggcggcaccgatcaccgagcagccgtgcgtgtatctcaaggaactaaataagatgacgctactcctcatagcaccacaa

SEQ ID NO: 53355 - DNA, 881 bp, Homo Sapiens
gtagtaacttctccacagaagtgccaatatggcaaaattacacaagaaaacagtattgcaatgacaccattacataaggaacattgaactgttagaggagtgctcttccaaacaaaacaaaaatgtctctaggtttagtcagagctttcacaagtaataacctttctgtattaaaatcagagtaaccctttctgtattgagtgcagtgttttttactcttttctcatgcacatgttacgttggagaaaatgtttacaaaaatggttttgttacactaatgcgcaccacatatttatggtttattttaagtgactttttatgggttatttaggttttcgtcttagttgtagcacacttaccctaattttgccaattattaatttgctaaatagtaatacaaatgacaaactgcattaaatttactaattataaaagctgcaagcagactggtggcaagtacacagcccttttttttgcagtgctaacttgtctactgtgtattatgaaaattactgttgtccccccacccttttttccttaaataaagtaaaaatgacacctaaaaaaaaaaaaaagaaaaaaaaaaaaaaaaaaaaaaaaaaaaaaacgacagaaagaaaaaagacagagaaaaagagacgaaagcgcgaaaacaacacagagaacacaacaagaggagatgagtgggcgcgtcagaatgaaagcgggggccaccaccacgcaaccaccatgaaagaagacgacgcaacagaaaacaaaaaaaggaggccgacaccataacggaggagaacagaagagaggagaagacatcgatcggggagaaaagagaccacagcaacagacggaacaaggatgacgcacaacggagcagaagaaaaaaa

SEQ ID NO: 53356 - DNA, 823 bp, Homo Sapiens
cgtgaattgagtcgcctggcggctctgtacgcgctcagggaagcttagcttcttggtgcccatctacgtgcactggatgatttttcttttgaacatttgccccactacactgtttggggatagctgggttaagcaagttaaagatatttacatttatattggaattttagcaactttttttcaggttaaatatataatttcaagtgcttttaatgaacttatttttaattggctagggagcaaaaaataagtgagttctgcttttagttagttaaccttgttcttttcttaaatagtacactgcatggtatttaatattccaggaagcatgggattttattttgcttgatttgggcacatgaaataatagctctaggaaaatgcgcatcttaatgactctttgtaaagagaggcatttcttacaactgtgatgtttgcttacataaaagttacctcataagttaattctaacttttattcttgaattttatttcatttcaatagcttgtttcatttgcacgcctttgtattttgattgacctgtagaatggatgttaggaaactcaaaattgaacacagtgaaacaaatggtatttgaataaatgtaatatcttttatattctatttatgatatccataatcaaatgagattattttaccacataaatgttttaaatatcagattttttagtttgcagttttaggaaaatgctttagatagaaaaggttcttatgcttgaatttggagtactaccaacaatgaatgaattattttttatattcttacacattttattggtcattgtcacagatagtaatacta

SEQ ID NO: 53357 - DNA, 468 bp, Homo Sapiens
gcagagagaagccattcgtgatgcttagaaccaaggatggtcatgtacacaaagaccatcgagacggccattcttgtttacaaaacacttaccaagaaagcactttgtaggggaactttagtaagttcttctcatttcattatgtttcttccaaggaaacaggagagactgaattaataattctctctttcctcttaagcacttttaaaataataaagtacatcttgaaatttggggaggcatctctgatttaaaaaaagaaaaaggctgcttgatgtatgttatgcagagacactctgcctctggtggctgcagagcaatacccaagcctcatttggaaggctcaacatttggaattgcactttaattgattaatcctcaattcatgtggccttacgggatggtgggtctgggaccccaattcattcttatctgccaaagaattatctagaagcacatcaaatacca

SEQ ID NO: 53358 - DNA, 911 bp, Homo Sapiens
  misc_feature (758)..(758): n is a, c, g, or t
  misc_feature (828)..(828): n is a, c, g, or t
  misc_feature (883)..(883): n is a, c, g, or t
agggcaggatttcgtatgcaagctcttgtttctcaggctgcctgcagaagaagtcgctataaattatctgttgtctacatggtacaaggcccattgactcatctgatgcttgttttgttaatttctttaatatttttatcacggggcagtgggagggcttgggcttttagccacagctgttttaagacttctgatctcctgccctgcaggaataggtgggaagtcattgaatttttacactatagtaatttgcattcccacataagtttgagtgttacgaaaacattcctttaaagggatctgtgctacacaaaatatgccaggacctcacagacaaagccattgctagaaaatgtcattccaatgatcagatctggaaacaggctgccataaccacttttccttcttgtagactcagctcacctgtatatttaaactgttcttggcatcttgaaacacctatttctactcaggtactcattgtcctgttactgattcacctttctgatccttttcaaccagttttcccccaaggggggaaattttacttaacctctagtatttgaacaactcaatatttgaattgttgccccatttgcttttacctgtactgtattcttggtcatctcaaatggcgtctaaacccagctactttgcattccagaagtttccattccctccaattccacctaatttttcatctgtcctagttactggctctttcttcatgtcttatttctcttgctttgggagcttanaagattttacaagacctaattttgggttccttccttggagccatagttaccctgcccagaagagtagaanaaggggttcactccctgtttcgctcaccaacaccctctgtgagtctcatcatcanctgaacgatgatgcctttacagggtgcc

SEQ ID NO: 53359 - DNA, 656 bp, Homo Sapiens
cacatggagataatcatctgaaagttatagggcactgccactgctgaatcagagcatgcccaatatttgaggtggctctgatttcctggcagctgaactcgggtagtccagtggcctagctggtaccacatctattcccatccagagacattctctggcaagtgttctcagctgaaaagtggttggggatgattcttaccttggtaattaaatgaagctacacatttgggtaatctagcaaatgaagtattttttccctcttggcaacttgtgtcagagttactctggtctgagtcaactttcgctggggaaaacctatggaacctactgcaaaaagattgtccaaaatgcctaagaaaatactcctctgatgcatttagccttcaaccctacctgtcttgctgaagggagaaaaatgttttagtacattataggcccagcagcttttattcatgtccaccagctagttgcacagagaatcatgtgtacctaactaaggatgatctaggataagtaactcctgttttatattgagtattttagggaagtctttaaaagacttgttttatatctataaatctaggttattacaaatacaagaattttgtaccttaaataagcctcatttctatttcttcttcattaattctccatct

SEQ ID NO: 53360 - DNA, 730 bp, Homo Sapiens
ataagcttgcctggcaggaatgtacggaaaagttcgcaaagctgctagttcaattgatcagtttagtattcgcctgggaatttttctccgaagataccccatagcgcgagtttttgtaattatatatatggctttgcttcacctctgggtcatgattgttctgttgacttacacaccagaaatgcaccacgaccaaccatatggcaaatgaaccaagcccagttgttgcagtgattggttgtctttttctagacttgggatctgcaagaaggccaattgcctaaaatttctgagaacagtgcacaagattattttatcactacaagcttttaactttttaagttattgtacaagtattctacctaaatcttccaatttcctttaaatggtaagagtttctaaaacagacaataatttaacaagctcagctctgctttatctgagtttagtggtcctaatatatatgtagagaaagatggtggggttgttcacctctgtacagaccatctgtatgttaggtgacattgattatgggttataatcagggaaactaattgtatttagtgacaaaaataaaaagttttttttttataattcagtctgcttttggattttcatatatttaactttgcaaaaagatttactttgtacatgttacaggcttgattggtgtaaatctttttataaatacataaataaaagaaaaaaaaaaaaaaaaaaaaaaaaaaaa

SEQ ID NO: 53361 - DNA, 1087 bp, Homo Sapiens
  misc_feature (918)..(920): n is a, c, g, or t
  misc_feature (924)..(925): n is a, c, g, or t
  misc_feature (929)..(929): n is a, c, g, or t
  misc_feature (934)..(934): n is a, c, g, or t
  misc_feature (951)..(953): n is a, c, g, or t
ggtccgaattctccggaatcgtcgaccacgcgtccgatttatattccaaactacaaaatataccagtgaaaaggaagagggcacaccctggaatgaggactgtggtaaagagaaacctgaggaaatccaggaccctgcagctctgaccagtgacgctgagcagcccagcgggttcacgttctctttttttgattcagacactaaagacataaaggaagagacctacagagttgaaacagtgaaacctggaaagattgtctggcaggaagaccctcgtttacaagacagcagttcagaagaggaagatgttactgaagaaacagatcacagaaactccagtcctggagaagcatcattacttgagaaagagaccactagatttttctttttctctaagaatgatgaacgacttcaaggttctgacttattctggagaggagtaggaagtaatatgagcaggaactcttgggaggccagaacaaccaacctgcgtatggattgtcgaaagaaacataaagacgcaaaaaggaaaatgaaaccaaaataataaatgtcagctggttttgatactgaatgtgaacaaggctcacctaaggaaactgacccagaaaacagttttagctgacaaagaagaaatttcagagtgaaggaattttaaaaatctggctgacggaatatcattctggttgccatctttttctgtggaactcctctgcatttcttcctaagtaattacttcaaaaattaaattcaacttcttataaaggaagaacaagatagtcccttgaaaatactttttgtatataatctctttgccctctatcctgagtaactaatggacatcttctcatgccaagtttatatgaagccttcttaaataaatgagccaaagcacttggattttccagcctaaaaatnnnaganntttncacanttctttaatattaaaannnaaaaggggcggccgctcctaaaagatcccctcgagagggccccaggctttaggcgtacccagtttttttgtaaaaagggggggccctttaggggggcggatttataagtttgggcacggggcgggcgtttttac

SEQ ID NO: 53362 - DNA, 565 bp, Homo Sapiens
atggtcggggccccgggcaacagattgaagagagatcatgtgaagggcagttggtcaggcaggcctcctggtttcgccactggccctgatttgaactcctgccacttgggagagctcggggtggtccctggttttccctcctggagaatgaggcgcagaggcctcgcctcctgaaggacgcagtgtggatgccactggcctagtgtcctggcctcacagcttccttgcaaggctgtcacaaggaaaagcagccggctggcaccctgagcatatgccctcttggggctccctcatccagcccgtcgcatctttgacatcttggtgtactcatgtcgcttctccttgtgttaccccctcccagtattaccatttgcccctcacctgcccttggtgagccttttagtgcaagacagatggggctgttttcccccacctctgagtagttggaggtcacatacacagctctttttttattgcccttttctgcctctgaatgttcatctctcgtcctcctttgtgcaagcgaggaaggggtgccctcaagggccgacactagtatgatgca

SEQ ID NO: 53363 - DNA, 710 bp, Homo Sapiens
ggaggtttagcctgctttcttaccaaattcatgttacccagacttgtgttctcttgcgtcccttggactgcctgttgattgatggaaagtgtctgcactgacacttttcgtcagtagtctgtagtttcgtggcctcttttgattataactggggtcaccaagaaggtttacttaattaaataccgcatttctaagagaagatactttgtgtaagaaaagatgccacatttagtggtttaacttttgtaacttcacttgatagtttttaagcaattagaatggagttagggaaagaacatatcatactgaacaaatgtcattctagtttagatagcatttctaagataactgatactaatacttgttttcttccctataacataaaaaacttcactgttaagtcatgtcccttgaaacatgatagttacatacacagttttctctccacacataaataacaccactaaagttgttttgtaaggttccaaactaatatggcatatatcaactctacagtttcaaataaatgactttttaattgtaaaagattagttgaaaaactgtatgaatgtgaagatcacatgcttagtcatttttatgttcattccactttgtatatcttttctatttattgacttctcatgttctagagagtaggacttttattccgtgtacctgatatatatacaattaaaatatctgtgtaatta

SEQ ID NO: 53364 - DNA, 924 bp, Homo Sapiens
  misc_feature (24)..(24): n is a, c, g, or t
aatttggatggtgctccttatggnacactcctttctgtgacagccgaagagaaatggacggctacaggttctggaagtcagggtactgggccagtcatttagccgggcgaaagtatcatatcagtgcactatatgttgtggatctgaagaagtttaggaaaatagctgctggtgacagactcaggggacagtaccaaggtctgagtcaggaccctaacagcctttcaaatcttgatcaagatctgcccaataacatgattcatcaggtgccaattaaatccctccctcaagaatggctttggtgtgaaacgtggtgtgatgacgcctctaagaaaagggcaaaaaccattgatttgtgtaataatccgatgaccaaagagccgaaactggaagcagctgtgcggattgtcccggagtggcaggactacgaccaagagatcaaacagctacagatccgctttcagaaggagaaagaaacgggagcactgtacaaagagaagacaaaagaaccaagccgagaaggtcctcagaaacgtgaagaattatgatctctggagaaggacaggaaatcaccccatttgaaaaacagtttttataataaatgctagttttttctgatctgtctatacaactgctgataagccggctgggcaggagtgccacaccttttgattctgagcatttgattctgacttctgtactctggtggccactggatctttgggattaaagctctgttggatttgtacctcagaggaagacaagtggctgatcctttggactctgtaagagcattcttctagtcaaagggtggaatggcagcagcaactggaagaaaatgagttttttggtgcccacacccaagacacacacatgctgcactgtctcggaaagcagggccagctagagccaccatgttcttcc

SEQ ID NO: 53365 - DNA, 575 bp, Homo Sapiens
gcacgagtttttttttttttgttttcatgtaaaatagtatagagttgttttgttggtttaagagtaacattcagtagtaatacaaagttttttttctatgtagaaattagttttcttttcttgcttgcaatagaaatgcaatgtgataggtgtttctcttcttattttcattgtcacattatgtcttagcatctcactttatgaaaaaaaggagaaagataccaatctacagagccctgcttgttgaagcactagtttaatcaacaaaaaattatggcaatcgggggtccattcatctattgcctttatgttgttttttaaaagaaaaaccatgatgcctttgtatttgctgtttgcacccctgaaatcaattccatatcatgtttgaatgccatacattttgcacatgtactgtacataagtaatgcatactgtatttttatatgtgtgcacatttatcatcagatcttttgtacatagtggcagtattgtagctgatcgggaaatgtttgatatctcagcaattttgcatttttgtgtctcaaataaaagacattttgatgtaaactcgtgcc

SEQ ID NO: 53366 - DNA, 1042 bp, Homo Sapiens
  misc_feature (751)..(757): n is a, c, g, or t
  misc_feature (759)..(760): n is a, c, g, or t
  misc_feature (762)..(765): n is a, c, g, or t
  misc_feature (767)..(777): n is a, c, g, or t
  misc_feature (780)..(780): n is a, c, g, or t
  misc_feature (782)..(789): n is a, c, g, or t
  misc_feature (791)..(796): n is a, c, g, or t
  misc_feature (799)..(803): n is a, c, g, or t
  misc_feature (820)..(820): n is a, c, g, or t
  misc_feature (827)..(827): n is a, c, g, or t
  misc_feature (851)..(851): n is a, c, g, or t
  misc_feature (855)..(855): n is a, c, g, or t
  misc_feature (860)..(861): n is a, c, g, or t
tgagattgaactaggcatgaagtgctggtaccactccgtgttcgcttgccccatcctccgccagcagacgtcagattccaaccctcccatcaagctcatctgtggccatgttatctcccgagatgcactcaataagctcattaatggaggaaagctgaagtgtccctactgtcccatggagcagaacccggcagatgggaaacgcatcatattctgattcctacctggaaggaattttgttgaaaggggttttcacctgtgagccttggtctgtctcggtagggtggtcaacttcagtggactgtggttggtttcagagcgcctggctgaggagttccactgaggggagcactggagcagccctttggcagaggctgaggagggagatggaccagcccacgcctggcacctggctccatggcataaggaaagggagatgctggcctctgtgctcctgctgtcttttcctgtttctgtttgcgtttgacttagtagcaaccgacagagtggcaagggatttggtcttcagcagtagacatccttccacccctgccctcagccaagtctcttgctgccatgccaatgctatgtccacccttgcccctcggcccaagagtgtccagcggtggcccacctcttcctcccactacagcctcaacagtatgtaccatctcccactgtaaatagtcccagttagaacggaatgccgttgttttataactttgaacaaatgtatttactgcccttctcnnnnnnncnncnnnncnnnnnnnnnnnccncnnnnnnnncnnnnnnccnnnnnccccccccccccccccnccccccncccccccccccccccccccccccncccnccccnnggggggcggggccctttcaaaaaaatatccccgggaggggccccacatatttctccctcccacccctttttttttgtaacaaagaggggggtccccattatagggggggcccctattatataaaaaaacagaccctgtggccgccccccttttttttaaaaaacccccccggaggtaaggg

SEQ ID NO: 53367 - DNA, 902 bp, Homo Sapiens
  misc_feature (677)..(677): n is a, c, g, or t
  misc_feature (702)..(702): n is a, c, g, or t
  misc_feature (707)..(708): n is a, c, g, or t
  misc_feature (710)..(717): n is a, c, g, or t
  misc_feature (720)..(721): n is a, c, g, or t
  misc_feature (763)..(763): n is a, c, g, or t
tgaatatgttcatactttcatgaatgtctgcttctttccacgattgaaagagttcattttgaatcaggattggaatgaccccaaatcccagcttcagcagtgttgcttgacacttaggacagaaggaaaagagccagacattcctctgtacaagactctgcagacagtgggcccatcccatgcccgaacctacactgtggctgtttatttcaagggagaaagaataggctgtgggaaaggaccaagtattcagcaagcggaaatgggagcagcaatggatgcgcttgaaaaatataattttccccagatggcccatcagaagcggttcatcgaacggaagtacagacaagagttaaaagaaatgaggtgggaaagagagcatcaagagagagagccagatgagactgaagacatcaagaaataaaggagggcatgcaagtgtggagtatttacttgctcagtaactgtgactgttgtctattgagacctagcctagttttcctgcagacaatgaacgaagtgtgctcattgaaataaaatacagagtcaaatcgctattgttgttttaatgatctgtttttagctggatggtctttattacaaagtattagatttttcttctatttaacggaaaacttgactttggtgaatgtgcattacttccttttattttgctnctctaataataaaattcaagaagcntgccnncnnnnnnnncannccccggccggccggccccgggccgcccgcgaggcaagcgggnagccacgcccccgcgacgcgcacacggccccgggcgccaaaacagaaaccaccacaggcggggggggggccccctctaaataatcccccccggggaggggccacacttttttcgcccaaccacccccttttttttgtgc

SEQ ID NO: 53368 - DNA, 894 bp, Homo Sapiens
cagtcacagccagtgtgagtgctgctctttccacctgccttgcaaattctgtttcccaggggaatgtgtctactgcctggtggttcaaaggttggaaggcagggcagaggtgggggctgattctgctgggacaggtcttccagaggcagcctccccccactgcctgtccccgtccccaccaggctgcccttgggatggaccttttcattcttttctttatattctagacagtctctgttgtctcattgtgttgctgtcccatttttcaggtgagggtaccgtggtaggggagtggcctgcccagggtcacactatgagaggcccccacctgctgcctttggacgcagccccctgctgctgcatccaccacccttcttacagatcagcgcgcacatggggtccttctgctgtctctggggcgagtcttggagccccctggggggctctgttggtgctgatttggacccgtttctctttttaaactgcacatcataacagggcttcatgtcgagcatgattttaatcataaatgcacttctgaggtgcaaggattgagctcagagctgctctgttgtggcaaaacccaaagtgctgtgatgtgtggctgtgacaagcctggagcgggtcctgtgagcgccgcctctgtctcctgcttccccactgaacgcctgctgaatgtgccgctgactcagctgtgctgctttcagccctcctgtgaggggcggtcccagtgcacagatgtttttcaagttcctcagtttgtactgaaattagggattcatcagggcaggaagcaggcaggcctctcagaagggagaggaggcctccaaatctattgagtcccacagtttgctcaagcccaggcaaatttctgtgattaaaatgaattcatca

SEQ ID NO: 53369 - DNA, 674 bp, Homo Sapiens
  misc_feature (582)..(582): n is a, c, g, or t
acaaatcaacacgtaatgagttccgaaggttcatggagaagaatccagatgcctacgattacaacaaggctcaggtgccaggaccattgacaccagaaatggaggcacggcaggctacacggaaaagggagcagaaggcagcccggcggcaacgggaggaacagcagcagaggcagcaggagcaggaggagcgtgaacgagaagagcagcggcgatttgccgccctcagtgaccgagagaagagagctctggctgcagagcgccgactcgctgcccagttgggagcccctacctctccaatccctgactctgcaatcgtcaatactcgacgctgctggagttgtggggcatccctccaaggcctgactccctttcactacctcgacttctctttctgctccacacgttgcctccaggatcatcgccgtcaggcagggaggccctcttcctgatctcttacagctctacctggggccaactcagggacctgagagggcacattcacagcagccctaggttttttcttccccgtgaaaccagagatgatttggaagatgggggtgaaggacactcgggaactanggcaaagacagggctagaggtatgtggagctggtactgtctctggaattttaatcacaataaagtttggcaaggaaaaaaaaaaaaaaaaaa

SEQ ID NO: 53370 - DNA, 566 bp, Homo Sapiens
ttttttttttttttttttcagcattaacaactcttttatttgaaaacgtgggtggctctgaaaagagccttttgagttcacaggtgccccttcgagacgcgggccgggctgggcccacttgggccggacgtcagcctcacttgccctttgccttgtggtgactctccgtcttcttagggagcagtacggcctggatgttaggcaagacgccgccctgggcgatggtgactttgcccagcagcttgttcagttcctcgtcgttgcggatggccagctggaggtgacgagggatgatgcgcgtcttcttgttgtcccgagccgcgttgcccgccagctccaggatctcggcggtcagatactcgaggaccgcagccatgtagacgggcgcgccggcccccactcgctccgcgtagttgcctttgcgcagcaagcgatgcactcgccctaccgggaactgaaggccagcgcgggacgagcgcgacttggccttggcgcgggccttgcctccttgcttgccacgaccagacatgacagcgatagtagtcaccgagagaaaccctcgtgcc

SEQ ID NO: 53371 - DNA, 728 bp, Homo Sapiens
agggctacccacttcggccagaacttattgaaagcgcaatgtacctctaccgtgccacgggggatcccaccctcctagaactcggaagagatgctgtggaatccattgaaaaaatcagcaaggtggagtgcggatttgcaacaatcaaagatctgcgagaccacaagctggacaaccgcatggagtcgttcttcctggccgagactgtgaaatacctctacctcctgtttgacccaaccaacttcatccacaacaatgggtccaccttcgacacggtgatcaccccctatggggagtgcatcctgggggctggggggtacatcttcaacacagaagctcaccccatcgaccctgccgccctgcactgctgccagaggctgaaggaagagcagtgggaggtggaggacttgatgagggaattctactctctcaaacggagcaggtcgaaatttcagaaaaacactgttagttcggggccatgggaacctccagcaaggccaggaacactcttctcaccagaaaaccatgaccaggcaagggagaggaagcctgccaaacagaaggtcccacttctcagctgccccagtcagcccttcacctccaagttggcattactgggacaggttttcctagactcctcataaccactggataatttttttatttttatttttttgaggctaaactataataaattgcttttggctatcaaaaaaaaaaaaaaaaaa

SEQ ID NO: 53372 - DNA, 574 bp, Homo Sapiens
gtggctggaagagttggggcacagccagttctgaatgttggtggagggtgtagtggctttttggctcagcatccagaaacaccaaaccaggctggctaaacaagtggccgcgtgtaaaaacagacagctctgagtcaaacctgggcccttccacaagggtcctctgaaccaagccccactcccttgctaggggtgaaagcattacagagagatggagccatctatccaagaagccttcactcaccttcactgctgctgttgcaactcggctgttctggactctgatgtgtgtggagggatggggaatagaacattgactgtgttgattaccttcactattcggccagcctgaccttttaataactttgtaaaaagcatgtatgtatttatagtgttttagatttttctaacttttatatcttaaaagcagagcacctgtttaagcattgtacccctattgttaaagatttgtgtcctctcattccctctcttcctcttgtaagtgcccttctaataaacttttcatggaaaagctcctgtgccaggagctcagtctgaaaaaaaaaaaaaaaaa

SEQ ID NO: 53373 - DNA, 730 bp, Homo Sapiens
  misc_feature (665)..(665): n is a, c, g, or t
  misc_feature (718)..(718): n is a, c, g, or t
  misc_feature (729)..(729): n is a, c, g, or t
ctggaataccttccttcttaaaatctgatcatggcagggatatgcagggcactttttactatttggccttctaagcagattgggaaggaggtattttctggttttcgctttcctccgacttaataggacttgccttctccctgggcagggagagaggctgggttggtgctctcccttactctactcatactgacttagagcctctggctgctgtttgggcatccaagaaagggaggggaaggaatgagctaaaaacaaaacagaatgaggtgggaaagggagattttcttctttacagaggaaaataggaaaccctccaagaattgtgcaagtaaagacatttgttgaatgcactgagtcccttggtgtagtagcaataaggaaaaatgaaattactttcctgtgcacacagtccagcctaattggtatgtgatgttgcacttagcagccatgtggtgggcatgtgtgactactctggttttcactttagtttctaaactttttatccctctcaagtccagcatggatggggaaatgtctctggatccccacagctgtgtacttgtttgcatttgtttccctttgagatttgtgtttgtgtcctgctttgagctgtaccttgtccagtccattgtgaaattatcccagcagctgtaatgtacagntccttctgaagcaagcaacatcagcagcagcagcagcagcagcacaattctgngttttataaana

SEQ ID NO: 53374 - DNA, 629 bp, Homo Sapiens
gtgatgaatataccgtaactcaaaatgtgatattttcttaaaatcactcttttatgctttaggaactggttggtctccactttgattattagtgtaaagagcctgagtatacgtggatttcattgtaaaatttaactccttgtcttttacttggggcacggggcccctggagggcttccctactttccccactatgttaacaggtaattctgatttatgcctttagtttgacttatttttaacaaaatattagaagttatgctttaaaatgtttaatgtggactgaaattttcatcttttgtttgagaatctatgaagtgtatcatatacgtggcctaaagcaaggtgtgtattttgttattctgaaattgttttgcatctggacaaatactaaatatcccagtggcctttttttttttttttttaaacctgtgtatccatctcatccttttgcgcattcctagtaagcaaaaaaatttgttatgccatcttcattattcgaattacagactgaaaaaaattttggcccagttttttaaagaagttttagaattttgttttccccatggaaaaggacaaagttctgacctgttacattgggcctggtttttttttttaaagaaagatat

SEQ ID NO: 53375 - DNA, 1055 bp, Homo Sapiens
  misc_feature (703)..(703): n is a, c, g, or t
  misc_feature (720)..(720): n is a, c, g, or t
  misc_feature (842)..(842): n is a, c, g, or t
  misc_feature (845)..(845): n is a, c, g, or t
  misc_feature (958)..(958): n is a, c, g, or t
gccagctcaccccagggacacctccaccctctgcccttcatgcatgtaccactggggaagaaatcttggctcagtatttacaacagcagcagcctggagtcatgagttcttcccatctgctgctgactccctgcagggtggctcctccttacccccacctcttctcaagctgcagtccaccgggtatggttctggatggttcccccaagggagcagcagtggagagcatcccagtgtttggggcactgtgttcctcttcgtccctgcaccagaccctggaagccttggccagagacctcaccaaactcgacttgcggcgctgggccagcttcatggatgctggagtggagcacgatgacgtagcagagctgctgcaggagctacaaagcctggcccagtgctaccagggtggtgacagcctcgtggactaaagttcccagtgtgggagaaaggagctagtttgcaataaaaacagctggatgcaggagcccagtgtcttcatgcagaggagctcaatgtcgcgggactagctacaccaacatatgcactttttacatttagaaacactgtgattagaccacagaacaataaatatgtgccatcagaccaaaaaaaagtagagaaaggagctgaactccactctcgatgctacttacagaggacatctgtaaagtcttcataaaagaccttgaatgatgcctangatggcagagcccctgngtcctactccatccctcagcctttgtcctttgtctggcctcctgctctccagatctgtaaactgggctcaaggactgtacaagcagagtacaactacccgccctcccggtggcaggggcccntgnttggggtttggtccctgtgtagatgattcccagaaatctcattcatccagctccctcttcgaacagaaggtccccatggtcaaacagctggcctggcattggctggtactggnttgcatcatccctcatcctcagagctggctttccagggcagtgtgggaaaacctgcattgagttcctcgaaaatggtgggggaaaacctaaaaaaag

SEQ ID NO: 53376 - DNA, 598 bp, Homo Sapiens
gggatctgagccaccctccccgcacacaccatgcctcctgtctcaacactgacagctgtgcctagccccggatgccagcacctgccaggtgccgccccggggcaagggccccagcagccctatggtgaccgccacactgtgccttaatgtctgccgggggcccaggctgtgctgtccctgcagcacgcctccttgcagggatctgagccaccctccccgcacagccctgcaccccgcccctagggttggcagcctcagttggcccctggcagaggaacaaggacacagacattccctcagtgtggggggcaggggacacagggagaggatggttgtccctggggagggccctctggccccaggcaaccttagcccctcagaacagggagtcccaggacccagggagagtgtggggacaggacagcctgtctcttgtagcttcctggggtgggaggcacaggggcaaagcaataccccagggaaagtgggaggtggtgctggtgctctctccaggcccaccatgctgggagaggcggccagagcctggggcctccagcctgggactgctgtgatggggtatcacggtgatggtcccatt

SEQ ID NO: 53377 - DNA, 698 bp, Homo Sapiens
tttaccctattcatatttgtcagtaattcaaaacttatatgtgtaactgaacgcgcatgtaaggtatggttttatttattttttttttttttgaggaaatttaaatgctaaagaaacaacgaaatgaaaaggtatcaggaaaaaaaagatcaggaagttgtattcaggtacaaatctttttttaaataagtattttgttgaggttgaagaattgctggcaattaaaagaatagagctaattatggctttcatcattcattcatgtatttattgagcacctacttattatggtgctcaacacttgttactgcaagctaccttaatttcccaagagtggtgccttactctgttttttctgatatggtcttccaatcagtgtgtgtaacatacctgttgtttatcagccattgtaggtggctgtgtctgttgcatcatcataagaagtttaagctttgtgctctgataaattgtgttctgttaaagaggttagtaggatgaaaacagcaaaacaataattttttcaacaaattgtaaattataagaaaaagagttggtttgtgtacaacaattttaatgattcccttgttcatttttgctgtgaaatgcactgaaaaaaatcctcaaaatgagttatagttcctgtgttgggaaaattgaccaataataaaactagagaacaaaccacaaaaaaaaaaaaa

SEQ ID NO: 53378 - DNA, 523 bp, Homo Sapiens
aatcgacatggacaactacatgctctcgagaaacgtggacaacgccgagggctccgacactgactactgaccgtgcgggtgctctcaccctcccttctctccctcaataatgctcacttctgatttgatgttgatatacttttatggtaactacatagatgttataagaacataaaccaacattataaacaatggccacatttagttactctaaatgtaacaaagaaattagatgtctttatttttctgtgattgtacaaaaacaacaaaaacgaagtgctctcagtcaggtttttccctccatatttttggtcacttttgataagtttgcatgaaaccattttggtgcatttttagttgggaatggtacatttttgtaaatccacccagtgaacatgaaattgtacattgtgtataattgttcattagaaaggacagttttacatgaatattcatatatttattttgttttaatttgaattgcctgttcagggttccttatgcagagaaataaagcagattc

SEQ ID NO: 53379 - DNA, 482 bp, Homo Sapiens
gttgctgcaagctatctgcccaagttaatgcaaatggacacattttttatgtcagaaaaacacacacacacacacacacacacacacacacacacacacacgaaaaacaaagaaaaaaatgcttgagctttttctaacttccccttgcagtctgttgtgtgagcagcctgtttatttctctaatattatgtcagtttattctctttaatggactgtaaaaaaatgtaatcacaagagtgccaaatatcttgaaatgccaaaaggcattttagtttcttttctctgtgctctgagtccacgtacaggaatgcttggagtgtcttttctgttatttatagggattctcttaaggcacaccagctgcctgttttgcatggtatttgcaaaaatgcctcttgcgtgaggaaatcttttaccattttttgtttgcaactttggacctcaagaggtttcccttcccttccccgttccctcttttctta

SEQ ID NO: 53380 - DNA, 761 bp, Homo Sapiens
cgtccgtaattaaccacatgttgtagtaactggtctttttatatttaagcagaatcctgtaagattgcttgtctttgcttaaaaacaatacctttgaacatttttgaatcacagaatagcggtaccatgatagaatactgcaattgtggtcagaattacagtatgcacaaagaattaattagcattattaaagagtcctcactaaacatttcatatgatcacactgaagaactgtaacattccatagagtgaagtggttcaaatttctcttggaatttttacttttgttggccttattttatgatccttttcatatttcttttgacttagagtattaatacatggccaaaataatttagttactacctcatacaaacaatataatggttactacacatcacaggaacttagttttggtttaagtcatttttgattgcttttttccaatggaatatgtatataccaggttttagcaaaatgcacacttttggctctttttggtatatgttctttatattttaatgtgagtatatacactaagaacaaactaaattgtgatttatgatcttcatttattttaatggtaatggttttaaaatatgttcctgattgtacatattgtaaaataaacatgttttttaacatgctgttgtatagtagcttgtcatctggtttaatctgtatatagtaacactaaaatatattaagaggggaaagctttatttgttttgtagttaaattcttaagtattgaaattttgg

SEQ ID NO: 53381 - DNA, 593 bp, Homo Sapiens
ttttttttttttttttttcaaagagtgaaatttatttatttggaattcagaaattccaggttgtatgacatcagttacccaataagtgtgaattctccaactcttcttttaatcccattttagaatttaatatagagatctctgattggcaggaacactagaaataaatgttccatggccagtagtgcaaatgggggattgtaggttttgaaaaaccaccctaagccatattaagggggttggaagaaccatcgaagcctaaggcatagaagaaaatttggggttaagaaagatgaagaacaaaaaacagctttattgcttatacatgaccaagaaaaggaaaacatggcaaaaaaaaaaaaaaaaagggcaggatgtgtattccttgcgaaagaacaagcctgctaatttgggaggaagggaaggtcaggacccaaatagagccaatttcctggagatggcctgttctactggcacattttcctgagtctgtgcttaaaacctttcaggtactttcagggcacagaaacaatgcatgctaaaaaatatatggccaaagctccttcctggagcaagttaaatctttgttggaa

SEQ ID NO: 53382 - DNA, 818 bp, Homo Sapiens
  misc_feature (710)..(710): n is a, c, g, or t
ggattgaatgacaatagtgcccccgtttttagcagaccagccttaactctgggtttgaatcctaaggagattgccacagtgagacttaaggaaatgtttggttggcagatgagcaccaatgactgcagcgtggagtgacgcactgcatggtctgtttattctctaattccaatatgtcttttgcttccagaagcaagaaaagtttcttctctcccctccttcccacccttttttcaaaggcaccacaagtatagacagttgcactacatcaaatctttttttgacacttgtagaaaccagtacacttttagattagacagtatcttcttttaatattttgatttgttttcctttagtttgaaaagttgtataatacttaactgactgtagcaaagttttatatgtggtagcatacctttaatttatcctattacaaaactgttctgaattttcttttggtttttaaaaaacaaaacttgttgcttagaagccatgaattattttattttacttcaactgtcgaaacttccttgttttaaaaaatgatcatttgggttcactcaggaaatgcatgtsaggraacttgtattataagtttattagttgtgatgtatcagtaactgctgttacccctttttcaaagaaatgtaattgattttgaagttttctagattgtcacatgctttgtgactaatgcaagaaagcaagtnctgtgttgtatttgttctagtcatttttattcaggctatatattgtagcttaatttttatttgcaattaatttatttaaactaagtaaatacttttcaaaatacataa

SEQ ID NO: 53383 - DNA, 571 bp, Homo Sapiens
  misc_feature (557)..(557): n is a, c, g, or t
ttttggtttcttgtctccttatttcctctttaccatttttggaggggaagctattttttttccttgatctttcccagtgatatggattgaatctggttggtcatttccaccaggaatcagaggcagctgttaccaggtttcggccttccagttgatccctccactgtccaggctgtctcaggaggaggtgaatcagagctagtctgtcacctttccaatctaagccgaagccacaggtgcctgacaggttcccttctaacaactatttgaccaagagaggcaatcagggggttgtatactgcactggattcgccagagaagggaaaatttaattagtgaaaaggaaagaacactaggaaacatttgagaacctgcctctatcccagaatgtgctggagatttgacactcaaatcagtgtttagtcttctgcttggcaccatagcttaacctgcagtttcttcaaaatgcccaatgccttgtttcctattaccttagattgcaaaccagtctagggaagtctatgagaaagtagcatttaattaaagtttaaaaaaangccggtggatcact

SEQ ID NO: 53384 - DNA, 932 bp, Homo Sapiens
cccatgtgcatcctgggtgcattctttggaccgatccgacttggcgctcagagcctgcaagtgctggtctcggagttgatcccatgggccgttcagaacgggcgcagagccccatgtgtcctcaacctgtactatgagcggcgctgggagcagtccctgagggctctgcgggaggagctgggcattacagcaccacccatgcacgtccaggcttggcctgagctcctgagccagcggggcctggcctacctcccccatcccctgcttcccttggaggcagagggctcccttgactacctttgttcctcttctttgaacactgacccttggacaacatttatcataatttgtcataaccactgctgagtggccttgaggacgaaccccgcagggagcaagcagtacagtggcattcccagggggaccagcagctacccaaggagaaccatgcatgaacagtatcagtcgtctgggctcatgctgggatgtcgcagtgctcctgttgcaactcctcccagccagccaggtttgctgggggccaggctgggtgtcctcacaggagtgagggctacacccaattccaaaagcctgagaagagagaagtggagggggaggcgagtgtgtgactaaaggctcccatcaggtaaaaaaaagaaaaaaaaaaaaaaaaacaaaaaagaaaaagaagacgagagaaagaaagggtggggcgggcacaagaaaaatgccacagagcgggacacagagcgcgcgaaccgggagtggtgaggacaagagggtccccaccgagagaggcgcgggctaacaacgcccggcaacgaggcgccgacgaaaaaaacacgaagaaggaggagaaagcgggcagccgcgagcacacagggacgagagaacacactgccgtgggcgagcacagaaggcgagcacagacgaaa

SEQ ID NO: 53385 - DNA, 488 bp, Homo Sapiens
  misc_feature (460)..(460): n is a, c, g, or t
agatgtatttcccaatcaacctggtggaataagaattctgaaaacaccatctattttgaaagctatttttgatacaccagatgaggatccaaattacaatccactacctgaggaacggccaggaggcttcgcctggggtgagggccagcggcttggaggttaaagcagcagtgccaataatgagacccagctgggaaggactcggtgatacccactgggatcttttatcctttgttgcaaaagtgtggacacttttgacagcttggcagattttaactccagaagcactttatgaaatggtacactgactaatccagaagacatttccaacagtttgccagtggttcctcactacactggtactgaaagtgtaatttcttagagccaaaaaactggagaaacaaatatcctgccacctctaacaagtacatgagtacttgatttttatggtataaggcanagccttttcttcctcttcttgatagatg

SEQ ID NO: 53386 - DNA, 790 bp, Homo Sapiens
  misc_feature (748)..(748): n is a, c, g, or t
  misc_feature (751)..(779): n is a, c, g, or t
  misc_feature (782)..(783): n is a, c, g, or t
  misc_feature (785)..(787): n is a, c, g, or t
agagttgttccaatcatgtaaccttctgtaggggattactgagacagggaagagaagtgcaagaattggttgctggtgctacatggcggcagctttgacattttctctgggttctactttattttttaaaatctttacagttctcaccatttcacgtaccttaatccaatctttataaaagaggcagtctagagaactaggactgctcagccttatcctggagtggagcatttagcccaggtcttaattctccaagaggaggaatacatagtatggtaaggcaaggaactgggtggaatgtcaggttgcctgcccaatgggagaggtagggtttttctagcttgtgtgacagaagtagcaaaatctggtcctcccccctcccagtgtagctgtggctcagagttttttctttttgttgtcacttactcccttgtgattgaattttttctcctgcatccatggcaggatccccagccagtatagagacttggttggcatcttctgctgcagggactaaaagtatttgactggggcacatgtggctgttgtcattctttctgcatcccactgttcccctccaatttatgttattttctaccctgtttttcagttccatctctgctctgtcctatagctttataaaaccagagtgtgtggggctgaggtcaggagtataagtacctgccttaggcactattccttatataacaaaaatattaaatatttttttcctcagtaaaaggatganaannnnnnnnnnnnnnnnnnnnnnnnnnnnnaannannnaaa

SEQ ID NO: 53387 - DNA, 500 bp, Homo Sapiens
caccctgtctttaggggagaagtctcatgtttatagtgcctgtgaggtcagggaaggcactgtcaatgctgttttgaaactttgtttccccactgttcagctcacaaaagtattttatcaccctcacgcccctgccctcacccagaagcacaaagtgaaatctgcccccagcagcttcccaagctgtgacccacagcaggttcctagttgttgttttggaccaggctgctggtcatggcccttgtccaactttctgagatctcaaaaagcagcagcccaagccagggcgagtggccgtgggagggttttttggtgtttccccttccctcaacttttagttttgaaaaagtgaaatctgcagtaaagttgctagaataatgcaacaaatacctgtacacctcacctggatcccacagttgttagttcttcagcacatttgcattctccctttctgtgtgggcatcacagatacaacaaagttagtatagcgggtgagtagg

SEQ ID NO: 53388 - DNA, 710 bp, Homo Sapiens
  misc_feature (708)..(708): n is a, c, g, or t
agaaaatcatgccctatgtgtcttaaatggacacaatgcatttgtatctggtagttttaagcatgcgcttggacagtatgtgcaagcctttcgcactcaccctgacgaacctctctatagcttctgtataggcctaacctttattcatatggcatctcagaagtatgtgttacggagacatgctcttattgtacagggcttttcctttcttaatcgatacctcagtttacgtgggccctgccaggaatcattctacaatttgggccgtggccttcatcagttggggctgattcatcttgcaatccactattatcagaaggccctggagctccctccacttgtggtagagggtatagaacttgaccagttagacttacgaagagatattgcctacaacttgtctctcatctatcagagcagtgggaataccggaatggctcaaacgcttttgtatacctattgttctatataaagcaccgcaactgagaacagagcaatggcagctgctgtgtgaggaccagtgtcttctgtctcagggcttattatttgtaactccaaaatagaaatgacaatttcagaattacctaacaaacagtgtatttatttttaatatgtgataatgatcttgtggtatatatgcaaaattattcctacaaaaatttgtatattgggtctgtcattttcctttcacattctatagtgaattgntc

SEQ ID NO: 53389 - DNA, 588 bp, Homo Sapiens
caacccacagtatgtaggaaaatgggctgtttcacaggcctggccacgctctcacggaaccactggcatcagatggtgaagtgactgctacccggttgccatctgttgaacagacttttggatgaagtgtgttggggaagaggataaggttatatctaggacaactctttgagttggtccttcatataagaatcgtgacggtaagagaataaacacttgtactgggatcagaatacatgatggatgaaattctttacatgttttagcagaatgaatttgtttaatataataaagtttgctacttatctgtatgtaggttgctaaaaaggattttcttaactcagattttaagccaaataaccatttaacactagtatttgttaaatggggtatttttctgtatttgtatgtttcactataataagggaattaaggataatgtgcattgagaatattttgaaaaataattgactcaaattttatttcttggtcttttgctgtttaaatgatgattttgaaagattaaacctgtactgttggtattgtgttagtgtatggaccaatactgcctgtaataaagatttatat

SEQ ID NO: 53390 - DNA, 607 bp, Homo Sapiens
ccgacgcgtgggtcacaagtgattgaagcccagtgaattagtcggttagaattcgttctacaacatgatagaacttttcttactagcttcagaaatgcacattgatttgtgctatgatgggtggtgtttgtatcattcactgttctataggcttatgatctgagcaaaatgtgaacttcagtatgtttactattgctcttacttgaaaactttttttcaaaaaaagcacaaattaaagtagtaaattcatatccatagatagttcattcattcaacaaatatttaccaagttcctaatataagtgaaggaccacttctcatattagattactaagtcatttgtatgaatatgtgtggcagtgaagagaacaggtctttcaaaaagcatttgattattttttttaaatacactctcttatttttctacttgtttttttgttaatcatagcaggatatgacaactcttatttgaattgattttttcctctaatgtaataatggaagccaaagtattcatatttcttaagatagccctaaatgtcctcttgaacttcttactggaacaatgtttgatactctagtatgtaagctgtatttatgtcatatt

SEQ ID NO: 53391 - DNA, 687 bp, Homo Sapiens
agaataccaagaaaacaaggctccagggaagaaaaagaaacgggctctggccagcaacaccagcttcttctctggctgctcccctatcgaagaagaggcccactgaagttggagtcatcatctctacccccagtctggcttgggagatgctttcaggttgcagccagaaggggttttttaaatgacttctctggatttcaggtttcttgctgttgaaaaaaggaacaaagcgttactgaaaagaaggtaacctttgttggatgtgggccttagcctccaggtccagactactactctatgttctccagaagggtgctaagtcacctactgaagagagaaccaactgactttcctattgactcatcaggaaccagtcctcagtctggtcaagttgtttcttatttgtgagcagttcaggctatctcctgatggggatgaggccaaggctttcttatcttttggttgtctctgcttaatggaggagcctggcctaggatggaggcctggcttagatctttcattccacctcaggaatgaggttgtgatctttcctgtcctgaccctctctgaattatgtttcaatagtactcttgattgtctgccatgttgttgaagcaaatgaattatttttaaatgttaagtaaagtaaataaaccttagcccgtctaaaaaaaaaaaaaaaggggg

SEQ ID NO: 53392 - DNA, 769 bp, Homo Sapiens
  misc_feature (633)..(633): n is a, c, g, or t
  misc_feature (703)..(703): n is a, c, g, or t
  misc_feature (757)..(757): n is a, c, g, or t
aaaggaacatataattgtatggatggtaggattaagttttgagtagttttgtaatcaagattttatgtaacatttgtaaagggaaaattagcacttttgtggttcttaagggaaaagaaacagaccttgtggagattataatttccttggtttctgttaccactgttagagggagttgtatcatttaacatatagtaggatagtttaagtgtagggaggacaattattgtctgaagctaaaatgggttatttataggactgatggaaatgatttcatctctgccatctctaaagcacttttcattgaacatgttagcctaggatacgtacagtaaattaacaatgatagcagcagatgcctagctcatcctgggtttgcttctgaccttgtcatgtgtgtgccaccaaacacgttattggcacctttttaaataagctctcatgatcaagatggtgatggtagagaagctgcccggaataaactgaatttcatatgttctaaaatgactagcaatggtttaaaaaggaagaagagtggaagtgaagaaggtggtataaatgctgtcaatttttttttaacccaagtattttggtggggaaaagcaagtatctattgcttagcatatgtaaagntgtagtctatatttatggggccattgcttaaagattataaattatgtaaatacattaataaattctaagnttcatttgacattccattgaatctcgcacccagtcttgcgtatgcctgcccagntttcagcctctt

SEQ ID NO: 53393 - DNA, 753 bp, Homo Sapiens
  misc_feature (583)..(583): n is a, c, g, or t
  misc_feature (683)..(683): n is a, c, g, or t
ttttttttttttttttctggggtcctcccttggtggttgcctggcaccatcccatccatcttagacttcttatttcttggcttctgctgagaaataagaagtctacttcacgtacttgaaaaggctttcctttacacttccaggaccaaacagcaacttcctgccacacacttccaccctatcactgggagaaatccttttctggacatgagcctttgacctgggtggggcagaaagaaccacaaactccatctcccaatagaactttgaaattcactcagcttttcctttcatgctgtttgttgcctgcttgttgcactcctcctgccccagaactgcaagatttttagcttcacccctttctgagagtaatgttatcttttatcagaatcagtatcagttcccctgtattctgtgcttcatcgaatttgcaagactgacctcttttaagcatttaattcactcccagagtcatctggtcaggttgcaatatgaggacttctctgtctcctctgaagcctgggacactgagcttacttaatacattagatgttcaaaagaggagcgttgtttcatctttcanaatgttaggccattactttgagtataaaatcgacttattaatgattagtaatttttctaaagtattgggaaaactttcttattttataagatcttaacangcttaaaaaagaattttatgaccagaatccaacaagagctctattttggaattgtgcccaagttggtgat

SEQ ID NO: 53394 - DNA, 655 bp, Homo Sapiens
cccacgcgtccgggaatcggcccaccacccatttactgctccccaccccagtgacatacatctcctgtacactgagcccaaaaaggcccgtagccaacactatgacttggttttaaatggcaatgaaataggaggtggttcaattcgaattcacaatgcagagctgcagcgttatatcctggcaaccttactaaaggaggatgtgaaaatgctctcccatctgctccaggctttagattatggggcaccccctcatggaggaattgccttagggttagacagactgatatgccttgtcactggatctccaagcatcagagatgtcatagccttcccaaagtccttccggggacatgacctcatgagcaataccccagattctgtccctcctgaggaactgaagccctatcatatccgagtctccaagccaacagactccaaagcagaaagagctcattgaatcatgcataccatgcagaaagttgagcttttaggttttgtcctctttgcttccccaaggctaaagtcagatctagagttctgccacaggtctaacaatcaagtctttagatggaaggaatccaggcaacattcttcaccacaacgaagaaacagataaaagatacccaattttgacttgaaaaaaaaaaaaaaa

SEQ ID NO: 53395 - DNA, 960 bp, Homo Sapiens
  misc_feature (646)..(646): n is a, c, g, or t
attaaatgtagttggaatagctagcattgcagctacagtagggaactgtagtctagttccctacagaaaacccaaggagtgaagggacaggattttgcctaggcaaaaatctaagactcgtgccctcctggtacatggggttttaagactgaatgtgtaataggagcactgcctttgccaaatcaaatgagtgacaggttaactagaaaatgtgacaatcacatttcctcttagctcaaataattctgtttttccaaagctttagcagcttaattaaatctgttggactgggggaggagagagctgttctctagtggttaacatggtattctttaagaagaaaaaacaaagccaaagaaaactcattatctggcatgttcgccttaaagatggtactgggtagaatctggagttttcatctcttttcaaagctgcatatctcttatatttggtattggcctctaagtctaatattgcagttggaattcttgctgtattattttttaagcaagtgttaggtgcatttaactgctttcttcatccatgacgacattcccaccatgggggtcttgacaaagcagagtaaaaatatgctgtttacattgtttacttacaagtaaggagcctgaaataacctgtagtttcnaatgcaggccctgatttactggcgttgtcagtttcaattatgaaactgaagtttggggcctcctctttatcatggtttttcccctggagcagttggggttaatggcattaaaaagaaataaaaggtctttgtcagtgggacgacagcgcccggagggggccggccgcgcgtcgggccacgtatgcgcactggaacgcaagcaagaggaaacgggccgggggccgcgccccgaagagaccggcaaaggggggggccccccaaaaaatccccccgagggggcccacttttaccccaccccgctttttttgggaaaa

SEQ ID NO: 53396 - DNA, 585 bp, Homo Sapiens
cgaaacactgataatgcatggatggagacagaagctgtgaactaccatgacgaaacaggtgagataatggataatcttatgctagaagctggagatgatgctggaaaagtgaaatgggtggacatcaatgataaactgaagctttatgccagtcactctcaattcatcaaacttgtggctgagaaacgagatgcacactggagcgaggactctgaagctgactgccatgcgttgtagctgatggtctccgtgtaagccaaaggcccacagaggagcatatactgaaaagaaggcagtatcacagaatttatactataaaaagggcagggtaggccacttggcctatttactttcaaaacaatttgcatttagagtgtttcgcatcagaataacatgagtaagatgaactggaacacaaaattttcagctctttggtcaaaaggaatataagtaatcatattttgtatgtattcgatttaagcatggcttaaattaaatttaaacaactaatgctctttgaagaatcataatcagaataaagataaattcttgatcagctataaaaaaaaaaaaaaaaaaaatggc

SEQ ID NO: 53397 - DNA, 715 bp, Homo Sapiens
  misc_feature (697)..(697): n is a, c, g, or t
  misc_feature (699)..(699): n is a, c, g, or t
  misc_feature (702)..(703): n is a, c, g, or t
  misc_feature (705)..(705): n is a, c, g, or t
  misc_feature (710)..(710): n is a, c, g, or t
ttctagagagggtccggcagggagggtcggcgccctggcccggggtgggccggagccctgtgatgctgcatcgcccccaggaggagccagctgtgccccagagttggcgcggccgagagaggacaagagcgcgcagcaggcgaagctggagggcgggactcgactttgttgtcgctgcccggaggagtcgagactggtacccggaggagctgtctcaccaggagaccacgtcctggaagtgtccgggactcgcgggacctgtggctgcagaccccgccggcacgcaggcccagagctggcgcactcctgaggatgagactctgggggccctagccggggtccacgggagggctgtccttggggactctaggatggcttcgttctggcccggctcacttctggagctgtgagacccaagacaaaaggggctgagggatttctcattgacaagagttcgtgcgggaaaaccacctgatccctagggatttgtcatcttaagactcaaaaggcttaataccaggaaccaccttggcaagatatttacccaccggccatctctgtttactcatgaatgttaaatgttaaaacgcagcgctctaaccctgcatattatttacttgcaaatgtctgtaatctgtaattgtgatgcctctgatggaataaattatctttttcagtctcctctaaaaaaaaaaananatnnanatttnaaagg

SEQ ID NO: 53398 - DNA, 730 bp, Homo Sapiens
  misc_feature (728)..(728): n is a, c, g, or t
attttaacagcaatgagatgacatgagaatatcttcaattcatcaaggatctgtaaagaaggagaggtacaagatatatgaaacccaaatctcaaaacaatgatttagtgaatttcccatgaactttaaacagtgattgcttcaaaatttccaagagccatactctccctccagctgctgtgtgtgtgtgtgtgtataaatgcacactattttaacctaaaatggtgccctgtggctgccattctctaactcttgcatacttaaacatttattcttggtcaaattaaaacctcatgcatttccaaagatataaatgccttgcctggagaagttagatcttgcaagtctcaggagggccgagatggtttgtcttatgcctatagctgtttatgtcccaccagtgggtgtttgtttcattaggtgccgtttccagccaaatgttctcattcttcacatcttcaatgttgagtagcaaacagaagaacatccttcttagcataatattgcttcactggactgattgtgaactcaaaatacctcttgtttcttgtgaagggtttgccttttgtaaacaatataagatcacttttggtcaaccaccctgtctgaatttatctgggctgctataataaagtatcataaactgggaggcttgtaaataaatttatttcttacagttttggaaagctgggaaccccaaaatcaaggccaatttggtgtctggtgangg

SEQ ID NO: 53399 - DNA, 917 bp, Homo Sapiens
gggctgaacggcatgcagctgggggataagaagctgctggtccagagggcgagtgtgggagccaagaatgccacgctgagcaccatcaatcagacgcctgtgaccctgcaagtgccgggcttgatgagctcccaggtgcagatgggcggccacccgactgaggtcctgtgcctcatgaacatggtgctgcctgaggagctgctggacgacgaggagtatgaggagatcgtggaggatgtgcgggacgagtgcagcaagtacgggcttgtcaagtccatcgagatcccccggcctgtggacggcgtcgaggtgcccggctgcggaaagatctttgtggagttcacctctgtgtttgactgccagaaagccatgcagggcctgacgggccgcaagttcgccaacagagtggttgtcacaaaatactgtgaccccgactcttatcaccgccgggacttctggtagaggcggctgggggagggtgggggcagggctggctgggggcttctccccactcccgcccccccttatccccctctgaagacgatgggcagaggagtgacagccgcagacacacgacagccggcagcaactggaatggcagccattaaaggtgcggggcgagggtagggggggtgggcggatagggcagggaagcggaccgggggaagtggcaccacaggcccaaccagacataacaggcaccacacagaaaccggaggggacgggttgggcttgcgcaggctgccacgaccgcggggttagaccccggcctcccagagaggctttttatgccattaaaccgtttttgcccgttccccgggaaaacacggcggttttttggcgcccatttagctttgtgggcccacgaggcgtacttctagaaagaacagtctttagtctggctcttagcaccgctt

SEQ ID NO: 53400 - DNA, 1019 bp, Homo Sapiens
  misc_feature (903)..(903): n is a, c, g, or t
  misc_feature (938)..(938): n is a, c, g, or t
ctggctttcagattccatctcaggagttagctagccagatagatcctcagaaagacatagagcctagaacaacgtatcagattgagaactttgcacaagcgtttggttctcagtttaagtcgggcagcagggtgccaatgacctttatcactaactctaatggagaagtggaccatagagtaaggacttcagtgtcagatttctcagggtatacaaatatgatgtctgatgtaagtgagccatgtagtacaagagtaaagacacccaccagccagagttacaggtaaggtcccaaaagtggccaggctggaggtcttctaatgtaattttgttttattttgagaacactgccattggaatgtttctacacgatcctattaagaataatgtgatgccctttcaatgcaacttttcatatttagtttattttgttagcgtgattttagctctgtttgtattatgatttttaatcaaaatcaatagattaaaaatagtttgacattcaaagtgacaatgtttagcaatcaaatttacatgtatagatcgtcagggaatagcccaaatgttttaaacgcaaaaaaaaagacaaaaaaaaaccaaaaaaaaaaaacctacaaaaaaaactttgttgctaggattaaggttattctaattgctttactctcaggaaagtgtaataacgcatgggaattctgtacgttatcactgtaatggaatatccaatttacagatagtatgatatacatttcatcatttaagtaagggatcgaaaacatttcaaattgctctatctgggctgatagacatttcgtcatttaagtaagggatcgaagacatttcaaattgctatctccatctgggctgatccaaaattctgagatttgtggctacctatatttttgntgcagctttttaaatgtactctgaaccttccaaancacaattcattccaagcctgggtagaaccaaatattctttggatcctttgatccaaagcctgggaatggataaccttttat

SEQ ID NO: 53401 - DNA, 617 bp, Homo Sapiens
  misc_feature (19)..(19): n is a, c, g, or t
  misc_feature (602)..(602): n is a, c, g, or t
ttttttttttttagtgtcncaaagatatcttagataaactattttgaagttcagatttcagatgaggcaacattttcttgagataattacccaagtttcatccatgttgaacggtacaaaatatttctgtgaaactaacaggaagatattttcagataactaggataacttgttgctttgttacccagcctaattgaagagtggcagaggctactacaaaaagcaaccttttcattttcactaagagtttaaaagctattgtattattaaaaagtctttacaatgcttgtttcaaagaaccaacagaaaaaaaagctaagaaaactgagaactaacattaaaaaaattaaatttagaataagaatgatttctttaatttgtcctttttttctttggtctaaaacattattaaatttttgtaaatattttgatttaatgtgtcttagatcctcattattttaatacaggaaaagaaaagatttagtaatttcttaccatgctaatatgtaaagttcatgccatccaggcatttaagagcgatcctcatcccttcagcaatatgtatttgagttcacactatttctgttttacagcagttttgnaaaacacatactatg

SEQ ID NO: 53402 - DNA, 811 bp, Homo Sapiens
  misc_feature (693)..(693): n is a, c, g, or t
cagagggattagcgcctcttccctcacactctgccaggctgccgggagcttgggccaggtctaaggtaatgaggtgctcctcttcctgctggaaaaaccggacagactcagaaccacaaaggcaggtgctgccagcctggcgccttcctctctgcttaggctgggtgagcttgtccaggcctgtgcctcaccccttctctcttctaggctcagtgtatgcttaatcaggcatggtgcatcagagcgggaaggagccatcaacagtgtatacttctggagccttctactgataaacagaggccccagaagacgatttgacttacctgagctcccagctgggacttaaacccaggtgtgtctgagtcacaactcttcggggatgccgtggtgagctggggctgagctcctgtattcccactcccccaccccacccccactcctgccatatcagggctggtctctgtggactcagcccagggctgcctcctctttgtcaccccaaagtggggcagccagggacagccagggtgtgttcagaatgggttcttcctgcagggcaggaagggcagattgttaaaggggctgcggcccagaccaccctggtccctcctccggcagtgactcagacccacactgtgccgtgcagctgtgtgccctgcacacccgcttgacggcgcactgctcacttctggngggccctttcagaggcactttttaagccaataaaacatttattgttcataaaaaaaaaaaaaaaaaaaagctctctagcgccgctcctacttagaccgatatgtagtccttttgaggt

SEQ ID NO: 53403 - DNA, 731 bp, Homo Sapiens
  misc_feature (709)..(729): n is a, c, g, or t
caggcaagggtttccatccccgctgccctaggcactctcttcccaaggccaggttgggcacctggggaggtcagttcagaaatatctagcagagacctcttaaacccccatcccagcaccccatcctgttgttcccagagctggtctcccatgagtgtgctagagccagatagccgtggccccccacccatctcactcacacacacaggcatccatacaccccagaagacttcccaaatgaggccagactcagggtcacggggaatgtgcttctgcccctgtaagggctttggggaagggggcaacatagtagaggctggaaagagcccccaaacctgtgcccatgcccctccagccctgcgtttccattctgccttctcagagtgcccttgctgcacccagaccaccggccaggagagaccttctctcccactccagcccctctcactgcccttcaactagagctttcacctttttacatttcccttctgaaggacacaaatctgcttttctgcccatacactggcccaagggctcacctaacttgggagggaaggggctgttggtacaaggatgattttctgttagactgccattttgcacggtctcccccttcccatctgatgtgtcctgcccctcagctctttgccttatctgtgtcactgtcactttagcaaaaatacagcgggccatttgtatcagcaaaaannnnnnnnnnnnnnnnnnnnnaa

SEQ ID NO: 53404 - DNA, 624 bp, Homo Sapiens
gggaggacctcaaaatgggttggtcacagcagatgtagctttttacactggaaatcttcaagccttaaaaggccttaaagatttggacctaaatatggccgaaatttgggagcagaagaggtgatgtcatcctggaaaactgggtagttcatctgaccatgggatgtgtttgttatgaagaaaatctggatgcctgtgattcgagaattgaacctgaaacccaaagtgaactggggtgggggaagggaaaaaggaaagtatcaagtgttgggaaactggattcagtgggatctacaaggaatgtcatttttgtgcatcctacagtgaggagtaactgatcaggtgtctataacatttttcattctctctggaaacagactcaggtttctttggaccaaatccaaaagaacacatagctgtaacacagctgtagttgactagaatgctctgtatactttatattcaaaaaatgctttgcatttcttccagtgcaatgaaattcatatggtgtcccaccttatttaatgatggtacaatttaaaatcttagtcaacttctgtagaaagttttctctatgaaagtaaagctgtttgaaaaattcaaaacaaacaggaaaaagaaaac

SEQ ID NO: 53405 - DNA, 741 bp, Homo Sapiens
  misc_feature (693)..(705): n is a, c, g, or t
  misc_feature (707)..(735): n is a, c, g, or t
cgtgcagcacatccgcatcgatggctccacctcatcagctgagcgggaggacctgtgccagcagttccaactgtcggagaggcatgctgtggccgtgctgtccatcaccgctgccaatatgggcctcaccttctcctcggctgacctggtggtgtttgctgagctgttttggaacccaggggtgctgatccaggctgaggaccgcgtgcaccgcattggacagaccagctccgtgggcattcactacctcgtggcaaagggcacagctgatgactacctttggcccctgattcaagagaagattaaagttctggcagaagccgggctttctgagaccaatttttcagaaatgacagaatccactgattacctctacaaggacccaaagcagcagaagatctacgacctattccagaagtcctttgagaaagaaggaagtgatatggagctcctggaagcagcagagtcctttgacccaggaagtgcttcaggaacatctggaagtagttcccagaacatgggagacaccctggatgaaagctcattgacagccagtccacagaagaaaaggagatttgaattttttgataactgggacagctttacgtctcccctgtaaaaggggcaaaaagaaaaaaataaaaagcattttaaaatcatggaattgaaataaaataatgtattttgttttannnnnnnnnnnnnannnnnnnnnnnnnnnnnnnnnnnnnnnnnaaaaag

SEQ ID NO: 53406 - DNA, 1774 bp, Homo Sapiens
  misc_feature (1281)..(1281): n is a, c, g, or t
  misc_feature (1285)..(1285): n is a, c, g, or t
  misc_feature (1565)..(1565): n is a, c, g, or t
  misc_feature (1577)..(1577): n is a, c, g, or t
tggccagtttggttatattcagggaaatgtcttgaatttttggtataaataggaattttttgtctctaagtggaattattttataaaacttctggctggatttaaatactaggcagtattccaagggatgataaaatgtttttacgaacttaattagaccatttttgtaattaaactttattatacatgtgctatgaggattaaactttgcctcataaaagtattctgacaggtgctttgcacagagtaagtccgccaaagtggacgttctcatatgtaattctgagcttactcatactggccaggaaggacgtgcacatgccacctttggcagctgtgatggggagcctgcctctgctcttgtgcatggaccttccacattctgtcctgtccaacttaatgccttaattaggaataatattttagaagaagtggtgtctactgatgcccccagaaaaggagaatatagtacagcctgtcttaagaattctgtttctgcctcttcttatctgagcagtcattttatggtttatgcctaaccaaccacgtgattcctgttcattgttatgggcactttttcatgtaagatgaacttaagtgatgtagtgatcctgagtaggcaacaaacagctttaatgtggatggcacagagtaagtctttgaattgttttaaaataaagtgactgttgtcaaatacatccttttttgcagttagtggattctcatttgagctggaatttttgtgaattgtagttgttaggtgcatggaaatatagggtaggctggaattaacacataagctaaaagcaacagcttctttttatctcttacctacataattgaattgattggcgaggggtggaagtttggtatctgttgtcaatggtaacactacagaagataactactagatctaagtaaccaaggtaagaacataggtcttttagctgagcaggtgacgccgaaatttgggcttttttattttgtagtaagggttttgagagagcgttccggacttaatctcttcagcagcctcttgcataaatcacattgatactccttttcctgcctccagttgttttcacgtctgtatttttctcctgttatatttacatgttcagtttttatttaacctttgaggaatggaaatgaaggttgtgtccataagtcgaggttccagatataaaattctgtcttcctttttgatcattaacttgtttgtttcagaatatttggtgaatgcaactgtgatgatactagtgtgaataacaacggaagacnctcncttggctttggctaggtgtagtgtcgactgcagaggtgtttaaaaagtggcctgagggccggcctgttagagctcttttggctgtggaagctaatttgtgctgaatgtggtgcctacagaaaaacccttcagaggtcatacagtgtgtactctttctgccggtcagttgaggctccttacctagcttagcaagaggtttctgccctggtcctcaacataaccagagaaagtaaatgggaaactttatctggaaaattattcaaaagcaggaaataaatcnccttggttagcnttttaataatttatccatgagactatttacaagttactactttgtcaattcaacaaatatttattgtctatactcttctagacagtggggtgaacaacacaggccaagttcctgttttcatggaacttatgttctgatgttgggaggcaaataacaaacaacaaacatgcaaaaaaaaaaaaaaaaaaaaaaaaaaa

SEQ ID NO: 53407 - DNA, 728 bp, Homo Sapiens
ttttttttttttttttttgatactgaatatttttactccggaaacagcagatgacatatgagaaaaacaaactgcttttaatttgacaaaactggatttcagcatttttcatcatccttattttgtaatttgccaaacccttgctgggaataaggacagcagaagataacaggtaagataggtaactcttttataaatgtttataaaatgcattgtaagctttgctacaatgcattttataaacattagtttgttaaccttgacaaccaccctttaaggcaatcattgttcccattttataaagtgagactctcaaaagttaggtggctgagaggtggcagaactggcatttcaacttggacttctctgactttaaagcctgtgtttttccttctacatttcacaaccactcagttcataccttgtaatccctgaatttctccgcttgcatcagagatactcccttacctgatgctgaggtatagcagaaaaacccaatgataatagtgtgtaggttcacagtagactttaagtattggccattgggctgaacaacttctacaaagcaggccaggtgaattccatgagattctaagtgagtaggatgagtttcaaggacctcctcgcccagacacatcccattgctatactgggtttgactcaaccatttgccgggaagtatcacatctcctaacatagcgctctgacattcaacctgacttcagtcc

SEQ ID NO: 53408 - DNA, 652 bp, Homo Sapiens
  misc_feature (581)..(581): n is a, c, g, or t
gtgtgccgggcactagtgatacaaaagagtgtgacagtgttcaagtctgcattttcgatcatgggctacatgccgagtgctggggcacagagatgaacaagatcggttccttcacttcttcatgccacaagtgtttattgagcacctgtgtgccaggcctcacagactcccagtgggttgaagaatggttgactgagtttgattcttcctgtaccctcggtcgtctgagctgtgtgcagacaacatccccccaccacccaagagggagggtagctcttccgccaccaggggcaagcacaggtcctggtggccccacgccacatgttagcccccctggagggggcgccagttggagacgggggctgggtgtccctggcccactcccagtcccctgtgctttacctccttgcccttgtgtctcaggtgtggtccctgcctgcttgatgaagttgctctgttcaagcctttggtgggatcatgtgtttgggggcttttaggggacccagctgcactggggcactgcccgtggcctgggtaggacatttcccagcaagggctggaggagttgccgtgccttcagncctgaatcgaatgtcagaaccagcagcggtgcttcaccctcttggggataacttgcttagttttttaataa

SEQ ID NO: 53409 - DNA, 766 bp, Homo Sapiens
agaccgtagagatggccagtctaaagagggaagcggccgtgttgcaatctacaaagcctcagggataatccacagctacacacttgaatgcaactacaacactggacgctcagtaaacagcatccctgctgcctgccatgacaatgggcgtgccagcccccctcccccgccggctttcccctccagatacactgtggaactatttgagcaggtgggacgagctatggccattgcagccctggacatggcggaatgtaatccgtggccccgaattgtactgtcagagcacagcagccttactaatctacgggcctggatgctgaaacatgtacgcaacagccgaggcctaagcagcactctgaatgtgggtgtcaacaagaagaggggccttcgaactccacccaaaagtcacaatgggttgcctgtctcctgctccgaaaacaccttgagtcgggcacgaagttttagcaccggcacaagtgccggtggtagcagcagcagccaacaaaattctccacagatgaagaattcccccagctttccttttcatggcagtcggcctgcagggctgccaggcctgggctctagtacccaaaaggtcacccaccgggtgctgggccccgtcagaggtaagccagtctgggagcccctgcaacatgtgttcggttgtctggggcattgctgggggaagtaagagcttgaagatatactgttggcccaggaccaaggggtgaatcaataaaattagtttgtagcagaaaaaaaa

SEQ ID NO: 53410 - DNA, 898 bp, Homo Sapiens
ggcttctggcttggtgtggaccaggagggggcagaaggcaccctgtcgtggctgggcaccgtcttcggcgtgctggctagcctctgtgtctcgctcaacgccatctacaccacgaaggtgctcccggcggtggacggcagcatctggcgcctgactttctacaacaacgtcaacgcctgcatcctcttcctgcccctgctcctgctgctcggggagcttcaggccctgcgtgactttgcccagctgggcagtgcccacttctgggggatgatgacgctgggcggcctgtttggctttgccatcggctacgtgacaggactgcagatcaagttcaccagtccgctgacccacaatgtgtcgggcacggccaaggcctgtgcccagacagtgctggccgtgctctactacgaggagaccaagagcttcctctggtggacgagcaacatgatggtgctgggcggctcctccgcctacacctgggtcaggggctgggagatgaagaagactccggaggagcccagccccaaagacagcgagaagagcgccatgggggtgtgagcaccacaggcaccctggatggcccggccccggggcccgtacacaggcagggccagcacagtaatgaaggcggtctcctggaccccagaagcgtgctgtggtgtggactgggtgctacttatagacccaatcaaaatacggtgggttgagaaggaacccgggtttacaaagtattatcaaaaaagttgaaggacccaggggtttacaagtaatacccaaaaaggttggccaaacccgttcctctatcctcctccggaatttcctgaaattttttggccctttccccgagggaagcccgcccaagcgggagggggtgaaacccccctctcctttgtggcct

SEQ ID NO: 53411 - DNA, 919 bp, Homo Sapiens
  misc_feature (39)..(39): n is a, c, g, or t
  misc_feature (597)..(597): n is a, c, g, or t
  misc_feature (679)..(679): n is a, c, g, or t
  misc_feature (701)..(701): n is a, c, g, or t
  misc_feature (750)..(750): n is a, c, g, or t
  misc_feature (764)..(764): n is a, c, g, or t
  misc_feature (769)..(769): n is a, c, g, or t
  misc_feature (771)..(771): n is a, c, g, or t
  misc_feature (822)..(822): n is a, c, g, or t
  misc_feature (871)..(872): n is a, c, g, or t
  misc_feature (894)..(894): n is a, c, g, or t
  misc_feature (918)..(918): n is a, c, g, or t
agcggctggctgggtggcactggcgtatgccaggcaggnagtcaggtggtagccccgtcggacatgatggatggacgcgtggaagccatcaaagaggccctgatggcacatggacttggcaacagggtatcggtgatgagctacagtgccaaatttgcttcctgtttctatggccctttccgggatgcagctaagtcaagcccagcttttggggaccgccgctgctaccagctgccccctggagcacgaggcctggctctccgagctgtggaccgggatgtacgggaaggagctgacatgctcatggtgaagccgggaatgccctacctggacatcgtgcgggaggtaaaggacaagcaccctgacctccctctcgccgtgtaccacgtctctggagagtttgccatgctgtggcatggagcccaggccggggcatttgatctcaaggctgccgtactggaggccatgactgccttccgcagagcaggtgctgacatcatcatcacctactacacaccgcagctgctgcagtggctgaaggaggaatgatggagacagtgccaggcccaagaactagaactttaaaacgttcccggngcctcagacaagtgaaaaccaaagtaaatgctgcttttagaactgtgccctcatgccctcttcctgctcacatgctagcggngcccagcagccctgggtggttntgccagcatgctaactcctgtaactcgcagctgcatcctatgagctctnccaagcttccccgnccctncnctgggtcagccgtgaggcccacctttgccaccctcagctctttcctctggntgtggcttcagcttgaaagcaacctggagttcggggcacagccctttgnngcctgggctggagaggtcttgnagcattaggggaagagagagcatng

SEQ ID NO: 53412 - DNA, 833 bp, Homo Sapiens
  misc_feature (590)..(602): n is a, c, g, or t
  misc_feature (604)..(609): n is a, c, g, or t
  misc_feature (611)..(645): n is a, c, g, or t
  misc_feature (647)..(652): n is a, c, g, or t
  misc_feature (654)..(654): n is a, c, g, or t
  misc_feature (656)..(658): n is a, c, g, or t
  misc_feature (660)..(663): n is a, c, g, or t
  misc_feature (669)..(669): n is a, c, g, or t
  misc_feature (672)..(672): n is a, c, g, or t
  misc_feature (683)..(683): n is a, c, g, or t
  misc_feature (685)..(707): n is a, c, g, or t
gggtttactgggggccgggccatcctttaaatgtaggcattagacttcctgggcggcagacaaaccaaagagcggaaattcatgcagcctgcaaagccattgaacaagcaaagactcaaaacatcaataaactggttctgtatacagacagtatgtttacgataaatggtataactaactgggttcaaggttggaagaaaaatgggtggaagacaagtgcagggaaagaggtgatcaacaaagaggactttgtggcactggagaggcttacccaggggatggacattcagtggatgcatgttcctggtcattcgggatttataggcaatgaagaagctgacagattagccagagaaggagctaaacaatcggaagactgagccatgtgactttagtccttgggagaacttgagccagcggctgtcttgctgcctgtacttactggtgtggaaaatagcctgcaggtaggaccattgcagtgatgggcagatgcgtctttcacacggaatcaggcacagtggccttctgtgacatgtgtttataaaaaatggttaagtatataataaattgaacatctttgagattgggannnnnnnnnnnnncnnnnnncnnnnnnnnnnnnnnnnnnnnnnnnnnnnnnnnnnncnnnnnncncnnncnnnncccccnccnccccacccccncnnnnnnnnnnnnnnnnnnnnnnnaaaattgggggggccgcctgggccccttaaaaaattttctaaaaccccttctttgggggggcgggggccccaaaggggaaagggaaagggggcaaaaactggttctccaaggaaaacccggggaca

SEQ ID NO: 53413 - DNA, 632 bp, Homo Sapiens
gtccttgtccactcgcacccctctctggcctggccggcaggcgtcttcttaactccttgtcctctatattcagcatgttccttgtcagctgctgggccggccctgccttgcgctagcagagcctctcctggcagcttctcaggtctccctaatggagacaccaggctactaggacactggctggggccaccccctcctgcctaatgcctcaccttacagctggggaaactgaggcctggaatggcccagagtcaccaaggcaaagttggggctggtcccagcctgaggctccagctgatgccctcagctcccagagagggggtgccccatctagctgggtgcaggggtcactgcttgtcagctcagggccctgtgcccgcttgcctgttcccctacatctgtgcctgcacatccagaactgcctccttgccgctgcctccaggaagcccaccttgagccagagtcaagggctgcagcactgcccgatagaacacgcccgccctcactgctgttcttgccttacagccaccatgggaaagctgcaacctttctgttttatttaaagaaagcccaacattaaagggttttcattgcaaaaaaaaatcaaggaagaaaacacaacaacaacaagg

SEQ ID NO: 53414 - DNA, 599 bp, Homo Sapiens
  misc_feature (569)..(569): n is a, c, g, or t
ccagaggacccataagtgccggtgacaagctgtctgtcaggggagaggctccagaacctgggttcgtccccagtgagaccggaggatgatcccccaaggactgcgcagcatcagctcttggtgggcctctgccttctcttctgtttggccacctggtgtggatgtcactgtgtgaagataaggacagaagtgcagagctgcgctttgtgtgttgtctatgtcggctgagctaccaaggtggaagttttcatggagaaaagcacctggctccagggccagtgttacagtgttaccctgtaaggtgttagccttaaaccaccgagcagcgttctcttgatgccagtgcagagaccagagtcagatgcccgaggacagtgggtaggaatttcatcaacaaatggacctatggcatcatggctttagaagctggtacatttactgagctgatggacagtggccttctaaaatatgacacttaaattgtaaatatgcactgtacttaaggattcttaagatgtattttttgttatttctcctccagctgctatcccttggctaataaattctangtatttgaaaaaaaaaaaaaaaaaggacgc

SEQ ID NO: 53415 - DNA, 755 bp, Homo Sapiens
aaaaaagtcacaaagatgacagtgaattagacttttcagctctttgtcctaagattagcctcacggttgctgccaaagagttatctgtgtctgacacagacgtctcagaggtatcctggactgataatgggaccttcaacctttcagaaggatacactccacagacagacacttctgatgatcttgaccgacccagtgaggaagttttctctagagatctttcagattttccatctctagaaaatggcatgggaacaaatgatgaagatgaattaagccttggtttgcccactgagctcaagagaaagaaggaacagttggacagtggtcacagaccaagcaaagagacgcaatcagcagctggtctcacccttcctctgaacagtgaccaaacctttcacctgatgagcaacctggctggggatgttatcacagctgcagtgactgcagctatcaaagaccagttagagggtgtgcagcaagcactttctcaggctgcccccatcccagaagaggacacagacactgaagaaggtgatgactttgaactacttgaccagtcagagctggatcaaattgagagtgaattgggacttacacaagaccaggaagcagaagcacagcaaaataagaagtcttcaggtttcctttcaaatctgctgggaggccattaatctaggaatcagcttgcaacagagcacaaaaaacaccaaaaaaatttcaaacaagacaaaaaaacaaaagggaaaggagca

SEQ ID NO: 53416 - DNA, 675 bp, Homo Sapiens
  misc_feature (542)..(542): n is a, c, g, or t
  misc_feature (627)..(627): n is a, c, g, or t
  misc_feature (639)..(639): n is a, c, g, or t
  misc_feature (653)..(653): n is a, c, g, or t
  misc_feature (660)..(660): n is a, c, g, or t
cattttgggagaataagagggcattttattttattagttactaattcaagctgtgactattgtatatctttccaagagttgaaatgctggcttcagaatcataccagattgtcagtgaagctgatgcctaggaacttttaaagggatcctttcaaaaggatcacttagcaaacacatgttgacttttaactgatgtatgaatattaatactctaaaaatagaaagaccagtaatatataagtcactttacagtgctacttcacacttaaaagtgcatggtatttttcatggtattttgcatgcagccagttaactctcgtagatagagaagtcaggtgatagatgatattaaaaattagcaaacaaaagtgacttgctcagggtcatgcagctgggtgatgatagaagagtgggctttaactggcaggcctgtatgtttacagactaccatactgtaaatatgagctttatggtgtcattctcagaaacttatacatttctgctctcctttctcctaagtttcatgcagatgaatataaggnaatatactattatataattcatttgtgatatccacaataatatgactggcaagaattggtggaaatttgtaattaaaataattantaaacctagtcntgtgttgccactcngcattanggtgggatgtaagta

SEQ ID NO: 53417 - DNA, 825 bp, Homo Sapiens
gccctttgcctgaccccctcaaggtccccccaccactgcctgacccatccagcatctgcatggtggaccccgagatgctgccccccaagacagcacggcaaacggagaacgtcagccgcacccggaagcccctggcccgccccaactcacgcgctgccgccccaaagccactccagtggctgctgccaaaaccaaggggcttgctggtggggaccgtgccagccgaccactcagtgcccggagtgagcccagtgagaagggaggccgggcacccctgtccagaaagtcctcaacccccaagactgccactcgaggcccgtcggggtcagccagcagccggcccggggtgtcagccaccccacccaagtccccggtctacctggacctggcctacctgcccagcgggagcagcgcccacctggtggatgaggagttcttccagcgcgtgcgcgcgctctgctacgtcatcagtggccaggaccagcgcaaggaggaaggcatgcgggccgtcctggacgcgctactggccagcaagcagcattgggaccgtgacctgcaggtgaccctgatccccactttcgactcggtggccatgcatacgtggtacgcagagacgcacgcccggcaccaggcgctgggcatccacggtgttgggcagcaaccagcatggtgtccatgcaggatgacgcttcccggctgcaaggtggagtctaggcccatcgccgaagcccccatcagccagccgctgtcctagattagcacatcagaataaatgtgactccttgaaaaaaaaaaaaaaccccgcttctttcggggccgcaaccg

SEQ ID NO: 53418 - DNA, 671 bp, Homo Sapiens
tttaaggtcacttttaaataaccaaatttgatttatggtttttaacaaaggactaaagagctgaaaccaacctagttttgtttttgtgatataaactttaagtgtcgagggaccatgccagcaactaccaaaaatctcttaaatcttcaggtacagctggcattttggcagatgcatagagacatctgagaccctcagaaaggaaggataatccaagaatataggaaatctgtgttctcttcctttcattttatcccttatatttctaaagactaattataagtaatctgacattttaatgtagctactcttatttattttttctttctgaggtattaaaatatctggactgagttttgccaaatgttaaagggagaagagttactgaagactttgaacacttgctttttgtgattgcttatgtcattagtgcctcatgactgtgtttgatgtcctttattgatacaaagtgagcctgtgccttcattatcttgcccattttaatacaaatggaaacctggtgtttgaaaatctctgaactgtgtgggttttggaggaatatacctgaattttattcaataacagtttctggacaggaagaaaaatacagttacatatttataaaatagtcgttatcagtagaaaaaaaaaaaaaaaaaaaaaaggacgcg

SEQ ID NO: 53419 - DNA, 753 bp, Homo Sapiens
cttttaaaaaccatttttttaaaactaataaatagtgactgaaccaatttatgcagtaaatagactaaagttcacagggcacggatgagtttatcaaacttcgttattttatcttgtcatttacaacatccatataagcaactagccatataagcaaaattcatagaactactaatgacttaagtgtacatctgttcttgtctccatatattcatgtaagatgcacaacaaaagaaacatcagaagtttataaaaataaatctgactatatgcatcctcatttattccctttagaacctaggtaaaaaatgttgcgaaaacatgggtagtggcgcatacattttgttatccttgaaatagcctaagtaatgttattgaagaactaatgaacaggtaacatattgtagaaaattagtctttcattgttttcttctgtgaagaatctgttgctatgtactgtatattcagcatttatatttggtttgtttcatagctaatgaggtatttagatatgaacaactgaatacatattgaaatagtgtgctggcttttgtagttttgataaagaccattgcaggcaatggaattgtgccagagaaatctgatttctagtacaaaaggaatacttagccagggcctcaagctcaagatacttattgaaaacatcctcaattgcaataaaaacattataacatgaagaagagtgattttttgaaccggtgatttaaatgtattgatctgctttgaattttc

SEQ ID NO: 53420 - DNA, 750 bp, Homo Sapiens
gactcttctggcagcatagaagcatggaattgaaaaatagcctcagactggatggacttggatcaggaaggagcatcctaacaaaccgttaggaacagcgccgtggatactgaagttttttttatggtagttacaggaaacttctgatactctttttattattttcttgtatagagtcagacacttgaaaaaaactaatgtttgaagacaaaaatattttggcagtcacaataccagaactggattgcatttccagaattctgagttaaagaaacaaagtatttgctttgtaaaaggccaaaattctatttcctacaaactttaaatgctgtttttatagatgtgatatgaggcaacacaagcacagacagttgcatagattttaatttatacatatcaagaaaagtgcaatttcatgctgaatgaagcgtaggaacttgacaagcccataggtagctatagttctttgtcagtatagggaattatgttcatgtgaatttcctgattctcaggtgactaaaaagctagcattctatgtattaaccttacaacagactctgtaagtttgagctttaaaaaccaaactttgacataaccttatttcttgtattggcccccttttttttataaaaggtgactaacaagaaataatttaatatcaccatgtgtatggattcctaatcaagatttcacgttctcagcccctgagactagtttctttgctctctgtaattagagcctttggaagca

SEQ ID NO: 53421 - DNA, 590 bp, Homo Sapiens
ttttttttttttttttaaccaaatagataggggaagggaggagggagagggaggacagggacgagaaaataccatgcataaattgtttactgaatttttatatctgagtgttcaaaatatttccaagcctgagtattgtctattggtatagatttttagaaatcaataattgattatttatttgcacttattacaatgcctgaaaaagtgcaccacatggatgttaagtagaaattcaagaaagtaagatgtcttcagcaactcagtaaaaccttacgccaccttttggtttgtaagaggttttttatacatttcaaacaggttgcacaaaagttaaaataatggggtcttttataaatccaaagtactgtgaaaacattttacatattttttaaatcttctgactaatgctaaaacgtaatctaattaaatttcatacagttactgcagtaagcattaggaagtgaatatgatatacaaaatagtttataaagactctatagtttctataatttattttactggcaaatgtcatgcaacaataataaattattgtaaactttgaaaaaaaaaaaaaaaaaacctcgtgc

SEQ ID NO: 53422 - DNA, 592 bp, Homo Sapiens
  misc_feature (408)..(408): n is a, c, g, or t
ttttttttttttttttttgactttgctgcttattggcaccagggacagagtttctagatacaattttatggattggttttaatttttatgagtttgtctctgcagtgattcggtttctcagagtctcatggcatcatagtttttccagaatgacacagtagccaccggtggatgacagcccacgggcggcacagtcacttctgcctgttgctctgacaccaacccaggcagctctgctgtggcttctcctgggctctggcattagttggtctgtgtcacattgtcagaacaggtggctgctgtgtggtgccatcgagtccctgctggttccccttgtcctgggagggtcacccattgcccaaggaagtgcatccacctggcaggtgacctggaggagtagcttccccngaggacccccaggcttggcctgtgattgcgcaaacccacatttcctaagcacactggacacccttcgagtgtgggttttaacatccctgtgagattgaatacttgtgccacacatgtcacaaaagagtatggaaataaaagaaaatttatccgaaaaaaaaaaaaaaaaaaaaaaaaagaccgc

SEQ ID NO: 53423 - DNA, 681 bp, Homo Sapiens
gcacgagggtgaaacaagtgatctggttttagcccagatgatgaaagtggatatggcacattttcacacacgtgagataattacagcttgccccacaacactgggtgttggagaaagggagagatagtcataagtggaagaaaaagccaagcatagtgagtgggaaagagagtgagagcctgtgcaggctgctgacgagccccaggcagcccacaagtttctcgtggggagatggaggcagagcccagggtaggggacagagctgctggggcctttccttgcctgggaatctgtcccaggaagagcttccccactcccatcccccaaattggaaaaaccgtacattcaagcctgtttggccctgaaattcttaagaatctggttaagaattaactcactaatgtcaaaagtcaaaacctcctaggggttgtcctgggagtcaggttcacgggtacagaagatgaatctcagatgtcactcaacctgagccgtcattctctgtggcagggctgccctgggtttctcttactcaatccctggagtgtaagcatttggattgtgtcacagattacctttttaccttttctttctttttttttctttttttcaatatcagtgcccacaccttactgagtattgagttttagagctttcgcttgatgtgcttgaccaagagacttc

SEQ ID NO: 53424 - DNA, 693 bp, Homo Sapiens
tggggtttctccttgttgaagaagaggcatccttctctgatgtgcacaaacacaatgtatgaccagagccttgcaactcaaagtgtggtctgtggaccagcagcggcagtgacacctgggagcttgttaggaatgcagagtctaggcctcaccctatacctcccgactcagaccctgcattttagcaagacccccagctgattcctataagcactttagagtttgagaagcaaggacctaggctggggatgtcctccgagcagagggtgaagtttctctcagttctctccctgccacttccagggatctgagcctgtgttcagcctcctccctaacccaccctgggagacacttggcctgttagattgttccagagtctgcatggcactcctgaagaagggagtgggacctgcagtcaccaggagatgagggttaggtgtgcccagccctccagacccggcctttctggttaacccctgcatgccaagctgcctgctgccccaggtcctcacctcaggcctttgaaggggcagcttctggaagttgttttctcctctgcttggagagtttgcccttgtctgtcttggaaagtgtgggcagccacagatgcccccaaatcagagctcacagtgagtgagcccctaagcttcagtctgcaataaagaatgcattggtttcaaaaaaaaaaaaaaa

SEQ ID NO: 53425 - DNA, 987 bp, Homo Sapiens
  misc_feature (828)..(828): n is a, c, g, or t
ggctgcagggtggaccagctgcctggcattcaggcccagatgcctgcagggctggggctctcgggacagatgcagggatgtgtgctgcagggctgctgggaggagagtggtgggggcctgagggctgagtgattctgtaaccacctgagaccttcacgtttgctgccgttgggggctcaggctgcactccccgggtcacctgacctgctgcccaggggcttccagtcctgtctgtgtggactggcacctgggctgctggagaagtctcctcccgttcggaccagcctcagggctgcacgttacctcaggaatgggccccaccatgaaggggcccatctgtcagcagcgtcttctaggtccccagctcagggagccatccccagctccagttttctcatgcgaatatgcacagttttaattcacgttgttacactagcctgccgatgagacccagacacaggcagacctggcgctcttgacccctgattccagtgaggactggccctgaggagtccttgcagacctgctgcctgccccacgacaggcccaaagatggaccccccctggccttgtgacagctccccaagtgttctccggtggagaaactgcagaggacttgtgggcggggctccccagccatcaccatcctgtgtacaatggctgtagacttgtatatggctcctttaatattgtaaagatgctgatgtacaattgtcgtgcatttgtgtgaacacattgcgttcccagtccatgccataaatgatgctctcaagcaaaagactggaagctctgtcctgtgcagaagcagcagccagactcccgcattcnatgttgtgcaaggaagttttgggggcggaaaggattcctccctttggatccctcagttccccatcgaggaataacccgcaacaatgggtggaggaagggtcacttggctgggtcccggagccttgggggtattttattgcattttggggggcctgtccc

SEQ ID NO: 53426 - DNA, 929 bp, Homo Sapiens
ttatttggctcctccatttctggaaattgagactcaagctttatgaatttatcaagaacttaaaaatgaagaaggtcacagattgatcttttataagaccttatttgatgctttgtgcttcaaggagatgatacctgtcatccatataagcaaactttttggcttacaactatttttttaatattagccttctagtctgtaatggaaattgtatattttgatagaagttttttctccattggttaaattagcattacttaaaatttgtttctttagaaaataaatgcaggttataaatgtgtgtatatttagagattataaggctctctgagccatcttctgatttttcattgctctataattctttttactgaaaatactatgttatgaatggtattaaattttagtctctggaacatccaaaaccaagcaaagggatgtgactattttgaatgaatcagaatgtcaacttgtatgtacactatatctacacttactcattatttaaaaagaataatgaaaaatctagatcaattcttcaatttgattgaactgttcagccttttcaagatttctttatttacaaatgattacatttaaatgaatgtacattcttctcactgactttggtgattttgaaacctagaatgatgtgtttctatctgaaatatctttccatttgaaaaaaatctccaaacaccgattaaaaccacaataggctgtaatattttttatttttgggagccagagtatgattttgggggaagaatatgtatccacccctattgcagtataacttttaacctccttttccccttaagcccactttttgaatggaaatttttaatgggataaggattttggaatcttcctaatttaaggcttggcaagtctttggaaatccttatccttcccttatcccctaaaaa

SEQ ID NO: 53427 - DNA, 594 bp, Homo Sapiens
tccccggctgcctaagctagggacactcaagtgcttccttccttgccccatcttcctcccaactggaggcctctgagcctcccctgtgccttgggccctgaagccccatatgtagtatagagcaaaggtggctcctggtgaagagagggtggaaaggcccttcagccccagggccatgtctgggttctccatgcccatcagtctctgcagtttctctacctgcccccagagctgaggccatctgcaagcccctgcccatggcccaatggggagcctccagccacaagttccctgtccttatcagccactgggtggttcccactgcatgaccctctatccctgccatctgtccccatggtttccagctcaatccacccctgacccatctgtcagctttttcccagggagccgtttcaggggttctgggcagtaggctgggcctggcctcagaacctggtggctcctgcctgctccttcacttttgtaaaaccatccccttcaccagaatggtattaactcctggtgctttgtactactggtccagctgccctgggctccttttctatattaataaagaaacgagtaaaaattaaa

SEQ ID NO: 53428 - DNA, 837 bp, Homo Sapiens
cggccgggaatatggctgtgtgtgtttgagtctgtgtctgtgagagagccagagagagtgagagagattgacagagaaagggagagacacacacacgccccttgaattgctttaactcctaagtgtttcagtcctcattccggtaaactccccatgctgattctttgttttaaactgaaccataggtacagtttcctttttgccaaatgtcaaaacaggtacaaattttaaaatgtaatgctttttaaatagaaaaatgtataaaattagaagtgcccacatataaaaaatacttgagatgaagattatctttagtgaatatcatctgcatatctctgtaagttcaattgtgtttcttacagtccctgtcatattaccaacagaggcaataaaagctgcagtgaaattgccatgactaaatcttttcacatatttcagtgtattttttttatagatttaaaatatacctgaaaacttttctaggaagaataattattcatggaaagagcattgtaatggcatgttttggggagaaaagacatgccaagtcttgtttactacatttaagatgtttacaactatactgggctgctttattaacaatactgtacttgcgtaatatggcattataagtacatgtccttccttagacttttaaaaagttttaatgagagaaagtaaatttactcaacaaaataacatgagaaatcctttacgtaatatctttactggggaattcttatttaagcaaggtacactattttttcctcagacttaaatgaatgaagtgttcatttatttttttatttgatgatatcaagaagtgagtagtagtag

SEQ ID NO: 53429 - DNA, 610 bp, Homo Sapiens
tgtagcaaagtgcccctttttcttcaaattgctccccctccccaggatgacacacttcatgtcatagctgaaccctactctactggattcaaggccagtaaatgcaatttagagaagcagttttatgtttgcagatattctgagtctcttcaggatgtgtttcgtgtctaccatatatgcaggataaattctttaacagcaaactccaaaggaatgttgaagctgttttagcaatgaggatttttttgtttgagtgttgaagtgggccatagtcctttagaaatgatgttcatttatgataggatttaacttctaaggcatagtttattttttcctctttcctttttgtttgttttaatgtattctttagcatgtttttgatataacttttatcctccagatcttaagctttcttttgctctcttcagcaatttaagagactattaagctgtcatcttcctaaaagctattttggtatccactctttttaaaaaaattctccaactttgtgattttttaatgattaaggtaatttgttagctctgcccctcatcttctaaaacctttgtaataaaatgtattaatcatgttaaaaaaaaaaaaaaaaaag

SEQ ID NO: 53430 - DNA, 486 bp, Homo Sapiens
agatgaatgtgaagaagtagaacatcagtgccaaaagactattcagcaactggaaactgtcctgggagagccactccagagctatttctaagactttctgtggtgtttcatactctactcagagttcacactcatatttcatatttttatttttgggtgttgggtgccatgttacttttggtgccttaatacacctacttggattacttacaaatgttttatcacttctttacaaaatccccacctggcttgtgctgccacataagcctctcctgcctatcgtatagagctgcagaaagagtaaatgatacacggtatttttatacagactgctgtgtttgtttaaacatttattattctcttcctgattgatggtaataatattagacttgttaattttagcacccaaagctgacgcctcatttgcactgtaagccttaactcttctgtacagcagtatcttacatacatggtatccatgttgca

SEQ ID NO: 53431 - DNA, 575 bp, Homo Sapiens
aagaagttcattttctgagtaaaaggtattttcatatatgttgggggaaaattaactcatctaaaaagaatcttattaggtatttgaactctaaaactaacagataagacagatatgtaccttattagagcaccagaactaatttgctaagtcttttgtttagtcctgcaagactgatgcttaatacacagtctgttctcctgtgtctaggtcaggaactccagtttgcttttctgttttgtgtcctggtagcagctgttgagtaactttcattggaggttgggaaggaagtgaggagaaagtgttcttgtttagtgttttatttcctataataggatgctgcctaacccagttcatctctatgtcctgttcactgaatattccgggtaattgaaagaaaatataatggatgggctccattaaaaccagctcaaaaataaattcttgtcagtaaagatttcttgtcaagatgtcttggattgcacttttgttgaggaaagacagtgtaaatagttaaagatgttgataaattgaaacattggtttgggaatggttgtggtttaaagggttctgct

SEQ ID NO: 53432 - DNA, 647 bp, Homo Sapiens
ggtttaagagattaggggcagacagggactttcctctgccggctgcgtggagaaggaagcggctaaaaggtttgggccggggagttccccattcgttctccggggagggagggactttacacctacccctcaccggaaagctagacccgcttcagggccaggagtggcgtttccgcacaggatttcctaagacgagagggatttagccaagagcacagacttggattccttctgtccctccccacctttctctcccaatgaagaaacgtttatatcctgtgattactctaggaaaggggcgtattaacggtcctttgcttccccgcaggggagaaaaagcttgacgaacttcacagaagagttcaagcttggaaataatggagtttatagagaaaagatatatttttaaaagctctaggtcagaagtactacacagtgcttttaaaaagtgtttaatgagagtttacagacagaagcccgaagtggaaagaccttatggttttgtagatatggtgactccagtctttgttgtataaaggttgggggagctgataaggtttttgtacagtattttctccttcgttgtattgatttttatataaaaatgtaacttctacgtgtctaacacgtattaaatattttgaagc

SEQ ID NO: 53433 - DNA, 666 bp, Homo Sapiens
gcaatcaggccaccgccctggccttcctgggctcccagagcctggctgcccccactgactgcgtgtcctccttcaaccaggatccctccagctgtggggaggggagggtcatcttcaccaaaccagtccgaggggtcgaagccagacacgagaggaagagggtcctggggaaggtgggagagccaggcaggggcggccttgggaatcctgccacagacaggggcgagggccctgtggagctggcccatctggccgggcccgggagcccagaggctgaggagtggggcagcccccatggaggcctgcaggaggtggaggcactgtcagggtctgtccacagtgggtctgtgccaggtctcccgccggtggaaactgttggcttccatggcagcaggaagcggagtcgagaccacttccggaacaagagcagcagccccgaggacccaggtgctgaggtctgagagggagatggcccagcctgaccccactggccactgccatcctgctgccttcccagtggggctggtcagggggcagcctggccactgcctagctggaatgggaggaagcctgcaggtggcaccggtggccctggctgcagttctgggcagcatcctcccaagcagagaccttgctgaagctcctggggtgtgcggtgtgggctgg

SEQ ID NO: 53434 - DNA, 653 bp, Homo Sapiens
attgggaaaagagtgggttaaagtcctaggtggggttctctttgttgcctaccaggagaaagcagtaggcttcctttctaagatacggactcagctggtctattttaccctgtgacatttaaatatacttttgaataagctactatcctgaggctgagggttttgctgccacttttcctgtgtttccacttctgcttccaaagattttcctcttagttgtttgaaataatactttgccagacaggaagtctttagactgcccacattcatgaagaagatgatgtgtggctggatcagtaggagaagctgagtgcaaatgccatgtgggctagagtatgggaaggttgaaaattccaagtaactgggagagtgggcaagtcctcagctgaacaatcttggatgtagtctagcagcaacccacctacaatggcgttatgtttggagttatgaggggaagtgaaagataagaattacctacagctttgtactcagataatttatatccaaaatttgtgttttaaatttcatactccagaactttcatgtttatgagtattagccttttaagttatgggaggtgatatacttagtccattgatgttgtcacttgtcatctaaacttatgagaccttgtcttagagaatctaaaatat

SEQ ID NO: 53435 - DNA, 575 bp, Homo Sapiens
  misc_feature (60)..(60): n is a, c, g, or t
  misc_feature (62)..(62): n is a, c, g, or t
tgtgttactaaagagaacagcgtcgacggaaccaacacctcctcgctggtgtccaagggnanagcagctcacattccaaatctcaggcctccagaccaacacagactacaggttccgcgtatgtgcgtgtcgtcgctgtgtagacacctctcaggagctaagcggagccttcagcccctctgcggcttttgtattacaacgaagtgaggtcatgcttacaggggacatggggagcttagatgatcccaaaatgaagagcatgatgcctactgatgaacagtttgcagccatcattgtgcttggctttgcaactttgtccattttatttgcctttatattacagtacttcttaatgaagtaaacccaacaaaactagaggtatgaattaatgctacacattttaatacacacatttattcagatactcccctttttaaagcccttttgttttttgatttatatactctgttttacagatttagctaagaaaaaaatgtcagtgttttggtgcacctttttgaaatgcaaaactaggaaaaggctaaactggatttttttttttaaaaaaaaagaaa

SEQ ID NO: 53436 - DNA, 486 bp, Homo Sapiens
attaattttttttgttggcaaaagaatctcaggaacggccctgggccacctactatattaatcatgctagtaacatgaaaaatgatgggctcctcctaataggaaggcgaggagaggagaaggccaggggaatgaattcaagagagatgtccacggacgaaacatacggtgaataattcacgctcacgtcgttcttccacagtatcttgttttgatcatttccactgcacatttctcctcaagaaaagcgaaaggacagactgttggctttgtgtttggaggataggagggagagagggaaggggctgaggaaatctctggggtaagagtaaaggcttccagaagacatgctgctatggtcactgaggggttagctttatctgctgttgttgatgcatccgtccaagttcactgcctttattttccctcctccctcttgttttagctgttacacacacagtaatacctgaatatccaacggtatag

SEQ ID NO: 53437 - DNA, 570 bp, Homo Sapiens
gcacgagttttcagctccgccttttttctcctattttctctctggctttcttcagccatgactcacaactaaaaacataaaacactggaggttagtggaggcccctccccaagcagggagcctgggatgggcagggagtgatagccaaactccttggtcacctgctccaagaaggaagcagtagctgagcacctgccctcacatactgctcttttcccctctccctccacaccagagatgtggtgagctctgttcttctaccaacccagtctcaacacacaaagtgccaccaccttccctgactcagaacccacatccactcaatgtgaactctactaccacgacctccccatattcctcacttctccatcacctccagcctgactccctgtctgccctttcacccccaagattttgcacaggttaaggccagttatggcctttttgaaatctgtaatagctcccctttccccaactctaaagcctagaccttaaacctgttcctagagctatgcacacccctgccccagtttaccgttcctccctcagggcctccgtgacactccatga

SEQ ID NO: 53438 - DNA, 544 bp, Homo Sapiens
  misc_feature (59)..(59): n is a, c, g, or t
  misc_feature (152)..(152): n is a, c, g, or t
gcacgagagtgacattattcaaacatttgtatgcgtatttgtgaaattgtttgcatcantcatttaaaaaatatttcagcctaagttttctaagaggtatgttgaatacatttttaaaagccagcttaagggtcacagcagccttagtttangagaagagctaatcacaggtgaccactcaagttctttcaatgaagacctgatgatgtatttagttcccattttccacggtgattgactcaatttaagtgtattgtggctatatgtaatttacaggctgctttgcgttgcaggtgggaaaatctcccaggctggtgtgaggctgaactggggtaaaagaccccctgacccctcctcattcttctaaggtcaccacctcttagagggtctcttattttctttcagagatcaaatgcacagttatgctgtacaactaaattctgcagtcttgggaatccttacgagtaccaactattagtcactttttaaagtccccaaagtggagtgaggatagggggagtggaagcagtgtttggttcttact

SEQ ID NO: 53439 - DNA, 721 bp, Homo Sapiens
  misc_feature (721)..(721): n is a, c, g, or t
gggggtcctatatgagccatgtcctcaaagcttttaaacctccttgctctcctacaatattcagtacatgaccactgtcatcctagaaggcttctgaaaagaggggcaagagccactctgcgccacaaaggttgggtccatcttctctccgaggttgtgaaagttttcaaattgtactaataggctggggccctgacttggctgtgggctttgggaggggtaagctgctttctagatctctcccagtgaggcatggaggtgtttctgaattttgtctacctcacagggatgttgtgaggcttgaaaaggtcaaaaaatgatggccccttgagctctttgtaagaaaggtagatgaaatatcggatgtaatctgaaaaaaagataaaatgtgacttcccctgctctgtgcagcagtcgggctggatgctctgtggcctttcttgggtcctcatgccaccccacagctccaggaaccttgaagccaatctgggggactttcagatgtttgacaaagaggtaccaggcaaacttcctgctacacatgccctgaatgaattgctaaatttcaaaggaaatggaccctgcttttaaggatgtacaaaagtatgtctgcatcgatgtctgtactgtaaatttctaatttatcactgtacaaagaaaaccccttgctatttaattttgtattaaaggaaaataaagtttttgtttgttaggttaatan

SEQ ID NO: 53440 - DNA, 408 bp, Homo Sapiens
aaaggtggtttctccagcacattttaagaaaagggaccaaaagttattttagcttcctcaatagattgcatgttgcttattaggataataaattaatattaaatgcaatatatgtcttgtctttattatggcatctatttaggagttgttcaaatcactgcagtagggctctgcaaataaaataatgtaacctattatcatggatctaatgtactgtaactttatcagtgaaaggtaaaatctcaaataacaagtacaaacattgaacaattacctataaagatttgtaaaagtaaacatttttccaatagatttcattcttgtcattttgtaagacgaccctgcagtccacctgtttgtaacttttttaataacacatagacatctgtattaaaaaaaccaaaaaag

SEQ ID NO: 53441 - DNA, 629 bp, Homo Sapiens
gaagttcactcagagggaaggagatagagagtcctggtcctcaggggaggactaggaaaagaccatctgcccggcactggggacttaggggtgcggggaggggaaggacgcctccaagcccgctccctgctcaggagcagcactcttaacttacgatctcttgacatatggtttctggctgagaggcctggcccgctaaggtgaaaaggggtgtggcaaaggagcctactccaagaatggaggctgtaggaatataacctcccaccctgcaaagggaatctcttgcctgctccatctcataggctaagtcagctgaatcccgatagtactaggtccccttccctccgcatcccgtcagctggaaaaggcctgtggcccagaggcttctccaaagggagggtgacatgctggcttttgtgcccaagctcaccagccctgcgccacctcactgcagtagtgcaccatctcactgcagtagcacgccctcctgggccgtctggcctgtggctaatggaggtgacggcactcccatgtgctgactccccccatccctgccacgctgtggccctgcctggctagtccctgcctgaataaagtaatgcctccgcttcaaaaaaaaaaaaaaaaag

SEQ ID NO: 53442 - DNA, 672 bp, Homo Sapiens
ctctggcaggcctgatgccagagtccaggtggaagggctcctgcatccctctccccgtatcccacaggccaacaagggctgggaggcagtggccaaggaaagattgaatgagctggggctgctgccactgctgttgaaatgagtgcccttggggccttgcatgggacacattcaagacctcgaagtcattcttggccaagcagatgacaacacatctcctggactggagcaaaaggtccttctgtgcaccctggtcgctgggaaacgtattctttgatctgttgaactgtcttccaacctgccatggcagttttgacactactcctgtttgccctcctgattcctgctttctttaccttttaacattgcccctttcaggggaccccactttgtagggaatctgcagaaggtgtgcttttgcacttgcagactgctctacctcagtgtttccttgggagactttattcagctgagagtgccctagacagtaacttctaaggtcacgtttactatttcagaggaaatatcttgccaggatacctacccatccttatagaacagttacctttagctgacccctttcctcacagggaccaagacaaagcatgggacatgaaattaagagtgaacttcttatgggaggctgcagctggatcagaggaaaaatccagt

SEQ ID NO: 53443 - DNA, 617 bp, Homo Sapiens
  misc_feature (2)..(2): n is a, c, g, or t
tncgttgtaaagtaccatcagaattgatttccctctttaataaagaatgggatagagagattcttcttaatatccttaccctatttgagaatataaatgacaacataaaaaatgaagggctcgcatcatccaggaaagaattcagcagaagttcactttttttcttattcaaagagtctggagtttgtgttaagaaaatcaaagcactagcaaatcacaatgatctggtggtgaaagtaaaagtcctgaaagtattaaccaaactctaatttggagtctgtcccaaacaatattgagatatttgcagttggtacgatgtgatttgtaaattctttgtttttcattgtgcgtatatggtaaagagatcttttcagctgctattttggaataatgactatcatatatcataacagtgactgatgttggttgtaatggttgggtttaggatgaaccattttaaggatgccaaatgaaatattagtatttgtacacagaaagaatttattgatttgatcttattacctagattgagattttttaatctttcctctacctaaactgacaatgaattggttatacatcatgcataagctacacttttatattagcttatattt

SEQ ID NO: 53444 - DNA, 586 bp, Homo Sapiens
gctgaagtagaacttaagagaggggccaagtgtaggattggggaccatggtctgggagctgttctggggcagggggaatatgcaagctaaagcccctctataccctggtaggcttcctcttcagcatgcccccctcttcaccccacacccatgtgtacactcagagtcctgctgccgctccaggctggaccagacccccatccccacccctcctggtctgtatcctgggcctcagcaagccatgcccctggggtgaggggaggcatctcccaccagctctattctttgccttagctttgcagtgagtgctgctcatgtcctcccctccacccgcacatgggggtcgctgcccttcactcctacccccagaggccttggccaagctgctgctttgaaagcgggatcttggagacaggccatccatcctggagcctcatggaacaggatgatggcactgagaaagccaatgaccgaatctcttttctctgtaaaaatgtagactgaaaagccatgtgtattttcctatgtgctgtagctctcctttggaaataaatcacaggcatctggaacaaaaaaagaaaaaaac

SEQ ID NO: 53445 - DNA, 549 bp, Homo Sapiens
cgacctcaaacctactgaatcagaatttctagggatgaagcctaggaatgtgttgttgttttcagagcttccctggtgattgtgataagcctggtttggaaaccattgctggagaactttgtaaagatacagagacccagaccttttgtatttacatttaaatacaaatacaaatcctgggtttctatatgttctgttagcttttcaggtgattctgctacacagacgttgaaaaccactgccctaagaaagagatcagaggccacatatcagagagaaaagggaccaaaccttcggtggtttgttgtgtgtcgttttaatgccaattattttaacttgcacagtcttctgaaaccttgtattaatagttctcttttgtattaccattttcaggtagggttttgatcactatgattctgaagataatagtgaaatagtgaatttcattgatatgaagagataattgattttcattcattggtttgaacacctgcaaaatcacaaataaatgagaactaagtcttgtaaaaaaaaaaaaaaaaaaaggac

SEQ ID NO: 53446 - DNA, 706 bp, Homo Sapiens
cgcaagtttgacattgaggcctggatgccaggccgaggccgctttggagaggtcaccagtgcttccaactgcacagacttccagagccgccgcctccacatcatgttccagaccgaggctggggagctgcagtttgcccacacggtgaacgccaccgcctgtgctgtcccccgccttctcatcgcgctcctggagagtaaccagcagaaggacggctcagtgctcgtgccccctgccctccagtcctacctcggcactgatcggatcacagcccctacccacgtgcctctccagtacatcggccccaaccagccccggaagcctgggctgcctggccagcctgctgtaagctaagaacccacccacagcagccctcgggggtgtcactgcttcctggagttcaggagaccccggacacctgggacctgtgttcctgagcccgtcctgacatctgtgttcttcctgtcagctccacgcccgggcccctggaccacggggtccacctctcctctgtccttgctgcctcagagtcagtcactgaccctgttatcattgagggtcccagtgggaagcaggacgtctgggctttacggttctagggacaggagaagcagaggaagaggcttccatccctccttccttctttcctcctacagtgctgagcaaaaagtccccaataaatggtcaggacaaagaaaaaaaaaaa

SEQ ID NO: 53447 - DNA, 610 bp, Homo Sapiens
cgaaccagcagaacccaggttgggttcaaccaaagggaaggagccaagagcctcaaaggaccatgtgctttcagaacctgagaccaagaccatgggaaaggtttctcgattcagaatacgcagaacaccagcccgtcctcagctaaaccttacaccaatgggactgcctcgaccaatcaggttgaacaagaaggagttcagcttggaagaaatttacaccaacaagaattaccaatcacccacaaccaggaggacctttgagaccatctttgaggaaccccgggagcgcaatgggactctgattttcaccagctcaaggaagctccggcgggctgtggaatttcgggacagcagccttcctcgatcacgaagaccgtcccgtggggtccgggctgcagggggcaggactgttcctcccaatgtggcccccagccctgatgtgggccccctgctccagcagcggctggaggagctagatgccttgctcctggaggaagaaacagtagatcgggagcagccccactggacctaggtgccccatctgttggtcatccatcctgaagggacaggaaacctcccaggcagttatttttttttctctatatttcta

SEQ ID NO: 53448 - DNA, 566 bp, Homo Sapiens
gcttcttggtggtgaaactacaactctcacgtgtgctccagttctaaaattaacctgtgcctggtctctgaagccctttcttgctctgtgcctttcagccacatccttaggtgctaacggccatgagctccgactctccaaagtgagctccactttgggtctgaggagcccctggcagagtccacgctgcctcaggtatcatgggcgtaatgatcacccaggctccgggagatctcatggatgattactgtatgagacagaggggacttcagtctttccagggccttggtggaatttttggctctggtgttttcgccagacaataaacttacactggaagctttgattcaccctccacagtactccagaaaggactgtcctataagttgtacactttaaaaggtcatgtagaggttgtagtagaatggcttttcaccctggtgactttggaagaaactcttgaatactgcctgcatccgggcaccatggccaggttgcctaggagtggggtccactgatgaaaagaggtgttttgtacttacataagaaaaataaatttctgattg

SEQ ID NO: 53449 - DNA, 765 bp, Homo Sapiens
gaatacaaagaattagtatggtggttccctcaagtaaggtatctttcttttaaaaagtgagatttgttcagggttagggttttgctgattttttttctctccctgtgaaaactgggttatagatcattataaaggaagcccatattttctgatacttttcagagacatttctcatttgaaatctacaacagctctgtgatgtcttcagagatttcattttttaacacacatcattaggattgtagcaataaggtcatacagaccttatccaagctcttctgacaccattagacaatacagtttgagaaggagaaaatgaactcatttaaaaattaattgtaatctgacaattttgaaattcctttgctgaagaaaaatatggaagttttgaggttcagggttgggaggcaagagaggtacctgttagtgtggtttgtccccttcctagcacatgtagcctcaagtttgaattcctgggagaagaaaagtctttacatctgtgatgtgggaggttgttccagggaacatcatgtttttgtgggcaaatacaagttgttataattaaaacccctaatttgaatatttttgttaccaagaaccaaggcaaatgtttaatttgttataaaacctgtttgtgaagtgctgtgttaaattgtgctgctggctaataggcctcatttcaatttaataaatatttattgaggactggctttatgtctggccctgtgctatgccctgggactcaaatttaaaaaaacgagccct

SEQ ID NO: 53450 - DNA, 625 bp, Homo Sapiens
agataaagcaagtatggaagttcgatatcaaacagaaggcttcttaggaaaattaaatccagaccctcacttccagggtttccagaagttgccatcatcacccctggggtgcagaaaaagtctactgggctcaactgcaattgaggctccttcatctacatgtgttgctcgtgccatcacgagggatggcacgagggaccatcagttccctgcaaaaagacccaggctatcagaaccccagggctccggacgccagggcaattccctgggtgcctcagatggggtggacaacaccgtcagaccgggagaccagggcagctcttcacagcccaactcagaagagagaggagagaacacgtcttacaggatggaagagaaaagtgatttcatgctagaaaaattggaaactaaaagtgtgtagctaggttatttcggagtgttatttatcttcccacttgctctctgtttgtatttttgttttgtttttgattcttgagactgtgaggacttggttgacttctctgcccttaaagtaaatattagtgaaattggttccatcagagataacctcgagttcttggtgtagaaattatgtgaataaagttgctcaattagaaaaaaaaaa

SEQ ID NO: 53451 - DNA, 608 bp, Homo Sapiens
  misc_feature (501)..(501): n is a, c, g, or t
  misc_feature (560)..(560): n is a, c, g, or t
  misc_feature (577)..(577): n is a, c, g, or t
agcacaaagtatgtttcagtttaaatgcacttcttccggtctaatttttatggggaagacaagtgagtcacaaacattctgttgaagggaaatctagtcagttgcttgaaagagcacagcccaaataaaacaaggactgactaggtgtaatgaaataacctgtgatttaaaagaagagctgcagctttgacagtgcttatttaaagaaaaatactgctggaaaatttccaatttctactacgttcaccatctctagtaagatctgacatatgctgaagttatgttttgatttggcacacagcatgttcaatgatggttactcgcctagtacaagacatggagaagaaacctttggacacagagcagatgacacctccttctgttttgtagtgtatcctggtgtcattttctgtgaatgtggtcaggtagagttgtttttgttgttgttgttgggcttttttttctttttttttttttggtctcttttggtggggggggggnggggcctaaagccataggaagaaaaatgtgatgtatgtgtccagtatgtactattttgnttttgttttgcaagaanagttgaactatttttgataacaagagtaaat

SEQ ID NO: 53452 - DNA, 660 bp, Homo Sapiens
cggacgcgtgggtggacaagcaatagggggttgaagtgtgtatctgatttgtttaaaatttgtatatcaccaaatttttaaaaagtgatagtcacagtgctaagttatctagttggctactattacaccttaaaaattgagtttacacacacacaattacctgtttatatggtgctcattgttattctcaaatataatgtgtgaccgtgatatagtgagaaagattctaccaaccactgtttcactactttttagttaaaattgggtatgttcttaatattcattagtgagaatcacaaagtatttgtagaaggcccaaatcacagaataaaggactaagagtggatttgctgacattccatactaatatacattgtttatgctttctttaaaataactagaagaacataaaagaaagagaatctcagaagtagtttgctgctaatatatacatatattgtataaaaaggtatattttggtttgttaaaacccttgttgacttttctacactgaacattttttttaagcttgatttaataaaaatgttaattttggaagtgcagttttgtaaaaacctttttcagtcaaacagtaaagactttatttatggatcgtaataacaaccacaagaaaagccatacatcttaatgaacatacgc

SEQ ID NO: 53453 - DNA, 500 bp, Homo Sapiens
catgggtgtagaaagcctggactatagccagagtcaataattattagttctttatcttgagacaaagggaagtgttaaaatatttttatatcaaggaatctcctacaaacactgtcctccccactgcccactgccagtatttacatgaattaattttctccttatcttcttactctcgcccacccgcttccctttccttccgttccaaagttatactacacttattcaggatagaaatttcctttataaaaagttgtaaaaacttcaaagtgcctgttgtagtatatatctttaataaatactcccctgctatatttgttaaactataattatgagcatacatttcataaaaataaaggcccatttactcataaactgtatgtttacggtgaaaaaatacacattttataacccactccagacctactaaatctgggcgttagaatctcaatcttgggttttccaacctggctcctttttcgaaataacctggaacactt

SEQ ID NO: 53454 - DNA, 614 bp, Homo Sapiens
tacagttttgatggaacttggagtacgttttcatcgacttatctatgagcatcttcaacaatattcctacagttgtatgggtggcatgttggccatttgtgatgtagccgaatataggaagtgtgccaaagacttcaagattccaatggtattacatctttttgatactctgcatgctctttgcaatcttctggtagttgccccagataatttaaagcaagtctgctcaggagaacaacttgctaatctggacaagaatatacttcactccttcgtacaacttcgtgctgattatagatctgcccgccttgctcgacacttcagctgagattgaatttacaaaggaattcagtgtcagttcctttacagaggaatgtcttatacttcagcagccctcggttgatagaaagcacaggagataccttatgacacagccaacattttgtgaaacaatgactggaacaaaacagcagccatacttacctttgaggttttatttaaagtttggataccactagctatattttgcttttttcccctcacattgaattttaattccattcttgaatgtagaaatttcagattctctaaaactacatgtcactgtttttatc

SEQ ID NO: 53455 - DNA, 812 bp, Homo Sapiens
  misc_feature (609)..(609): n is a, c, g, or t
ggcaggtacagcctgggtgtgaatcggcgaggattcatgaaaaaagagtgtagcggttctgagatgccactcttagggttgggatattgagacaggccaggtttacatgtttgatgggtcatgttgcagcagtccgctgtgttcaatatgatggcaggagggttgttagtggagcatatgattttatggtaaaggtgtgggatccagagactgaaacctgtctacacacgttgcaggggcatactaatagagtctattcattacagtttgatggtatccatgtggtgagtggatctcttgatacatcaatccgtgttgggatgtggagacagggaattgcattcacacgttaacagggcaccagtcgttaacaagtggaatggaactcaaagacaatattcttgtctctgggaatgcagattctacagttaaaatctgggatatcaaaacaggacagtgtttacaaacattgcaaggtcccaacaagcatcagagtgctgtgacctgtttacagttcaacaagaactttgtaattaccagctcagatgatggaactgtaaaactatgggacttgaaaacgggtgaatttattcgaaacctagtcacatnggagagtggggggagtgggggagttgtgtggcggatcagagcctcaaacacaaagctggtgtgtgcagttgggagtcggaatgggactgaagaaaaccaagctgctggtgctggactttgatgtggacatgaagtgaagagcagaaaagatgaacttcgtccattgtgttagacgaatatactccctgtcccttccccccttg

SEQ ID NO: 53456 - DNA, 632 bp, Homo Sapiens
tccacgtcccatgaacatgcagcagagctagttagcatggatgaggaaaaatttgtggatgccgttaactctgccttttggagtgatgctgaccacacggacttcatcgacacagctggtgccatgctgcagtatgctgtcagccttctgaagcccactaaggtctcggctcgccagctgcccccaagcgtagccagggtggatgccaaaagccgagttctgtttcctcttgggttgggacatgctgctgagtacgtcaggcctcgggtggcgctcattggggatgcagcccacagagtccatccgcttgcaggacagggtgtcaacatgggctttggggatatctccagcttggcccatcacctcagtacggcagccttcaatgggaaggacttaggttccgtgagccacctcacaggttatgaaacagaaagacagcgtcacaacactgctcttctggctgctacagacttactaaaaaggctctattctaccagtgcctccccgcttgtgttgctcaggacgtggggcttgcaggccacaaatgcagtgtctccactcaaagaacagattatggcctttgcaagcaaatgagtactcctctcctaaagaaagattacgttgatgaaaaa

SEQ ID NO: 53457 - DNA, 762 bp, Homo Sapiens
  misc_feature (82)..(82): n is a, c, g, or t
  misc_feature (741)..(741): n is a, c, g, or t
cttatttggaagcccatgaaacctttaatgagtggtttaagcatatgaattcagttccacaaaaacctgctttgatacctcnaccaacttttactgagaaagtggctcatgaacacaaagaaaagaaatatgaaatggattttggtatttggaaagggcatttggatgccctaactgctgatgtgaaggagaaaatgtataacgtcttgttgtttgttgatggagggtggatggtggatgttagagaggatgccaaagaagaccatgaaagaacacatcaaatggtcttactgagaaagctttgtctgccaatgttgtgttttctgcttcatacgatattgcacagtactggtcagtatcaggaatgcctacagttagcagatatggtatcctctgagcgccacaaactgtacctggtattttctaaggaagagctaaggaagttgctgcagaagctcagagagtcctctctaatgctcctagaccagggacttgacccattagggtatgaaattcagttatagtttaatctttgtaatctcactaattttcatgataaatgaagtttttaataaaatatacttgttattagtaattttttcttttgcattaccatgtaaaatttagacatttgaattttgtacttttcagaatattatcgtgacactttcaacatgtagggatatcagcgtttctctgtgtgcttggtaataaaactatataaaaattaaaattttctgnttttacaaaaaaaaaaaaaaa

SEQ ID NO: 53458 - DNA, 564 bp, Homo Sapiens
cccacgcgtccgccagctccccgtgcctcgacctcagccgcctggataaggggctggccgcactggtgcgggagcgtggcgcggatctggtggtcatcgagggcatgggccgtgctgtccacacaaactaccacgcagccctgcgctgcgagagcctcaagctggccgtcatcaagaacgcgtggctggccgagcggctgggcggccggctcttcagcgtcatcttcaagtacgaggtcccagccgagtgaggcgctgcagctgccggactcttctgcttgtcacttgtcaggaatgtgtttttaccaccacagggaaactgcgttcaaatcaacgtatttatatggtactgctgtgacgcggcacatacaccccagccgcacagatgcgtgtgacccagaggcgagacgcagctttgtcctgggagacgttcatattggaatctatttaactgctaaagaaccttttatatatatatatatataaatagagagatctatacaggtatgtctgacgggacgcagcaccgtgggcacgcaccaaatagagtttttaaaagagaaa

SEQ ID NO: 53459 - DNA, 587 bp, Homo Sapiens
agctcggggcagggtgggcgcgagagagcctagaagcccatgtagccgcgaatcccgcagccccagtacacctccctccgtgcctccccgccttttctgcagagctccgccctggagtgaaggaggagccgtcacctggagctccgaaaaaagcagaagaagataaaactctgcaaagacaatgtctagcacttatatctccagtaactcctgtcaaggtttattgttgcttgttcatcattgcagtcctgactacaagtgtgattgcactttctattgttttgtcagaatttcctgaaaagatacaaaggcccttctgaccattggattggccttagaagagaatcatcccatcgcatttggaaatggacagacaacatggaatataataacattcttcacacatttataaaacaatttgggaggagactggaaatcatcttgactgaagaccaccaatggcagcagttcatttgggtacagcagcaagcatcagttaaatacctatcaacatagctgggcttggcttgctatcagaggaagtgaagaatgtgccttcctgaaatgacatgggagtcacagtggca

SEQ ID NO: 53460 - DNA, 760 bp, Homo Sapiens
  misc_feature (571)..(574): n is a, c, g, or t
  misc_feature (576)..(617): n is a, c, g, or t
  misc_feature (619)..(629): n is a, c, g, or t
  misc_feature (631)..(638): n is a, c, g, or t
  misc_feature (640)..(649): n is a, c, g, or t
  misc_feature (655)..(655): n is a, c, g, or t
ggataagcagcaattctgaacggcttcccgatatcaacatctaccagctgaaggtgctcgactgcgccatggatgcctgcatcaacctcggcctgttggaggaagccttgttctatggtactcggaccatggagccatacaggatttttttcccaggaagccatcccgtcagaggggttcaagtgatgaaagttggcaaactgcagctacatcaaggcatgtttccccaagcaatgaagaatctgagactggcttttgatattatgagagtgacacatggcagagaacacagcctgattgaagatttgattctacttttagaagaatgcgacgccaacatcagagcatcctaagggaacgcagtcagagggaaatacggcgtgtgtctttgttgaatgccttattgaggtcacacactctatgctttgttagctgtgtgaacctctcctattggaaattctgttccgtgtttgtgtaggtaaataaaggcagacatggtttgcaaaccacaagaatcattagttgtagagaagcacgattataataaattcaaaacatttggttgaggaannnnannnnnnnnnnnnnnnnnnnnnnnnnnnnnnnnnnnnnnnnnntnnnnnnnnnnnannnnnnnnannnnnnnnnnccttgntcgggccggcctcggcccctcgaagaagcttttcatagacccatttcgttggggcggcgcgggccccagataggaaaagggaaacatggggccatagcctggttt

SEQ ID NO: 53461 - DNA, 572 bp, Homo Sapiens
atggatagatggataggtgaatgtaggtggacaggtgactgggtggatgttgtggtctctggagaagcactgccattcagcctcctgctccagctgttcacatgcagaaatgctctcttcacaggcagagaagcctgtggctaaagcttccacatcccattaactcagtgcttttgtctttttcatgacatggcacatagagaaaatatttttttctagcacacaagagcaacctgaaaggctgctcctggccagaggactctgtcccgggggaccgtgtcctcccccatgtcctgcctaggccctcagaggaccagggatcatgtctccaggtaacccgactgtagcccctgctggctgagctccagcctgtgcccactgataatagcagggacggccttttctcttagagcagctgataagtttccctacctgatggccccctctgacataaactgcacacctggggtgatggcttaaagccagaaagagctgagggagttaagagggccaaccttagggcacgtgggcatttatataaaggtcttaaaagcaaaaaaaaaaaaaaaaag

SEQ ID NO: 53462 - DNA, 894 bp, Homo Sapiens
  misc_feature (841)..(846): n is a, c, g, or t
  misc_feature (848)..(855): n is a, c, g, or t
  misc_feature (865)..(866): n is a, c, g, or t
tgaccggaccgaagagtagaaatttgaaccttcaccatccaccactctattcaggtaaaaaatgaatgagccaccttagcaggagcagatttttcccagaagctgctgcctcttcctgaggcagaaaattggattactaaggctcaaaactaaaagagatgtcagcattgctggatagaaatgtcacctatatgggatttgcctgttttaataactttgtaaggaattcttgctcttctaggggtgcctggcgcaaccgtgggcaagttactgctcctctttaaacctcgtggtggttattgaaacagatttattagaaggagagggtaggtgcagagctggagagccatgggtgaggcagcttgtgacctgcctagcagccgctgaccacctctccaacagaagcctagtcctgttcagagcagcactgtcactgcaagtccagccccctttgccaggggctccattccacccctttcctgcagggaggggtgccatgagtcttgcttttggctcatacaggagagagggaaggctgccaggcactgcttgtatccctgctgataagaggagggagtcactccaggaataagacaaaaggagaggaggaggccatcacctctggcctcttccatcgtacacttcctgtctctggtttaatcatgatgcatggagctacaacagccatcttaggtccccgaggtgcccagcatcacgtaaaacatcgatatgctaagaagaacaaaaagagcccaatctctgatgttattgagctcctgcatgaactctggacttgcctgcctcagacttctgtgaaagaataaaatttctttttgcctannnnnnannnnnnnnaacccactcnnttggttacaaagtgggggctttttaaaa

SEQ ID NO: 53463 - DNA, 931 bp, Homo Sapiens
  misc_feature (801)..(801): n is a, c, g, or t
tggattctcactactgcacagaccctgccaagttcatttcagtactgtgtacctccctggccaccatgctgcacgtggaactgccccacatcaacctcctttccaagatggacctcattgagcattatgggaagctggccttcaacctggactactacacagaggttctggacctctcctacctgcttgaccacctggcttctgaccctttcttccgccactaccgccagctcaatgagaagctagtgcagctcatcgaagactatagccttgtctcctttatccctctcaacatccaggacaaggagagcatccagcgagtcctgcaggctgtggataaagccaatggatactgtttcagagcccaagagcagcgaagcttggaagccatgatgtctgccgcaatgggagccgacttccatttctcttccacactgggcatccaggagaagtacctggcaccctcgaaccagtcagtggagcaggaagccatgcagctgtagcaacaaggtggaccctggagagcaggatgcataatccagcactggggaaagtggaggctcctgatgcaggctgcagacccaagagcaagtcctcccagccagagctggcgggctggcaaggggatattcagctctgcaaaggacttctggccaaaaagccagacatggtgccaagcagaacaccccccatactgtcagtggtgtccgtgagctctgggccctgccaccagaaagtcgagcactggtcctagtcaggctgtgatgaaatgtgctaccatacaagaagttatttttctanaaaaaaaaaaaaaaaaaaaaaaactcgaaggcatcctatgtccgggggggcgggaaaaaagaggtaaatgaaaatgggccacatgggtcaatagcctggtttccctgaaccacagtttttcttggaaaat

SEQ ID NO: 53464 - DNA, 677 bp, Homo Sapiens
acagcacccttggcgtccccagcaggctccccactgtcagccacacacctgcccccatcacaccaagccgacctcagagttgttcatcttccttatgggacaaaaccggttgaccagaaaatgggcagagagagatgacctcggaagcatttccacagatggtgtcagggtttcaagaagtcttagggcttccagggtcccctggaagctttagaatatttatgggtttttttttcaaatatcaattatatggtagattgaggattttttttctgtagctcaaaggtggagggagtttattagttaaccaaatatcgttgagaggaatttaaaatactgttactaccaaagatttttattaataaaggcttatattttggtaacacttctctatatttttactcacaggaatgtcactgttggacaattattttaaaagtgtataaaaccaagtctcataaatgatatgagtgatctaaatttgcagcaatgatactaaacaactctctgaaatttctcaagcaccaagagaaacatcattttagcaaaggccaggaggaccacctacgacatacatttgtcttgaagatctcattgatgtgatgttacattccctttaatctgccaactgtggtcaaagttcataggtgtcgtacattcccattatttgtaaaatc

SEQ ID NO: 53465 - DNA, 878 bp, Homo Sapiens
ctggccacacggactcagaggggccaccggggtggggaaaggacccctccccgaccccccgcagccactggcctccagctctcggccacagaatggcctctaaggctgactcagccactcccttgggctgtggcagcaggaggcgggggctctggctcaggccccggagcctgtgcagcttgcccatggccctaggcagcgaggggacagcctgggggacttcctgcctaggcaaggtcattggccgggcctggcctgtggatagtggggccaggggccggcccaggccaaatgagtgccctccttgttatgacaccaagtgactacaagggaggcaagacccctccaggcctctcagccgacactgggtcccaccacacacagtgactgtgccgtgcagtgcaggttctggccttttccttgaaggcatctggtagacccgaagccacgctctcgggccgcacatgcacgccgcagcaccagctgccctgagctgcttgtacaaccaaacacctttcccctcttctccagctgtaacctggagagtcagccatgccttgtcttttgttctcataaatagtcactggggccgggcgcagtgactcacgcctgtaatcccagcactttgggaggccctagtgggcggatcacttgaggtcaggagttcgagaccaccctggcccacatgggtgaaaccctgtctctactaaaaaatacagaaaattacctgggcgtggtggcgggccccctgtaccccagctacttgggaggctgaggcgggagaatggcaagggcgggaaccccggaaagcagaacttgcatggaacctaaaatggcgccactggaactccaacctgggggaaaaaaaccaaaattca

SEQ ID NO: 53466 - DNA, 671 bp, Homo Sapiens
cgcgtccgagctcagatggtgtaaattttaaaattttgtataggtatttcataacaaaaatatgtatttcttttttgttattttatcttgaaaacggtacatattttagtatttgtgcagaaaaacaagtcctaaagtatttgtttttatttgtaccatccacttgtgccttactgtatcctgtgtcatgtccaatcagttgtaaacaatggcatctttgaacagtgtgatgagaataggaatgtggtgttttaaagcagtgttgcattttaatcagtaatctacctggtggatttgtttttaaccaaaaagatgaattatcaatgatttgtaattatatcggttgattttttttgaaaagatgaaccaaaggatttgactgctaatattttattccttacactttttttctgaataagtctctcataatgagtgcagtgtcagactgtgcctactctgatggtatgtgccatttgtaaaataaaatagagcagaaaaacacaaaaagagaacactggttcagacattcagtgggcaagtaaattatggactgcaaaataatgatttttattcaagaaagctttaaaagttttatatccagatataccaccaccataaagccaaataacctactatcaaatagaaatgttgctatctttataagtgcaatt

SEQ ID NO: 53467 - DNA, 571 bp, Homo Sapiens
ttacaaacaagactaatatttttacaaaatgtcattaaagaagcatcaaggtttaaaaaacgaatgctaatagaacaactggagaacttcttggatgaaattcatcgaagagccaatcagatcaaccatattaatagcaattaaaagaaaatagaatgtggccacttatttcactatcttcttcaaatacaaagtaaatacaagactgttgtgatcttgtattcattttctgacatgcattgttggctatttgaaatactaaaagcaaatctacagatcctttttccatcattttacagtgaccttttcttcattttggtttatttttgtaatgtgaaaagtatcactctaaaaaacatttttaatttaacaaactaaaaatattcctccaaatctcttgcttgtcattgactcttgcgtgtcaatttccctcaggttctattttcttaaaccaacctttaaaattgtcacctctgttaaggttgaactttgccaaaaaaaaaagaagttactttgtaatttttggggaaaaaagcacatacattaaaactaggtaatgttttgtatatac

SEQ ID NO: 53468 - DNA, 664 bp, Homo Sapiens
  misc_feature (638)..(638): n is a, c, g, or t
tgtgtcagaggcttctgctcgcatacctgagcagcttgatgtgactgctcgtggagtttatgccccagaggatgtgtacaggttcctgccgactagtgtgggggaatcacggacacttaaagtcaatctgcgaaataattcttttattacacactcactgaagtttttgagtcccagagagccattctatgtcaaacattccaagtactctttgagagcccagcattacatcaacatgcccgtgcagttcaaaccgaagtccgcaggcaaatttgaagctttgcttgtcattcaaacagatgaaggcaagagtattgctattcgactaattggtgaagctcttggaaaaaattaactagaatacatttttgtgtaaagtaaattacataagttgtattttgttaactttatctttctacactacaattatgcttttgtatatatattttgtatgatggatatctataattgtagattttgtttttacaagctaatactgaagactcgactgaaatattatgtatctagcccatagtattgtacttaacttttacaggtgagaagagagttctgtgtttgcattgattatgatattctgaataaatatggaatatattttaaagcccccccccccgccncgccccgccccccccacaagggggcg

SEQ ID NO: 53469 - DNA, 507 bp, Homo Sapiens
agctcctcaagcaccctggcccgaaaggaggctggggggcggcggaagcgagtagagtttgtgacatttgtgccagcccctccagcccagtcacctgaggagcctgtaggggcccctgctgtgcagtccatccttgtggcaggcgaggaggacatccgctgggtgtgtgaggacatggggctgaaggaccctgaggagcttcgcaactacatggagaggatccggggcagctcctgaccctccacagccacctggtcagccaccagctggggcaacgagggtggaggtcccactgagcctctcgcctgcccccgccactcgtctggtgcttgttgatccaagtcccctgcctggtcccccacaaggactcccatccaggccccctctgccctgccccttgtcatggaccatggtcgtgaggaagggctcatgccccttatttatgggaaccatttcattctaacagaataaaccgagaaggaaaccaaaaaaaaaaaaaaaaaaaag

SEQ ID NO: 53470 - DNA, 588 bp, Homo Sapiens
gggatggtaattagcctttccccatgttaatttattcagttttttcaagggtcaactgaattccccacttcctgggtaagaagcatgatctccttttaatttcacgtctaagatcctggcagcttcccctagctggttcctctgtagtcctgctgggactgtcagctcatttaaatgtgggtctgcagaaggctttaggtctcccccaacccccttacctttcacagaggaacctttcatcaggataaatgattattgctgccctgtgggtcttgctcaatactgttcatacctggagagagaaggtattgaaacatctcctttatgtgtgactttcccaaatttttaaaaattgtttatggtttaggccccttaaatactgtgtagcaggatgaagtctaccattaccagctgggtcaccttggatgggtctgtcaacatctaagcctcagttccctcacctgtaaaaatgagggtagtccctacctcataagggatattgtgaggatggaaagcgaaagtgtgagacaatacctcccaagtgcctggtacatagtgggtgctaaataaaccactttttgtctgcaa

SEQ ID NO: 53471 - DNA, 448 bp, Homo Sapiens
tttttttttttttttctgggtgaggttgtccctgcagtactccttgtcacagaaaacagaaaaacagttgttcctgttgtgtggtttatagatttcgaagcaacatgtcacaacaataacctccatagcacctccccttcccaaaccaaacaacccaacaaaaaaaatccctcacttttgttttctgtttattgcttacctggctttttatattgcattttgcaaaagaagaggtctccctcaatcctcccctttagggaaggagtcaacagtgtaactaaatttctctaggaagatggaaagtacttaaataatgtgtgtgtggttttcctttggggacgtggttaacggtccagaagaatcccttctagaaagcattttaggccagccatggtggctcacgtctgtaatcccaggactttgggaggctgaggcaggcctcgtgccg

SEQ ID NO: 53472 - DNA, 643 bp, Homo Sapiens
actttcacgagggtcctccggggccacacagactacatccactgcctggcactgcgggaaaggagcccagaggtgctgtcaggtggcgaggatggagctgttcgactttgggacctgcgcacagccaaggaggtccagacgatcgaggtctataagcacgaggagtgctcgaggccccacaatgggcgctggattggatgtttggcaactgattccgactggatggtctgtggagggggcccagccctcaccctctggcacctccgatcctccacacccaccaccatcttccccatccgggcgccacagaagcacgtcaccttctaccaggacctgattctgtcagctggccagggccgctgcgtcaaccagtggcagctgagcggggagctgaaggcccaggtgcctggctcctccccagggctgctcagcctcagcctcaaccagcagcctgccgcgcctgagtgcaaggtcctgacagctgcaggcaacagctgccgggtggatgtcttcaccaacctgggttaccgagccttctccctgtccttctgatctctgacgacacccccagccagctcagggttttagagtgtttttcattttctttttttttttttttttacaataaartttcaggsttttt

SEQ ID NO: 53473 - DNA, 730 bp, Homo Sapiens
tcatgttgaaagataaatgttgctaagtcctggtatgatggtgtgagcttccttggggaagtacttcttgagttatgtaactaacaggatgttttactacagatctggatggctattcagataacatggcaaaaaatgatagcagaagatcattaaaaacttaaaatatattttattagaaaacatttatctatgaatgaatatttccttgatgctggtctctgcacacatatgcttggttacttgcatgcattcattggttgttcaataagtgagatgattacagataatactgtattttccttatatggaaaaccgttatagacccaataacaactaaacctttcaaaagaaaatattttctattatgaatgttgattttcataccaaagaagatggagagtctaaaatttggatatgattcttatgttttttttaatagaaaaccttcttcaagtttattttcctaaataaacatcataattgtcaaaaaaaaaaaaaaaaaaaaaaaaatttgtggggggctgggcccggaaaaagttttacacacccatctgtgggcccggggcaccagtagggtagtggaacgtcgccatagccggccccaagaaaacccggccaagacatagcgcgtgggattcccccaataaaaacgccggggcaacccaccgttgtgaaaatccgaagggatcagaggcaagggaccacacgggccaggaacgatatataa

SEQ ID NO: 53474 - DNA, 743 bp, Homo Sapiens
  misc_feature (683)..(683): n is a, c, g, or t
  misc_feature (703)..(703): n is a, c, g, or t
agcgcctggaaaaagagaagcatgaaaaaggtgctcagaaaacagattgtcaaaaaaacttgggaaccgtgggtgctgttgccttggactgcaaagggaatgtagcctacgcaacctccacaggcggtatcgttaataaaatggtcggccgcgttggggactcaccgtgtctaggagctggaggttatgccgacaatgacatcggagccgtctcaaccacagggcatggggaaagcatcctgaaggtgaacctggctagactcaccctgttccacatagaacaaggaaagacggtagaagaggctgcggacctatcgttgggttatatgaagtcaagggttaaaggtttaggtggcctcatcgtggttagcaaaacaggagactgggtggcaaagtggacctccacctccatgccctgggcagccgccaaggacggcaagctgcacttcggaattgatcctgacgatactactatcaccgaccttccctaagccgctggaagattgtattccagatgctagcttagaggtcaagtacagtctcctcatgagacatagcctaatcaattagatctagaattggaaaaattgtcccgtctgtcacttgttttgttgccttaataagcatctgaatgtttggttgtggggcgggttctgaagcgatgagagaaatgcccgtattangaggattacttgagccctgnaggtcaaagctgaggtgagccatgattactccactgcact

SEQ ID NO: 53475 - DNA, 632 bp, Homo Sapiens
ttttggtatttacaagaattcccaggtacgaagatatctgcatgggtggaaatcaggttcaagcaacgtactttgcattaactgataatacctcagctgcggggttaaagttttcccagtatagagagactgtcactaggaacattgtattgatttattcaggtcattgagatcttctagatgtattttaaaaagaatgctttttggttatgtgttgctaccacagttaacactccataatgttcatgtcagccaaagaggactaaccaaagctgaaatctcagagaacaatttgctttactaagctgagtcaacttgagagcgaacttctaacaatgccgcactgtagtgtggctggttctaccactatgactttaaaacatgtttatatcatttttaatttttatgatacggtagtgtcagggagaaatgtaatgttctatatgamattcctttttcaagtttgttcattaataacagttattaatttaaatcagcgttagagtttgtgctgctgcaactgctgtgaaaatttctctgagtaattctgatttgtgaatgatcccagaccaaccctgagattttgtcaacctgattaagtcaatatgaatgattaaaaagatgtgagaaca

SEQ ID NO: 53476 - DNA, 726 bp, Homo Sapiens
ggaggaatcctacggcccctgaatattttggcatcttcaacctaccgcaactgtgtcaagaatgcctctcttatttctgcattgtccactggacgttttagtcatattcagacaccagttgtttcctccactcccagacttaccacatctgagagaaacctgacatgtgggcatacctcagtgatccttaatagaatggcccccgtgcttccaagtgtcctgaagctgccagtcagatctctaacatacttcagtgcaagaaaaggcaagagaaagaccgtgaaagctgtcatcgataggtttcttcgacttcattgtggcctttgggtgaggagaaaggctggctataagaaaaaattatggaaaaagacacctgcaaggaagaagcgattgagggaatttgtattctgcaataaaacccagagtaaactcttagataaaatgacgacgtccttctggaagaggcgaaactggtacgttgatgatccttatcagaagtatcatgatcgaacaaacctgaaagtatagatcagaagtttcacttgtttctcagttattggatatgtatctttgtgtacatatctttgcaaaaatggataagtacaaaacttgatgtaaattgtaccaatgaatatgtaaacatacagtgacaacattaaacttagaaaagttttaaaacttaatggatcagactttgccagatttggttagggaaacagaaattta

SEQ ID NO: 53477 - DNA, 584 bp, Homo Sapiens
agtgggggaaagcccttagtcttgtacaggagcagcttgctcccaagtccttttggaagctggcagagctatattcctgacagccctgactgccaggtagagcaaaagacattggtgggggtatgtgaagcaaaaggggcaggtgcacacacctccacagtgacctctgtgcacacggttaccaccaactggctggccctcctcctcttccctggcccattgatcatcccttctcacagagggtcatcattatttccaaatattgtttgtctgatgacttcctcttcccagtgcaatttttcccttcctatttcaacctctggttcctgggatgagccataccctggaactggcccacccactgtgtcttccacgtaagggagacctttgcaaagggcatccaaatgggtaggcaggtgacagccgccgtatttattttgcataatattttaatttgtatatttttgtgatttattttggcgttatgagtttgactctcggggagttttgttgttatgactcttgtgtcttttgtcacaaaacaatgatatttgctaaacgatatatggaatttatttttggtt

SEQ ID NO: 53478 - DNA, 607 bp, Homo Sapiens
cacacacctgcagggccggcctggcccttccagcaaccctgttagtaacggcaaagaaacccggaggagcagcaagagatagcatgacattctttcttcctgccaccaaccacatcccaagtgtcccctggagagcaagatagccttccactgattggctggtgtagcagtattttagccactgaacttcagtggagggtggtgagcagtgtccttatccaccctaatctcatactccctcattgtccagctgaactacctgtcccctgggagtcaggaccctctgcctgctctctttcctctttagaaatggcagttactggctgggcgcagtggctcacgcttgtaatcccagcactttgggaagccgaggtgggcggatcacctgaggtcgggagttcaagaccagcctgaccaacatggagaaaccccgtgtctactaaaaatacagaattagccaggcatggtggcgtatgcctgtaatcccagctacttaggaggctgaggcaggagaatctcttgaaaccgggaggcggaggttgaggtgagccgaaattgcaccattgcactccagcctgggcaataagagcgaaactccatctcaaaa

SEQ ID NO: 53479 - DNA, 744 bp, Homo Sapiens
atccccagcaggtagcaggagcgggagcggcccgtggaccgggagcccgtggaccgggagccggtggtgtgccaccccgacctggaggagcggctgcaggcctggccagcggagctgcctgatgagttctttgagctgacggtggacgacgtgagaagacgcttggcccagctcaagagtgagcggaagcgcctggaagaagcccccttggtgaccaaggccttcagggaggcgcagataaaggagaagctggagcgctacccaaaggtggctctgagggtcctgttccccgaccgctacgtcctacagggcttcttccgccccagcgagacagtgggggacttgcgagacttcgtgaggagccacctggggaaccccgagctgtcattttacctgttcatcacccctccaaaaacagtcctggacgaccacacgcagaccctctttcaggcgaacctcttcccggccgctctggtgcacttgggagccgaggagccggcaggtgtctacctggagcctggcctgctggagcatgccatctccccatctgcggccgacgtgctggtggccaggtacatgtccagggccgccgggtccccttccccattgccagcccctgaccctgcacctaagtctgagccagctgctgaggagggggcgctggtcccccctgagcccatcccagggacggaccagcccgtgaagaggagcctgggcaaggtgcccaagtggctgaagctgccg

SEQ ID NO: 53480 - DNA, 917 bp, Homo Sapiens
  misc_feature (878)..(878): n is a, c, g, or t
tgcccagctgccctgtgggcagaggcctgtgtctgtgccacacctgccacggtggcagggggggtacccggggcagcatcgtggctcctgaacccagacccaatgcttagccaaacgaagtggctcccatgtggcaagcacccttctcagtttcgcagtggcttggctcgggatccttggcagttcccccagccccaccctgtctgctccttcccagttccttcccgggccccacacgctgctccagctgccaactttgctgcagagccactgccgcccttgagcctctcaccatgagtgagccaccagctctccacgttcccctcatagcagtgtcactcccaaccccaccatggcccagggacccgtggacaggttggggatggggtgtgtgcccactgtgctcatcacaggagcctcagttgagagtgagcggggtacagtaaggcagtgcttcccacactggacctctttcctggttctcttttgcaatacattaacagaccctttatcaacataaacaatagtaactgagctattaaaaaaaaaaaaaaaaaaaaaaaaaaaaaagaaagaaaaaaaaaagaaaaaggggggggggggataggagattcccggggggggcaaaatttaagggttaccagagttttgttgtaaaaagagggccccaataggagagagcgaattttacaacatagagaatggcagcgttttaacaacgcccgagccgcgaccaaaccgccccgccgggacccttctgaaaggacaccaacacgagcgcgggggcacaacatctggaacaaatatccagacagaagatacagcgccccagcgacactcacacgcgtcaccggctctcggctgccaccacgaccacnattctaccgcgtgaagacttgcccacagattcttggata

SEQ ID NO: 53481 - DNA, 672 bp, Homo Sapiens
taagcccttagttgcctgggcccctgcgtcccaagcatttagagattacccaggagacagcccggctactctcgaaattggacagcgaggctgtgcccagggccacctgctgcccggacgtccagcctgaggaagccgaggaccatctctgaccaccctggcaccttaaataaggaagaggcccagattgtgaacacggacccatatatccctacctcccaccacctagtggccaaacaccccgccaggagttcaatgctgggagaggtccagagggttcctataaggaaaaactatttaatacatgacctaggggaggcctaaaacccttttggggataatgtcccagagtccccccactagacacaggtcactgccaagcatcagggccactcgggctcagaggtcactcagggtcaatactcagggtcagtgcaggttatgagatccttggggtccaccctagtctctgacacctgggacaggggtgcttttgctactttggttgtggtcactcccccatacctgcctgcctccttcacggactcgaagtgaccttcctggaggaggtgggcagctcagactccacatgctggtggtgcctgaagtctgatggcctctaataaactgtgtctattaaaaaaaaaaaaaaaaaaaacaaaaaaaaaaaaa

SEQ ID NO: 53482 - DNA, 514 bp, Homo Sapiens
gcacgaggtggcacagatggcttcgttcatcctgatcaaggccccacctcagccacagcagtccccccaacctgtgttgtccaccctattattcatgtacctgccaggccctgctagatagcaccccgtggcattacataacacttcatgagtggctgtgtcttgtaattttggggacaggtttctctctttccctctcttttttttgtcaaaagcccagagactgacaaccagctgcagtgtctaagtgttcctcactgacagggtggggcctcaccacccctggagggagcagcgttggcagggagacagcctggcccagtgaccctgggcccaagccagcccctccagggctttcagggaagcgccatccattttcaaagatgtcaaacgtcacttcttcctgtagggcccgagtcctgcctcctatcagggccagatcatagaaggctattttctattctggggaacgattataacttaaatgattgttttaataaaaattttaagctgg

SEQ ID NO: 53483 - DNA, 610 bp, Homo Sapiens
acaccgaggcccacccactcccggtgaaccactcagacagctccggcagagcctggggcagacactgaccccatctcctgccgccaccctggggccgccgcagggatgccttgccttttcaggatttgagactgttctcaaagggattgggaacgaaggccccatctcgggcagacccccagcagatgtgtcggacaagcaacttcttttcctctgtgaggagacaagacttggagactcagcgatgtcaggccagggccatggccacactggcccacacattcctttctacagagaatttctatgaagcccactcacttgccattccagggccaaaggaccggaggtttgcatatccgccccttgtatttgatttgcttccttttggtttcttggtttttgtttttgcttgattttgtcttttctctacagtttagttttgtcacaattacacatatagttttcaaaatcatgcactttctaaaatggtgtcatcctgaaaaacaaaacccagtgtttgcacacacacaaaatcttgaccccgttatctatattttaaatgctttttgcccaacactgaccctatgttcaactttgtgtcatttacctt

SEQ ID NO: 53484 - DNA, 658 bp, Homo Sapiens
attctccggatgccgcagccgccggagccgctacagcaggagaagccagcctcctccttggacgatgtgttcctgcccaaggacatggacggggtggagatggatgagactgaccgagaggtggagtactttaagaggttctgtttggattctgcaaagcagactcgtcagaaagttgctgtgaactggaccaacttcagcctcaagaaaaccactcctagcacagctcagtgaggccctgcccaggctgagctgcttcagggcatcctgaggccctgactgccagctgaaggcgtataatttttccctctgtgtgccccacctacccgtccaagaccctctgtgctccccaccatcctggaccaaccaaaagctgaacggatgccacactgtgctggggccccttgacctcagcagagccgcttcctggtgctacgcagcctccacactcagagcccgtggactgggctggcctaagggccagggctgatggtactgctggcccaacactgctctctttgtgtttggtttttttgtttttgtttttattttgtttttttccaattctttacttttgatactgtgaagatctttcgtgccgaaaaataaagcaacatttggacaccgaatatatcctgacaacgaaaaataccgcccg

SEQ ID NO: 53485 - DNA, 744 bp, Homo Sapiens
ttttcctaattacagattaaaaatctgtatctttgaactctagatttacataaatcctggcttccctgcacattttgcccctgtaaattggaatacatgatgattgaaccatctgttatgagaatattacatttcctatttacacaattgtttgtgacagagtaaaaaccattttcatagtatatgttggatcactgttgtcttcatatttctaaaataaatgaattaaaaaatttaaattcttagatgcttatctctatcatagctcagaatgcaacttcaatacccccattcttttatatttccagatttcttttaattaagatataatgaacaaattaagttaaatgaagtctgtattttcatgcaaatatattagtattcattaatatacatttattctttgcaaatagattttagttatattagctcttaaattgttaaataaattattattgaattttattattaaattattaaaatgaaaattataaaattagcactgtaaaataatatgtaaaggacttggaatgttaaaaataaccattcatcattttgctttatattacatctaatatttcctgaaacattttgtaatacccacatggaaagtggagaaagagaaaccttgtgctttttataaaacattgccaaggagaataatggttaaacaaatctgttcaaatacatatttaaatttttttacaaataaaagttttaaattaacataaaaaaaaaaaaaaa

SEQ ID NO: 53486 - DNA, 872 bp, Homo Sapiens
cattttagaattgcccttcatttactaaatcagccagttaatgtgattcagttgtgacctgtgggattttaaaattttcctgccctcataatttaagcaaaatccacgatagtatcagcccaagagtgtgttgctattgtaagccccatggatcaatacataaactatgcataaaaataaaatttcatattttcgctcgtaaaaatttaggcgctgaataagaattgtgctatttctctattaatatatgttagaaataacttttctaatgaaacaaaaatgtttctcaaaatctagaaaagtgcatataaatttttgttcatttagaactgagtattctggagaaaaccaatggtcagcactttggtttgagttatctgagattgtattttcaaaatgaattttaagtagatatttggtgtttttatcttgtcaaagacagtttcaaaatttgattcagtttatgttttattccgttctaaaatattggagatgaggaaaatgtacttgagttttgaaatattttggtaagcctctcttactcctggttatgcactttttaaaataaatactgaattccagaaaaaaaaaaaaacgcccagctaaacacgccacacacgaacgccacataaacaaaacaaaggacggcagcgataaaaaagatcaccgtagagcacacgaaatctcacagcacccacgactcttgaagcaagagggccccacttagcgggacgtaatcgcaacacgcccgccgcaacacagcggaccgcgaacccgacgagactgcaagaaccacttgggagcaaaacggaaaccacaagagacgcaaggacccaacgactacgtgacccactgcgacccgacgacctaat

SEQ ID NO: 53487 - DNA, 606 bp, Homo Sapiens
  misc_feature (509)..(509): n is a, c, g, or t
tggaaaaacaggacaccagagcccaccagacagtgccggccagcagagaagcagagagccagcgccacacaacatcaagaaggccgacaaccaggttggaaaccaagacggagctcagacccaccacatcgccccagaggcttttccagcacccatgatgttccggactgacctaaaaactaattgtcgagaagccaagggtgaggaggcaggaagcacctccggttggaggcacccaggcttgccagccacagagcgccccgaagtcaccgtcatcccagcccctggccttcctgctgccctccggggccatggcactgctgttcagctcaggcacaggggcacagcagaggtttgggaagcggtctccccaccggcactgggattggcgggtccaagcccagcaaccggcttcgctccacaacacacaccacacctgggactgtttttaatacatagcaacagactgggttatttatttaagatgtgtattgtgtcatatgaagttnaagagacataaatggcattttgttatttattaagacaaactccaattgttctctggctgtttttttcagttgtgtctagcaaatacttatctgccct

SEQ ID NO: 53488 - DNA, 930 bp, Homo Sapiens
  misc_feature (26)..(26): n is a, c, g, or t
  misc_feature (930)..(930): n is a, c, g, or t
gcattgatacccaatgacaaactatnggagaacaagcaaagtatgcaggccccctgcagcctcccaggacaggctggcaagggaggagggccggccagcatttggtgggccatcagtctggccatctgtcacgtcacagaagcaaaccgtgccttctggctctgcgccccatattcccagcatcatagacatccaacagcaccagcaggagagtgggctagcctgctggatgctgttcgtgcctgtccctgctctgcctcccacccagttgcctgaatcatcccagctcagatgcagccactgtctcttgtcaagtgggacctcatactattctcagaaggctaacttgagaggtttggggccttgttccccagagggtccccagggactctgcagtgtccttggcaaatccccactgtactcaatgccctacattctcttctgtggtctctcccctggcttgcttcatggccactgaaccaatcactttgtatgctatgctcctactgtgatggaaaacaaaatgagtataacttattttatatccatattcagactatatagagaatattctatgcatctatgacgtgcttactactgcagtgcatttgtcattagtcttcatgttaatacagtacatttattctttggtacctgcctggccacagagcatcattcaatggaggctgagggagaagggctgggttcttacttggagttcctggtgaaatctttggctggaaagggctcactggggccacccaatggccagcatccacaaccagcttcccagtggggctggagtttgtctaggctcagtgaccaacccaggcacagctggtggagccaccgctccctgcttctcgtggaggggaagatgttccctaagcccctggggcttccttctgcaaatacacattttctcttttn

SEQ ID NO: 53489 - DNA, 816 bp, Homo Sapiens
  misc_feature (625)..(625): n is a, c, g, or t
ctctagcgaggtgacagcgtagaaccagagatagtcaagaaaaaccaaaacctgtccctgataaggaaaataaaaaactgctctgcagaaagtgcaaagccttggcatgttacacagctgacgtaagagtgatagaggaatgccattacactgtgcttggagatgcttttaaggaatgctttgtgagtagaccacatcccaagccaaagcagttttcaagttttgaaaaaagagcaaagatattctgtgcccgacagaactgcagccatgactggggaatccatgtgaagtacaagacatttgagattccagttataaaaattgaaagttttgtggtggaggatattgcaactggagttcagacactgtactcgaagtggaaggactttcattttgagaagataccatttgatccagcagaaatgtccaaatgatatcaggtcctcaatcttcagctacagggaatgagtaactttgagtggagaagaaacaaacatagtgggtataatcatggatcgcttgtacccctgtgaaaatatattttttaaaaatatctttagcagtttgtactatattatatatgcaaagcacaaatgagtgaatcacagcactgagtattttgtangccaacagagctcatagtacttgggaaaaattaaaaagcctcatttctagccttctttttagagtcaactgccaacaaacacacagtaatcactctgtacacactggggatagatgaaatgaatgggaatgtttgggaattttttatcctcccctttggtctcccttaaacctacttgtaaaactgggctt

SEQ ID NO: 53490 - DNA, 699 bp, Homo Sapiens
ttccgacaggmcctcttccgaggatgtacagcgctggagctcggggccggcacgggctcgctagcatcatcgcagccaccatggcacggaccgtttattgtacagatgtcggtgcagatctcttgtccatgtgccagcgaaacattgccctcaacagccacctggctgccactggaggtggtatagttagggtcaaagaactggactggctgaaggacgacctctgcacagatcccaaggtccccttcagttggtcacaagaggaaatttctgacctgtacgatcacaccaccatcctgtttgcagccgaagtgttttacgacgacgacttgactgatgctgtgtttaaaacgctctcccgactcgcccacagattgaaaaatgcctgcacagccatactgtcggtggagaagaggctcaacttcacactgagacacttggacgtcacatgtgaagcctacgatcacttccgctcctgcctgcacgcgctggagcagctcacagatggcaagctgcgcttcgtggtggagcccgtggaggcctccttcccacagctcctggtttacgagcgcctccagcagctggagctctggaagatcatcgcagaaccagtaacatgacccatcgcctccaccaggcgcggcgtctcgactgttcttagagtgtatttctagtaaaatcagaagctcaccaaagcaa

SEQ ID NO: 53491 - DNA, 794 bp, Homo Sapiens
catgcctagaagccagaacaactccatgttacactgagttcatgctcctatttactgatcacaaatgagctcattaatgtcatcgaaacatttattgtaacctaacagaccatcacagattggaaacttggtagatagcagagcatggtattagtgaaaaaggttcaaaatacacaagtaacatacactctgaaaaacatgcagataatttgctgatgaagcagaagaggggatgcgcatggcaagaacttgccttaccccagattctctatatctcatggtttccttttcctcttgactgtctttacgagtgttttttatttgggaccctcgagcccagagatattaatggatatctgtcttcaatatttgacaaaatctaatggaaaccatccatttactcatgataaggcttcatcactggatttctgtgtcttcactagaacaccattgtcatctcatattgatcaggtattttaatctagcacttacatattgttgataaatgaaagctgaatttttacttaataaattcactttgtttagtaaaaaaaaattgttttctaaatatgacgttcatgaagagaaaataatgagtcagaatcatctgcagaaccactggaatgtttcatcgtcacctgttagttttcataaacagttttctgtcctctctgagatcctcccgctcccaaatactcaacctgattaacttcacataaaagtcttatgtgccaggcttagtaatattcctatagatcttgacctctgaatccctgaaagaggaagaaatccat

SEQ ID NO: 53492 - DNA, 466 bp, Homo Sapiens
cttgatggatttgaagtacctagttcagaactccctagtcaccatctccaagcctgtcaacatcactgcatattggaggagatgactgtggtaggacccaaggaagagatgtgtgcctgaatagtcgtcaccatatctccaagcttcctggcaaccagtgggaaaagaaacatgcgaggctgtaggaagagggaagctcttccttggcacctagaggaattagccattctcttccttatgcaaagattgaggaatgcaacaatataaagaagagaagtccccagatggtagagagcagtcatatcttacccctagatgttcatcccagcagaagaaagaagaaggtgttggggtaggattcttcagaggttagcctggtactttctcatcagacactagcttgaagtaagaggagaattatgcttttctttgctttttctacaaacccttaaaaatcacttgtttt

SEQ ID NO: 53493 - DNA, 743 bp, Homo Sapiens
tgagtataaatgcaatgcgactgcaaaaaaggcaaagacctcagactctccttccaagggacctgtggttcgtgctgcgaagatgcttccacttaaagcatgagaaatggggtgccgggatgtggggtgtggtgtgtgccctcatagatgggggtgggagtgtggctggtgtgtgtgtcaaaccctcactcacccacgcactcacacacagcattctgttctccatgcaaagttaagatcgaatccatccgcttgtaggggaaaaaaaggaaaaaaattaaccagagagggtctgtaatctcgcagagcacaggcagaatcgttccttccttgctgcatttcctccttagactaatagacgttttggaaagttcggctagtgttcgtgtgtttgtcgtagcacccagagcctccaccaaaccctctccatgtctttacctcccagtcgctctaagaatctgcttgaagtctcgtatttgtactgctttctgcttttctcccacccctcctagcacccccacatcccccatctagtaacatctcagaaatttcatccagaggaacaaaaaaattaaaaatagaacatagcaaagcaaagacagaatgcccccccccaaatattgtcctgtccctgtctgggagttgtgttatttaaagatattctgtatgttgtatcttttgcatgtagcttccttaatggagaaaaaaaaacctaataaatttccagaatcataatcctcaaa

SEQ ID NO: 53494 - DNA, 691 bp, Homo Sapiens
caatttctcgttgactgactcagtctattttaagtattcagaaaagattttgatccccattgagttaatgctctgccttgaaaattatttttctgatccttgttagtgataacattttttttctactgaaggtcagaggataggaaacaagtatttctcttctggtatacatgtaatgtattctgtaaaaaagtattcatattggcaattttagttaggcataatattgtggttgtaatttttaaaacttagtgtttgtctgattaaagcaggcactgatcagggtatctcctaagaggtaattcacttcttattcctttccaataattattacattctaaattttcatctatgagaaataacaaacaagaagggaatagaattaaatggggtataatctaatcttcattgtttaaatggtttgccttctcaccattgaagccatttttttatagcctcagaaagaggaaataatgcctccaccattttctacctggtgacttgaaaattgaacttttaagttaggaagaagttagagtcagggaactgtgtataccactatctatgcagcattgttatagtctgattatttctgtgtttgaatatgattttcctaatgctctaaataaaatttgttaaaaattaattttttatttaatgatgtgcaaatatcgaatatttaggtaatatt

SEQ ID NO: 53495 - DNA, 533 bp, Homo Sapiens
gggcatctgggacgtggtgccagtgaggagcccagttggctggcactgggcccatttgaaggtgtctcagacatttggccagtatgtctttctcaggggtttggtcacaaaggatggactcttcccacccagaggatgcagggaaagcacactgtgtctttccggtcattggatcctctccctttccccaggcagctcgcctggccacaccgttggagtgaaccctcactgccctcaaggacaacagcagggtgtcacccagagcccgatgaggggtgccagcaggtgcccccacgagtggggccttggcccaagcagagcttcccctgaaggtgccatcagccaggcagctctgtcccctcctgctctccatcttatatgtattctaaccaggaaaaatgtgatagcacatgggtagcctaggcagtgagtaaatacctcagatgtcctcctgcagcaagtgtctatatgttgtggttattttctatcttacatgttctcgaatgtgtatattcaataaacctctacctctt

SEQ ID NO: 53496 - DNA, 650 bp, Homo Sapiens
  misc_feature (624)..(624): n is a, c, g, or t
  misc_feature (642)..(642): n is a, c, g, or t
agaaaatggacatcgttaccaagcaaacctagagatcactggccccaaggtggcatctcctgggccacaagggctactagactggaagaccaggaaagtgccatagacataatgtaactggatttcagcaaggcatttaacagagcctcttatgatatccttgtgaaccagatggagagatgtgggcttgaagccttcccattgcctacaggataaaattcaaacttcctagtgtggtgtacaagaccctttacagcccgcctctgtgtacccttcaacaccattctctgaaccaaccatgctcatgtttttacctcagtgcctttgcacatgctattccctctgcctggaatgccctgtgccccctctgccctctgccgtgctaaaatatcactcatccttaaacttcaaaatcaagtgccatctcttccttgttaccttcaggcagaattagttactctttcctctgtgcaattgttctatatcttcgctctagctcttttcctgttgtattgtaatgatttgtttatgtttaccttccttactagactgtgagctcaagagcaggccgtcttaattattcctttctgtacccctagtgtcttttatggttctcagcccctntatacaggtgctcaatanatattttt

SEQ ID NO: 53497 - DNA, 645 bp, Homo Sapiens
ccgcttttcttgttatttttacaaaggccacctttatcctttttgatgccatattttcagtgttacacttttatggcttttaattttcgatttgacagatgtaagaagcagcatgaatagtttatactgtggtttttcagagactgaatgccaagagaactcggtaaatgtttattcttctcagctttctctttaaattcccctaaatagcgccccatttgggaacagagcaagagtgttgaactgaagaccaaaatgccctcaaggtgtaaaataatccgagggggaatatttgctgggcgtcaggaaagactcagatgaaatttcaaccctgatggttttcggtgatccaggaagtcagtgagacaatctctctatatgcagagccctttcatgttaattagaatggtatggacaaaccaatgaaaacaagagggaaagtgagaaagatcacccatgattctgtttcactgtttgctttctcctgtcatggttaagagaaatgtgcaattcgatcctcaatcagtgggtggaggataacagggtagattcacttgtgtgcacttgtacagttgtagctgcgagtccagaagtcctctagagcatgtgtactggcactgagttggtgagacagttgtggagtat

SEQ ID NO: 53498 - DNA, 645 bp, Homo Sapiens
cgccgtcgacccacgcgtccgtgcatttatattatcaatgccttgcaggaacgttgcattgataggcccattttatttttttattttttttttcgagacaggatctcactctgtagcacaggctggattgcagtgcaatcctgcaattctcaatcttgcactgcagcctcgacctcccaggctccagtgactcccccacctcagcctcctaagtagctgggagtacaggcgcgcaccaccacgcctagctgatttttgtatttttttgtagagacgggggtttggccatgttgccgaggctaactcctgggattacaggcatgagctgtgctggccgggttttttttttcttgatgtaaacgtgtacagctgttttattagttaaggtctaatttttactctaggtgccttttatgttcaaaactctttccactggactggtatttgctcaaaaataaataatggtagagaagaaaactataaaaatggacaaggctttcttctatcagtagcgtttaccctttgtcaccagtggctttggtatttccatgtctggcattgcataaacttctctggtgtgaaaggataaatatgcctttctaaagttgtatatcaaaattgtatcaatttttattttctatgatt

SEQ ID NO: 53499 - DNA, 500 bp, Homo Sapiens
cacttgaagttagcacgcgttcagagtcaaaatggcatagtactgtcatggagtgtcctggaggtggatcgaagctgtgccactgttgatagctaccatctctatgcttaccatgaggaacccagtgccactgtgccctcacaatggaaaaagattggggaagtcaaggcacttcccttgcccatggcatgtactctcacccagtttgtatctggtagcaaatactactttgcagtacgagccaaggatatttatggacgttttgggcctttctgtgatcctcagtcaacagatgtgatctcttctacccagagcaggttaaaccttggagcctttatattttcctcttttaaaatttccaccttttggtcttgtttttaatcttgtgcatgataccccatgtaaaatccaccttgtgcaagatttcttggacagatgtgtgtatacactacatttgtttataaccagaagcaaaataaactcagcccacaaagctaaaa

SEQ ID NO: 53500 - DNA, 797 bp, Homo Sapiens
tgatgtgctagaacaaagaatagtacagcaggttacaggaatacttaaagatgctggagtaaacaatttaacaattcaagtggaaaaggaggcatactttcaacatatgtctggcctaagtactggatttcatgatgttctggctatgacaaaacaaatggaatccatgaaatactgcaaagatggtacttacatcatgtgagataactcaagaattacccctggagaataaacaatgaagattaaatgactcagtatttgtaatattgccagaaggataaaaattacacattaactgtacagaaacagagttccctactactggatcaaggaatctttcttgaaggaaatttaaatacagaatgaaacattaatggtaaaagtggagtaattatttaaattatgtgtataaaaggaatcaaattttgagtaaacatgatgtattacatcatcttcaaaaatagatatgatggattctagtgaagaccaaaattacttctgtttactttctatcaggaagcatctccattgtaaatatgtatttacatgtttattacaaagacccaaatgaaaaatttttagtccattttttgcatagcctaaagataaaataggaataaaaagttctatatttatggattttctgtatataaaactggtttctaattataacttaagtccattaagtaaaatctgtattgcactttaaatgtaactaaattatttggggagaaatttcaacactgatatgagataagcatgagatagggaagtgtataacattcacggttttggag

SEQ ID NO: 53501 - DNA, 763 bp, Homo Sapiens
  misc_feature (630)..(630): n is a, c, g, or t
tactgcatatgtgatcatacttgccttgcacatacatgacttccaaattgacctgacagtgttacagagggacttgaagctcagtgagaaaaggatgatggagatagccaaagccatgaggctgaagatctccaaaagaagggtgtctgtggccgccggcagtgaagaagatcacaaactgggcaccctgtccctcccgctgcctccagcccagacctcagaccgcctggcaaagcggaggaagattacctagacgcatgctttccagacagggcgttttggctgcatcacagccactggctggtcctattcatttccatttttatgtatgttttgaaaagaaaaggtccggggatggtggctcacacctgaaatcccagcactttgggaggccgaggcaggaagatcattgagctcaggagtttgaaaccagtctggacaacatagggagaccccatctctaccggaggaaaaaaaaaagagtcaggcctggtggtgtgcgcctgtaatcccagctactcgggaggctgaggcaggacgattacttgagcttgggaaatcaaggttgcagtgagctatgattgtgtggccacactccatcctgggtcacagagtgagaccttgtctcanaaaagtaacataaggaaaaaagaagccttgctttagcacaggtatgaagccagaagccagcatctcaactgtgcttgtcttatgcagaaatataaagcgatggccaggttgggacttcaaaaaaaaaaaaaag

SEQ ID NO: 53502 - DNA, 731 bp, Homo Sapiens
cccacgcgtccgggacttccaaggctcccaaagactccctaaaccatgcagctcattgtcacaccaattcctgctttaattaatggatctgagcaaatcttcctctagcttcaggagggtggggagggagtgattgctgtcatggggccagacttccaggctgatttgccaaatgccaaaatgaaacctagcaaagaacttacggcaacaaacgaggacattaaaagagcgagcacctcagtgtctctggggacatggttaaggagcttccactcagcccaccatagtgagtgggccgccataagccatcactggaactccaaccccagaggtccaggagtgatctctgagtgactcaacaaagacaggacacatggggtacaaagacaaggcttgactgcttcaaagcttccctggacctgaagccagacagggcagaggcgtccgctgacaaatcactcccatgatgagaccctggaggactccaaatcctcgctgtgaacaggactggacggttgcgcacaaacaaacgctgccaccctccacttcccaacccagaacttggaaagacattagcacaacttacgcattggggaactgtgtgtatcttctagcacttgtgtattggaaaacctgtatggcagtgattattcatatattcctgtccaaagccacactgaaaacagaggcagagacctgtcacaaaacaaaaaaaacaaacaaaaaggggg

SEQ ID NO: 53503 - DNA, 947 bp, Homo Sapiens
  misc_feature (586)..(592): n is a, c, g, or t
  misc_feature (597)..(598): n is a, c, g, or t
  misc_feature (600)..(602): n is a, c, g, or t
agattccatggtttcatgaccgcttctgtcaacaatataataaaggtattggtggcatggatggaacacaacagcagatttttaaaatgttagcagaggtactaggaggaatcaattgtgtaaaagcctcggttcttacgccttattaccacaaagtagattttgagtgtatcttggataaaagaaaaaaacctcttccgtatggaagccataatatagcattgggacaactaccagaaatgccctgggaatcaaatatcgaaatagttggatcaaggctgccaccaggggctgaaaggattgctttggaatttttggattcaaaagcactttgtagaaatatccctcacatgaaaggaaaatctgctatgaaaaaacgacatttggaaattctggggtatcgtgtaattcagatttcccagtttgaatggaactctatggcactgtcaacaaaggatgctcggatggactacctgagagaatgtatatttggagaagtcaagtcatgtttgtagtttttatttaaaatgaatgttatcgtgtgttacatttggacctattttaataaagtggcctgtctcaattnnnnnnnaaacnnannnaaaaccacaaaaaaaacaaaaaaaaaaacaaaaaacaacccccaccccccacacaaaaacccaaaaacaaaaacacaccccacaaaacacgccgccaaactaaaaaaaacaaccccggggggggggcgcgctctaaaaagaaaaccccccgagaggggcggcacaaatttttacccccccaccaccaatttttcttttttaaaaaaaaggggggcgccccttaagagaggggggcctcttataataaaaaaacctggggcggcggtggcggcgccgctgttatttttttacacgccctctctctcttgtgtgggtgaaaaacaagacatctcttctcttttttgt

SEQ ID NO: 53504 - DNA, 726 bp, Homo Sapiens
atagataaaagtgtgattaatcaaatgatatgatcagagtaaagaatttgccatttgatccttttacttgttttagccacctatagtgttaccaaccatctttatccttgtctgcagggataataatgaactaatgtagtgttttaagataatttaatgatactatctttccaaacttgttagattttaaatgtattattgacctgagaccttaatgacaaatcactgctatggacaatgaagtgttcatttacttgtaattccaataatcatagttatggaattatggtaaggtttgcttttctgtcctaataaatgtgtgtattttttgagatggagtttgctcttgtgctgaggcaggagagttgctcgggcccgggaggcagaggttgcagtgacccgggatcgtgccacttcactccagcctgggcaagggagcaggacgccatctcagaaaatatacatatataaggagataaagtttcccattttccaatacagtttcacatttgaacagccctaattgatacaactttatggcagggttttagtgtgtgagtgggatccaaaacactcaatcctgtaaaagggtacagtcctattgtattgttaacacactgatgatgtgagcctgtgagatgagccaatcaccagttgttatgttcgaatctgctttgtgtgggacgctttaatgtcagggttcactaataaatgattttcatatac

SEQ ID NO: 53505 - DNA, 835 bp, Homo Sapiens
  misc_feature (719)..(719): n is a, c, g, or t
  misc_feature (811)..(811): n is a, c, g, or t
gagaaggatatgaattcaaagcctgaattcttagaaactgtctttttactggagaccatgctgggggggccccagtacgtcaagcaccatatgattttgcctcatacccgatcttctgacttagaggtccagcttgatgttaacctgaagccattaccatttaatagagaagccacgccggctgaaaatgtagccaaattaaggcttgagcatgtgggagtcagccttacagatgatttgatgaataagttactaaaagggaaagcaagaggacatttccagggcaaaactgagtcagagcctgggcagcagcccatggagttggagaataaggcagctgtacctctggggggcttcctttgcaatgtagcagataaatcaggggccatggagatggctggcctgtgccccgcagcctgcatgcagaccccaagaatgaagctggctgttcagttcacaaacaggaaccagtattgctatggctccagggatctccttggactgcacaatatgaagaggcggcagctggctcggcttggctaccgtgtggtagagttatcctactgggaatggctcccactactgaaacgaactcgcttagaaaagttggcgtttcttcatgagaaagtattcacctctgctctctgaagggcatttaggggcatttctatggcaaagctataggtgtatactgtaccaggtgttgcaaaatgattatnaaagccagaatgtaagtttggcgataaaatagtgtgttgaggagaccttattgtatccaaggcaggtttagagctagtgtatgttactgtgnaattggaaatggtagttggaattg

SEQ ID NO: 53506 - DNA, 465 bp, Homo Sapiens
  misc_feature (455)..(455): n is a, c, g, or t
tttttttttttttccttttgttgaaagcactgcagttgttacaggaagtaaagtaggaactgttgtgtgagcgagacatgagcctgtaggttcagtaggtagagaccaagcatttatctgatagaagcacatggagtgcaataggacattgtgagaaggaatttttcagggattcatctactagtttaaaaaccccactctggccctcttgtcctttcagaaaacatgcaaataccaagatccatacaaaacaataatttattccactgatcaaccaagactggttctggttggacagctaatctgatttggggattcactgtttcagaggacacagacaaaagctgttgcatcaaaactggactttaggagtaatttctattgaactcctgtcaatatgtttatttcctctgtctacagcagatgggagtcttctcttttagacaggggctttntgtttttaac

SEQ ID NO: 53507 - DNA, 570 bp, Homo Sapiens
aaattagtctttgctgagtaaaaggggaaatttctaaacctagtgcactgtttggccagtgtccacagcctcttttctggctgtgttttagagaaagggatttgagctataggctcgcctcctgttctcattctcacaaagctgccttgactgtggcctgcaaccacgagtgccatgctttcaggtcttctgtggcctactggccttcaagacagaggcctgccccagtgtgccacagatccatgtggatggagcctccttcagaggggtcacaggtctttgagactcagcctgggctttaatgtgtaggaaaagccttctggccacccagagagccggagccctgcttgctgtattctctgctcccttcttcctgctgggttttagccataatagggcccggtacgatttgggagtgacatttctgtaaagaagaggaaaaatcatttttctataatttgtaaagttgtgaaagagccactaccacagtttttacattgattattggaacatttcagaataaataaagatattttcttaatgaaaaaaaaaaaaaaaaaaaaaacgcgg

SEQ ID NO: 53508 - DNA, 725 bp, Homo Sapiens
  misc_feature (658)..(658): n is a, c, g, or t
gtactttcatactgaaaacaaatcaaatcatttttactgtgtaaattgtattcttaacatttgtattttgtaggattgatcttattttgagacaagggttgtaaaatgtatttgctctcagaattcatccccttcttagtattaggtcattcttcatctgtgtaatttttattaactttgagattcttatacagaaaatagttgcaagggtaaggtaattaactttagatcccttcatttctaaagcaattattgagtgcttaaaatttaaggttgttttagagtggagtttgtgagtaaaagaggagcccagggagacagattgcaagtagtaggttgcaatcttttagattcagcttgtaataatctttgagccacaccaaaaggaatgccaagggctctctaaatttagccagtaggaagctactgctctcctggcaaggattaattggcacattctgttaagatatccctcatgacagttgccctttcaaagcaggaggaagaaaaggaagaaagaaaaactgtttcatcatttctgttagggtaggaaatgaatcatagggtacaatggatgaagtagatagaagtctctcatttaacaagtgtcttttgcaatcttgatgtaatgcacttttataaggacttgagatctcanataaattctgtaagatttctaaaaaaaaaaaaaaattgttgcccctgtgccaaaaattttaaccctt

SEQ ID NO: 53509 - DNA, 468 bp, Homo Sapiens
ggcatagccttcctgtttctgtcaagtcttcccttggcctgggtcctcctggtgagtcatggagctatgaaggggaaggggtcgtatcacttgtctctcctacccccactgccccgagtgtcgggcagcgatgtacatatggcaggtggggtggacagggtgctgtgccccttcagagggagtgcagggcttggggtgggcctagtcctgctcctagggctgtgaatgttttcagggtggggggagggagatggagcctcctgtgtgttggggggaagggtgggtggggcctcccacttggccccggggttcagtggtattttatacttgccttcttcctgtacagggctgggaaaggctgtgtgaggggagagaagggagagggtgggcctgctgtggacaatggcatactctcttccagccctaggaggagggctcctaacagtgtaacttattgtgtccccgcgt

SEQ ID NO: 53510 - DNA, 681 bp, Homo Sapiens
gtgaagcgaagccactcttacctcttgctgctggccttgttagacagcacttgggcctttgccagcagcaagaggtgaagcgaagccactcttacctctcccttcccctcccacctgccccctgcgtaggcacccagacttggagagacccgtctgctgttaatacttccatcctcttccttcccaaagagcagatcccaaggcatttactccttggtctgtctcgctttatctgtcgcccctcccagcgctgagagcctcccctggctgtcagcagcactgtgtccaggctcttgtctgaacaccgcagcccctccttcgctccttccagagctcagcatgtcacggcaaggactgccgcattggtgatggagggccagctgaggggaagttgctggtgagtttccttttctccatttctagcatatggacacctggcctctgcttgagcacttaggtgacaggaacttccgcacctcctgaggccctggatgattctaattgttagaaattctaattgttagaaatccttccttataatgaatgaattctgctttcctataatttctacctattgggccttgttctgttctctggaactaaacagaacaaccatttacccctccttttcaaactagagaatacagatctggttttagaaaaaaaaaacgaacacaccca

SEQ ID NO: 53511 - DNA, 657 bp, Homo Sapiens
  misc_feature (540)..(540): n is a, c, g, or t
gcagcttgcccagggccacacagctagcgagaagtggagccaggatctggtcccatccactgcaatccaaagtctgtgctatgagccgccgtcctgtcgtgtcctgtctgccttgtttgaaagtaggcgtccccttcacgggccaattgaccgtgcaactctttgggtgaggcatgggggaataaacagaataaaaggaatgcaaaggcaaaaagaaactttcacaagaaataaccattaataagagccaccgtgcccggcccaggacttttaaaacaagcatcccaggggattccggtgcctaccagaagtcgcaagctgcttggctctggagggcgcctaggagtcggtgtcgcctaagatgggataatggcttcaggcaactcctagccttccccatatctcctgcctcagcccccctggcccagtgctggggcgtcagctaaacctgagcttccaagaagtcaggttgccaaaggaaggagccttctgagaccctccccaacccacccaggttcccaaggccctgccgtaccctgnggaatcaaccaaggagttcttgttctcgaagaaccccaggcctcatgatggtctacggtagaggtccaacaactacagcctgtgggccacatctggccacagcctgatttgtaaata

SEQ ID NO: 53512 - DNA, 680 bp, Homo Sapiens
ctcccacccaccttccagacccccttggttggcaccctctcctccggttccctctcaccccatggctgtgaatgacaggacaggtcacacgtgtgttttccattgggtttaatttaatggacgtgcagtttcatttgtaaattgtgcattagccacctccttcagtggcaggatgtgagtggctacctggctcaactggaggggaccccttgggccctctggggcttcccctcccccacctggttggggtagagcaaaaggatggtcactcttccgaggtctccctgaaatgaatgtatttctcccccaaaagagctgatatttaatgttttaataaggatttttgagaaacaaataaccttatttataatctgggtgatccaatcattttttactcccttttgatgccatacatagaggaaagtctagcttttttggcgtgagacttttgcaatgtgcagtgggataaaatgcatttccttttctggttcgtttttcttgttaacacgcgcacacagacacacacacacaccgttccactcaccacctggacaggcgtcccccagcacggacacactggcacacaggtgcccacatctcttcctctcagcccctccacctgcctaatgttatgcaacctccttctgatgtatccaccaaaccagtactgaatgtggccg

SEQ ID NO: 53513 - DNA, 742 bp, Homo Sapiens
  misc_feature (663)..(663): n is a, c, g, or t
ggactaatacagacgtacagatactttctctgaagagtattttcgaagaggagcaactgaacactggaggaaaagaaaatgacactttctgctttacagaaaaggaaactcattcagactggtgatatcgtgatgtacctaaaagtcagaaaccacattttctcctcagaagtagggaccgctttcttacctgtttaaataaaccaaagtataccgtgtgaaccaaacaatctcttttcaaaacagggtgctcctcctggcttctggcttccataagaagaaatggagaaaaatatatatatatatatatatattgtgaaagatcaatccatctgccagaatctagtgggatggaagtttttgctacatgttatccaccccaggccaggtggaagtaactgaattattttttaaattaagcagttctactcgatcaccaagatgcttctgaaaattgcattttattaccatttcaaactattttttaaaaataaatacagttaacatagagtggtttcttcattcatgtgaaaattattagccagcaccagatgcatgagctaattatctctttgagtccttgcttctgtttgctcacagtaaactcattgtttaaaagcttcaagaacattcaagctgttggtgtgttaaaaaaatgcattngtatttgatttgtacttggtagttttatgaaaatttaattaaaaacacagggccatgaaatggaaaggtgggtaattgc

SEQ ID NO: 53514 - DNA, 779 bp, Homo Sapiens
  misc_feature (716)..(716): n is a, c, g, or t
  misc_feature (758)..(758): n is a, c, g, or t
atagtatgcctggaagatctgcagattgggacagttcttacaggcaaagttgagaatgccactctctttggaatttttgtggatataggagtggggaaatctgggctgattcccatacgaaatgtaacagaagcaaaactttcaaaaacaaagaagagaagaagccttggactgggccccggagaaagagtggaagtccaagtactcaacattgacatcccccgatctaggattactctggacctcattcgggtgttatgagtatcccacgaaggccagacgctgattttattttctcatttccacagattgacaaggataagtcagttgtttgtaaactctaggtagcagatgagaaataattcacttaatatcagaaatattttccaaacactttcctttattttttcttctgaataaatagaaaaccaacagtttgatttccttttcccttaaaggaaacaactaatacacattcttatatggctttatgtagtaatagttttctgactaaaattttgttttttattttttgtaatttatctttaactccttttgcattttgtataacagattgcttaacttctacttgccaacatctgccttgctggacttgtatgggattgtcttcttgatttgaattgtaccgtctttgttgacacagtagggctgggcagtgtttaatccttccattttatagatttttttttaatcangccttttggacttcattcataattttgcaataatctcttttnccttgtcatgcaagccaaaat

SEQ ID NO: 53515 - DNA, 711 bp, Homo Sapiens
cctcgtgccgaattcggcacgagggggatggacacttggccggggaatgtccagggagctctgaagctggcagccttaaagatgcaagtgcatgaaggacagtgatgtggggaggccgtggggcagctcttttcatggcttgtacacgcctcagctcctggcaattagctggactccatgacccacccctggtgcagcatagatccgacgtctgtctgggcgaagggtaggggtgggtaggggcgggaagcctgagtgcaaatgtcatttccctctactgcctcttcctgcctctccccaccctgcccacatccacagaggggagagaagggtcatagctaaatgcaacaaagtctgtatcttgtcccaacctgcttttctgttctgttagcatatcataaagtaagcctttctggtgaaggaaggttgctatgaaactttttttcttggtggaaatggacaagtttaggcactctgctttttgccttacactaatgcttagaaagctgtcttttcagtggtgttgcagcccccagatgtgtggccaacctctgctgcaaaggaatctcttgctgagtccaggccaccaatcaggcaaatagcccatacatttgatcgttgtaaaccatgaagtcttttcttgcaagaggtttttcttctgctgtggtatcttgcccttaaaaattagttttcattaaaaagaaatttgat

SEQ ID NO: 53516 - DNA, 727 bp, Homo Sapiens
  misc_feature (694)..(694): n is a, c, g, or t
taatactatatgtggaagacatcccattggggtgttattaaatgctatcacagagctccagaagaatggaatgaatatgagtttttcgtttttgaattatgcccagtcgagccagtgtagaaactggcaagacagttcagtgagttatgcagctggagcactcacggtccactgaagctctgaatcctcagggatgccacctgcacattctcatactctgtccggggtcccagcctagcctttaccacgatactggtcctggtttggggggattctgaaacctcaaactaatagaactttcttctctttttttctagtaggtgtagtccttccttaatttcaactcattaaaaaatgctttatagtttagggcagtggaaggaaggctggcatcaaaatattttgatcaaaaaagatgacaatgtaaaggctcagttgtggcagacagttttttgaaagtaacttgtaaagcatttaccatatcctaaatttgcactctttgcagacttgtgcacatatattccgctttcagaatagttttgcaaattgtacacaaacaaacaaaaaggtggaagctttttaataaagaaattgcatttataaatgatctgtattagaatataataaatctccagttatagtcaattactacccatgttgtacaacagataccttctattttagttgctaatanagggctacacaactcaaaaaaaaaaaaaaaaaa

SEQ ID NO: 53517 - DNA, 665 bp, Homo Sapiens
gcacggagcctggccgcggacccctcccacccctgccttgccggcccctgcacatttaggatatgctcctggatggggactgggctgtgcccagggcctctgtcccccaggatgtcttgtggtggcggtcggccgttctgccccccagggcaccccctgttgtaggcactggctagggaggggcaggcctccttcctgcccctcgagacactcttgggagatgcattttccgtctggctcacagggggagggtgaggctttgcaccccagcccctgcccaggccactgtgagggtgggtgctggctgagcccccggggcagcaggagccaggcaggtgatgtctttgttctcggctcccacagcagagccaggtgagggggcgcctgccagggccagacccaggtggggcagcctgaaccctgcttccccctgtggccggcatgccccgatctttcacacactggtgaccctgagagaggagggaggagggaacctggcgggggtgtctgaggccgcactgtcagctggccggtccaagcctggtggctgggagctggggtctgtttaccttaattaaactcccacaggtgccttcaaacaacaaacaaaccaacaaaaaacaaaacacaacccacaagacactcaatcaggttcgcagacaaag

SEQ ID NO: 53518 - DNA, 778 bp, Homo Sapiens
  misc_feature (559)..(559): n is a, c, g, or t
cagcttattttttttttttcagtagagacagggtctcaccatgttagccaggatggtcttgatctgacctcgtgatccgccgacctcggcctcccaaagtgctggaattacaggcgtgacacctgcgcctggccaagaatggacattttttaaaaaaacatcagtacttcctaccactgctgcatgagtataatgctccggaattatcagaaagcataatgcagaaatacgaattagtggaacttaatcatgtgccatataagcttacctaacaaacagttatatccctattcctcaactgaatgtctttcaataaataagaatttatcatttattttctgcaacttttttatgtctcattctttaaacattaaaaacccttaatattttaacaaaaatttcttgattagaggcacagtgaaaaagaagtcaaaaaaaaaagttctacttttcatcagtgctattaaaggtggcagcaaatgtaaatcttggctgaatggtcttaattactcattaaaccacagtcagaaagacatataggtgctatttgggaaacttnttattaccgtaggatgggttctctaattgctatcacacccactggtcatgtttgcatttataatgaaataaacagaagtgcacagtatgtacagaaggaggatggtatggtcgcaagcgttgcttatgattatccgtctcatcaactactatatttgggagtatgtccagacatcaagctttcgcgctttacatcttaactactggcttgaaccgagtg

SEQ ID NO: 53519 - DNA, 785 bp, Homo Sapiens
  misc_feature (625)..(625): n is a, c, g, or t
ctggatttgtaggtgaaaatgcctcagccaatcctagaaaataatattggaaaccgagtgtttcagaatattggctggacgcctgggtcaggccttggacgagatggcaaggggatctctgagccaattcaagccatgcagaggccaaagggattaggacttggatttcctctaccaaaaagtacttccgcaactactacccccaatgcaggaaaatccgcctaagaaaagcgaagaagaaatgttttacagactttattcactatgtcccattgttctaaaatgataacatgacttctgtttttgaagcaagaatctacattgcctcaaacacatcactctagcttccttactgcatacagtcctgccatagtgagagaaatgggatttcatcacaattcatggtgctaaaatgaaaacctctgcactttaatttttttcagtaatttccagctatttctaggtataaagagcagctcgtttctcttatttattttagtctcatgtgtcaatactttccgatgctttgcttaattcatgtatgtgtgcagtgctgcaatgcccagacaaacgtgagcacacccaccagtttctaaaatggaatagacaggaaaagattgtgttntatatcatccctatctattgtaacccaaaagacctaccatcgcattagtgaagaccgaacacatctttgtttgaaaggcttgtcaatttcatattccttggattggcttcttggtgaggaatttctgacagagtgatacccatcaattttctatccttaa

SEQ ID NO: 53520 - DNA, 554 bp, Homo Sapiens
gcgcagtgtgcttggattccagccagccatttattagtctaatattccttcactaaattccaactctatgtctggacctgtgttaggcacttcagataccacacgagtaagacaagggccctgcaggggtggtcctttggtggaaagctggtcttaagggttgggcttgggaataggcagggtcagattccagggcatggctctggactcagctggtttatacctatatgaccattacagttgtctacagatcacatccattctggctggtcaacatgcatgctgtactggctgttaaataaaaatattctgaatgtcactccttttgagggacagcacagccttccctaggcattctcctatattccccagccaaattgtagagtcagatgcacccacatttgcctgtgtccttgatttagcaggaaggaaaggaatagtcggggttgatggatgcccacttctcttctctttctcttggtcaactcaggagccttttagtctgagggaatggagaggcaaagaaagaagggagagtaatagaattgggaggg

SEQ ID NO: 53521 - DNA, 789 bp, Homo Sapiens
  misc_feature (1)..(1): n is a, c, g, or t
nctagaatgggatgtaatgaccgaatttccccaagaaagaagctccatcagtctggtcagcctggctggatctctgtatgcaattggtggttttgctatgattcaactggagtctaaagaatttgcacccactgaagtcaatgacatatggaagtatgaagatgataaaaaagaatgggctgggatgttgaaggaaatacgttatgcttcaggagctagttgcctagcaacacgtttaaatctcttcaaactgtctaaactgtgaacaaggtgacaaaacataatagattgggaggtggtttgtttggtgaatggggctttaatttattctgttttttaaaagcttgtacagacactcatgtagaaattattcaagaagttattgtctaagagatgagcagtaggtaagaaaacctcagtcattgactcttcaatgtaatgatcagagtttaaaaccattttctaataataaattaaatcttcagttgaacaaattattttgtgaatctgtttcactcaatggattgtaaagaaggctcctaaatttgagttgtttgctaatcatttcatttgcatcattagggtatccttaaactgattttctattacaattggaagtggagaatatgtgcatctacactaaaaaaatggttaagatatcaaaaacctctcctcgtgcttcaaaatgacaggaatcctgtgcattatacttagaattacatgccataagatgactttaaaaatcctacttcaaaagtgtaataaatggatggggaaatcgttcgatgg

SEQ ID NO: 53522 - DNA, 615 bp, Homo Sapiens
atgttattttttaaatgacattttcttctttttcttttggactaaataaaagagttgagtgaagctgatatatgtaatataccagagccttaatttttgaaaactgaatttttctagttgtaaagaatgtgagaggcttcattagcaaattaattaaacagatgatcagaactatcacaattataacttaccaacaagaagggaatgcaggtagttgtttaggagatggtacattttttatataacattcacttccttgtgtatttgatagtcttttcatggtttataacattttctcctgtaaagataggctaatttctgaaataataattaamtttatagaaagccgagaggaaattgctagtttattcctggtagaggaatttctgtatttgaaaattctccagaaggaataatataaactgtggactttgggtgataatgatatgtaggttcgtcagttgttaacaaatgtatccctctgttgggggctattgataatggggaaggctgtgcatgtgtgggagtaggaggtgtatgggacatctctgtaccttctaatcaattttgctatgaacttaaaactgctctaaaaataaagtttattaaaaaaaa

SEQ ID NO: 53523 - DNA, 660 bp, Homo Sapiens
  misc_feature (612)..(612): n is a, c, g, or t
aggatctggggttgggagaggctgttggtctgagggcagtaatcacaggctgcaggctagagggggcagttatgactgcctgaaagtgggtgagggattgcacttcagaaaaacatctaaaaaacttagtctatgtttgaattccccacctccatcccatctatgggaagagccgttcagtgtttagagagtggggagatgggtccctgcacttggcctctccataagccttggagggtcagggctgataccaggggtcctggcaagccattgggcagagacagaccacaagagcagggcatttttttacgctgggcatacatatgcacacaagcatgcacagaggcatgtcccgtgcccagcctctccaccgtcactgtccgctgctggctggaggggatgcaggggtagtgtatgcagaccttccactgggcaaatgccatgtgtcaggagggaaaggcctaggaagcccccatggggaaggttctggatttattccctcctctaaatgctataaatacgttagcacttgagtcgactggaggctgccaggaattcaggatgcatacagctgtaatttaacccagagcagctccacgtgagagcattaanagatgtatgaagatgtttaaaaaaaaaaaaaaaaaaaaaaaggacgcg

SEQ ID NO: 53524 - DNA, 685 bp, Homo Sapiens
aaaaccttcatctgattggtgagctgaagtctgtccttgcaccatgttatcatctgtttctcgtgtccgcctggttgaggaggacccacgagtgctgccgaggtgtggagggctggtattgagttgtggacatcactgttgaccctacctcacgtgccgagactctcatgtcacaggcgtgccttgctgcccccctgcagcactgtgcaggacgtggaccagctggagctgctgcccagcacagaggagagtcgccgcagatgacctagctgcggtgtgagagagcatggcccagacaagcagctgggttggcttctgagaacaggacttaccctgggcttcaggaacatctgatggctgaggttagtgtgcttggaggctgcaggacgaactgtcgatgtttcttagcagagatggtcacagagggcagcagggacaggactggaagggacctgcagcctgcagaccccgcctggcccccgctggcttctggctggtccagtgatgggcaagtgacagaccttccccaggctctgcttccagaactctaatgggaaactgggcctgtctacctttagaagtcttcgattctcagagagatttgtctaatacaataaaaactggcattaatacaaacctcaaaaacgtgagcgtatcttccaggcttcatggattcttgacatgt

SEQ ID NO: 53525 - DNA, 922 bp, Homo Sapiens
catttacggagcatgcgtggtcttcacccttggcatgttctccgccggcctctcggacctcaggcacatgcgaatgacccggagtgtggacaacgtccagttcctgccctttctcaccacggaagtcaagctaaggtgattcaaactaaatcaacccaatgtctctcctacccactcaccattgctacccttctcacctctgcctcctggtgcctctatgggtttcgactcagagatccctatatcatggtgtccaactttccaggaatcgtcaccagctttatccgcttctggcttttctggaagtacccccaggagcaagacaggaactactggctcctgcaaacctgaggctgctcatctgaccactgggcaccttagtgccaacctgaaccaaagagacctccttgtttcagctgggcctgctgtccagcttcccaggtgcagtgggttgtgggaacaagagatgactttgaggataaaaggaccaaagaaaaagctttacttagatgattgattggggcctaggagatgaaatcactttttattttttagagatttttttttttaattttggaggttggggtgcaatctttagaatatgccttaaaaggccgggcgcggtggctcacgcctgtaatcccagcactttgggaggccaaggtgggcggatcgcctgaggtcaggagttcaagaccaacctgactaacatggtgaaaccccatctctactaaaaatacaaaattagccaggcatgatggcacatgcctgtaatcccagatacttgggaggctgaggcaggagaattgcttgaacccaggaggtggaggttgcagtgagctgagatcgtgccattgtgatatgaatatgccttatatgctgatatgaatatgccttaaaataaagtgttccccacccctga

SEQ ID NO: 53526 - DNA, 617 bp, Homo Sapiens
atttttatcctgtagttctatgattatatgatttgtaaataagaagcctaaccaatttaaaattcctgactttagtctcatatatcttgtcagactgtctcggttcaaattccaaacctaccatcttcagttgtgcgaccttgggcatgctacctaatctctttgtgcctcaatttcctccttttaaaatggggatgatgatgataacaataatacctacctcacaaggttgttgtgagcatcaaatgagataacacaagtaaaatgcatagaacagttccaagcacagagtaattcaataaatattaactagtaatagtagtggtagtaactcgtgaatctttttaataacataataggctttgattttattatctctttaagttgttaacttttttcccttgctataagttttatgtcaagtaaggtagtttgtttaagttagttacccatgtccccaatcaagggaacctaaatgaagatatatcattaaataattaacctttttttattgtgtcaagcaatactaatttgtgtcataaaatttgttttgcatcattcaacaatttatgcccagaaataaacaatattctacaacaggcaaaaaaaaaaaaaaa

SEQ ID NO: 53527 - DNA, 774 bp, Homo Sapiens
  misc_feature (671)..(671): n is a, c, g, or t
  misc_feature (746)..(746): n is a, c, g, or t
gtcagcattcgatataaactcaagggcccaaatcatgcagtatccacagcctgtaccacaggagctcatgctgtgggagactcatttagatttatagcccatggtgatgctgatgtgatggtggctggaggtacagattcttgtatagccctttatctcttgctgggttttccagagcccgggctctgagcacaaactcagatcccaagttggcatgtcgaccatttcatccaaagagagatggttttgtaatgggagaaggtgcagctgtgctggtgctggaagaatatgaacatgctgttcaaagaagagcccggatctatgcagaagttttgggctatggactctcaggtgatgctggtcacataactgcccctgatcctgaaggagaaggtgccttaaggtgtatggctgctgctttaaaagatgcaggtgtgcagcctgaggagatatcctatatcaatgcacatgctacttccacaccattgggagatgctgctgaaaacaaagctatcaaacatctcttcaaagaccatgcatatgcccttgcagtttcctcaactaagggagcaacaggacatctgctgggagctgcaggggcagtcgaggcagcttttaccacattagcttgttattatcaaaaactaccacctactttaaacctggattgntcggaaccagaatttgatctcaactatgttccactaaaggcacaggaatggaaaactgagaaaagatttattggnctcaccaattcctttgggttttggtggt

SEQ ID NO: 53528 - DNA, 737 bp, Homo Sapiens
  misc_feature (688)..(688): n is a, c, g, or t
actaaataataaacacttgtgtgctgggattacaggcgtgagccaccaaccttggacataaaatgggttaaaaaaaaaaaaaaaaaaagacttaagtaatttaaagtttttatcatccctcccactttcaaaatagaaaatcatggggaaaaggaaataagtaaatgtcttttattggctatctaatttgaatgtttttttctggtgtgtgtgtgtgtgggtgtgtgtgtggtgtatacagtggaacatgatctggatcagattgactacatagacagctgcaccgcagaggaagaggaggccgaggtgagacagcccaagggaccagacccagacagccttagttcacagtttatggcgtatattgaacagcggcgaatctctcatgaggtagtacacagattgaagcctaaatatgttgctatcccttcataaaaataattcataatagtataaagttttgttatatcagtgatttgttgactgaagcctaattgttttcattatgttcacttctgatttcagtcctgagtttttcagatttattcagaaaactcagacagcagcctcaagtaggctttaggtttatttttcaaacaagaagaaagatttcagaattttgcaggaggaataaaagaagtctaggtactgttaaggccttggaagaaagtacaaagaaaaatacagngatgcttttcattggtggttttattgcttttttattggtactaactgat

SEQ ID NO: 53529 - DNA, 486 bp, Homo Sapiens
aacacccacttcaactctcttcacatcgtcaacacttacggggccttcggaagcatcaccaaggagcgggcggaggtgatcctgcagggcacagccagctccaacgccagcacccccgatgccatgtgggaggactacgagttcaagtgcaagccaggtgaccccagcagacggccctgcctcatctccccgtaccactaccgcctggactggctgatgtggttcgcggccttccagacctacgagcacaacgactggatcatccacctggctggcaagctcctggccagcgacgccgaggccttgtccctgctggcacacaaccccttcgcgggcaggcccccgcccaggtgggtccgaggagagcactacaggtacaagttcagccgtcctgggggcaggcacgccgccgagggcaagtggtgggtgcggaagaggatcggagcctacttccctccgctcagcctggaggagctgaggccctac

SEQ ID NO: 53530 - DNA, 544 bp, Homo Sapiens
  misc_feature (534)..(534): n is a, c, g, or t
ttttttttttttttttttccccaagaggaagaattgcttttctcttaccagtatgatttgtaactctggaacactattcttacagaatgcctttctaacctgaaggatacccagatttctttctttatgtacaagatggaaaatcccctacccctcaaaaacaggttgagtttatgggccagaatattttgtataccagacattggtaagctctcatggtttacaggaaggctctggttccccctcacaggatgagcatgctcatttgggcgtgtgtggaggagctgtgaacttcacgctcttcaaccccagactttgactgtatagttttttgtttttttaactgttccatcaggaaaaaaatgtgtcagttgattttggggtgacttgtgtaaatggttcatggcaatgacgttgggttgattcctaggcctggctgagttgtgcctaagggtggctgaaatactaaaacacttatcttacagcaagtgaacaggggctacctgccacatcccctccacagatgcactttanaaagcactca

SEQ ID NO: 53531 - DNA, 693 bp, Homo Sapiens
cctcgtgccggctggactggcagcaaagtgaccgttggagtttaatgagaggaatatactcatcatcagtctatttagaagagatttcctcgatcatttcaaagatgcctaaagcagatttctatgttctggaaaaaacaggactttccattcagaactcatctctgtttccaatactgttacattttcatatcatggaagccatgctgtatgccttattaaataaaacttttgcccaggatgggcagcatcaggtgctgagcatgaatcgaaatgcagtggggaagcattttgaactgatgattggtgactcccggactagtggaaaagagctagtgaagcagtttctcttcgattctatactgaaggcggatcctcgggtgttcttcccatcagataaaatagttcactacagacagatgtttttatctactgaactacaaagagtagaagagctttatgattcattattacaagctattgccttctatgaattagcagtgtttgactctcagccttagaattctgaggttaacgtgctaaagtataattattagctctaacgtaacaccaactgttgtgaacatccatgttattggaaaagaacacattttcagtgtattttagatgtttaaattctgacttttggctattaaatggtttacacaataagccaagaccaaatcaataaac

SEQ ID NO: 53532 - DNA, 871 bp, Homo Sapiens
acttaaccaaggtgccattgaagaggctgagtgatgaacatgaacctgaacaaagaaagaaaattaagaggaggaatcaagccatttacgctgcagtggatgatgatgatgatgatgcagcttaagatgatttacttgttttgtttttgtgtttgttttgcttttttgagatggagtttcactcttgtcacctagactggagtgcaatggcgtgatctcggctcaccgcaacctccgcctcccaggttcaagcaattctcctgcctcagcctcccaagtaggtgggactacaggtgcccgccaccacacccggctaatttttgcatttttagtaatgacagggtttcaccatgttggccaggctggtctccaactcctgacctcaggcgatccacctgtcttggccttctaaagtgctgggattacaggcgtgagccactgtgcctggccgacaatttacttgtcttagtattatatgtagatatgtgattttttgagactgtatttttagagctgaatttttgactaaagacttaactttataataatgaagatacattagagaattttagttagatattgactttatctttaggcttttgtatgtttcagatgcaaacatattaaagtttcatatatctacttgactgggtatcttttttggaagacatacattattcacttccatttttacaataaacacttacttaacatctactctgtgccaagcactctgctataatatgggaccataaagatgagtacgacaaggatttggcctccaaggacttgttatcacctgtaaaccatttgcatgtttacaatatggcttatataatatttgttatataaatcaagtcttgaatactat

SEQ ID NO: 53533 - DNA, 667 bp, Homo Sapiens
ttttcctcttcagtctcccagtcatctggtttgtttgtttctttgttcgttctgagacggagtctcgctctgtcgccaggctggagtgcagtggcgcagtctcggctcgctgcaacctctgactccctggttcaaacgattctcctgcctcagcctcccgagtggctggcatcaccacgcccagctaatttttgtatttttagtagagacggggtttcaccatgttgcccaggatggtctcgatctcctcacctcgtgatccgcccgcctcggcctcccaaagtgctgggattacaggcatgagccaccgcgcccggccccaatcatctgtttttaaacaatcgtttttgagcagatagctattcattccagattttcgtgtacccattctgtttcaggagctcttctaggtaaagctgagatcacaggaacagcaggtgacaggcctagctatagttaggaatacacaagccgtaaaatcgagtccttacagccataccacaaggtacgtccatttggactacaagaagagcttcctttaaagttcctatttcagcataaagaggctgtccttttttttgaggaatagtttggaccttgtgcctcctgtgggaggctgaggactgcaagaggagagctagcagatatgcctgttcacccctctctg

SEQ ID NO: 53534 - DNA, 558 bp, Homo Sapiens
  misc_feature (483)..(483): n is a, c, g, or t
  misc_feature (541)..(541): n is a, c, g, or t
  misc_feature (555)..(555): n is a, c, g, or t
ggcagccccccagtcctggatggtggtaaagaatcctcaagatcaaacccacgcagtgctgagagcttggcctgattctagggctggggctggagaaactgctagagatgatgccgatagccagtgtgatccccctgccctgatggtcaagggcagagtgcagactggaaccctcccctccccaaagattcagacctgtggggctgagtgggctcatagtgtccccaagtcctgagaggctggtgtctggcttcagcctccagcttctcaggttctgatgcagtcagctgagttccctgcctattcttgcaagcactaggaggagggtggtgggttgctgggaacagcaccgagcgccctccccacccagattcacagagcacactccccggggggatactttaatccggaggccgtgacgcctggctccgccccgagacgagctgaatcaaaatacggatctaggcttgagcttggttgggnttgcttttttcttcttcttctttataaacaattctttgtaactttttgtattgacagnttcaaacttacagnaaa

SEQ ID NO: 53535 - DNA, 583 bp, Homo Sapiens
caataagaatggcacctgtgtgaccaatctgacatgctgcatggaacatggggaagaggatgtgatttatacctggaaggccctggggcaagcagccaatgagtcccataatgggtccatcctccccatctcctggagatggggagaaagtgatatgaccttcatctgcgttgccaggaaccctgtcagcagaaacttctcaagccccatccttgccaggaagctctgtgaaggtgctgctgatgacccagattcctccatggtcctcctgtgtctcctgttggtgcccctcctgctcagtctctttgtactggggctatttctttggtttctgaagagagagagacaagaagagtacattgaagagaagaagagagtggacatttgtcgggaaactcctaacatatgcccccattctggagagaacacagagtacgacacaatccctcacactaatagaacaatcctaaaggaagatccagcaaatacggtttactccactgtggaaataccgaaaaagatggaaaatccccactcactgctcacgatgccagacacaccaaggctatttgcctatgagaat

SEQ ID NO: 53536 - DNA, 766 bp, Homo Sapiens
ggaaaatcgcgagggacgggcggccccccgacagtccagctcctttcggctcttgcaggaagccctggaggctgaggagagaggtggcacgccagccttcttgcccagctcactgagcccccagtcctccctgcccgcctccagggccctggccacccctcccaagctccacacttgtgagaagtgcagtaccagcatcgcgaaccaggctgtgcgcatccaggagggccggtaccgccaccccggctgctacacctgtgccgactgtgggctgaacctgaagatgcgcgggcacttctgggtgggtgacgagctgtactgtgagaagcatgcccgccagcgctactccgcacctgccaccctcagctctcgggcctgagcccgccatgccctcagcctgcctcactgctgggccagggtcatgcctatataagttggcatggcagggacaatggtgggcagttgctcttacatgagctaagtttggagacctgaggcccctttgtcctcgctgggtgggccaaggtctgggacctgtcttggactgtgggagactcaccctcaccttgccaggcctctcccctgcaggactggcattgcactagtctgaggtggccactgcctttgatcaacctttgtgtgcgagggtctaagtagggtcgaacacagaagtgggaaggagaggggtgggccaggggctaatggtgtcactgtgtaaagtttttgacatactagctctataaatatatgaatatggacaaataaa

SEQ ID NO: 53537 - DNA, 648 bp, Homo Sapiens
  misc_feature (16)..(16): n is a, c, g, or t
  misc_feature (30)..(30): n is a, c, g, or t
  misc_feature (42)..(42): n is a, c, g, or t
ggcgccccattcaggnccctgccccacagnctgtaccccacnacccagccccctgagcagggcttggatcccacccgcagctccctgccccgctccagcccggagaacctggtggaccagatcctggagtccgtggactcggattctgaagggattttcattgactttggccggggccggggctctggcatgtccgacttggagggctctgggggccggcagagtgtcgtgtgaggcctcacagctggccttgagtttttactgacacgtccctgtgtgcgggggtgtccatgtggcgtgtgtgtgagtgagacttttttactgcgtcccgtcccgccagccctatcggcctcgtcactggccttggtcactttgtatttctgtcttggctggaaataccatcagccttccttgctcggcccaggtctgtttcaggcatctgagtcggcgtttacccaggggccgggccagagacgggggtcgcccgctcgctcccacgcttctcctgccccagccctctggtgcccacacctgcccacagagaatgtaaacccagtgggcttctgcccacgctggttcccaaagtgaccagactccagcacacctgtcctcttttgccccgtgtggccatgcgcacccgaagttggt

SEQ ID NO: 53538 - DNA, 796 bp, Homo Sapiens
attgctgcagagactctcttattatccccgctcaggtgttggtggcaatctggtggccattcagaccagccgaatctcaacctacctgcacatgtggagtgcacctggcgtcctgcccctccagatgaagaaattctggcccaacccgtgttctactttctgcacgtcagaaatcaattccatgtcagctcgagtcctgctcttgctggtggtcccaggccatctgattttcttctacatgatctacctgggggagggtcagtcagtcataaacagccagacctttgtggtgctctacctgctggcaggcctgatccaggtgacaatcctgctgtacctcgcagaagtgatggttcggctgacttggcaccaggccctggatcctgacaaccactgcatcccctaccttacagggctgggggacctgctcggttcaagctccgtgggccacactgctgctgtgccaaaaaggtgtacagcctccccaggatggggcctcatacaacccttcatgtggattaaacatttaaacgtgtacttggctggctttaaattccctttgtttggtgtcagcaaaaccctttatttaaatttcaataatcagaaaagtgtaaataaaacaggatgcggcgtttccctttaggagggtaattctgatcccgctcactgactcctgcctcggtgtcgggtgggggagcgttataacttattcaaggcggaatccgtttccccaaatcggggatcaccgcgaaagacacttgaccaaatgccataaaaggcctaaaccgcagaaggg

SEQ ID NO: 53539 - DNA, 656 bp, Homo Sapiens
cctgacctcatgatccacaagactgggtaatctgtaaagaaaagaggtttaattggctcatggctctgcaggctttacaggaagcatggtactggcatctgcttggtttctggggaggcctccggaagcttatagtcatgacagaaggtgaagggggagcaggcacatcacatgacaaaagcaggaacaagactcatagcaagaagtcacttatcaccaaggggatggcccaggccattcatgagggatccacctttgtgctccaaacacctcccaccaggccccacctacagtattggggattacatttcaacttgaggtttgggcgggaacaaatagtcaaattatattacccatctacatggttttctttttcttactatgggagtgtccatgaataaattcatgggcatcctcataactcttccatgaatggcaaggggtacttatggaaaacagttttccaaagatctgattgttttgaaatgtgttagattggacttgttcaaatgttcatatttttgttctatgctaaatgcatcgttaggggagtagtggtaaatattccagaatccatatgaaattcatgagtttatttatgtctaagacactgaaaactgtgtccaatatcgttcagtttcctgggtctttttctt

SEQ ID NO: 53540 - DNA, 536 bp, Homo Sapiens
  misc_feature (60)..(60): n is a, c, g, or t
tttttttttttttattttcaaattccctattccaaaaatagtgccgggtggcccaaaganacatctgaagggaaagaatgagaaagctcccagggaagcgggggatggggcgctgaggcagggttgttagaggactgtgtcatcctcaccaagctcattacatctgccagggcctgcctcaagaagcccagcccagccttttcctgggatgcagtgaaatcccatccatgaactcgatgggcccctcctgtgccggccgagaggcacacactgccttcacgacgtgactgctggacctggccgagcttgaggccacatgtgaagggtcctgctgtggtcatcttggtgactcggtcacagcagctactggccaagatcagacgtcgctgaggggctgttcaccaccatcctcgttctccagggtcaaggaagtgttttaacatgtcgtgttttcgacttgaccttgtggtatttttcttggcctagttgtgtgccatggatatttaaaaaaaaaaaaaaaaaatccgcctcgttcc

SEQ ID NO: 53541 - DNA, 622 bp, Homo Sapiens
aaatgcttggagtccatgtgtcaaggtgaggaagcagagcttcagctgcctgggcactctggacctcctgtcaggctcacactggcatccttcactcaaggccgagactcctgggagctggagactagcgagaaggaagccctggccagggaagaacgtgcaaggggcacagaactatttcgagctgggaaccctgaaggagctgcccgatgctatggacgggctcttcggctgctcctgactttacccccacctggccctccagaacgaactgtccttcatgccaatctggctgcctgtcagttgttgctagggcagcctcagttggcagcccagagctgtgaccgggtgttggagcgggagcctggccatttaaaggccttataccgaaggggggttgcccaggctgcccttgggaacctggaaaaagcaactgctgacctcaagaaggtgctggcgatagatcccaaaaaccgggcagcccaggaggaactggggaaggtggtcattcaggggaagaaccaggatgcagggctggctcagggtctgcgcaagatgtttggctgattaaaagttaaaccttaaaagagaaaaaaaaaaaaaaaaaaaatcgctaatcggg

SEQ ID NO: 53542 - DNA, 350 bp, Homo Sapiens
tactactactactaaatgcgcggccgctcgaccatctgtcatggtctccttccaccaaatcttcatctgggaatagcagcggtatccctccacccaagtatggccacctgtttgtcttcatatagaacaggggcttctggtctggtcatgtccctagagacttactagagactggctgaccatgaaaaaaaaaaaaataatctgagttattcagccagtcagctcccctttaaaaatctaaggtatctccaagcaacacatctccattctagttgtcttgaaccacgtgggcaactgtttcaggggttttctcttgcccaatccccacctaataaagttctgagagcatg

SEQ ID NO: 53543 - DNA, 685 bp, Homo Sapiens
cagagctccaggcatgtcccatccccatgcacatgtggtaacacacacctgtatcacacatgtgcttacatttccactcacatgcacctctgagcctcccttgctgtcttggacctgtctgttgggtttagtccgtggacatttcagagggagatccccctcccatttaactgtcctcacaggcccttgcctaggatggatgaccaacactgcactcaatgagccagcctctcttttgggggaatcaagcatttgcttcctctagactacagcagggaaagggaggagaaatctgatgtctcaactggcacatgaagcccattcttggaactatgcaaagggcagaggctgggagtttggacgcttagctcctacccctgtcctacctcaccggggcactttcagggtccagggcctctgaagtctctaggcctatatgggacaatcaattctgactgagctcccccattcccctcgggtgaggatgactgttatttttgtagctgagaacgtggaatcccacgggtttttactgcccttcacccaacctctcccacctccaccccacaatgaatgtatttattgtgagaatggctacacttctttaggaatgcccccacttacaaccaggtgggtggaacaggcatgtgacagagtggggagcctgggctcagctcctccccct

SEQ ID NO: 53544 - DNA, 893 bp, Homo Sapiens
catgtgttgacaaagctttagagaaagtttcctattctcttccatttcccctgcccaaagtgctgacataggcagtgatgaagaatctttaccaagattttcagggtgtacctatgaaattgctttaaatgcactgctggtgtaaataattagcaagcaaaagcgtttctgtgacttcaggtaccagcttaaagagcactagggatggggaacgaatgccaaatcagactccacctagagcaccaggaaacagcttgtaccctggtagggaaatggtgttgctgaaaggggaggctgagccagtgcgagactgaacttgtgcagccttagccaagacaaagcagtgtttttcagcagacggctgatgggacaggaattgaagaagagaattgactcgtatgaacaggacagggtgaaaatgctgggaattataatgggaaacaaaactatctatgttcatattttgtaatatttcatttgttaagtttatatctggatataatgttctttttaaacaagtataatcatatcgtcggaggttaagattatgaaattttagaatctctattcaagatgatgttcactccaaatacactacagaatttagtcaacattttatataatgtttcaataaatgtttctttcaataaagatactatgtgcccttcatagtaataaaatctcaatcttaaagcatgaatctaaaacataaatatttatattacagactcaattttacaaaaattactaattgtctctagtgcatatttgaactacaagtcaacttttagggaatacctctttatacgtctacatatttagtcatatacaatagataaggctctggaccacattcgtatattcatgatccgatagtaggtaggtcaaagatc

SEQ ID NO: 53545 - DNA, 374 bp, Homo Sapiens
cgaggctggtttaaaccacagcacatcctcttagaatcaaacacattaaagaccaagatgaaacatttacccacaaaatgtaaacccaacctttataccacaaaggcaatcagatcccatcctcctccttcatacccacctctgttgaagaacatgtaacgtactactgccatcttagtaaaaattttgaaaggatgaccactcagaacaactctcttgatgaccattctgtctggatctactgacataagatggcctgtagcaatgaggctgtgcattcctaaaggacaaaagcaaagaagctatttaggaatttacaggccaaagtcttcatttattgcccagtccatttaaagacccatgcaagagcctgg

SEQ ID NO: 53546 - DNA, 597 bp, Homo Sapiens
aagaccagtttctttcgttgctcgctactttgatgaactctttctgagagactgcagcacacctagagggccctttcctgcttctctgaaagcacaggtcacccagcctcagaatcacacctcccggctgctgctgagagcaccactgaacttagacctctcaacacagtatgccaagtggattccagcctcatggcctagcaaaagaacagactccctttttcaaacatggaagcaatgaagtggagacacatgcaggacctaactcgttttttccttgttttattacctgttgcagaagcggttatctttcttttttactttgcacatcagtgttagcctttccctatttcagcacaatcttagactcatatttgcacacttttgtgtcgtgaagttctagacaaatttgtacatgtggcaatgttaaaagagcatttacagcagaggttaatatactaaaattaaagggtatttggtctggttcatatggtcaaatattactgccttggtagcatttatttaagggctttttcttaaataagaatcattaaagtcattaaaaaaatttactgaaatgccaaaaaaaaaaaaaaa

SEQ ID NO: 53547 - DNA, 944 bp, Homo Sapiens
tgaccggaccgaaggagtagaaaacttactctggctcctcccaggtggcggaggagagcccggggctgctgaaccctgagcccaggagactgagcccagagttgaggctactgccctatatgatcactctgggcgacgccgtgcacaacttcgccgacgggctggccgtgggcgccgccttcgcgtcctcctggaagaccgggctggccacctcgctggccgtgttctgccacgagttgccacacgagctgggggacttcgccgccttgctgcacgcggggctgtccgtgcgccaagcactgctgctgaacctggcctccgcgctcacggccttcgctggtctctacgtggcactcgcggttggagtcagcgaggagagcgaggcctggatcctggcagtggccaccggcctgttcctctacgtagcactctgcgacatgctcccggcgatgttgaaagtacgggacccgcggccctggctcctcttcctgctgcacaacgtgggcctgctgggcggctggaccgtcctgctgctgctgtccctgtacgaggatgacatcaccttctgataccctgccctagtcccccacctttgacttaagatcccacacctcacaaacctacagcccagaaaccagaagcccctatagaggccccagtcccaactccagtaaagacactctttgtccttggaaaaaaaaaaaaaaaaaaacccagcttttcttgtacaaaggttggcatttaaaagaaaagctttggccttatccaatttggttgcacccgaaaacagggcaccctctccgtcccaaaatataaaattccattttttttgtgcttatcccactcatttgatatccaccatggcgactcggggccccttcattaaaaccctctccgaagggttgtcacatctattcgcatcgcacggtatgaagcgacgttgt

SEQ ID NO: 53548 - DNA, 1063 bp, Homo Sapiens
gccagctgagccccagggtggcaggggcattatagcctggtggacatgtgccttcagggttcctccggggccaccttcctcaggccagtgctgggttcaaagggctgtgtgtgtgtgtgtgtgtgtgtgtgtgtgtatgtatatgtgtgtgggtgcacacatctgtcccatgtatgcagtgagacctgtctacctcccacaaggagcaagggctctgcccgccctctgctcattcctacccaggtagtgggaccccgggcccccttctgcctggcttgcctgcttctgccctttccagaggggtctcactgacagccagagacagcaggagaagggttggctgtggatcaaggaaggctgcccctgtaccctgtggggaaatggtgggtgcatggctggatgcagaggtggaaggccctgggccacaggcgagagtgggcgtgtcacctgtcccaggttcccagcaagtctgcagctgtgcagtcctggggtccctgaccctgtcgcccagggggcgtgctgtccagcaggggccctgccttgcaaggaacgtctcttccggcggctgggccgctcctgcctggtctgggctgtgtgtggcgccctttcctccttgtttgttcctctgtgttctgtgtgcgtcttaagcaataaagcgtggccgtgtctcgcgacaccaatttttttcttcttcaccctcctttactcccctctccccattctctccaccttcccttacacaaaagggtcgcccttttctacattatccctcccaggggccccagttctttaccccccccccctttttctttttataaacgtgcgccctttaaaggcgattttcaattattaattttagcccccgggtccgttttcctctcatccctcccccggcccggtaaaaatcttttaccccggcggatttcccctgaacaccccccccccaccactgtgcgttgggacctacatttgtgaccaactttctccaccccaaacactctttacctgctccttatagccacaaattaatacaatatttttccacggcgcatatcccgtgtgt

SEQ ID NO: 53549 - DNA, 915 bp, Homo Sapiens
tgagaaaccctatgaatgtcaagaatgtgggaaggcctttactcgagtcaattaccttactcagcatcagaagatccacaccggtgagaagcctcacgaatgtaaggagtgtgggaaggcctttcgctggggttcgagcctcgttaagcacgagaggatacatacgggcgagaagccgtacaagtgcacagaatgtgggaaggccttcaattgtggctatcacctcactcagcacgagagaatccacacaggcgaaaccccgtataaatgtaaggagtgtgggaaggctttcatttatggatcgagcctcgtgaaacatgagagaattcataccggggtgaaaccctatgggtgtacagaatgtgggaagagctttagtcacggccatcagcttacacaacatcagaaaacgcacagtggggcgaaatcctacgaatgtaaggagtgcgggaaggcatgtaaccacctaaaccatctccgagaacatcagaggatccacaacagttgaagagccttttgaacgcagtagcccgctcgtatctatggtttcgctttccacagtttgttacctgcagtcaactgcagttcaaaaatattagatggaaaattccagaaatagagaattttaagtctcgaatggtgtggcccttctgagtagcgtgatgaaatctctcgctgtccgggtccacccggccggggatgtgagtcatccccttggtccagcacatccacgctgtatacaccacccaccctggtagtgacttagtaaccggccttggtgatcagggatcaactatgccaacatccgcagtgccctgtggcccaaagcagggcctcacgtttggctttaacgggggggccccaggggaggccaggaatagggggattgcctgggtggattccagaatatggcga

SEQ ID NO: 53550 - DNA, 499 bp, Homo Sapiens
ggcacgaggagaacatttagttgagaagattcctagatgttggcttgaagtatcctttcatggtagagagagagtggcagcagctggccagtgaattccatagtttgcaatttagatgtctttggtgatggcactgggtgttccggtgaactttctgagcagactgagtaggaggcacaaggactatccgtacatcatctgctgtgatttctctgaagtttatatcaagtcttccagcgtcagcttttggggctttggggaaatggcaggttttagttctttgtcatgccaactcagggggtaggagaaaactggaaatgttagcttggagcgtcgtagccagatattggaggaaaggagaggaactgagaacccgcaagcgtgcgccgtagttttccacgggagcatcatttctctgtaccgttgcttctctcttgattctcagttacaaaataagtctggtttcattagaaaaaaaaaaaaaaaaaaaaaacacttg

SEQ ID NO: 53551 - DNA, 716 bp, Homo Sapiens
cgcagaatcaagataggcctggcacactagacatttgcctccaaaagaaataacctacagtcttaagatgtaaataaaaatgttctgccaaggatctaaattaccttgggtttcgcatatgtctatgaaattctgtgataatttttttcaatacattgattcactggcgtctgttttcattttatacttttaataactcatcactggtggtactttatcttgaaaagtaatattttttatattttaacattggacagtgttagccagttgtaatgatgtatcagaagtaaagaaaaacccattaaagttatagctaatagatgctgttgggggttaaattaatagtaaaataatccaatatagcacttttgatgatttttatataaaagtcaactgtacatttcattcagaataataaatacttattgctgctaaaacttcttaaatggttgtttctgctatagttatttctattgcagttccaaattgccatcttcccttgtctcatttgcaagttctcaattgtatttctctcaaatggacaggttccttctttactggaggattttgtttttatcatattggtttttcattacttctgaatagtcttaattacgtttactaaattctaaaggatttctgtgctattataattaggaaatcaacgtcttttggtcaggaactttataatgtgctattaaatgtatattacatta

SEQ ID NO: 53552 - DNA, 899 bp, Homo Sapiens
  misc_feature (824)..(824): n is a, c, g, or t
  misc_feature (869)..(870): n is a, c, g, or t
  misc_feature (872)..(874): n is a, c, g, or t
  misc_feature (878)..(882): n is a, c, g, or t
  misc_feature (884)..(885): n is a, c, g, or t
  misc_feature (887)..(889): n is a, c, g, or t
  misc_feature (898)..(898): n is a, c, g, or t
gaagtgaccatccccccaaatcgggtcctgagctatcgagtaaagcagcttgtcttccccaacaaggagacgatgaagaaggatggtgcttcatcctgtttaggaaagtctttgggttcggaggattccagaaacatgaaggagaagttggaggacatggagagtgtcctcaaggacctgacagaggagaagagaaaagatgtgctaaactccctcgctaagtgcctcggcaaggaggatattcggcaggatctagagcaaagagtatctgaggtcctgatttccggggagctacacatggaggacccagacaagcctctcctaagcagcctttttaatgctgctggggtcttggtagaagcgcgtgcaaaagccattctggacttcctggatgccctgctagagctgtctgaagagcagcagtttgtggctgaggccctggagaaggggacccttcctctgttgaaggaccaggtgaaatctgtcatggagcagaactgggatgagctggccagcagtcctcctgacatggactatgaccctgaggcacgaattctctgtgcgctgtatgttgttgtctctatcctgctggagctggctgaggggcctacctctgtctcttcctaactacaaaagccctttctccccacaagccctctgggttttttccctttaccagtctgtcctcactgccatcgccactaccatcctgtcaccagtgggacctctttaaacaagcagccaaccattctttgatgtatcccattcgctccatgttaacatccaaaaccagcctggatttcatacatggacttctgattaanagtggcagggtgtgcatggttaaaaaaaaaaaaaaaaaaaaaaannannnaaannnnnannannnaaaaaaaant

SEQ ID NO: 53553 - DNA, 824 bp, Homo Sapiens
ctgcaccgggggcaaaacaacacttgtcagtgctttgaacctttcaatattgtagcatgcttgaggagtttttcccttactggccaccaaagttctgaaccacttgcaggttccaggttttactggctgcaccacaccccttcccctagatgactgcctgtgcagagacacagttgcaccattagccttacctgccctgccctgattgtgagacccaaatgtgtaggctctaaattccagccatcaaatccaattcctggtggggaaaaccttctggagacccccaaccttctgataaaagagtctctacctccagggaaagccttcttaccacactggcatatcagatgaaagcattgcactgtacctctcgtaacacagcaatacagtcctcttgaggcactcaagcctgagaggaagctcaggatctgacatgttcttccttttcctcacaagtcatcatgattttttattttaaaataatctggaagtaatgggaacttagtttttcctgaactccaaccagaatccaaatgggttagatgaggccaggcgcggtggctcacgcctgtaatcccagcactttgggaggccgaggtgggtggatcacctgaggtcaggagttcaagaccagcctggccaacatggtgaaaccccatctctactaaaaatacaaaaattagccaggtgtggtggcgcctggttgaggcatgagaatcgcttgaacccgggaggtggaggttgcagtgagcccaagatcatgcctactgcactccagcctgggcaacaaaggggggactcctgtcttaaaaaacaaacaaaag

SEQ ID NO: 53554 - DNA, 676 bp, Homo Sapiens
ttgaggatttctaatacagttcattagtttgtattgtatatgtgtttaagtataatttttatttatacaaagatcttatagtcttagaagtatgaaaaataatgcttaagagtatttgatttttttctttttctaattatcttggaaaattggatacttaagacttggagcctttacttcagattaccagtttacattttgtattgcttgtgtgagataatgaataagatgtgatatttggcatgtgtaaacttagttcactctggggttgttaatattatttgtttcattacagagtagctgtaggtaggaaagtaaacatcagaactagcctagtccttgttacgattagtactttggatttgatttttcctgtaaaacagatgcagtcatcttgtttgacctcagtaaccccagacagtttaagaaaacctctccttttgagctgatacaggttttttccccagaatccttttctggcatgtttattgtatgaaataatgaggctctccatggaaggatgaacacatatgagtcaagggattgcaattctctctgatagacttagttttcagaccttataactattgtatatgcattgaagggtgatatatttgcatataaaaataaatgcacctgctctgggaaaaaaaaaaaaataaaaaaaaaaaaaaag

SEQ ID NO: 53555 - DNA, 871 bp, Homo Sapiens
ggaggagaagcgcatctaccgggtgcctgttttcacagcgcccttctgccaggccctgctggaagagctggagcacttcgagcaatcggacatgcctaaggggaggcccaacaccatgaacaactacggggtgctgctgcacgagctcgggctggacgagccgctgatgacaccactgcgggagcgcttcctgcagccgctgatggccctgctgtaccctgactgtggcgggggccggctcgacagccaccgggcctttgtggtcaaatacgcaccgggccaggacctggagctgggctgccactatgataatgccgagctcaccctcaatgtggccttgggcaaggtcttcacagggggcgccctgtattttgggggcctcttccaggcacccacagccctgacggagcccctggaggtggagcacgtggtgggccagggtgtcctccaccgtggcggccagctgcatggagcccggcccttgggcactggtgagcgttggaaccttgtcgtctggctccgagcctctgctgtgcgcaacagcctctgtcccatgtgctgccgtgagcccgacctggtggacgatgagggcttcggtgatggcttcacccgagaggagcccgccacggtggatgtatgtgcgctcacctgagcttgcttgggcccagtgtgggggtggcaggcaagtgagggctccgttgccttggtctgggggcagaaataaaatcccccgcaccctactggacttcttggcctcaacgggggtgccagccttctggggtcaattctattgggcaaaagatgcttgccttaagtttcaggttttgtccagaaaacaagggtcctggggaatgggggggctttcacccga

SEQ ID NO: 53556 - DNA, 643 bp, Homo Sapiens
cccgggatgaaaatccacagcacagacctctaccgtgtttctcttccatccctaaaccacttccttaaaatgtttggatttgcaaagccaatttggggcctgtggagcctggggttggatagggccatggctggtcccccaccatacctcccctccacatcactgacacagctgagcttgttatccatctccccaaactttctctttctttgtacttcttgtcatccccactcccagcccctattcctctatgtgacagctggctaggacccctctgccttcctccccaatcctgactggctcctagggaaggggaaggctcctggagggcagccctacctctcccatgccctttgccctcctccctcgcctccagtggaggctgagctgaccctgggctgctggaggccagactgggctgtagttagcttttcatccctaaagaaggctttccctaaggaaccatagaagagaggaagaaaacaaagggcatgtgtgagggaagctgcttgggtgggtgttagggctatgaaatcttggatttggggctgaggggtgggagggagggcagagctctgcacactcaaaggctaaactggtgtcagtccttttttcctttgttccaaataaaagattaaaccaa

SEQ ID NO: 53557 - DNA, 695 bp, Homo Sapiens
cccacatccacacgcccccgctgggctacggggctgtsccggsccacsccgccgcccaccccgccctgcccacgcaccccggccacaccttcatctccggcgtgacctttcccttcaggcccatccgmgaggctggcccgtgtgtgccttctgcgctctcgctggacgaagcctttcgagatggaaggggtggccggamtcccagaagagaacctcggggaaggggtcgggcagcccctccccgccggcagaaccgtcttggtgtcacggagtccaggtgcttcccacccggtcgcattctttgacatagcagattggatggtggagggaagagtccagcctctgccgagarcctgctgcgtgcatttttaaaagatgccgatcctgggagcctctgttctctgcgcatttcagacacagcctgtgtggcgaggagtgtgamggcaggagccacgggtgcaagcccgtgtgtctggcctctttcctcgtgaagacgatgtgtccccgccagaaaaagtgggctccttctgcagccccgtgagctgagcccaggctgcgtagtgaccacaagcttatgtgcagcactgctcagggaggctgtcaggaattcccctcacctcggaaaggaacttctcagttttattgggggtgtctaaatttcctttcatatgttcaaataaatttttctaaacagt

SEQ ID NO: 53558 - DNA, 633 bp, Homo Sapiens
aggatttgcacaggacagaaaccttgtgaatgcagtgaatgtggttgtgccttccgtgatcaattatgtcttattttatgttacagaaaacccataggaagaaaactcagatctatgtggaaaagggttgagcaaaaatttgtagttcattatgtggccgaaaagcatacactgagagaacatgtataaggctgagatagcctgataaactcatcctattaaaatgtatgctgtgatacacaggcaaatttgatgttaacctaagcacatacacagcaattgctcgactgtgtcaattaaatgagtaaaggaagcccaagtacttttaagtggaggaaatgaagtactgtgaatttttaaaacagatgagataattggtgtcgggagtgttgcagtgactgaaaagcttcataaggggcagttggtgggaaagggctaatactgtaatggtggaatgtgggacacatatgtgtcaattcagtttccttagaccagtgccagtgtggaggattaattgaaaaccaggaccataaactttcagaactttgtattatgcagagggatctgtgaaactagtcaatttgtttcattaaacaaatattttaaaattaaaaaaaaaaaaaaaaaacgcgg

SEQ ID NO: 53559 - DNA, 743 bp, Homo Sapiens
gaagatcttccaggcagcactgtacgcagcaccctataagtctgacttcctgaaagcgctctccaaggggcagaatgttacggaggaggagtgcctggagaagatccgcctcttcctagtcaactacacggcgaccatcgatgtcatctacgagatgtacacccagatgaacgctgagcttaactacaaggtgtaggcatgcccactgctggacacgtccccgactcgtggccacatggagaaacaggcaaaccagaatcactgtgaatcaagtcggtgaactgcccctggcctgtgtcccccagagcagcccagggtcctgccagagtctgcaggggacagccctcgttttttaagtcttttttttttttttttttggtctattctaaaggaccagtaaataatgatcttacttccaaatctccttggaatttcacgacagcacagactgactttataccttcatttcagcgtggtaaaaaccgattaacacttctaatgagtcaagtcctagggttttttggttttgttttgttgccaacgaggaacacagctctgggggaatggtgtcatccacctcgctttaaaaataagcacatgatggctgggcaccgtggctcacgcctgtaatcccagcacttttggaggctgaagccggtggaacacctgaggtccggagtttgagaacagcctggccaacatggggaaaccccatcgctcctaaaaaatttaaaaataggctg

SEQ ID NO: 53560 - DNA, 626 bp, Homo Sapiens
gcgtccggaaaaacttttttattaaaggaaggaattaatttaaggcaatttttaactatgtagaactaattgcccatgtttaattatagcagacacgccattctaacaggtatttgataccattggatgcattattctaggttttttctttaataaaaatggaacaagttttcatttacattccaagctgtcaggaaatgaagaatattttattatctaggattttatctgatgtagttgcttaaagatctgatgtgctataattccatgaatcagaaataataaaatgctatcattctggatctgaagacttttgatactttttcaaaagcaaaattaatttcaggaacctttgataagttgttgttataattaatctaattttgtatagtttttgtaaataaattaccatccttccacaattagggatgcttttatccccccatcactaattgcagttgtttgataccaaaataaatttacgtagagatccttaacttaaaataaattaattttttcaaaaaacataaatctggaactgttgtttctatatttgataacaaatacagtatattttatttataagccatggtctactgatactgtatgaggactttccttatata

SEQ ID NO: 53561 - DNA, 818 bp, Homo Sapiens
cgctcgagtaattagcaaagcaactccggccctacccacggtctccatctcatctagtgctgaagtctgaggactctgcagcatcagacccacctctaagagaactttctgaatttgcagctaatctcggggaagagaaagataggtttaatttatttgaagttttcatggtgttaatatttttgtttacctcgctagcttcagaattttgccaacctctgaatttgcacattttgtataattttttttttctttgagcagtgttgatcaagccaagttgaatatttgccatgaaattccagtgaatgtgtagctcacatgcaaaccctaagtttgctgtcagttattgtatggtcagtaccccagtcctagtacacatattctaaaggttaaagtgaatgtttttgtaacatttaagcatatttcagatgtaaataaaagattgtaaaatatacggtttttaccaaatttaaaagatcctttttagttaatacaatgacagttgctacaaaatttcggaataacattttcagaataccacttataattaaaatatttcgcggactgtgtcacaaaaaccggttgcaaaaataactaattccctaaaagtctggtgggaaggtccccttaaacccggaaaacatatggagccgtctttaaaaaccaaaggggggcatgtcgaaaatttcattgaaaagataattctacttctgttctcgcctgcacaactcaaaacccccctggtcttacctcttctgcccagtaccaagtagccgcataccgttaccgcctagaaattatggctccttgcctcgcgg

SEQ ID NO: 53562 - DNA, 369 bp, Homo Sapiens
ccccccctccgcaagcaaaactggttgaacagcggatgaagatatggaattcaaagctctaatggacctttttgaagagaagttgtggcttatgtggagtttacatgggcctctgatggaagaaagctaatctgtttagtatttgtgcattttactaaaatggcagcttaaagttgtgtatctgctattgtgatgccaatgccggtgttttaagtggaaaaaaaatgacctctttgatttgtgctgtgtacacaagatttctggaaaagtaaagaaaaaccctttttatggctcacacagcttaagagtagctgtctctcaaacgtgcgctcacagttgagctgcttttgttttattctaaataaattg

SEQ ID NO: 53563 - DNA, 889 bp, Homo Sapiens
  misc_feature (533)..(534): n is a, c, g, or t
tttttttttcagtagagacgggtttcgccgtgttggccaggctggtctcaaattcctgacctcaagtgatccgcctgccctggcctcccaaggtgctgggattgcaggcgtgagccaccgtgcctggccagaaactcttttttaagcgatgagatctgtgtggcatttctagcgctctctaaattatgtctctggcatattttaatcactggaaactcaaagagtggaagagtggaagtgcgaaggaatctcaggtagctcttaactaattcgccagcagtgaagaaacttcaaccaatcatgttttccttgaattttgcaaagaaagaaaatccaaagcattgcttggatgttcttttaaggcattttatatcagttgaaccttaaactgaaatatgaagacaagctttataaactagttttttgatatgaagtatatcaattatgtttgccttttgtgaagaagtaaatgagttgaatttgtatttcacttactagattatactaatgagctaatggggtcattgccatcnnctcctactcatgactttgatgagttattgctgtaacatcacttcttgatttaatttgatatggaatcagaattggggagaaggtatttttaaataaacaacttttttaatggaaagtttttgtgtcttaacaaattctttttttagaatcccaaataaaaggggttatttagtagaaaaatgaggatgaataccttttccttgggatattttggttttgctaaaggcaataatggctttgggaaattatatgtggaggaccatttaaaaaaaaatggacagcccccggaactttttccagccatttaaccctccctcaaggggccttttccaaaaagtaccttaaggggtggaaa

SEQ ID NO: 53564 - DNA, 522 bp, Homo Sapiens
  misc_feature (1)..(1): n is a, c, g, or t
  misc_feature (43)..(43): n is a, c, g, or t
  misc_feature (45)..(45): n is a, c, g, or t
  misc_feature (424)..(424): n is a, c, g, or t
ngatgggcgaggcaaaatcatgccaaacagctttatcatgaantncaagaccaagaatcagaagctcctggatgccttaaaaaataagcaatgttaacagtgaactgtgtccatttaagctgtattctgccattgcctttgaaagatctatgttctctcagtagaaaaaaaaatacttataaaattacatattctgaaagaggattccgaaagatgggactggttgactcttcacatgatggaggtatgaggcctccgagatagctgagggaagttctttgcctgctgtcagaggagcagctatctgattggaaacctgccgacttagtgcggtgataggaagctaaaagtgtcaagcgttgacagcttggaagcgtttatttatacatctctgtaaaaggatattttagaattgagttgtgtngaagatgtcaaaaaaagattttagaagtgcaatatttatagtgttatttgtttcaccttcaagcctttgccctgaggtggttacaatcttgtcctggg

SEQ ID NO: 53565 - DNA, 906 bp, Homo Sapiens
  misc_feature (878)..(879): n is a, c, g, or t
  misc_feature (884)..(885): n is a, c, g, or t
gaaacctcaccttcagggcaaaccagggagacccttgtccccggccaatgtccctgctctgcctggcgagacggtgacctccccagtcaggctgcaccccgactacctctccccggaggagatacagaggcagctgcaggacatcgagaggcggctggacgccctggagctccgcggcgtggagctggagaagcgactgcgggcggccgagggagatgacgctgaggatagcctcatggtggactggttctggctcattcacgagaagcagcttctgctgagacaggagtcagagctgatgtacaagtccaaggcccagcgtctggaggagcagcagctggacatcgagggcgagctgcgccggctcatggccaagcccgaggctctgaagtcactgcaggagcggcggcgggagcaggagctgctggagcagtacgtgagcaccgtgaacgaccgcagtgacatcgtggactcgctggacgaggaccggctccgggaacaagaggaggatcagatgctgcgggacatgattgagaagctgggcctccagaggaagaagtccaagttccgcttgtccaagatctggtcaccaaaaagcaaaagcagcccctcccagtagtagccagtagggccgtgggctcggcccggacctggcatccggacttggactcggggccatgggcttggcccggacccggaacccggacttgtactccggggccgttgggctcgggcccgacccgggcattcggactgggaccttcgggaagggccttcctgtccctacaagggggcatggtgggaacgcaggggacctgcgcttacccggctggggggctccattaagaaaaccgaccaccttgggaaaaaaaaacaannaaaannaactttccagggattctatgg

SEQ ID NO: 53566 - DNA, 703 bp, Homo Sapiens
  misc_feature (196)..(196): n is a, c, g, or t
  misc_feature (553)..(553): n is a, c, g, or t
  misc_feature (560)..(560): n is a, c, g, or t
  misc_feature (577)..(577): n is a, c, g, or t
  misc_feature (580)..(580): n is a, c, g, or t
  misc_feature (585)..(585): n is a, c, g, or t
  misc_feature (592)..(592): n is a, c, g, or t
  misc_feature (613)..(613): n is a, c, g, or t
  misc_feature (621)..(621): n is a, c, g, or t
  misc_feature (644)..(644): n is a, c, g, or t
  misc_feature (668)..(668): n is a, c, g, or t
  misc_feature (677)..(677): n is a, c, g, or t
  misc_feature (682)..(682): n is a, c, g, or t
  misc_feature (700)..(700): n is a, c, g, or t
catgtgtgacttacgttccttatgttttatggaactctcggaacagtgttttgtttttgtttagtttttgttttcgtttttttgagacggagcctggctttggctcccaggctggagtccagtggtgtgatctcggctcactgcaacctccacctcccgggttccagggattctcctgcctcaccctttcaagtanctgggattacaggtacctctaccatgcctggctgattttttgtatttttagtagagacagggtttcaccatgttggccaggctggtctctgactcctgactaaaagtgatctgcccacctcggcctcccaaagttctgggattacgggcgtgagccacttcacccggcccggagcggtgtattttgattgctggtgctttaactatattgaccaaggtgtatagtaacctatttatcacattttacgaagcaattttaatcttaaacacatccagcaaatggtgtccctgctgaaacttttaactggaaacctcacacctggcaggcagcactctctgcagccgtgcccttgtggantcagcangaactggtgtttttcanccngacanaagcatnataaagtgactgatgtttacngaacccanatgaagtcttcctcctctctccnaaataaaactaacctattccatanttgctggtnaaatngcctttatccttgggaanaat

SEQ ID NO: 53567 - DNA, 564 bp, Homo Sapiens
taataagactgtctgcacctgtattcattgtggaacttcctctttcattggaaactttcttactcaagaatgacggcagtattgttttcttatatgtgcaatgaagtggaatgataaacagtatgcctttaatttatatgtgttcttgttctgatgttgtttcctgaaatgatttttcttcctaactgtggttttcgggtatgcaagcctaaatctttgtacactttgtctcacagaatagttctgaggctccatgacagggttttgtcattgttgatgttattgttgcttcgttttataaaaaagccaaaattttttttccaatccaaacgttcacctgtttcctttcctcaagctataccagtgtaataccagttaccctgtggatccatttaatatgttatccccactaattaattttcgtatattatttccaatatttggaaagctctttatagccatttggtatttcctattacccacctcctattttaaatatttatcagtctaaacttgtgcagtgtagtaaacatgcaagttgttacgattgagctgtattaccat

SEQ ID NO: 53568 - DNA, 644 bp, Homo Sapiens
ccccgcgtccggtctagagcagtggttgtcaaagtgtggtctgggggggcctcaagagcctttcaagggtattctaggtcaaagctgtttttataacactaagacatcatttcactatttatagcttttccttttttttatttgagaaggagtcttgctctgttgcccacattggagtgcagtggcacgatctcagctcattgcagcctccgccacctgggttcaagcaattctcctacctcagcttcccgagtagctgggattataggcacccaccaccacacctggctaatttttgtatttttagtggagacggggtttcaccatgttggccaggctggtctggaactcctgagctcaagtgatctgcccatctcagcctcccaaagtgctgggattacaggtatgagccacaacgcccagccatcatttatctttttcactcattttttcatgagtatgcagaggagttttcaagaggctatctggtgtgatattgtaataggctgaatgcaaaagcagatacaagattccagctttcgtctgtcatcagacattgaagagatttggagaaatgtaaagcagcagtactcttctcactaatttttgttgtggttagttagaaaaatggttatttttagtgg

SEQ ID NO: 53569 - DNA, 507 bp, Homo Sapiens
gcgtccggcggcaggtcctgccctggccatcaggcgagacgcctttgtgagctgtgagtgcctcctgtggtctcaggcttgcgctggacctggttcttagcccttgggcactgcaccctgtttaacatttcaccccactctgtacagctgctcttacccattttttttacctcacacccaaagcattttgcctacctgggtcagagagaggagtcctttttgtcatgcccttaagttcagcaactgtttaacctgttttcagtcttatttacgtcgtcaaaaatgatttagtacttgttccctctgttgggatgccagttgtggcagggggaggggaacctgtccagtttgtacgatttctttgtatgtatttctgatgtgttctctgatctgcccccactgtcctgtgaggacagctgaggccaaggagtgaaaaacctattactactaagagaaggggtgcagagtgtttacctggtgctctcaacaggacttaacatcaacagg

SEQ ID NO: 53570 - DNA, 579 bp, Homo Sapiens
  misc_feature (457)..(458): n is a, c, g, or t
  misc_feature (534)..(534): n is a, c, g, or t
  misc_feature (536)..(536): n is a, c, g, or t
  misc_feature (538)..(538): n is a, c, g, or t
aaaattgctggacatggtaatgaatgcctgtagtcccagctactccggacacctgatgtgagagggtcacttgagccagggaggtcatggctacagtgacccctcattgcaccactttacttagcctgggtgacagagtgagaccctatctcaaaaaaaaaaaaaatctatgcattgtatgggactttcctttggatcccccaatcaaaggataagcaatgcgtaagcctgtgtccttcctgaagcttctcgactgcccaaatagggaggtgagtcctctttatctcctctggctctggaagcaccttgaaaatgtgcattttcaaggacacttgctgggttgtgcattaagggccagtttacttgtctgcctctttgaccacctgtgaactctgttgggtgtactctgctaagttctggggatgaggaaattaataaaggtacagtcttgccttcnnaaaaaaaaaaaaaaaaaaaaagaataaaaagaaaaaaagaaaaaaaaaaaaaaaaaaaaaaaaaaaaaaaaaaaancncngggccttttttttttcttttgggggggggggggcaaaaata

SEQ ID NO: 53571 - DNA, 621 bp, Homo Sapiens
cgctgacagatcttcacgtgggaatcggtgcataaggagaactttctgctggcacgcgctagggacaagcgggagagcgactccgagcgtctgaagcgcacgtcccagaaggtggacttggcactgaaacagctgggacacatccgcgagtacgaacagcgcctgaaagtgctggagcgggaggtccagcagtgtagccgcgtcctggggtgggtggccgaggccctgagccgctctgccttgctgcccccaggtgggccgccaccccctgacctgcctgggtccaaagactgagccctgctggcggacttcaaggagaagcccccacaggggattttgctcctagagtaaggctcatctgggcctcggcccccgcacctggtggccttgtccttgaggtgagccccatgtccatctgggccactgtcaggaccacctttgggagtgtcatccttacaaaccacagcatgcccggctcctcccagaaccagtcccagcctgggaggatcaaggcctggatcccgggccgttatccatctggaggctgcagggtccttggggtaacagggaccacagacccctcaccactcacagattcctcacactggggaaataaagcct

SEQ ID NO: 53572 - DNA, 635 bp, Homo Sapiens
gagagaagttgctaatgatactgtacaaaggatggattaaataatgaagtcaatttcattgatagaaaatgcaaattttaagattctcagtgtatgaggtctcagcctcgggagcatttattttttactttcctgctaaaaatccactggggaggtataaaattcactccaaagaagtttgcctgggccaaaagcctccaggttccttctgagaacaaaatactaatgatttttttttttttttttggctgcttgggagagactttcagcattctttcacgatatccagatatgtcccttcagcacacacactcaactttctcatctggttcgtttcatcctcccgaaagaacggtgctctcccactcttactctatttcaaagagctactctgtctcaaccacagcagccctgccaagaaaaggcaagatgaaaggctagagcatgtgctaccttgagatttcaagaagtgtcctacctcagctgaagatggagaaacggggagtggagaggggatcagcccagggtaccatgtgatgactaatatgccactcattaagggcttttacctcggctgtccacatccagtcatgcatttggggccaggcatgcctgcgaaatgattgacattcctg

SEQ ID NO: 53573 - DNA, 514 bp, Homo Sapiens
caaaagcattcgttggagagccttacttgggtttgcacccaaaaaaaaaaaacccaatctgaggaaagactgcaagtgtctgaatgaagagtgcttgtcaatgatcaactcttgtggtacatcagggaactcacataggtgaaaaaacccatacttaccttgagtctgagaaaacctttggtagaagctcctgtcttatcaggccccaaaaaacctgttctgcagtgagagatttaattgtgggtgagaatctatgtacatataatatgtatgagaagactgttctcatagttagttgactcatatggtagagaggactttacatgaaatcagtatgaaaatagttttttagatacccagaagcttgttctgggagaagctagggtgggtcagagtagacctgatgggtaactcaggtaaagatgcttttcttttatctgaactacttaatgattgctttacttttactttttaaaaaattcagaaatccaataaaggaaaggacggtaacctt

SEQ ID NO: 53574 - DNA, 464 bp, Homo Sapiens
atgaagatgacaggcatggccggggtcagctctttcagccgcgcttcagcgatgactccagtctgggtgtcccagcgagcccctgcagggacagtatggctgagggtcaggtgtgctgccagtaagtgagggaggggctggcaggaagggtggggtcctcacactccccgccctctgcagagctgggctctaccccaaaaggcttcaggccagctgccacagctggaagcagaggccttcgtaggtgatggcctgcatgttgtaactaccccgtcccgctgggctcaaggaacagctcagctaaagccctcgggttccatccgtttaaatctgtggcattttcagagcctcatctgtcagccttaatgtcagtggcaggaagtcataactccagctaaaaattacagagtaaagttccctgattcttaatgtgtaatgtctgccctatgtgtacatacacaata

SEQ ID NO: 53575 - DNA, 499 bp, Homo Sapiens
aagaaatccaaggccacacagctgagtcctgaggacagagtggaggacgctttgcctccaagcaaggccccttccaggacacgaagggcaaagagagaccttcctaagaggactgcaacccagcggcctgaggggaccagcctccagcaggacccagaagctcccacagtgcccaagaaggggaggaggaaggggcgacaggcagcctctggccactgcagaccccggaaggtcaaggctgacatcccatccttggaaccagaggggacctcagcctcttagcaggaggctctccttgcttgcactcaccctttcttattgtcttgccctgcatctgggggtctgaatttttgggagcaggcaatatctgaaggtgcaaacaggccctacggctgttccctgcacaactctcatggttttaattgtaccccatcttccacatctttaaagctcatgtgaaaaatgctgcatttttaataaactgatacatttgaacttc

SEQ ID NO: 53576 - DNA, 736 bp, Homo Sapiens
  misc_feature (705)..(705): n is a, c, g, or t
  misc_feature (723)..(723): n is a, c, g, or t
cacgaggggaaaagtaatacctttaacctcactagcttcaagagtagacattcttactagctcaatttaaataattgattttaaataggaagaaaagaggatatatttaagatacatagaaattatgatgtgaagtattcatgagaatctgtagattccatcaaaataagtaggaactcatactaaaattgttggatttaaagaggcaacttttgtttatgattcaaatatgggaatttgagaaatatttcatttgtccactggatgtcactattttactaaaaggcagctattagtgtgggactgtgactgaggtcttaaagactgaaagagttggggttcattttctgttacaacttacaggaacatttgtactttaagaaaaatttaagtgacaaatgttagaagatgatggattgaaaaatataagtaatttggcatattgaccctatataaaaaagtgggcattttgtaacattccttcaggaagaatagaattgtatgcttttttctgcatgtttgtgatcactgtgagtctcagatgattattccagttttcaatgatttttcaaaataaaagtcaatcagcattgttatttatcattaaggtattgaacactggattgcatggttgaatgtgtctttaatccactacaaaatgtgcttgttattgataggatcatgttgttaaattgtaattttcanaattaattgatgttttanaaatgttgagaca

SEQ ID NO: 53577 - DNA, 608 bp, Homo Sapiens
ttttttttttttttttttaatttaaaaaagaaaatgggtggttgggagagaactagaacagaagatgtgcaatagggctcagagcagccccaggaagtgggccatgtctgtggggagcagtggcttgctgagcccacctgctattgttctgcacgaggctgggcctgcctcactctccagggcctcatgccccattctgggcctgtggtgctcgtggctgaggctccacagggctgcaagtgccctgccaggctctaaggcccgaagaacaggtgatatcgggggcgctgcagagctgggctctagcaggacagttcttttgtagccaggggaccctagaagtggggtggggcggctccagggctttccagcataccctgcccctggatgggaaaggcagggtcagggcccactgagacccatgcagagtttccaggtgtgcactggaagtgaggtcacatgagcagcgtgggaagaagactctgtcaagactctcagaagaacctggagtaattgtgcctgaagctcagcgtgaagtctgaaatatgcaacagaagaaatatatctctatctctctactctgggctctgtgtttttcctcctgggtg

SEQ ID NO: 53578 - DNA, 702 bp, Homo Sapiens
tttgaagctaggaacccacgggaactgactgtggtccagggagagaagctggaggttctggaccacagcaagcggtggtggctggtgaagaatgaggcgggacggagcggctacattccaagcaacatcctggagcccctacagccggggacccctgggacccagggccagtcaccctctcgggttccaatgcttcgacttagctcgaggcctgaagaggtcacagactggctgcaggcagagaacttctccactgccacggtgaggacacttgggtccctgacggggagccagctacttcgcataagacctggggagctacagatgctatgtccacaggaggccccacgaatcctgtcccggctggaggctgtcagaaggatgctggggataagcccttaggcaccagcttagacacctccaagaaccaggccccgctgatgcaagatggcagatctgatacccattagagccccgagaattcctcttctggatcccagtttgcagcaaaccccacaccccagctcacacagcaaaaacaatggacaggcccagagggtgaagcaaacagtgtcccttctggctgtgttggagcctccccagtaaccacctatttattttacctctttcccaaacctggagcatttatgcctaggcttgtcaagaatctgttcagtccctctccttctcaataaaagcatc

SEQ ID NO: 53579 - DNA, 770 bp, Homo Sapiens
ccacgcgtccgcccacgcgtccggccttaagtctttcctctgttgctgaccagattgtgttaccatttgaatacactgactaatgtttgttaaactttttctgtggcaccttggccacatgcctgcaggcatttgttttcagaacagtctcaccaattacaacacaccgtgttttagtagaagtgttgtggttttagttggtgctttcagaactgctgcctaggaaactataaacccttggttaaggggaaatcatggcttgttctctttgtacagttactttatttatataggtgttaagctttgtggaccaggtgtttttcttttggggcgaacccctgagcagagaatcttactaggctttggttatcaccaaaacaacctccagtatataccaaagctttgacttgtttgagctcttgagcttagaagttgattttgcacttatttttttggggggtgggaatgtactgcagtcagtaaacattattgactgtttaacttaaacagatgctttatggcacctgctcaagcccgtgactgtacagaaggatcctggttgctaccagtgggtgctgattcagcatcacaagtgactgaaattggctgtggatctgttctttgtgaaagaattcctgatttctccatggagcatgtacacaacaattttgatcatattaactgtacttcagttttgcatttttattcaaatgttatctctttttttctttgagaaataaactgtcactgatgtgaaaaaaaaaaaaaag

SEQ ID NO: 53580 - DNA, 445 bp, Homo Sapiens
ccagggaaggagccacctctcagtgcctcacctccccctgcctcccagcctccgcagatgaggttcctgccccttcctcctcgtaaccaaaaccctcactgctcccaggacggtcttatttataaaccagatacatgtcttagtctggtcccagaccaaggagctggtcagacggccctttctaatcctacatgttgagcttatgtaaaaaatgttgtttcctcctgttttggttcctttcttacccacaaaccattactacttgaaacttaaaaaagtcgccaagtgtaaaggctaaagagaagcagtctgacggaccttgtgatttgtactgttgctgcggagctatttacagattccggaatacatatacaaaaaactacgggtgtgaccataaacaacttaacattgtatactccgacacacctaacaacactgcacacag

SEQ ID NO: 53581 - DNA, 636 bp, Homo Sapiens
catgaagacgtgccttctgccatgattgtgaagttccagccacgtggaacttgcaaagcatctgtgcgacttggtgtctttgacctggtgctacaccttatggaagctggggagagaccaaaaccagatgcagagcctcccagtccgggctggagcctgggaatgcaggaaggtgctccgggaacgccttccgcggaatgaagcggcccatgcccttgttgacgttgatgtttccgtcttcaaagacgatcttgccctggctgatgaccactagtggggagccgtggcactccataccctcgaagatgttgtactccaccgcctgcaccaacagcctcagcgttacttcccaggatttgctctgccccaaacgagctgttcataacagcgattttgcctaacattatatcataagcgtgttccaatgttttttttctctctaaaaataccttttattgactgtaatattccactgtatggtccacagtgtatataaccaacaactcaccgttgcgcatgtaggctgccggtggctttctataatcaaatcaatattgttctggggcatcacaaagaggaagggggtcccccggggttatgcaatgtggctgctttgactgtactggacataaaaat

SEQ ID NO: 53582 - DNA, 915 bp, Homo Sapiens
  misc_feature (715)..(715): n is a, c, g, or t
  misc_feature (774)..(774): n is a, c, g, or t
  misc_feature (801)..(801): n is a, c, g, or t
gatgacgacacgcctttgcacgacgctgccaacaacgggcactacaaggtggtgaagctgctgctgcggtacggagggaacccgcagcagagcaacaggaaaggcgagacgccgctgaaagtggccaactcccccacgatggtgaacctcctgttaggcaaaggcacttacacttccagcgaggagagctcgacggagagctcagaagaggaagacgcaccatccttcgcaccttccagttcagtcgacggcaacaacacggactccgagttcgaaaaaggcctcaagcacaaggccaagaacccagagccacagaaggccacggcccccgtcaaggacgagtatgagtttgatgaggacgacgagcaggacagggttcctccggtggacgacaagcacctattgaaaaaggactacagaaaagaaacgaaatccaatagttttatctctatacccaaaatggaggttaaaagttacactaaaaataacacgattgcaccaaagaaagcgtcccatcgtatcctgtcagacacgtcggacgaggaggacgcgagtgtcaccgtggggacaggagagaagctgagactctcggcacatacgatattgcctggaagtaagacacgagagccttctaatgccaagcagcagaaaggaaaaaataaaggtgaaaaagaagccgaagaaagaaaccaaaggcggagagggtccgctttcngaaaacgaagcggacaagttctggctccctcgggaatccggaaaagcccagtccttcanaaaaattgggggaaggaatgaacaggnaacctcttcctggggggagactcctgggcttgtccttccaaggggggtcccccccccctggggtggcttgaaagaggaccccccctcccccctgggttctccacccttcccccc

SEQ ID NO: 53583 - DNA, 843 bp, Homo Sapiens
  misc_feature (753)..(753): n is a, c, g, or t
ctgtgacccctgccctttccccgccagagacctcaggctctcagcacattccacaggctcctgagtccccgaggcctgggccagcttgggcaagccaagatcagatgtctctgtgttcgggaaggtctccgtgtgggaaagcccttgggggatcccgggtgaggagtgttgccccatccagagaatgaatgagttcctttaagtgccaccgccagcaagcccagaggcacacagtccgagtgcacccgcttagcctttacattcctctccaccgacaaaaggaaggggaaactcaatcagcaggacttcagaaagggccttgtgtttatagctttgtcaagtaaatttggacgcagctggagcacaggccctgtttgtttgcacataataatcttgtttatcactttaaaaaattcagtaatatctcagcagtcaggcttctggttgtgaaatcacattgtatgggatttataccaaattatgtatttgctaaacattcactgcacacgtgtacagcggagtacgaaaaggaacgttgtccacaggggatttatggatacaacagcaaacattttataaactatgcacatgcattacacacatgcacacacatatgcacacacatgtgcaaacatagccacttttttgtcaagagttaccctttggggctccttaaaccagaatgggagtttgaaagagagatcatactccagctgaagtttgttgacccttttctaaaattaaaaagatcanatttagtatttgctggatatgcagggagatgagactctttttatctcaaaataaacagattctttcaggaacgaaaaaaaaaaaaaaaaa

SEQ ID NO: 53584 - DNA, 620 bp, Homo Sapiens
gggatctgaggggtgagggtggcccccctcctcacgccttcttcactgcccccctcagagtgcacaatacgagtttgttcctgcctccactctcccaccccgttctggcctccctgtctcaagatactgagcctctcacctcccagccctcagccacccccatccctgccccttctgagactcacagcacccctttccttcctctcctcccacctcctccctcagcccctcattctccttgggaatctgcagagggctctgggactcactgccggatgtgaaatccaggcgtcagctgtttcctaggcaagggcaggaaagtggtctccagcccttgctccactcatgcctgggggcctggggctgagtggtatccctacctggcctccccctggcctctgggcctccagcgctgggtttgtcgagtgagagagagagaggagcttgggttgcttccctgtccccgccccctctgtggcattgtccctcccactcttatttttctaccaattgctatttttccgaacaatccttgtagagtatgtaccatccaaaggcaggagggcctcgccgtggccggctctggttggagatggtacagttttattgtacaggtgcta

SEQ ID NO: 53585 - DNA, 708 bp, Homo Sapiens
aaagtttgtatgtcagttagctaaaacttcagaatacatttctccctataaagagttataaatgatggtttagttctcaggcagctacaaatgcctatttattccctaatgtacctgaacactagtaccatagaactgaaccaccatctgtatcagcgcatggggagtgtgcattctgaggtctaacccggggtgccaggaacacacacatcctccatcccagcatagagaatggggactccctgagtaatgggagttctttcatggcctctgcttggggtgggggagtcagcagcacccatttgtacatataggtcattcatacatcacattttaaattggggactgtgtgtgctggtgtgtgtgtgagttctacgtttctaccatatgtgatcagtttaatagtaactttatttatttaaaaaaaagaaacacaattagttactgttaaactgataaagggtgtttatttttacttttagaattggtcctatgaagaagtagaaagtgagtcatgcactagacagtgggcctagctcatcagtggctaaagttgaaaaggggttggtctcctgtatatatatgtatgtatatacacacgtacatacattcatatatatacatatatacataatgtgcttaaccactgccttttaaactttaaattaataaaacattggggttgattcaaaaaaaaaaaaaaaaaaa

SEQ ID NO: 53586 - DNA, 781 bp, Homo Sapiens
gggatccctgtttattgggaaggatatgttcgattcttaaatacgccatctgacaaatcagaagatggaaggctaatttatactggcaatatggcccgagcagtgtttggtgtgaaatgtttctcttattctacgagtctgattggccttacatttctgccatacatttttacacaaaataatgctatttctgaaagtgtgcctctgcctattcaaatcatattctatggcatcatgggaagctttacggtgatcaccccagtgctgcttcactttattacaaaaggctatgtcattcgattgtaccatgaggccacaacagacacttataaagccattacctacaatgctatgcttgcagaaacgagtacagtgtttcaccagaatgatgtgaagattccagatgctaaacatgtatttaccacattttatgctaaaacaaaatcactgttagttaatccagtgctctttccaaaccgtgaagactatatccatctaatgggttatgacaaagaagaatttattttgtatatggaagaagccagtgaagagaaacggcataaagatgagaaatgagcctatttgttagtgttcgtgcttaaatgtgatttacgttttaatgtataataataaaattgccttttgcattccgttagtgactggttgttaaaaataattttgaaattatcccaggccttttaattttccagaagaatgaatgcttggtttataaataaaaacaaggcttatggttttgggaaacccaaaaaaaaaaaaaaaa

SEQ ID NO: 53587 - DNA, 725 bp, Homo Sapiens
agacattggccgattgaaacttctcctacctgacctgcaaccccaaagcaacttctgtttgctctttgattaccggctggccggagacaaagtcgggaaacttcgagtgtttgtgaaaaacagtaacaatgccctggcatgggagaagaccacgagtgaggatgaaaagtggaagacagggaaaattcagttgtatcaaggaactgatgctaccaaaagcatcatttttgaagcagaacgtggcaagggcaaaaccggcgaaatcgcagtggatggcgtcttgcttgtttcaggcttatgtccagatagccttttatctgtggatgactgaatgttactatctttatatttgactttgtatgtcagttccctggtttttttgatattgcatcataggacctctggcattttagaattactagctgaaaaattgtaatgtaccaacagaaatattattgtaagatgcctttcttgtataagatatgccaatatttgctttaaatatcatatcactgtatcttctcagtcatttctgaatctttccacattatattataaaatatggaaatgtcagtttatctcccctcctcagtatatctgattcgtataagtaagttgatgagcttctctctacaacatttctagaaaatagaaaaaaagcacagagaaatgtttaactgtttgactcttatgatacttcttggaaactatgacatcaacggata

SEQ ID NO: 53588 - DNA, 617 bp, Homo Sapiens
ggaagaccagttagtgatcctggccaccaccaccactgacttaggtgtgaccaccagcgtgccggaggtgcccatgatggagaagatcctgcagaagttcaccagcatgcacaaggcctactcacctgagaagaagatctccatcctgctcaagacctgcaaactcatctacgactccatggccctcggcaacccagggaagccctatggggcggatgacttcctgcctgtgctcatgtatgtgctggcccgcagcaacctcacggagatgcttctcaatgtggagtacatgatggagctcatggaccccgccctgcagctgggggagggttcctactatctgaccaccacctacggggccctggagcacatcaagagctacgacaagatcacggtgacccggcagctgagtgtggaggtgcaggactccatccaccgctgggagcgccggcgtactctcaacaaggcccgggcctcccgctcctccgtacaggacttcatctgcgtgtcgtacctggagcccgagcagcaggcgcggacgctggcgtcgcgggcggacacccaggcccaggcgctgtgcgcgcagtgcgcggagaagttcgcggtggagcggccgc

SEQ ID NO: 53589 - DNA, 567 bp, Homo Sapiens
  misc_feature (455)..(456): n is a, c, g, or t
  misc_feature (465)..(465): n is a, c, g, or t
  misc_feature (467)..(467): n is a, c, g, or t
gctggctaggccgccctccccactgttaccaacatgaagctgctcgcagcaactgtgctactcctcaccatctgcagccttgaaggagctttggttcggagacaggcaaaggagccatgtgtggagagcctggtttctcagtacttccagaccgtgactgactatggcaaggacctgatggagaaggtcaagagcccagagcttcaggccgaggccaagtcttactttgaaaagtcaaaggagcagctgacacccctgatcaagaaggctggaacggaactggttaacttcttgagctatttcgtggaacttggaacacagcctgccacccagtgaagtgtccagaccattgtcttccaaccccagcttgcctctagaacacccactggccagtcctagagctcctgtccctacccaactcttgcttacataaatgctgaatgaatccaaaaaannaaaaaaaananaacctataaaaaaaccttggagccaccgtatccagctgaatcgaattcggcccgggcctttggcagacttatggttggccccggaccgcaatggacactc

SEQ ID NO: 53590 - DNA, 949 bp, Homo Sapiens
  misc_feature (600)..(600): n is a, c, g, or t
  misc_feature (715)..(715): n is a, c, g, or t
  misc_feature (858)..(858): n is a, c, g, or t
gatcgattgaaatacgaatcccagaaatctaaatccagcagcgtggctgtcggaaacgactttggcttttcctctcctgtcccaggaactggcgacgccaaccccgctgtgtctgaagatgccttattcagggacaagctgaaacacatgggaaagtccacccggaggaaactgtttgaacttgcccgagccttctcagagaagaccaaaatgaggaagtcaaagaggaaacacttgttgaagcatcagtcgctgggggctgccgcgtcaacagccaacctcctggatgatgtggagggccacgcgtgtgatgaagacttccggggcaggcgtcaggaggcacccaaggtggaggaaggcctgcgagaaggacagtaagagatgccagcagctcttccttgccagagatgatctgacccggtgggggcagctggaaagcaacactggcccccagctgaagggcccagctgcagccagacagatggtgcttgagaaccgaggcccggtgatcctccagccacagtccagcccaaccactgccactttccatgggacttagaacttcggagttgctgccttgcaattggaggaaggacctgnggcccctataggcagcagccaattacagccccttttgtagccaggcgttcctatggtcaaagagtgggaatgcaggaaccaacccctccctttaaaaaaaaaatccagaaagcangataaagttggaatatggaaaaagggcaagatgaccccccaccagaggctcttttggcctgaaaggtggagtctcctgccctcggtccgttctctatcttcttctgttcacagaactctgccctgaacccccttttcctccancctcccctttctgggtcccccatttccttcagcttcccttccggggcacattgtggcccccttccccttaccatgtaccctccctgggatt

SEQ ID NO: 53591 - DNA, 714 bp, Homo Sapiens
cacatcctgagcccaggtgacgtggccgaagtatccccaaccgtgggcagtgcgtcaagcagcgccggcaagcagatgggcgaatcctacgacacaaactttacaaagaatatccagaaggtgactcaaagaatgtggcagaacctggaaggggacaacagaagcactttcagtaaagcaacggcaagcagctaggttgcaagaacattcctctactttctgctaagccttggaaacagttgggaaaagtagtttgaccctcacagttcacattcagctcagcagagcaagaccccagagatgcttagagacaggacacctggccatcaaacccagtttggcccagcctggttgggtgactttgtgggagccacttaacagctctgggtccctgttttaccatcctgggagcaaggccctgcagctccacgagacctttaccccgggaagaagccgccacccatgaaagcatttctgaagcccctttctaagacaaggctcagcatcttgatatttttgacagattcctcccaagtctggctctgggaggtatgtacccatctcaaatgttcccaagataaattcatccttcaggaaatggaaatgaacttgcttactaatgtgtgattcctagttgtagccaccggatgtgctgaggcctaaatgttagcaggtgggaggaggccacagaacaataaaaacaaccaaataaga

SEQ ID NO: 53592 - DNA, 771 bp, Homo Sapiens
  misc_feature (699)..(699): n is a, c, g, or t
  misc_feature (720)..(720): n is a, c, g, or t
ggtcctttcagcaaaatcagtgaatttaaaacttgtattcctggttttcctggagctccttctgcagtcagaatttcaaagaatgttgaaggtatccacctttcctgggaacctccaacctcaccttctggaaatattttggaatattcagcctacttggctatccgcacagcacagatacaagataatccaagtcaacttgtgttcatgaggatttattgtggtcttaagacatcatgtatagtaactgctgggcaacttgcaaatgcacatattgattatacatccaggcctgccattgtgttcaggatatcagcaaagaatgaaaagggatatggaccagctacacaagttcggtggcttcaaggtaacaataagaaagcacctttaaattgaattggtttttttactgaagctattgtgatgatgattatttattagtaactggttatgaagatttgtcatttaaaagagtattctctggctgtatttccagcagttatgaacttgagtttgtaaattgttcttaaaatgtatttgctgaattatagatccaaataaaagaaaagaagcaaagactctctgaaaattagtatatgagttcttccttacagatatagctcttttataaagaaaaacagtgaaattaagataaaagctagaaagctttattaccccaatatcttttataagggctgngtaacccagtcatcctagagntattgagatgattctggtaactggctggtggatactatgctggcttatata

SEQ ID NO: 53593 - DNA, 686 bp, Homo Sapiens
ggcctcgcccctgtgccacgccctgcaggcccacgtgctgggcgggaccctgaccgtggccgtggggggtgtgctggtggctgccttactggtcttcactgtggccttgctggttcggggccggggggccggaaatggccgcctccccctcaagctcagccacgtccagtcccagaccaatggaggccccagccccacacccaaggcccacccgccgcggagccccccgccccggccgcagcgcagcktccttctggacctgggagatgccgggtgctacggttatgccaggcgcctgggaggagcttgggcccgacggagccactctgtgcatggggggctgctcggggcagggtgccggggggtaggaggcagcgccaggcggctggaagagagtgtggtgtgatggacgggcagcttcctgtgtgctccaagggatgagcctcgtggggcagagggcccggggccgccgcctggcctgggagtccctccctggtttttattctcagtacctcaggctcccctgtgtacttggaggggcagggagccctttcctcggttctggcctccagaccagggtaagggcaggcccctccaacaggtgctcacagccaccgaggcaggggctgcagccacccactgggagtyttgtttttatttataataaaattgttggggacacctca

SEQ ID NO: 53594 - DNA, 585 bp, Homo Sapiens
ttttgttaagttcaaaagctggtggtgtaggacttaacctcattggaggatctcacttaattctctatgacattgattggaatccagccactgacattcaggcaatgtctagagtatggagagatggtcagaaatatcctgtacatatttacagactcctaactacaggtacaatagaagaaaagatctatcaaaggcagatcagtaagcaaggtctttgtggggcagttgtcgacctcaccaagacatctgaacatattcagttttcagtagaagaacttaaaaatttgttcacattacatgaaagttcagattgtgttactcatgatctgcttgactgtgagtgtacaggagaagaagttcatacaggtgattcgttggaaaaattcattgtctctagagattgtcagcttggtccacatcaccagaaatctaactccctgaaacctctttctatgtcccagctgaagcaatggaaacatttttctggagatcatttaaatcttacagatccttttcttgacagactaacagaaaatgtgtcattcatttttcagaatataaccactcaagctactggcacat

SEQ ID NO: 53595 - DNA, 848 bp, Homo Sapiens
ctgccacagtatatttttttaatttggcaggataatatagtgcaaattatttgtatgcttcaaaaaaaaaaaaaagagagaaacaaaaaagtgtgacattacagatgagaagccatataatggcggtttgggggagcctgctagaatgtcacatggatggctgtcataggggttgtacatatccttttttgttcctttttcctgctgccatactgtatgcagtactgcaagctaataacgttggtttgttatgtagtgtgctttttgtccctttccttctatcaccctacattccagcatcttaccttcatatgcagtaaaagaaagaaagaaaaaaaaaggaaaaaaaaaaaaaaccaatgttttgcagtttttttcattgccaaaaactaaatggtgctttatatttagattggaaagaatttcatatgcaaagcatattaaagagaaagcccgctttagtcaatacttttttgtaaatggcaatgcagaatattttgttattggccttttctattcctgtaatgaaagctgtttgtcgtaacttgaaattttatcttttactatgggagtcactatttattattgcttatgtgccctgttcaaaacagaggcacttaatttgatcttttatttttctttgcttttatttttttttttatttagatgaccaaaggtcattacaacctgcgctttttattgaatttgtttctggcctttgttaagttctattggaaaaaccactgtctgtggtttttttggcagttgtctgcattaacctgttcataccccccattttgtccccttttattgaaaaaataaaaaaaaatttaaagtacccaaaaaac

SEQ ID NO: 53596 - DNA, 550 bp, Homo Sapiens
ttagcaatagtgcagaatccagaatggatgtcctctttgtagccatctttgctgtgccacttattctgggacaagaatatgattatgaagaaagactgggagaggatgaatattatcaggtggtctattattatacagtcacccccagttatgatgactttagtgcagatttcaccattgattactccatatttgagtcagaggacaggctgaacaggttggataaggacataacagaagcaatagagactaccattagtcttgaaacagcacgtgcagaccatccgaagcctgtaactgtgaaaccagtaacaacggaacctagtccagatctgaacgatgccgtgtccagtttgcgaagtcctattcccctcctcctgtcgcgtgcctttgttcaggtggggatgtatttcatgtagaaggtggaagaaggctgctatgactctttggatgggagtctggcaagaggaaattggaagataaaataaataataagtgaactaaagaacagttacagatccagccacaactacccgtaaaagggccacat

SEQ ID NO: 53597 - DNA, 531 bp, Homo Sapiens
gtaactaacggtggctggaacatattcagaacagatgcttgaaatatgcacttagcagtatggttccacatctgtctgggtaaaccatgaagaaaatgaagctgctgcctcaatcgacccagacagcagccataggcagataaagatttggtttcaccctggtggtggtaggcatcgtgtgtgactttttttcctctaatatcaattttacagtacggaaatagtattttaaaatagtattggctaataaattatgaattctataaagtagtaagacttggtatggttggagtgtaggaatgaatattcatgaaatgtttcttattgcttttccttccctaattcatacaatgaatgtatttggaatacttacgtattataaaataaactatacctcttcaagaggtatcctgttctgtaagatcagatgtttttattgcaggtcaatataatactggcagagacagaaaatacccccttatcagtcccttagtgcctctttctgtttgtggcatggtgagaacacccatg

SEQ ID NO: 53598 - DNA, 693 bp, Homo Sapiens
ctgaagccgctgatgcgggctctggatgagggcgctggaccctgcgaccccggcgaggtggcgctgccgcacgtggcacccatggttcgcctactggagggcgaggaagtcgcggggccgctggacgagagctgtgagcggctgttgcgcaccctgcacggggcgcgtcacatggtccgggacgcacccaaattccgcaaggtggcagcccagcgcctgcgaggattccggcctaacccggagctgagggaggccctgaccaccggcttcgtgcggaggctgctctggggtagccggggcgcgggagctccgcgcgctgaacgctttgagaagttccagcgcgtcctcggcgtcctgtcgcagcgcctggagcctgaccgctgagagcgcagacacccttcttcacacccgggacccccaggtttttgcgaaccccagaagagaccaaaggagtcgtcccaggctcctcgcgcctcaggtggaatcctgccctgtgcctcacagaagaggtggggaccgcagtcagggtcacctggaccatggtgaacatgtgacctgcagatctggcatcagaggccagagttcaaatgtgactccacctcttaaaagccgtgatttctagcagttgacttcacctctgtgtcggcctttaacaaaatcatagccatacagcagctcaggcctgtaatctca

SEQ ID NO: 53599 - DNA, 868 bp, Homo Sapiens
gctcctrccccctgcccggagtgaactctgccctgaccccacccccagccctgcggcctgccagcatggatctcctgcgcccacactggctggaggtgtccagggacatcaccggaccgcagcagccccctctgccttcccacaccaggagctgccccgggctctgccggcagctgcagccaccgcaggtgcgctggcctcgaggccacctattccaacgtggggctggcggcccttcccggggtcagcctggcggccagccctgtggtggccgagtatgcccgcgtccagaagcgcaaagggacccatcgcagtccccaagagccamagcaggggaagactgaggtgaccccggccgctcaggtggacgtcctgtactccagggtctgcaagcctaaaaggagggacccaggacccaccacagacccgctggaccccaagggccagggagcgattctggccctggcgggtgacctggcctaccagamcctcccgctcagggccctggatgtggacagcggccccctggaaaamgtgtatgaragcatccgggagctgggggacctgctggcaggagcagcacgtgcggggctgggacgccccctgcttccagctgccccagcctagggaggggctggagacccctccctgcctccctgccctgaacactcaaggacctgtgctccttcctccagagtgaggcccgtcccccgccccgccccgcctcacagctgacagcgccagttccaggtccccgggctgccagccgtgsaggtccgtgaggtcctggccgctctgacagccgcggcctccccgggctccagagaaggcccgcgtctaaataaagcgccacccagggatgaaagcg

SEQ ID NO: 53600 - DNA, 385 bp, Homo Sapiens
tcttgatatatggcttgagaatgataatgtaaaaggaattcttctcttacttcaataaaatgggttttaacataactttaaattcagttaaatatacaatattgaatacctatagttgactttgggatggggactttttcaagtcattaagagtgtttgtttaaggtgatctcattgatggtagttctcagccgtctcaaaaactgcaagctaatcagtcagacattctttaatgaccccaattttttcactttaattgttaccatgttttctatttttactgatttttgctaaagcatgtaagagtgaatttattatagcagtaatcttgtgtttctcctgatgtgcaataaatcaataattcaccagcaaaaaaaaaaaaaaa

SEQ ID NO: 53601 - DNA, 982 bp, Homo Sapiens
caacaggcatcacctgaatatcttacctcccctcaagagttctcaccagccttagtttcctacacttcatcacttccagctcaggttggaaccataatggactcctcctatagtgccaataggtcagttgctgataaagaggccattgcaaatttcacaaatcagaagaacatcagcaatccacctgatatgtcagggtggaatccttttggagaggataatttctctaagttaacagaagaggaactattggacagagaatttgaccttctaagatcaagtragggacacttgaaggcttattttgcttcacagtaaaataacagctctattattattcagcaaggccaaagacttttgagaatgtgtatggraaattctttttgtgcatttgagggcaaaattcaggccatcttcttatacatatactatcaaattatgttgtgtgcattagaaatcagttgcttgatagtagctattaaacccaatattgctgatagtatgckaatatcctaaaatcttaaatattgcatatctatgaatgtkaaattcagaatatctctaaaacatggaaaattgatgtttcaataaaragggagacattttattattttgccttactaatgattttgcagctctgtttttctgcacactcaatagaaaatattgtgggtctgagatgccctttgaaaatgcctgagagawaacatgggctactacattatgttaatgttttgtaatgtccttttaatgagtggtgacataaaagggctgctttgttgtkctgatatggcaaaaattaaataaattctttttcactttaaatgmgatatytmatgtttttacttggaatmtttgctttactttgaacaacyaatatatgtgaagcttcgccamaatwttttagaaatgtcctttttgaaagartgatgtgagtrttttgagtrggttgccaataggagcaaaagctcactytagagta

SEQ ID NO: 53602 - DNA, 992 bp, Homo Sapiens
  misc_feature (877)..(877): n is a, c, g, or t
aaagcctatacacagtcctcacacctcagtgaacacaggaggattcacaccggagaaaaaccctacacctgtgttgaatgtggtaagggcttcagccagagctcacacctcattcagcatcagataatccacacgggcgagcgcccctacaaatgcagtgagtgtgggaaagccttcagtcagcgttctgtcctcatccagcaccagaggattcacactggggtgaagccctatgactgtgctgcttgtgggaaagccttcagccagcgatcaaagttgatcaaacaccagttgattcacaccagggaataggctgttgggctggcaggagtgaaaccgagcatagtttcctctccaactcctctttggccattgtctcagcctctgccacttcccagaccgaaagcctggactcagctcactgcctacatccagtggccacatagcctgggaccctcctttgaaacatcctttacaggctcccttctcactgccactgctcttgcctcttgtgatgtcttgggtttgggcttgtttttacagcttgtgaacggactgcacgtttgttacaagggagaagattatggagggctgcatattcatgaatagagtttattattataatgaaaagttaccaaaaaaagaaaagtgacgtttggtttggggtccgcgcggggagaggcaggcgcccggcactgggagcgctgcggggggaggcgggggcgaaggggagtggcgagcgggcgacgggggagcaaggggccgggatggggggcggggacggcccgagggcgccctttcgggtgcctttcaatattgccgcccagcgtgcccccgtcccccctggggttcgagaggaccataaccgtcggggatntcgtgaataaatgtctggctggcggctgcgccaaaaatcgcagcgcgccaccctgtggtgtcgctccccccagcccgcgtaattcgccgtgctaacccctcgcgctcgattgttg

SEQ ID NO: 53603 - DNA, 806 bp, Homo Sapiens
  misc_feature (43)..(43): n is a, c, g, or t
taatctggtcccaggaattactggtttaactgaacatctccangaattatttaaggtgtcaaaatatataaccttcacattgaaagataattttaatttatgggcataataaaaatttgaatcattcaggtaattttcaaaaaatggagaccatttgtctttaactgaaggtatatgtttaagatcatagtctaccctagtatggtgctttgccacaaagtgatttctgaagaatggttctttttaagataatgacttcatatgatcattgtttcatgttacttgccacaaataactttaatttaggttgaaactggaactgtttgtttctcatattagctacttctctattaggagcacaagaaccatagttaaatgcaacatgagctactttagtcctgtttgtttaaatttgtgttgtccatgtattatgatttattaacttgttgatgcatgtaaattgggtgcattttgttgccatgtatgttaaatggtgaccaatgtttttacaaaggaattgaacaaaaaaagtatcttttaagaaatttggaatgtggtttgattttgaaatttgatttcttactaatctcagagggccttggtattattctgttactaaagcaaacaggattaatgaataacggattttgtttacaaggtggcagcaatgtcactgagatagtgaatggaaccaatttaccacctccctggatcttgacctgagatacaaccatcagcgtatgaatgaaagtgagccataaaaaggttatagactccctatccccctgtggttttcacggattttc

SEQ ID NO: 53604 - DNA, 660 bp, Homo Sapiens
  misc_feature (28)..(28): n is a, c, g, or t
  misc_feature (638)..(638): n is a, c, g, or t
ccggactgagagtgagattgcatttttntgggggtatgaccatcgtctacaagaacagcattgacctcttcctatacgtggtgggctcatcctacgagaatgagctgatgctcatgtctgttctcacctgcctgtttgagtctctgaaccacatgttaaggaagaacgtggagaagcgctggttgctggagaacatggacggagccttcttggtgctggacgagattgtggatggcggtgtgattctggagagtgacccccagcaagtgatccagaaggtgaattttagggcagatgatggcggcttgactgaacagagtgtggcccaggttcttcagtctgccaaggaacaaattaaatggtcgttattgaaatgaaggctgtggattcaaggctccctgccccccagatcatttccccaatcctggcaaaagcccaaagatcccagggtcaggagagacccctctgtatccccaggtccctcccagaactgactcctaaggtctccagccagggcttctgagatgcaaaggtttggcctcaggagagtcaccttttctcacggccctggccttaactcatatcttaggcattcctggccccagggccctaataaacctgcttttgtcttctgccanaaaaaaaaaaaaaaaaaatggc

SEQ ID NO: 53605 - DNA, 500 bp, Homo Sapiens
acaatttggggaatatctactatgtttattcttcaagaacccatcatcccattagatggagaaacctggagttatctcattgctatatgtgtctgttctactgcagcattcttaggagtttattatgccttggacaaattccatccagctttggttagcacagtacaacatttggagattgtggtagctatggtcttgcagcttctcgtgctgcacatatttcctagcatctatgatgtttttggaggggtaatcattatgattagtgtttttgtccttgctggctataaactttactggaggaatttaagaaggcaggactaccaggaaatactagactctcccattaaatgaatacctgattattattgtctcattaatgttcaggttattaatatgtatactgccattttaatgtttacctatgaatgtcttttgtgttatataactgacagagtgctataaaatatataatatatacaaatgcagaaaatttaaaa

SEQ ID NO: 53606 - DNA, 794 bp, Homo Sapiens
  misc_feature (633)..(633): n is a, c, g, or t
  misc_feature (635)..(690): n is a, c, g, or t
  misc_feature (692)..(695): n is a, c, g, or t
  misc_feature (697)..(702): n is a, c, g, or t
  misc_feature (704)..(705): n is a, c, g, or t
  misc_feature (707)..(707): n is a, c, g, or t
  misc_feature (709)..(709): n is a, c, g, or t
  misc_feature (714)..(714): n is a, c, g, or t
  misc_feature (717)..(717): n is a, c, g, or t
  misc_feature (743)..(745): n is a, c, g, or t
  misc_feature (751)..(759): n is a, c, g, or t
  misc_feature (761)..(764): n is a, c, g, or t
  misc_feature (777)..(777): n is a, c, g, or t
  misc_feature (793)..(793): n is a, c, g, or t
ggtatctgaggcagctacagattgccctgcaagatgagtttttggagataaatgaaataactggacacacactcacacaagtaacaccacagcagacctcggagtactgctaagtgtacctgtgtcaaatccgcacaggactcaatatagcaatttattcttgatgtatgcaattgcacattgtaattatattaacagagcacactaataatttgtatagattatatatattagatcttgggtatggtttttaccttctcccatggggaacttcttccttcctgatgtggaattgtacatttaaagcttggtcggtgacctttgcataccatcaacgagcacagctaagaacagagtgagagaggcccatggctgattttaccatgtgcccagattaatgtatatagttgattggaatgaggttttatgaatattcatgtttttgaaggcctttaatttctgtctgcatattagcttttaatgtgtgattttaagagagaatactttgacacctgtaaaaatcaaaatactactctttataagacatttcacaaatattcacttacattacaggctggaagtattttattcatatgtatatttataccaataaaatgattttacaagtggaanannnnnnnnnnnnnnnnnnnnnnnnnnnnnnnnnnnnnnnnnnnnnnnnnnnnnnnnannnnannnnnnannananaaaanaanaaaaaaaaaaaaaaaaaaaaaaaaannnaaaaannnnnnnnnannnnaaaaaaaaaaaanattttattaaaaatana

SEQ ID NO: 53607 - DNA, 997 bp, Homo Sapiens
  misc_feature (751)..(751): n is a, c, g, or t
  misc_feature (782)..(783): n is a, c, g, or t
ttcccgggatcgatagtgaagctctggaaagctttcactgtagttcagcccacgttcagaatcacctacatggcctaccattactttcgaagcaagggctgggtgcccaaagtgggactcaagtacgggacagatttactgctatatcggaaaggccctccattttaccatgcaagttattctgtcattatcgagctagttgatgaccattttgaaggctctctccgcaggcctctcagttggaagtccctggctgccttgagcagagtttccgttaatgtctctaaggaacttatgctgtgctatttgattaaaccctctactatgactgacaaggaaatggagtcaccagaatgtatgaaaaggattaaagttcaggaggtgattctgagtcgatgggtttcttcacgagagaggagtgaccaagacgatctttaacaattcaacctcaaatttctaatttcaccaacaactatttattgagggctaggtaaaaagttctttttgttgtaatcgtccattaattcataagttttaaagggcatggtgctcccagcaccagaaaactatcagtgtttttaaagataaattacacaagggaggagaaagatccctgtgctaggactgcagattctatacttgcgttggcctctaactctccaatccagagcctcctgcctctggcgtcagtcttttccctcatccactcactggggagattggactagaggagtcctgagaggacacttcncacaagagacatttattctctgattttaccnntgaaatggtagtagtttacatttatacagtacagtttatgaagcactttcatacgcaggcatctcttggtacctacatctaagctgttcccgaaagagtgttacagaacacaacaggtatggtacatattcggataagcatatcttcccctgcacttgttaattaaaaaatgagtgggtggaaaataatggtttgggaggacattaatgaaagg

SEQ ID NO: 53608 - DNA, 698 bp, Homo Sapiens
ttaaagtaaaaaattgtttagagatatgcaaagaaggaaatatatatgatgtcacacaagctccagtaagctatccactaagcaggtgcctgtgcaactctgatttatggcattaacatatcaaattgaaggaaggattctagctcattttccattcaagcatcttcccactgcctctcttccagctaaataatcagagaagcagggcagtatatccctggagatccctgacttttatctccataccttaaattgttggtagatcctttggatgtagagataaaaattcattatgatgctagaggcattggggggtccatgcgaaaggttcaaacagcctattacattaatgcacatgtggaaagaacaaaaattttcaagctaagtcttaagttcaaatctataatttttttctcttcagttctgttctttgtatgataatccttaaaaaagtagttgtcttcttttcacatacacctctttaaagctatcatcttataataagtggaattggatgcttattgtgtgcccagcacagtttaggaaaaaaataattggcactgtttgtccagttactggagatcttcattttgatgctttgtactttgttccaggtctttaattctcagtccatcttttcctatgattgtgtacttcacatgatacattccatataaagagctcttttaaatgaaaaa

SEQ ID NO: 53609 - DNA, 900 bp, Homo Sapiens
gaaacctcagtgctgagcccactacccgaagacacatggcggcctgtgaggaatttggggatggctgcttgagcctcctggccaggtgtgaggaggatgtggacctgttcagagaggttatctacacactcctgggactcatgatgaacctgtgtcttcaggctccctttgtctctgaggtttgggctgtggaggtgagcagaaggtgcctgtctttactaaacagccaggatggaggaatcctgacaagagctgctggtgttctgagccggaccctttcttcctctctgaaaattgttgaggaggccttgcgagcaggagtggtaaagaaaatgatgaaattcctgaagacaggaggtgagactgcatcacgttatgctataaagatactagctatctgcacgaatagttatcatgaagctcgggaagaagtaataagactggataaaaagttgagcgttatgatgaagctgctcagctcggaggatgaggttctggtgggcaacgctgccctctgccttggtaactgcatggaggtgcccaacgttgcgtcttccctgctaaagacggaccttttgcaggtcttgttaaagcttgcaggcagtgacacacagaagacggccgtgcaggtgaacgcaggcattgctctgggggagctgtgcacagctgagcccagatttgctgctcaactgagacagcttcatggcctagaaattctcaactctacgatgaaatacatcagtgattcttgagagagacccggtttgtgtgcatttgggggacccacagatggcccccgggtggtggttcctatggtaataaagaccttttgatgtattccccttcaaaaaaagagcaaacccaggcaacacacaccacaaaaaggggcgggccgcttta

SEQ ID NO: 53610 - DNA, 531 bp, Homo Sapiens
gtggtcattgcacggctgaacctgaatgaggtagaaaagcagtggcgactcaaccagctcaacaacgcagccaccatcttggtcttcttcactgtggtcatcaatgttttcattacagccttcggggcacataaaacagggttcctggctgccagggcctcaaggaatcctctctgaatgcagcctgggacccaggttctgggcctggaacttctgcctccttcctccgtgatctgccaggctcgtgggcacttcccacagcccaggagagcttctgaaaggacagtatagctgcccttgctccctacccacagcacctgagttaaaaagtgatttttttgttattggtctaagggacttccatcttggtctgaagtcctgagctcagacgcaggtactgccagccataccttcctggtagcatctgctggacctaagtaaggcatgtctgtctaaggccaagtctgcccggcttaaggatgctggttctgactctaccccactgcttccttctgctccaggcctcagttt

SEQ ID NO: 53611 - DNA, 409 bp, Homo Sapiens
  misc_feature (34)..(34): n is a, c, g, or t
ggtcgaccgcattctgattgatcatgtgaaggantcatttatgggccccgtccctaagagaaacagaagaggagtcagaaagaaagatgcctgtgttttcctctgtggggcccgtgcacttcctggagagatgctacaatgcaatatacagcgctccatccccactgggaaagctgctgtgatgagactagatgagccttcaacacactcagaaaatgcaacagcaatagggggcagacagctcctacctgtgtttctaggagcaaaagagagggaactaattgcccgtgaagacgccagtggaaaggatcagcctcattctaagcaaaaacatagtattagtgatactcttactgccttatcttaaccaaggactaataggatacctttccattaaacaccagtgact

SEQ ID NO: 53612 - DNA, 1090 bp, Homo Sapiens
tgagtgaggtgtggagtgggggaagttgattgggtctagaccaaagaactttgaggaacttgcccagagccctgcatgcatcagacctacagcagacattgcaggcctgaagaaagcaccttttctgctgccatgacaaccatgcaaggaatggaacaggccatgccaggggctggccctggtgtgccccagctgggaaacatggctgtcatacattcacatctgtggaaaggattgcmagagaagttcttgaagggagaacccaaagtccttggggttgtgcagattctgactgccctgatgagccttagcatgggaataacaatgatgtgtatggcatctaatacttatggaagtaaccctatttccgtgtatatcgggtacacaatttgggggtcagtaatgtttattatttcaggatccttgtcaattgcagcaggaattagaactacaaaaggcctggtccgaggtagtctaggaatgaatatcaccagctctgtactggctgcatcagggatcttaatcaacacatttagcttggcgttttattcattccatcacccttactgtaactactatggcaactcaaataattgtcatgggactatgtccatcttaatgggtctggatggcatggtgctcctcttaagtgtgctggaattctgcattgctgtgtccctctctgcctttggatgtaaagtgctctgttgtacccctggtggggttgtgttaattctgccatcacattctcacatggcagaaacagcatctcccacaccacttaatgaggtttgaggccaccaaaagatcaacagacaaatgctccagaaatctatgctgactgtgacacaagagcctcacatgagaaattaccagtatccaacttcgatactgatagacttgttgatattattattatatgtaatccaattatgaactgtgtgtgtatagagagataataaattcaaaattatgttctcatttttttccctggaactcaataactcatttcactggctctttatcgagagtactagaagttaaattaataaataatgcatttwatgagggacagcacttkwaagttttt

SEQ ID NO: 53613 - DNA, 748 bp, Homo Sapiens
tcacaagcggaagaggagatctcatagtagcacacaagagaacaggcattgtaaaccacatcaccagtttaaagaatctgattgatgttccattgggactgtttaccagattgctttctaaattagccagctggggttactttaaaaaacagtatgtaatttctttccttctccacgttaacagacttgttctgccaaacagcttatttgtagtcagtgcagacaaatcatgcttcatacgcattgttatataaggggaagggggaaggtttatgacaggatttcagagaccagagataattaataattaatgtacagtacactaaaaaaaaccatctgtaccccactattaataagtacaaaaaaccctaaggcttaacgtcatagtactggttattcataggataattatacgttgtatatatagaaaggaagtgatatgagtgatgaacagttcatttgtgctcatagttaactacgtaaacatgatactgagtccagttaaccaccaggccagtgcctgctttgatatttgtaccagatgtgtttggtggtcagcgtttaccatgatccagaatattctaatttttgaaggtcaaaaactttgagtgtttttataaaataacaaaaaactgaaaaatgcagaaaagtataaagatggtaatctctgtaggaaattagtccccattatttagctgtaaaattataattaaaaaaaaaaatctttggttctaaaaaaaaaaaaaaa

SEQ ID NO: 53614 - DNA, 522 bp, Homo Sapiens
tcatgcctggtcttactgcttcttcctcagggctcttgttctcccagaagcctcagggtaatgtgttggttagcacgtaactactaggattggggccctagggattatagccaggactctaatctgcctaccatgccatttaacaagagatcccactctccagctgccttgtgtccctagggtcctggccatgtgtttagtgtgctaaactttctcctttgttctcaggccttccaggtagtccccttcctggacttaagagtgcaaactcttctctgtggttctagccttgggcagaattatatcccagagaccacagagcaactgtcaagctgcttaccccctcacccagggctacagcctgtgcccagccctctaatttgtgcctctcttgtgttgggggtggtggggggttattcctttccctttcctgctctggcctccttgaaagttcagagtacccagtacaagtcagctttaaagtacagcttttagtgtttcctgggttgtttctctggggct

SEQ ID NO: 53615 - DNA, 634 bp, Homo Sapiens
tttttttttttttttttaaacaaactgctgtttttatatacctggaatctgttgttggcttcagagccagtggttaaagagcagggtcccaaggattgggagatctagtgtctgccctcctgccctgcaactcaattgggcctttttcggtgacctcatccaaggccatgatgtcaagggccatgtccccaagcagaggtggagaaggggacactgaggtgagcaaaagcaggaaggggcatccactgcgggtgactggaggccgggcaggaagcaagtcatcagagccgctcagctccgttcactctctgccttctgccccactactgtggggcagtggggccagagcccacctccccaacatgtgaagacagtgatgggcacgtgcccacacccccacttctctagccgtttgcagaggccgccacccagcaggggcctgaaaaggagcagcctcgtatttttctgtgaaatgttttaatgaaccatgttgttgctggttgtcctggcatcgcgcacactgtatgtacatactggcaacgatgtcaaatgtaatttattttaacatttttacaataaaacatgaggtggacaggccaaaaaaaaaaaaaaaaaaaaaaaaaaagcctcgtgc

SEQ ID NO: 53616 - DNA, 590 bp, Homo Sapiens
ggcacgagggaagtggagaattcagacaaatgctgaaatcgcatattaccttctagcatccatggtgttttgagtgaagctggggctgtacttacatatgatacataaatagctcccctattagtaaaagctaagccaaacaactgataattttcaaaatctatattttctcctgatttaatggtcatacttgaaacacaattatatccaactgatccatgttgtatatgccttattttcaaaagtctcatttaagctcattcatgccctttctcttatgtagtcttcttcgatacgaaaggagcttggaataaatatccattagagcttttaaaaacacaaaacaatgctttaatgtttcttttttcctggactgagtttggttgaccaacaaaatctctcaagccattttgttttgatcctaaaatatcaatggtggctctcgaaatttggtagagctgatatcaagaaagaatttcaaagatttttatatcttttcaaaatgtattttatagttgctttgcatacactaaataactttgtttatgtaaactgtcaatattatcatgtaataaaataaatttattttt

SEQ ID NO: 53617 - DNA, 669 bp, Homo Sapiens
cccttccggtcttcttttcaggttcaacttgcctcgaaccctgtgctggatgcctggtacggtgctcgtgactgggccttgaaccacctagatgataatgaagtttggatcaccaggaaagagtatgaagaaaagggaggagagtacctcaaggagcactgtgcttccaacatctatgtccccatccgcctgccgaagcaggcctcccgctcctcagatgcccaggcatccagcaagggctccgctgctggtggaggtggtgctggtgagcaggcatagcagaggccctccagagagactgccctgcacgccatgccttgggccacgttggcagtgtgacaggactgtgattgtgctagatgtacctgcccaagtctgctggtcacatttggcagcaaaatggatttctcctggggagaacaaagttaagggacactgagacctgcccttcagaattcggttcacttgggggcttctgtggtagagactaactggccttctgatgtctttgttcaactgtggccagctgtggcatcagcttcctggagcagtaaatgaagacagagtggaggacacaaatgtacaaaatgcacaagactgatttcttaccacattttagtctttcttgttttaaaaaaaattctttaaaatttaaaaaaaaaaaaaaag

SEQ ID NO: 53618 - DNA, 830 bp, Homo Sapiens
  misc_feature (692)..(692): n is a, c, g, or t
  misc_feature (724)..(724): n is a, c, g, or t
  misc_feature (757)..(758): n is a, c, g, or t
  misc_feature (768)..(768): n is a, c, g, or t
  misc_feature (830)..(830): n is a, c, g, or t
agaggtaatcctggcagttggttgtagaagaaggagaaatgaaggtatacagaagagaagtagaagaaaatgggattgttctggatcctttaaaagctacccatgcagttaaaggcgtcacaggacatgaagtctgcaattatttctggaatgttgacgttcgcaatgactgggaaacaactatagaaaactttcatgtggtggaaacattagctgataatgcaatcatcatttatcaaacacacaagagggtgtggcctgcttctcagcgagacgtattatatctttctgtcattcgaaagataccagccttgactgaaaatgaccctgaaacttggatagtttgtaatttttctgtggatcatgacagtgctcctctaaacaaccgatgtgtccgtgccaaaataaatgttgctatgatttgtcaaaccttggtaagcccaccagagggaaaccaggaaattagcagggacaacattctatgcaagattacatatgtagctaatgtgaaccctggaggatgggcaccagcctcagtgttaagggcagtggcaaagcgagagtatcctaaatttctaaaacgttttacttcttacgtccaagaaaaaactgcaggaaagcctattttgttctagtattaacagtgactgaagcaaggctgtgtgacattccatgttggagaaaaaaagaanaaaaaagctgaatgctctaagctggaacgtangatctatagccttgtctgtggcccagacttggnnctgtgtacanaatgacaaatattgcatagcaagctgacatctacactagctatctctgctgatctctgctcn

SEQ ID NO: 53619 - DNA, 939 bp, Homo Sapiens
atacattattagaaactgttaaggtctttcccgggacatttttttctgccattttcttttgcaattgtagttttatgtactgttaaagaattgtattgaattctttttagatcaaagtaaaaataggtcagcagagatttcagtttcccagggcttaaccagaaccgccacctcaatgcattgtcagtaggatacattattagaaactgttagggtctttcccaggacatttttttttctgtatcatgtctccccatcattgaagcgcaagttttcttgaattcaaatactcccaatgagcttgtatacttccaaacagctaaacttgatttccagttgtggatttcacacatataattgccgccttcttccctcctcttttttcccccctagttgaatcagcttgtctaacaagcccattttcatgccccagctgtgctgtgggttttccaagcctcatatttgaatattcaatgagtttaagatggatatgatttcaaaaaatagggccgggcgcggtggctcacgcctgtaatcccagcactttgggaggccgaagcaggcggatcacgaggtcaggaggtcgagatcatcctggctaacacagtgaaacccccatctctactaaaaatacaaaacattagccgggcgtggtggtggggtgcctgtagtcccagctactctggaggctgaggcaggagaatggggtgaacccgggaggcggagcttgcaatgaggccaagatcgcgccctgtactcagcctggtgacagagcgagaattcgtctcaaaacaaaaaaaaaaaaaaggggggggcttaaaaatcccggggggccctttcctccctttgttcacagggccccaggcggtatacaaaacgccgcgtaaaccgccggaaacgccgtttggaacctcggggcctgcacccccacgccgaatt

SEQ ID NO: 53620 - DNA, 928 bp, Homo Sapiens
  misc_feature (882)..(892): n is a, c, g, or t
  misc_feature (894)..(894): n is a, c, g, or t
  misc_feature (896)..(919): n is a, c, g, or t
cccgggatgggcacgttctctccgacgcccgtcttcgtgtctcctccctccctcgccttcctccttcctagctcctctcctccagggccagactgagcccaggttgatttcaggcggacaccaatagactccacagcagctccaggagcccagacaccggcggccagaagcaaggctaggagctgctgcagccatgtcggccctcagcctcctcattctgggcctgctcacggcagtgccacctgccagctgtcagcaaggcctggggaaccttcagccctggatgcagggccttatcgcggtggccgtgttcctggtcctcgttgcaatcgcctttgcagtcaaccacttctggtgccaggaggagccggagcctgcacacatgatcctgaccgtcggaaacaaggcagatggagtcctggtgggaacagatggaaggtactcttcgatggcggccagtttcaggtccagtgagcatgagaatgcctatgagaatgtgcccgaggaggaaggcaaggtccgcagcaccccgatgtaaccttctctgtggctccaaccccaagactcccaggcacatgggatggatgtccagtgctaccacccaagccccctccttctttgtgtggaatctgcaatagtgggctgactccctccagccccatgccggccctacccgcccttgaagtatagccagccaaggttggagctcagaccgtgtctaggttggggctcggctgtggccctggggtctcctgctcagctcagaagagccttctggagaggacagtcagctgagcacctcccatcctgctcacacggtcctccccataactatggaaatgcccctaatttctgtggaataaagacttttttgtatttctnnnnnnnnnnnanannnnnnnnnnnnnnnnnnnnnnnnaaaaaggcg

SEQ ID NO: 53621 - DNA, 607 bp, Homo Sapiens
cctaggagtgtgagactgatgttgctggacagaaagtgatccttagcccagtgtgtcagcgtccattgttactcatcactgcattgttgggcaattagtttgtaatttgttttaggcaatcactataaattataattatggacactgcatcagtatacataacatgaaggaataaaaaggatacagaattgtatatacatacttactgtaacacatctaaaaaaatgtatatgggtaaggacctgaaagatccatggaaaagttaacccagttgagatttttaaaaagttttacaaatacatataacacttatgtgctgggctttcttttaaatgctttccaagtgttaacttgtttagtcccctttactctgagataggtactgttaccccagttttacaaatggctaagctgaagcagagatgttgaaggatcctacctaaggggcacaactagtaagggagtagagctgagattggctccagagttcttgttttcagccaccattttatgctgcctctccagtgattttttttcccattttcttcagtgtttctatagcagagatttgataataaaaagaaaatcctaaacaatgagaaaaaaa

SEQ ID NO: 53622 - DNA, 717 bp, Homo Sapiens
  misc_feature (78)..(78): n is a, c, g, or t
gggatgcgggcctgcgctgcaccaacattgggggcctggagctctccaggaaagccaagctggcggccaccgcagggnccctccacattctggccggtatctgcgggatggtggccatctcctggtacgccttcaacatcacccgggacttcttcgaccccttgtaccccggaaccaagtacgagctgggccccgccctctacctggggtggagcgcctcactgatctccatcctgggtggcctctgcctctgctccgcctgctgctgcggctctgacgaggacccagccgccagcgcccggcggccctaccaggctccagtgtccgtgatgcccgtcgccacctcggaccaagaaggcgacagcagctttggcaaatacggcagaaacgcctacgtgtagcagctctggcccgtgggccccgctgtcttcccactgccccaaggagaggggacctggccggggcccattcccctatagtaacctcaggggccggccacgccccgctcccgtagccccgccccggccacggccccgtgtcttgcactctcatggcccctccaggccaagaactgctcttgggaagtcgcatatctcccctctgaggctggatccctcatcttctgaccctgggttctgggctgtgaaggggacggtgtccccgcacgtttgtattgtgtataaatacattcattaataaatgcatattgtgaccgtt

SEQ ID NO: 53623 - DNA, 490 bp, Homo Sapiens
  misc_feature (241)..(241): n is a, c, g, or t
  misc_feature (349)..(349): n is a, c, g, or t
  misc_feature (412)..(412): n is a, c, g, or t
tgtcactttgggtggggagggggagcatggtgggccatgctctgggcagctgttccaagacagagctgacccttccattaccaatggcctgtccctcaccaacaagccaactgccacagatgacccacttcataccacattcacatctttccacctgaaatggctaacaggtattaaatccttggttggtgtttaaagccaacccaagaacagggtgttaggtactgttttaagcacctanataggttagcataggggactgcaaatggtgttccgcaaagcaaatcctgtttttgaccatgaactaagaattttattttattttattttttattttttgtagaaatangatctcactatgttgcccaggctgttcttgaactcctggcctcaaatgatcttcccacttcancctcccaaagtgcagggattacaggcacaagccaccgtgcccagccaagaatttttatttttgcttttaaatagcaaa

SEQ ID NO: 53624 - DNA, 737 bp, Homo Sapiens
gtaaactgaagtgtttgacctctgttttcttctctcctctttcatctgtttctgattcgttggctggcagctgcacctgtggggggacctctcatgcagacttgcacatatgcagggagtattgcactgaagatctttgctggaccttcttctcttcagaagataattttcaaaagggagcaatgctgtgaatgcagcttgcttctctctacagattgagaagtccagcttcaaaagttacttgccacttaagcaaggaacttgtcaagagatcatggttcatgttactgaaaagactttaaggatttgtaaggttaatccatagattgctgagaaaaatggaaatatttttatttttacagattttgcacttctgaattcaggttaaaaactaacttgtatttagtctgcttagaggactgtgacttgaaaatttttatataccaatgagctttttggtagcgtccacaatgtttaaaatatttcataggcgagatccgtgttctccatttattaatgcattgtagaccaatttaactgctgtgtttcaggaaaattcttcctagtttaataagcaagctaaaagttttattttttatatttagtgcttaatcttttgcctcatgttatgtaaattagcctgcagatattttctctcaattctgtagactctcgcagataaacattcaaacagtgaacaacaataaataataacctaggtgttaaaaaaaaaaagg

SEQ ID NO: 53625 - DNA, 661 bp, Homo Sapiens
cgatggcggggcatggttgacgttcccaaacggtgtcaaagggctgccggatttcgcatccttctctgctaagctctaggaatcttccggccgctgcttcctgccgcctcactcagccaggtggagagcaccaatctgaaccagcaatgcctgcagcccagcccctcctctgaacactcagctattactgcgctttccctccccacggccccaactccagggcaggagcaactggacagtgggcctggcccgtggagctgccacgcaggtgcctgagggccaggtgccacgcaggtgtctgaggaccaggtgccacgcaggtggtgggggtacagacaagatgctgggatgtcccctgccccatggtcaagggtgtcctgcctgcctgggtccagggcctgagggagccacatggatcccgagacttgtgttctcttggctgaaaacactgaggtgctcccatctgtgcgtggcccatgagctgggatggtcctccagctgcccacaaggtccgcccctctgtctctgcaccacctgtttgcataaacacactttgctacaatcttgctagtgcgttttcttaaaagataatctatttactgtaaaaataaattggactttgcaaaagcttttagaaggaaaagaaagaggattaaagaga

SEQ ID NO: 53626 - DNA, 643 bp, Homo Sapiens
taaaactaggactaagaatgaagagttgttccagaaggaagatatgcccaaagacaaggaattccttggggagataaatgacagactgaacaaagatactcctcagcatcctaagtccaaagatattattgaaaatgagggcagatcagaatggcaacagagggaaagaagacgatataaatgtgatgaatgtgggaaaagtttcagtcatagctcagaccttagtaaacacaggagaactcacacgggagataagccctataaatgtgatgagtgtggaaaagccttcattcagcgctcacatctcattggacatcatagagtacacacgggagtaaaaccctataaatgtaaagaatgtgggaaagacttcagtgggcgcacaggtcttattcagcattagagaatccacacaggtgaaaaaccctatgaatgtgatgagtgtgtaaggcctttccgagtaagttcagctcttattagacatcaaagaattcatacctgaaataaactctactaatatagcagtaatatcaaaagttctttggacactcaggcctaactagttatcaaagaatctattttagaaaccttgagtttccttaatgtggtcaaagcttcagtcaacataaaacttctttggaca

SEQ ID NO: 53627 - DNA, 756 bp, Homo Sapiens
ggcaaaacttcgatgcaccttatgattctgcagatgactggtctgagcatattagctcttctgggaaaaagtactactacaattgtcgaacagaagtttcacaatgggaaaaaccaaaagagtggcttgaaagagaacagagacaaaaagaagcaaacaagatggcagtcaacagcttcccaaaagatagggattacagaagagaggtgatgcaagcaacagccactagtgggtttgccagtggaatggaagacaagcattccagtgatgccagtagtttgctcccacagaatattttgtctcaaacaagcagacacaatgacagagactacagactgccaagagcagagactcacagtagttctacgccagtacagcaccccatcaaaccagtggttcatccaactgctaccccaagcactgttccttctagtccatttacgctacagtctgatcaccagccaaagaaatcatttgatgctaatggagcatctactttatcaaaactgcctacacccacatcttctgtccctgcacagaaaacagaaagaaaagaatctacatcaggagacaaacccgtatcacattcttgcacaactccttccacgtcttctgcctctggactgaaccccacatctgcacctccaacatctgcttcagcggtccctgtttctcctgttccacagtcgccaatacctcccttacttcaggacccaaatcttcttagacaattgcttcctgctttgcaagccacgc

SEQ ID NO: 53628 - DNA, 406 bp, Homo Sapiens
gtcacttaagactggaattagaatgtttctggtatttctcatttttttccctggctatgatagaatctcatctaatcttgacatctctcctaggggaagaatatcacaggctaatagcgtggttgggggtgaagatgatagcagttattaaatcaggaatctcttttatgtatgtccttgttacattgaggttaagagacaaaatcattggcagtgcaatctctttccaggatttcgtttgctgtggcattggttatatcagagcactttaatctgaaggatgatactgtaacttgatttatctaattagcttttaattatctacagctattttattttatttaattctctcctacagtactgggaccactgtaaacttctcagatgacttgtatttttgtagtgc

SEQ ID NO: 53629 - DNA, 846 bp, Homo Sapiens
caaagggactcttgtgagaagactaatgagtccctcatccatgaagatgccaatgtactggcagattaacatacaacctatgttttgaacaaaaacaaccagcgatacgtaatcaaaatgtaattttcccctaataaaattatggatatgggcagtcatcaagtggctgccaaaagccattaagtggaaagctgattaagaagaacaacaaatttctaatggatttatcaaactgtcccaaatcctgataaatattaacatcacagaggaagaccagacattatgggcctggaagtactataggagtgcacacatcacccgtgacatggtcttgccaaataattaaacctgaatttgatcaggtctctggatcttatttgcaattcaaaagaaattttaaaaaaatcctactaacaccaccacaaatatgcaatcagcaatatccagaaaggggaaattcacaggacaaaaacctggttttcttttttggtttcttcaaccaaaaaagaaagaaattgcaaaggaccaaaaaaatgttggggaatctatacattataagggacttaacaactaaagggcaacatatagactttagatcctaatttgagcaaaatctaaaatcaattattaggcaatcagaaaaatttgaacacagactagatattcgaggatattaaggtactatatgtatcgaagattccatggttatgtccctacaagagtccatgccttttcagagaatacatactaaaagtactctgtacactacatgaccctgatctagaatcagtacactacgggtaggcgcgtgccgctggagaaacggcagagaacagacaccaacat

SEQ ID NO: 53630 - DNA, 708 bp, Homo Sapiens
ttttttttttacacattaaatgtaccacagtttaatagttttgtgatagttcaataactgtcatttgctttaatctacagaattttaaaaaatctaaataaaactattacgctggccagataaaatagtaacaaaaaaagtaaagagatataaaacaaactgtacactattacaaagtagtggttctctgtatgtctatgtgtatatatgtatatataaaactatacagatacatgtgtgtatataaacatacatatgtatatatacacacatatacttaattttaaagttaatcaaatggttatcaaaaattaatatacaacaaagattcctgggaaggtaatgcttatataaaataaggccatgtttctaaaaatccctcaaatcagtccaagataagatttttaatgaagaacataaaggttaaagaaattctttctctccaggttagctgtttttccctacttgttttcttcttgctttttcctgttgttgtccatattaaacttctttgtgctcttaaaggcccgccatcatgtgaagtggccacgccccttatggacaaagtcaagccaccaactcccaaatgtatcagtgcagctgcttcagaggaaatcactgaaaaataaagaaaaaccatccatgcatggctgcatccagtgtacctgtaatcctgaaaaaaagggcctaattccttccatgctgaaa

SEQ ID NO: 53631 - DNA, 664 bp, Homo Sapiens
aaatgcattgatttttaaatataaagcgaattctactgtgcttttaaatcaggtactagtttgtatgtatgtttaaagtatgtattgaccatgagatttcccagtgtttggtgcttaatgccgtttattttatttaagctaagaatgcatatgtaacccatgcacataaccagtagctactatactaatctggttgagcatgaactgatcaagatatcaaaacttatcaaaactagcctgaagctgatgaaactgttaacccactaattgccttaatcttaaagctgttttttaagcatacttaaataatgtatgaaagtatgtataaagtttgaaggataagttattagtgttctgcagagcaataatgcctttttctattcatcaaatcaaggtcaaaattcatcttttcaagattaaaaagctctcttaatggaaatatttaatttgcttatataaagcactatagccatgttttccaaaaagtataaaaatatacacttacctttcattcagtgaaatataggaagtgctgaattacaatgtgaagttaatgacttctgtttacaaatgagacactctaacgagttttcagtctctctgtatgcctttgctatttaggggtccaccccaagaaagccaaatacaacataaaccgtcctga

SEQ ID NO: 53632 - DNA, 680 bp, Homo Sapiens
cgaagagctcatccgtgagcaggcttggtgagacgctatgaccgttaatgaaatcaccatctgggcctcggagaagagctcggtcatgaagaaatgcaaggctgccaaccccgagatgcccctgtccttcacaataagccgaggattctgggtgctgctttcctactacctggggctgctgcccttcatcccaatccctgagaagttcttcttctgcttcctgcccaacatcatcaacaggacctatttcccattttcctgctcttgcctgaaccagttattggctgtggtttcgaaatggctgatcatgaggaagagtctgatccgacacttggaggagcgaggggtgcaggtggtcttttggtgccttaatgaagagtcggattttgaagcagccttcagcgtgggagccactggcgtcataacggattatcccacagccctgcggcactacctggacaaccatggaccagctgcccggacctcctaagtccagaagcctcgaggtctcctgtttctcttcctgaaaaataaaatatttgcctttcgatcaaaaaaaaaaaaaaaacccaaaaaaaaaaataatcacacacaaaactagataaaattcctgaaaaaatgaccacgcggaaccatacttacagatcctcgcacctccatagaccaaacaagccaggggc

SEQ ID NO: 53633 - DNA, 582 bp, Homo Sapiens
  misc_feature (572)..(572): n is a, c, g, or t
acaaccccatgatgcgggtctctaccagtgccagagcctccatggcagtgaggctgacaccctcaggaaggtcctggtggaggtgctggcagaccccctggatcaccgggatgctggagatctctggttccccggggagtctgagagcttcgaggatgcccatgtggagcacagcatctccaggagcctcttggaaggagaaatccccttcccacccacttccatccttctcctcctggcctgcatctttctcatcaagattctagcagccagcgccctctgggctgcagcctggcatggacagaagccagggacacatccacccagtgaactggactgtggccatgacccagggtatcagctccaaactctgccagggctgagagacacgtgaaggaagatgatgggaggaaaagcccaggagaagtcccaccagggaccagcccagcctgcatacttgccacttggccaccaggactccttgttctgctctggcaagagactactctgcctgaacactgcttctcctggaccctggaagcagggactggttgagggagtggggaggtggntaagaacacc

SEQ ID NO: 53634 - DNA, 694 bp, Homo Sapiens
ccaatctaaatgtaactattgaacatgattagctgtttcatccctagtagagtgacagaaggaaacatccatagacaggagtaataagacaccagctaaacttctaaaccatttttaaaggatgcgtgtgagctggcataacctacctactctttcctatgggcctctactgagagcatggaggtaatacatctaatacactgaagaccagggcaagagagctggaagaaatccctcttaagcactccaggccttcactgagtatgaggtgctggtctccaaaggcagagggcaaggcaaggcagagagggatctcctggggcacagacaactgacaaaagaaacacttggattgttgtataagaggagtgagctttgtaaataccacgttagctggcctgctgtggaacagaatgcctatgaatgacagtagtcaggtagtggatgaacactgatctgagagcctgtaaaagaaactctttggaatgataatgtcatctagacctttgatacgcaaagtgtgattcctggacagatgtattggctttacctggcagcttgttggaaatgtaaaacctcaggcctcaccccagacctactgaattatttatattaattaaaattaaataatttttatttcaacaaaatccctgggtaatttgtatgtacattaaattttgagatgcatgatctt

SEQ ID NO: 53635 - DNA, 941 bp, Homo Sapiens
aggatcaccagcatttctgagcttgggtttatgcacgtatttaacagtcacaagaagtcttatttacatgccaccaaccaacctcagaaacccataatgtcatctgccttcttggcttagagataacttttagctctctttcttctcaatgtctaatatcacctccctgttttcatgtcttccttacacttggtggaataagaaactttttgaagtagaggaaatacattgaggtaacatccttttctctgacagtcaagtagtccatcagaaattggcagtcacttcccagattgtaccagcaaatacacaaggaattctttctgttgtttcagttcatactagtcccttcccaatccatcagtaaagaccccatctgccttgtccatgccgtttcccaacagggatgtcacttgatatgagaatctcaaatctcaatgccttataagcattccttcctgtgtccattaagactctgataattgtctcccctccataggaatttctcccaggaaagaaatatatccccatctccgtttcatatcagaactagcgtcccgatattcccttcagagagattaaagaccagaaaaaaagtgagcctcttcatctgcacctgtaatagtctcagttcctatttcttccattgaccatatttatacctttcaggtactgaagatccatactaataatgtaataccgggcggaacaagaacacgcacacaacaccacaaacacaagaaaagcaacacagagaagcacgaacacaccaggccacagccacagcacccacgcccgccgaacagaaaaaaccgacaaacagaagacggagagagaagagacccacaacaagcaagacagaacaagacagcaaagaaagcagggcagacagcaggcaccgacacgagaagacggacagcacaagaaaagcaagccgcgta

SEQ ID NO: 53636 - DNA, 584 bp, Homo Sapiens
  misc_feature (465)..(465): n is a, c, g, or t
tgcttttttaagtaccttctacagtcttcctacctgaggggttcagaggctgctgactcacactgctaactctgttactgacaaaagcaaatcaataactctaaattctgggctgatataaagaaaaaaacaatattggatctggatttaatctgggtaaaatcagccttctgagaagggctaagaaacagttcaattaactgtataggtctttcattagaccgagacatcactagaaattctgggcactgctgtttgtggtatttgtctcagagtagcttatgactgttttggttctagctttagattttggattttcaccagtcatgtgttaatttacattagatagtaaagaatggctacactaagactgaattatcttattagtctggcaagcatataaagtatacttgtatgtaatgattgccaaggtaacagaattgctgacatctgtctaaaaagttntgactatccaatttagatgtgtaatttctatatactttatgctgtttatatttcagtcattacaccaagtccatttagagataatgggctttgttagcactttcaaaaaaaaaaaaaaa

SEQ ID NO: 53637 - DNA, 704 bp, Homo Sapiens
ggttttctttctcctctttgcttccattcatctctggtggctgctggtgatggagttcagacagtaaacacgtggctggataacacccatcatcctatgaagaatatagggagtacttgttctctgtgattcaacttttatgtctccagtaacattgcgcttatgaaggtacctgtatttgtatggactctgaataaagaagaattcattgtttagcaagtattagttcagcaaccactgagaaataagcactgaggaagattcagagacgtgtaaaacacagttcctactgcacaagtacccagcaggtggcccaggaggcagatacagcacacttgaccgcagaactgggctatccaagatgtttttcagtaaacagaaggcatttagctgaaatgatcagcccatgtagtgttggtcacttgggcctttcacctgccatggtacctttgttcccagctcctccaggtgccagccagcaggcttggtggtgacagcaactggaacgaaagttcagtgtggtttaatttttatacgttactcaagttgatttctcagaaaattgaaaacagaccttgtgctgaggacacgtcaataaaaattataccttcccctgccccaatgttcatgtgagtcacagcatgcagaggggctgtgcatccccctcattgaaggcacatttgatgaggctacgctgcagatgg

SEQ ID NO: 53638 - DNA, 571 bp, Homo Sapiens
  misc_feature (555)..(555): n is a, c, g, or t
caaatatcagtgtcttgcctgtgatgtggctatcagtgggaatgaagcacttagccaacacctccagtcaagcttgcacaaagagaaaacaatcaaacaagcaatgagaaatgccaaagagcatgttagattattacctcactcagtctgctcccctaatcctaacaccacatctacctcgcagtctgcagcttcttctaataacacctatcctcatctttcttgcttctccatgaagtcctggcctaatatccttttccaagcgtctgccaggagagctgcttctcccccttcttctcctccttccctttccttgccttcaacggttacctcaagtttgtgcagcacctcaggggttcaaacctcactacccacagaaagttgttcagatgagtctgacagtgagctgagccagaagctagaagacttagataattctttggaagtgaaggctaagcctgcttctggcctagatggtaatttcaatagcatccgaatggatatgttcagtgtgtaggagtgaagacaggatcccgtgcttaaaaaaataaaaantaaaaaaaaaaaaaaa

SEQ ID NO: 53639 - DNA, 895 bp, Homo Sapiens
  misc_feature (565)..(565): n is a, c, g, or t
ttatactaaagattacctagtgagcctctgtcagatatattgctttcaaaaagatggttatgtcaaaagaaaaaatatagctaagtatataaaggcataaaaaacttaagacaattgcatgaacttattctcaaatattttacatttaaagggaactacattaaaacatgagacttgtcttgcactggaaaattattatgactcataagatctcaaaagtgcaaacatattcaatgtgcagaccatgacaagtatcttcttccaatgatgtagatccatacatataaaatatctatgaaattcttttaaaaactattgtctaactacaaaaataatggcatatacatgcataaaccatctttaattagaaaatttagtaacagtcatatcaggcatcatcgatttttcttttcttagctcctgtattcttagaaccagattgctgaagcatgtttgcagccttcttctggaagttgcctgaatttttttcctccatctttttatcaccttgttcagaatgacaagtttgagacgattcagccctgaaagagttctgcgtggactntgtcacttgcatagtaatagcatgtgcctcattgttcagaagattaactctaggtcctattttcaaatacgaaatggtagcataagctgtaaaactgaagtctttttttaagaactgctgtattaggaagtgtgcaatatatcttctccagatcttcacgaggaaagtgggggagccaaaacacctggctaactctaagttttgctgcacccctttcccatccaagaatcaatcagtttcaatggaagtgagtttttcattcaggtccctctgccggccttaagaatcttgattagaaccctggcagacctctgtaaagggcctttcttt

SEQ ID NO: 53640 - DNA, 440 bp, Homo Sapiens
gtcactccccacccacgctgcacaccggccccagggccctgccgcctgggcctccacacccatccctgcacgtggcagctttgtctctgttgagaatggactctacgctcaggcaggggagaggcctcctcacactggtcccggcctcactcttttccctgaccctcgggggcccagggccatggaaggacccttaggagttcgatgagagagaccatgaggccactgggctttccccctcccaggcctcctgggtgtcatccccttactttaattcttgggcctccaataagtgtcccataggtgtctggccaggcccacctgctgcggatgtggtctgtgtgcgtgtgtgggcacaggtgtgagtgtgtgagtgacagtgaccccatttcagtcatttcctgctgcaactaagtgagcaacacagtttctctgatgtc

SEQ ID NO: 53641 - DNA, 647 bp, Homo Sapiens
tccttcctcagccgatgaggtggatgtgaaattggaccccaaggatttgcgaatagatacatttcgagccaaaggagcaggagggcagcatgttaataaaactgatagtgccgtcagacttgtccacatccccacagggctagtagtagaatgccaacaagaaagatcacagataaaaaataaagaaatagcctttcgtgtgttgagagctagactctaccagcagattattgagaaagacaagcgtcagcaacaaagtgctagaaaactgcaggtgggaacaagagcccagtcagagcgaattcggacatataatttcacccaggatagagtcagtgaccacaggatagcatatgaagttcgtgatattaaggaatttttatgtggtgggaagggcctggatcagctaattcagagactgcttcaatcagcagatgaagaagccattgctgaacttttggatgaacaccttaaatcagcaaaataaatactaacttattattatttatgattatataaatgaaatggacctatatcaagaggcagactgaagcttggaaatcattatgaatatttgtaaattacagctttaagaacacattacacataaatatatgttttgtaattaatcgaaaaaaaaaaaaaaa

SEQ ID NO: 53642 - DNA, 719 bp, Homo Sapiens
ggggatccctgtgttgtaattggtccctcctttcagctctctagtgagatgcccgtgtctgtgcgtgtgcgtgtgtgtttcatacagctagcattagatgggtgatgtttcttacttatcatccctaactattgcaacttgaccttaaaaagacaaaaccccacaaaactcttcctgccacgggcttgcagattgaagcactttcgatgttgggcgctggcgtttgtgttctgggcaccaccgtgaccctgcccagatggctataatattattttatacacaaaccttttttttcataaatgttataattttgtgtctgtctttataaactattataagtactatttttgttataattcaaaatagatatttagtataaagtttttgctgttaaatatttgttatttagtaaaatatgaattttgctctattgtaaacatggttcaaaatattaatatgtttttatcacagtcgttttaatattgaaaaagcacttgtgtgttttgttttgatatgaaactggtaccgtgtgagtgtttttgctgtcgtggttttaatctgtatataatattccatgttgcatattaaaaacatgaatgttgtgcattttgtgattttggaaatactcaatgggggctcttctataggctttcaagaataaacggtgggggaccccgcaaaaattcaaaccacaagattcaattaacaacacccctggt

SEQ ID NO: 53643 - DNA, 847 bp, Homo Sapiens
  misc_feature (699)..(699): n is a, c, g, or t
gggggtctgggggacctggggcccagctgcagctgcagcagccttggtctttctccagaaggatgtcaggcttgcccaggaaaggggctgtgctgtcgtcctggtgtcagaagaagtgaggatgcctgcaggctgggactgctgctggggacgtttgggttggaaggaaggcggcagtcagacttgtcctgtgccggcactgctggggaggcccctccttcctgcagagccgtcccctcatcactgggttgattactccttagagagctccccactgctcagctgctccattccctaatggtttgccctccaaacccttccaaagcctcccagggagagaacgggaccctggacagagtcttgagctggaagcgtagggctgagctgtgtgtgactatccttttgctatggatgtgttcaagcagatctgatgtcctcgcctgtctcagcagcgggacccctgtttcctctttgtcttgcccctggattgcctggaagcaaatttcacgcctttctttatgtcacctaaaaatattttcaaacccatctcctaaaaaaatcagtggtttttttaacctgaccgaagtaccctaatgtaataccccgcatggtaaaactcaccagcaaggttttttccttgggagaaattaagcccccaattacccaaatttgaaaaaaatcacaaattcccccagttcnacaaataaaaccccccaatacccatatacccccttggccgggcccgccctttggggcctctcagagaaaacttttcctaacacccttttctttttggggcgcgcgggggccccaacaagggtaaaagtgaaccttgggtcctataccg

SEQ ID NO: 53644 - DNA, 810 bp, Homo Sapiens
ctcattccaaagctccaaaaaaagacgttattaaaatgctggtgaatgataacaaggtgcttcgttatttggctgtactggaatcccccatcccagaagacaaagaccgcagatttgtcttctcttactttctagctaccgacatgatcagtatctttgagcctcctgttcgcaattctggtatcattgggggcaagtaccttggcaggactaaagttgttaaaccatactctacagtggacaaccctgtctactatggccccagtgacttcttcattggtgctgtgattgaagtgtttggtcaccggttcatcatccttgatacagacgagtatgttttgaaatacatggagagcaacgctgcccagtattcaccagaagcactcgcgtcaattcagaaccatgtccgaaagcgagaagcgcctgctccagaagcagaaagcaagcaaactgaaaaggatccaggcgtgcaggaattggaagcattaatagacacaattcagaagcaactgaaaaatcactcatgcaaagacaacattcgtgaggcatttcaaatttatgacaaggaagcttcaggatatgtggacagagacatgttctttaaaatctgtgaatcgcttaacgtcccagtggatgactccttggttaaggagttaatcaggatgtgctctcatggagaaggcaaaattaactactataactttgttcgtgctttctcaaactgacctgctgatgagaaaatggcagacaatttttgatactggaactatgctttgaaatacaccttacactcttcatagaggcatttac

SEQ ID NO: 53645 - DNA, 672 bp, Homo Sapiens
  misc_feature (584)..(584): n is a, c, g, or t
gggggaaaataaactcagtagagccacgacagggtggagagaagcagggaccattgtcttcctcaggagcgtgacagctgaccccacagaccatgcttgctggtacacactggtcccagacccaggcctgtcggacatcagcagtgtgctaaaaacgtgtaagatgtggtcactactcaccgtgtgtcctatctagttgacatgggtggagtcagctaaggggtgaatgttcatatgctcccaattcacgttgaagccctaatccccaaagggatggtattgggggtggggtcttggagaggtgattaggttatgagggtggagccctgatgaatgggattagtgctttataaggagagacaccagagagatgatctctctctccaccatgtgaggacacagtgagaagacagccgtctgcaggcccggaagagagccctcaccaggaaatgaaactgttggcaccttgagacttcccagcttccagaactgtaagaaataaatgtttgttgtttaagcctttcaggctacggctttctgttacagcagcctgaactgagagtccatgccgagtttttgaatanatgtgaattctgatggaaaaaaaaaaaaaaaaaaaaaaaaaaacttgtcggccgcccggccctcaaaagcttctagaccttcgttggc

SEQ ID NO: 53646 - DNA, 414 bp, Homo Sapiens
  misc_feature (278)..(278): n is a, c, g, or t
  misc_feature (399)..(399): n is a, c, g, or t
  misc_feature (406)..(406): n is a, c, g, or t
tcgttccttcccaatcctcattcctccctttcattcctctgatgtctctttttactccttctgttgactatcacaacatggatggcaatgatggtgtgacttcctcctcagatatctggctcttctctccaatatgttgcatcctgggctgtttggcatcccagctgcctaatttctactctgcatcttgggcattaagagcacatacacacacaaaaaacaaaccctcacatttttacatacctttacagtttacaaggatgcttccatatatttgnaccttacctaatcatccctattacactagggtggaggacattaggtatttcatttttcaggtggggcaggatggaggttcggaaatttaaaaccaggggtaaggcccggcaaaaaaacaanattaaanttaaaact

SEQ ID NO: 53647 - DNA, 653 bp, Homo Sapiens
gcccaaggggcggcccaagaagaactcaattccaacgagcgagcagcttactgagcaggagcgtgccaaggatgcagagaaaccggcggaggtgccgggcgagcccagcgacaggagccgcgaggactgagggcggtatacggtgcggggcctgggatgcccgcgccacccgcagccccctcactcggcggaaacccgcgagccggcccttccgcgtccaagaagtttacttcctaagcctttttattatgatcttgaatgcggacaattggggccaaacgaggaaggacacagacccaaaagccagacccaggtcccagcgcgcttctgggctctaacctgggagactcgcatccagcccggcggaagctacagtctctaccctgagctccgtggcgcagagcgctccacgcgtattcacgccccgctcctcgcctgcacccccaccccgtctggggcctgcctcccggccggggagcctccaggcacacacccgcttctggacgtcggggacccagcggttgggctcaggccacaaacggctgagattgccccggggcaacccgtcggctcggctggaggccgggtccccgatgtcgctgggccctacccctcttgcgaagacggtgactttttttccaataagatatttt

SEQ ID NO: 53648 - DNA, 500 bp, Homo Sapiens
ggatttcagtgatacatgctgcctcatcatcattacttcatacagaaataaaacttatatgaagagtaactttaaaaaggatcaggaaattcatgaagtaaaaaagtctcatgaaaatgatacaaagtgctgggattacaggcatgagccaccacgcctggcctcctcttgctacctctttatactcacactgtcctcccaatatgacccatggtagccactgatcccattaccctaattttgttatttcaagaatgctattaaaatggaatcgtaaggtacgcaagctttgagatagggctttgttcactcagcaaattacccttaagatctatccaagttgttaggtgtctaaatagttttaatttttgttactgagttagtattcttttaaatggatgcaccagggtttgtgtatccattcactgttgatggacatttgggttgtttccagtgttttgctgttataaataaagatgctgtgactatttgtgtacccg

SEQ ID NO: 53649 - DNA, 386 bp, Homo Sapiens
gcggccgccctggcgtgacccccgaggaaggggtcgaggagaagcttggtccacgccacctgctgtggggagcggagcgtcatcgtctcccgccccgtgcgtcagcgagaccttgggtcaacacgaccctgcgcacagccttgacccccgacagcgaggacctgacctcacagagggaggcgtccagggcggcccttgggtggccagtcccgcaggcagggcccggggaagcccggatcagacctccaggtctgatccgcccctcagtgggagcgggacagggacacagggcacctggacgcgcgggagagggggcagaccccgcgttaggggtggcagcagctgtcgcccggccacacctggtggtgtcattctgaaccctgttg

SEQ ID NO: 53650 - DNA, 657 bp, Homo Sapiens
cgtccgctgcgtgttaacatcaggtgaaattgctcaaataatggagcaaggtgacctctcagtgagagatgctgccgtcgacactctgtttggagacttgaaggaggacaaagtgacgcgtcatgatggagccagctcagacgggcacctggcacacatcttcagacatgcggccaaggagctgttcaacgaggatgtggaggaggtcacttaccgagccctgagaaacaaagacttccaagaggtcacccttgagaagaacggagaggtggtgttacgctttgctgcagcctatggctttcgaaacatccagaacatgatcctgaagcttaagaagggcaagttcccattccactttgtggaggtcctcgcctgtgctggaggatgcttaaatggcagaggccaagcccagactccagacggacatgcggataaggccctgctgcggcagatggaaggcatttacgctgacatccctgtgcggcgtccggagtccagtgcacacgtgcaggagctgtaccaggagtggctggaggggatcaactcccccaaggcccgagaggtgctgcataccacgtaccagagccaggagcgtggcacacacagcctggacatcaagtggtgaagtcaggccagggccttccagctgctcttggg

SEQ ID NO: 53651 - DNA, 619 bp, Homo Sapiens
  misc_feature (588)..(588): n is a, c, g, or t
  misc_feature (590)..(594): n is a, c, g, or t
  misc_feature (605)..(605): n is a, c, g, or t
gggtaataatgtaactttgttaataggtgcataaacactaatgcagtcaatttgaacaaaagaagtggcatacacaatataaatcatacgtcttcacacgttgcctatataatgagaagcagctctctgagggttctgaaatcaatgtggtccctcacttgcccactaaacaaagatggttgttcggggtttgggattgacactggaggcagatagttgcaaagttagtctaaggtttccctagctgtatttagcctctgactatattagtatacaaagaggtcatgtggttgagaccaggtgaatagtcactatcagtgtggagacaagcaccgcacacagacattttaggaaggaaaggaactacgaaatcgtgtgaaaatgtgttggaacccatcagtgatcgcatattcattgatgagggtttgcttgagatagatagaaaatggtggctcctttctgtcttatctcctattttcttcaatgcttacgccttgttcttctcaagagaaagttgtaactctctggtcttcatatgtccctgtgctccttttaaccaaataaagagttcttgtttctgaagcaaantnnnnncaacaacattnattaaaaaatgtcg

SEQ ID NO: 53652 - DNA, 893 bp, Homo Sapiens
atccattttgataatgtcagtgtggtatctctacaggatggaaaaaaagagccaagttcatgtacctgtttgaaggggcccaaactgtcagaaatagggacgattgcctggatgataacgctctgcgatgccctccacaatttcatcgatggcctggcgattggggcttcctgcaccttgtctctccttcagggactcagtacttccatagcaatcctatgtgaggagtttccccacgagttaggagactttgtgatcctactcaatgcagggatgagcactcgacaagccttgctattcaacttcctttctgcatgttcctgctatgttgggctagcttttggcattttggtgggcaacaatttcgctccaaatattatatttgcacttgctggaggcatgttcctctatatttctctggcagatatgtttccagagatgaatgatatgctgagagaaaaggtaactggaagaaaaaccgatttcaccttcttcatgattcagaatgctggaatgttaactggattcacagccattctactcattaccttgtatgcaggagaaatcgaattggagtcatagaaaatggaagatggtgttgttaataaaggcatttaatagataaaaacatctccaaaaaggattttgaagctgatcctatttagttaaaaagataattttgctttcaaccgtagtccagaaaactaattattggcatcagtctgtgaaatagtccattatttgttgttaaaaatgcttcaaaaggttttcagtgtcagtctgagatgcctggtatataggagcctttgggaaatacctatttttcagtgkkcsgggsgggkgggrtatcaccatgaagcsagaramatgcattctataatcatgtagacact

SEQ ID NO: 53653 - DNA, 592 bp, Homo Sapiens
gaagagccagcacttacggcagaaacttcttcagtctctgtttcttgataaagtgtattgggaaagtcaaggaggtagacaaggaattgaaaagcttatcgatgtaatagaacacagagccaaaattcttatcacctatatcaatgcacacggggtcaaagtattacctatgaatgaatgacaaaagaatcttctggctagggtgttagatatatttatgcatttttggttttgtttttaaatcaagcacatcaacctcaagcccgtttagcaatgaggcagtgtagatgaatacgtaaaataaatgactttaaccaagtagctataatgggacttagcactgtatgcatacttaaaaaggttttgaaaaacaaactacttgagaaatatttgtttatatttttctctaacatcatgctatgtgtcagtctgaacatctgacaacagaaatttcagttattattctagctaagttttgaaaacatttggcatgctgtttaatagaaaactggaaaccagagatactgactccattaataaaccatattttgtggccgtttgactgttctgaccaaatactaatggggacaat

SEQ ID NO: 53654 - DNA, 521 bp, Homo Sapiens
ttttactggagacagggtttcaccatgttggccaggctggtctcgaactcctgacctcgtgatccacctgtctcagcctcccaaagtactgggattacaggcgtgagccaccatgcctggccagaaatctatgttttcttagaacatgtggaagaaggaaaaagacaaaaaaggaagtctggattctgaggaccacgtctcacccagggtgacatcaggaatggtgctagcctctgcaacacgacacccagtctgaagagctctatacaggtactaagactagcaggggacaccaagactctgcacaaccagattgcttgtgcagagggccacaataagtgtatgttttatattttattgtattatttattcaaaaataaataatacactcacatgtttccacacccaaaagatatatagagtgaaaagtctccctccaatccttattctccacctgctcagttcctgtctaccctggcctagaggtaaccactattctcatccatacatccagcatttct

SEQ ID NO: 53655 - DNA, 580 bp, Homo Sapiens
  misc_feature (426)..(426): n is a, c, g, or t
  misc_feature (479)..(479): n is a, c, g, or t
tgtgaaacacattttccaagtcttgggctttctctggaggggaaggtggatgctggcgggtgacttgcagtgggcgcctggcagtgggtgtggactgtaactgacaggtggaaatgagtagggacactattgttccctccatgccagctttttttttgctggaaatgccccctccacacccctggtagctctgtgtcctgagaaatccagagtgtgggagacatcactgcatctgtccccccagcttctgtgaagggaagctgtggcctcttttgaatgtggggaacaactgaagactcaggggtcacccagaggtctggtggaaagcaacttcaggtttcatcttgctctattcctcaaaggtctggtctgtgggcctctgaggagaaaacaggtctagccaagacagggacaaaatggggaagnggggtgtgccaggcctgaactgagctaagcacctgccccgggctccacacttncatctttcttttgtcttcatttcacctctgtgtttaaagcactgtgtgacatagctccttagagatataacctattgtctgctcattgacacgtgtgtgtg

SEQ ID NO: 53656 - DNA, 681 bp, Homo Sapiens
actgttattcaagttaaagatgagaattccgagtctaaagtatttcagttactgcacaaaaacatgttattttatgtattcaaagcagaggatgctcattcggctcagaagtggatagaagcatttcaggaaggcacaatattgtagcagtattggtttcatctcttctgtgattccaaagaggtggaatttcatcagaatggagtaaatgcaattcaaaaattgtataaaaatgaacactgccaagataaagccaaccagacccttcatcaaagaaattgttttgttaggtataagcaatttttaaaaggtgtttgttttttcatttatgttatttattaaaattttgatgtttacttaatggtcagaattatttctgagacacactgaattctaaagtaccatttctttagagaccagaaaaactatcttaatactgtatactgtattaactattcgtgacatagttcacactgttttcttaccttacattgtaacaatcttactggtggaaagtctttgtaaggaaaaaaacacatagcaaggagcaaatttccacaaagtgcttggtttaggaattgtgattattataaaactgctgatgaaaaaaatgcatgtctttgaatcaataaacttgggtgaatatttgtatcttttagtggaaaaacatggccagcttct

SEQ ID NO: 53657 - DNA, 623 bp, Homo Sapiens
tcgacaaggcctgtctgctgtggcaggaccagtgtggccagcagggctcctgcttggtgtaccagaattcggccatgagccgctacatactcatcatggggctcctgtacaaggtgctgggcgtcctcttctttgccatagcctgcttcttatacaagcccctgtcggagtcttcagatggcctggaaacttgtctgcccagccagtcctcagcccctgacagtgccacagatagccagctccagagcagcgtctgaccaccgcccgcgcccacccggccacggcgggcactcagcatttcctgatgacagaacagtgccgttgggtgatgcaatcacacgggaacttctatttgacctgcaaccttctacttaacctgtggtttaaagtcggctgtgacctcctgtccccagagctgtacggccctgcagtgggtgggaggaacttgcataaatatatatttatggacacacagtttgcatcagaacgtgtttatagaatgtgttttatacccgatcgtgtgtggtgtgcgtgaggacaaactccgtcagggcttgtgaatcccactgggaaggcggtgggccttgaaccttaggaaagcttgtgtgtccctattaaaactt

SEQ ID NO: 53658 - DNA, 462 bp, Homo Sapiens
cgagcctacagctactacagtacttcctgacttctcccattcaaaccattctaggcctgcaatggggaacaggccctccccatcagtattggtaaagtgaccatgattcctacatagaggctctgctggtcaaatacttgactcccactcttgccactcctagctccagaagggctcagggccttccccacagatctaaggactgggctaccctgcctgtccactgaggtttctcctaaaacaagaggcttgactctggtctgggccctgtggccctctgggaagctttgtacctcttttgcaggatctgggggtggggagggacaagctagttccccaacctcctatgactgctttctatgctcacagccttttttccataagaaccttcttgaaacttctccccgcacatactcacggaaaggaaccaatggtgctatttcccctctctcctcctcaacc

SEQ ID NO: 53659 - DNA, 625 bp, Homo Sapiens
  misc_feature (624)..(624): n is a, c, g, or t
aacgacagggtaaactaagcgagtccataaagtggcgaggcaacattaaacatttctgtaacctattttgtgtcttggagttttgtcatcagcaaattatgaatgactgtcttccacaaaataaagtaaatatttctaaagcaaaaactgctgtgacggagctcccttctgcaaggacagatacaacaccagttataaccagtgtgatgtcattggcaaaaatacctgctaccttatctacagggaacactaacagtgttttaaaaggtgcagttactaaagaggcagcaaagatcattcaagatgaaagtacacaggaagatgctatgaaatttccatcttcccaatcttcccagccttccaggcttttaaagaacaaaggcatatcatgcaaacccgtcacacagaccaaggccacttcttgcaaaccacatacacagcacaaagaatgtcagacagaatgccctgttcgtgcagtttgctgagggtgttcccgctggaaggtatttgggctaccagccagatcccctgaactaccaaatagctgtgggctttctgggactgctggctggggttgctgctgggtcatggggcccaccggatgctgcaagagatcaggtaacng

SEQ ID NO: 53660 - DNA, 331 bp, Homo Sapiens
cgctggcattacaggcgtgagccactgcgcccggcctatttccccacctttcgtgtaaggtgctactgaacatgacagcttcttgtcatgacaggaaacttgcatcagttggatatccttttgagaaactgaattttgcaaagggccaaatttccccaaactgaacgggctcaggaaatgttcctttacactcagaacattctattttaagtatattatttattgttggcagttcctcagggatttcccttttctctgtattgggcagtgtagttgatgtaaaaccgttttgtggatggaaaatatttttattttattgctcttttagttt

SEQ ID NO: 53661 - DNA, 738 bp, Homo Sapiens
  misc_feature (474)..(474): n is a, c, g, or t
  misc_feature (476)..(476): n is a, c, g, or t
cgggmtccgctacctgaccttcttccacaactacaatatcctcatcgccacactgcgggtggccctgcccagcgtcatgcgcttctgctgctgcgtggctgtcatctacctgggctactgcttctgtggctggatcgtgctggggccctatcatgtgaagttccgctcactctccatggtgtctgagtgcctgtyctcgctcatcaatggggacgacatgtttgtgacgttcgccgccatgcaggcgcasagggccgcagcagcctggtgtggctcttctcccagctctacctttactccttcatcagcctcttcatctacatggtgctcagcctcttcatcgcgctcatcaccgagcgcctacgacaccatcaagcatcccggcggcgcaggcgcagaggagagcgagctgcaggcctacatcgcacagtgccaggacagccccacctccggcaagttccgccgcgggagcgntncggcctgcagccttctctgctgctgcggaagggacccctcggaggagcattcgctgctggtgaattgattcgacctgactgccgttggaccgtagccctggactgcagagacccccgcccccgaccccgcttatttatttgtagggtttgcttttaaggatcggctccctgtcgcgcccgaggagggcctggacctttcgtgtcggacccttgggggcggggagactgggtggggagggtgttgaataaaarggaaaataaa

SEQ ID NO: 53662 - DNA, 837 bp, Homo Sapiens
gcctaagatccagcccccatactgacagacggacagacagacatgcaaacaccagactgaagcacatgtaatatagaccgtgtatgtttacaatgttgtgtataaatgggacaactcctcgccctctacctgtcccctccccctttggttgtatgattttcttcttttttaagaacccctggaagcagcgcctccttcagggttggctgggagctcggcccatccacctcttggggtacctgcctctctctctcctgtggtgtcccttccctctcccatgtgctcggtgttcagtggtgtatatttcttctcccagacatggggcacacgccccaagggacatgatcctctccttagtcttagctcatggggctctttataaggagttggggggtagaggcaggaaatgggaaccgagctgaagcagaggctgagttagggggctagaggacagtgctcctggccacccagcctctgctgagaaccattcctgggattagagctgcctttcccaggcaaaaagtgtcgtctccccgacctcccgtgggccctgtggtgtgatgctgtgtctgtatattctatacaaaggtacttgtcctttccctttgtaaactacatttgacatggattaaaccagtataaacagttaaaaaaaacaaaaaaaaacttccgaagggcctcaaaatacacggagcgtgcggacaacacacggactcggcaaggcgaccaggggcccaaagaggatacatggaccacactatcccgggacaaaggcgacactcgcccgaccccctatagagagcccaatcaatcagaaagcccaggaaactcataata

SEQ ID NO: 53663 - DNA, 740 bp, Homo Sapiens
  misc_feature (665)..(665): n is a, c, g, or t
  misc_feature (674)..(674): n is a, c, g, or t
  misc_feature (691)..(691): n is a, c, g, or t
cacaacagcctgttcctgtgacacccaaagggtcacaattagtggccgaaagtttcttccgtaccccaggtggacccaccaagccaaccagctcatcctgcatggattttgagggtgctagtaaaacctccttaggaactctctttgtcccacagcgaaaactggaagtctcaacagaggatgtccattaatcaacagatgttggcttagtttaattttctaaagagttgtttaatagagaaaatgtacacagactgatttggagaacacattctctgaaaatactgtaaatacgttggggatttgttcaatgtgaaatcagatagttgttttcatacatatatatatatatacacacacacacacacacacacacatatatttgtataaagctaagtttagctttcaatcctacaaaataaaagtaaaatgttgaactctaagatatattaacttctagggggaaaaatccattattttagctatgcctatactattatgcaaagtaactgtattaaagtttacttccctctaagcaagtatgcttgacatgcctaacacagcattcccttaaacattttgcacaaagaaaatgctgtgtgatgtataatgttgtatttttaaataggggtatagctatattttttgtaatttctttaatctgntggtgcagngtatctttttgtaaagnttgcaacaatcctcaatcaagtctatggaaaaattatttataaaatgta

SEQ ID NO: 53664 - DNA, 540 bp, Homo Sapiens
  misc_feature (64)..(64): n is a, c, g, or t
  misc_feature (69)..(69): n is a, c, g, or t
  misc_feature (118)..(118): n is a, c, g, or t
  misc_feature (153)..(153): n is a, c, g, or t
  misc_feature (194)..(194): n is a, c, g, or t
aatttaaacagtatctgcacttcgtgtgcaagcctaagatgggcctcccctaccaggggcatgnctccngtgtgaatctccccgacagccacggggccatttcctcggtggtgtccgncgccagctccgcggtatattactgcaactatcctnacgtgtgacaggtccctgatccgccccagcctgcaggccanaagcagtgttacacacttcctggaggagctaaggaaatcctcagactcctgggtttttgttgttgctgttgttgttttttaaaaggtgtgttggcatataatttatggtaatttattttgtctgccacttgaacagtttgggggggtgaggtttcatttaaaatttgttcagagatttgtttcccatagttggattgtcaaaaccctatttccaagttcaagttaactagctttgaatgtgtcccaaaacagcttcctccatttcctgaaagtttattgatcaaagaaatgttgtcctgggtgtgttttttcaatcttctaaaaaataaaatctggaatcctaaaa

SEQ ID NO: 53665 - DNA, 569 bp, Homo Sapiens
gtggccgacagcgatgccgtggtgaaactagatgatggccatttaaacaactctttgagctctccagttcaagcggacgtgtacttcccacgactgatagttccattttgtgggcacattaaaggtggcatgagaccaggcaagaaggtgttagtgatgggcatcgtagacctcaacccagagagctttgcaatcagcttgacctgtggggactcagaagaccctcctgccgatgtggcaatcgaactcaaagctgtgttcacagatcggcagctactcagaaattcttgtatatctggggagaggggtgaagaacagtcagcaatcccttactttccattcattccagaccagccattcagggtggaaattctttgtgagcacccacgtttccgagtgtttgtggatggacaccaactttttgatttttaccatcgcattcaaacgttatctgcaattgacaccataaagataaatggagacctccagatcaccaagcttggctgatttaaaccacctctatttcaaataggatcacgtgccacaactatctgactgttggtctggaa

SEQ ID NO: 53666 - DNA, 638 bp, Homo Sapiens
ggaagttcagtttacattgttctttgaaatgagttcatcttttgtgttgaataattgtattctaagtaggagatgcctgtatttaacataatcatgctttctatataatcaaatatgtatttgttggaatactggtagaaataaccttcccttcctccactgtgcagtggaaaaaaaactcccgatttatactgtatataaattaggaaattatgttacatatttacatttttaaaaatataaaaatgacatattattttgaagtgattgtattatagtttctgaagcttatgactggctataaatataacaacatacccatgagaaaccagaccaaaattgaatatatatcatcactgtgaccttgaacttatagtcatttgggataaaacagagtgtgccttgaaatgataaagagtgccctgcaattttataactgtacattttattatgggtggtcctctcaaattggccccaaatccttgtcttcgaggttggtgaaataaaagtttaaaataaaagttgactggtattccctttagtatttccagaactattgctgtagaggcctcccttattttcagatttctcattttgattaaagttcacttccccacatagatgtaaaaaataaggtc

SEQ ID NO: 53667 - DNA, 582 bp, Homo Sapiens
  misc_feature (538)..(538): n is a, c, g, or t
gcggattcctccagttccaggagaagtgagtccctcgatgagccgggagtcccgcgttcccctcgcgtctcgggagtaggtgctagcaagggcgctaggaggccctgttcctcactgcggatggtgctgctgtccccagcctctctggggcatggccatcgggtgatgtccttctagccaaagatgctgctgctcctacctcactgcctgtcccagagcaggccagcccgcgtgggccgatggtggcggcagtggctactgctcctgcagggcatgtggtgatcctgccagggccaggtggggtggactgggcgtggtggtcctcagaggacaactcccagcctgacaaggagggctgcgtctccctccgagcctccgtattggcctcctctgtggctcacacccatggctgaatctctgcagggcacgtgaagtcacgggtaggggccaggcccctccaggccgtcactggcctgcacagtggtctgagctcttgggtggaagggacctcctcactggatggtggtggctcttgcanggagaacggtgactttgtattgtcatgtgtgcggttcctgttct

SEQ ID NO: 53668 - DNA, 559 bp, Homo Sapiens
ctcggcaccgtttcgttatgtattgctataaaagaatactggagactgggtattcataaagaaaagaggtttgcttagctcacagttctgcaggctgagaagtaatccagtctagcaacagtgagaacacaggtactactacgagagtagcacgaggccattcataaaggatcagacaagatatagaccgtattaccaatgataatagtattttgaatggaagatatgagggggaaaaaaaaacttatgtgtagtcaatcttttaagctttgactgttttgggaaggaagagtacctcttatcgaggtagaataaaacacatagggtcttgtttcttaaaatggttttaaatcttgaccttaagattgatttcaagtaccatactgtagtacagataagtggctcagttgagcacagctatattttaacatctctttgttcccctagtttagtaaattgacccagaggtgaccatttgtaaaaaaatttgaaaaaatttttcattgttttacttcaaaagtattgttttgttaaacccaacgtttagtttttcttgtga

SEQ ID NO: 53669 - DNA, 654 bp, Homo Sapiens
gtgttcctctacaacgcagcctttgcaggcctcaccacactctgtctggtgaagaccttcactgcagctgtgcgggcagagctgatccgggcctttgggctggacagactgccgctgcccgtctccggtttcccccaggcatctaggaagacccagcaccagtgacctccagctgggggtgggaaggaaaaaactggacactgccatctgctgcctaggcctggagggaagcccaaggctacttggacctcaagacctggaatctgagagggtgggtggcagaggggagcagagccatctgcactattgcataatctgagccagagtttgggaccaggacctcctgcttttccatacttaactgtggcctcagcatggggtagggctgggtgactgggtctagcccctgatcccaaatctgtttacacatcaatctgcctcactgctgttctgggccatccccatagccatgtttacatgatttgatgtgcaatagggtggggtaggggcagggaaaggactgggccagggcaggctcgggagatagattgtctcccttgcctctggcccagcagagcctaagcactgtgctatcctggaggggctttggaccacctgaaagaccaaggggatagggaggaggaggcttcagcc

SEQ ID NO: 53670 - DNA, 766 bp, Homo Sapiens
caagactcagccatagaagatgccgccccaccttctacttgggtagctgggctgggacgctgggacaggaccccgtcctccttcatgactcccactgctgcctctcctgggcatggctgttagctgttctgccttctgggtgagctggcactcttctccctgagaccaaagatttgacctgtcggtcttgatgtcaaggtccccaaagaccaggttaagtgacgacacctgtctgttcctgccctgttgcttccagccactgtgatgtttgaaatatgtgatagtacctggttgtgaaaaaaagacaatgaactgctagtgacattcctcaatgacctctcccaaacctcccatgatgccttacccttgctgtcatgacaaccctctggcttcctaagacccatctgcctatcgaaatatgtgcaagtcagtgagacgaagtatagagaacaggtggcccagatccagggacccaacttctggccccttggtctgtcacctcctcgctgtgtgatcttgagaaagctccttccactcacccaccccacttcccagtctgttgggatcagaggaactttgaggtgtctgccggctaacattgtgtcattcctggagtccacagtacacgtcccctggcctcaacaggcacagctctcacaaagctcttcaagcatggaagtgggagtcgtgttgtactttcatggcactctgatgcctgctgtctcagtgttggttattatgcaaacaagtaatgtttgaatatctt

SEQ ID NO: 53671 - DNA, 871 bp, Homo Sapiens
ggagcctgcgcctgtgggattcccacgtatgcggagtgagcctgctcagccaccgctgggcactcacggcggcgcactgctttgaaactgaccttagtgatccctccgggtggatggtccagtttggccagctgacttccatgccatccttctggagcctgcaggcctactacacccgttacttcgtatcgaatatctatctgagccctcgctacctggggaattcaccctatgacattgccttggtgaagctgtctgcacctgtcacctacactaaacacatccagcccatctgtctccaggcctccacatttgagtttgagaaccggacagactgctgggtgactggctgggggtacatcaaagaggatgaggcactgccatctccccacaccctccaggaagttcaggtcgccatcataaacaactctatgtgcaaccacctcttcctcaagtacagtttccgcaaggacatctttggagacatggtttgtgctggcaatgcccaaggcgggaaggatgcctgcttcggtgactcaggtggacccttggcctgtaacaagaatggactgtggtatcagattggcagtcgtgagctggggagtgggctgtggtcggcccaatcggcccggtgtctacaccaatatcagccaccactttgagtggatccagaagctgatggcccagagtggcatgtcccagccagacccctcctggccgtactctttttccctcttctctgggctctcccactcctggggccggtctgagcctaactgagcccatgcagcctggggccactgcaagtccaggcctggttctcttctgacttgtaggtaataaaaacattcagttgacaacaaaaaaaaaa

SEQ ID NO: 53672 - DNA, 729 bp, Homo Sapiens
  misc_feature (16)..(16): n is a, c, g, or t
ctcctaacaccatggnattcaaagtgctcagggaatttgcctctccttgccccattcctggccagtttcacaatctagctcgacagagcatgaggcccctgcctcttctgtcattgttcaaaggtgggaagagagcctggaaaagaaccaggcctggaaaagaaccagaaggaggctgggcagaaccagaacaacctgcacttctgccaaggccagggccagcaggacggcaggactctagggaggggtgtggcctgcagctcattcccagccagggcaactgcctgacgttgcacgatttcagcttcattcctctgatagaacaaagcgaaatgcaggtccaccagggagggagacacacaagccttttctgcaggcaggagtttcagaccctatcctgagaatggggtttgaaaggaaggtgagggctgtggcccctggacgggtacaataacacactgtactgatgtcacaactttgcaagctctgccttgggttcagcccatctgggctcaaattccagcctcaccactcacaagctgtgtgacttcaaacaaatgaaatcagtgcccagaacctcggtttcctcatctgtaatgtggggatcataacacctacctcatggagttgtggtgaagatgaaatgaagtcatgtctttaaagtgcttaatagtgcctggtacatgggcagtgcccaataaacggtagctatttaaaaaaaaaaaaaaa

SEQ ID NO: 53673 - DNA, 763 bp, Homo Sapiens
cgcgcggcggcggcggttcctctcccactccccccagccctggctccgggggaccccgcgatgccggtccgcaccgagtgtcccccgccggccggtgcctccgctgcctccgcggcctcactcatcccgccgccgcccatcaacacccagcagcccggcgtggccaccagcctgctctacagcggctccaagttccgcggccaccagaagagcaaggggaactcgtacgacgtagaggtggtgctgcagcacgtggacacgggaaactcttacctttgtgggtacttgaagattaaaggccttactgaggagtatccaacccttacaaccttcttcgaaggagaaataatcagcaaaaaacaccctttcttaactcgcaagtgggatgcagatgaagatgttgatcggaaacactggggcaagtttctggctttttatcagtatgcaaaatcatttaactcagatgactttgattatgaagagctgaagaatggagactacgtcttcatgaggtggaaggaacagtttctggtcccagatcacacgatcaaagacatcagtggtgcttcttttgccgggttctactacatctgctttcagaagtcagcagcctccatagagggctactactaccataggagttcagaatggtatcagtccctcaatctaacccatgttcctgaacacagtgcacccatctatgaattccggtgacaacggttcagaacaacaaccaaataaaactgaacttggcaaaaaagaa

SEQ ID NO: 53674 - DNA, 592 bp, Homo Sapiens
  misc_feature (540)..(541): n is a, c, g, or t
  misc_feature (543)..(543): n is a, c, g, or t
  misc_feature (546)..(548): n is a, c, g, or t
ccttgcagaacttctacttgcctgcctccctgcctctggccatggcctgccggtgcctcagcttccttctgatggggaccttcctgtcagtttcccagacagtcctggcccagctggatgcactgctggtcttcccaggccaagtggctcaactctcctgcacgctcagcccccagcacgtcaccatcagggactacggtgtgtcctggtaccagcagcgggcaggcagtgcccctcgatatctcctctactaccgctcggaggaggatcaccaccggcctgctgacatccccgatcgattctcggcagccaaggatgaggcccacaatgcctgtgtcctcaccattagtcccgtgcagcctgaagacgacgcggattactactgctctgttggctacggctttagtccctaggggtggggtgtgagatgggtgcctcccctctgcctcccatttctgcccctgaccttgggtcccttttaaactttctctgagccttgcttcccctctgtaaaatgggttaataatattcaacatgtcnncnacnnnaaaaaaaaaaaaaaaaaaaaaaaaaaaaaaaaaaaaaaaaaaag

SEQ ID NO: 53675 - DNA, 895 bp, Homo Sapiens
  misc_feature (650)..(650): n is a, c, g, or t
gcctctagaactgtgaaacaatggatttctgtggtgtaagcaactcaatctatagtagtttgttactattttgttatggcaaccaaagatgactaagccagacaggttatgtcactcgccaagtgtcttggtctgtttgtgctgctataacaaaataccttagactgggtaatttacaaacaacagagatgtatccagagatccacagttctggaggctgagaagtctaaaatcaaggcaccagcagattccacatctcgtgaaggctcactctctgcttcacagatggcactgtcttgctgtgttctcacatggcagaaggggcaaacaagcccccctgggcctcttttataaaggcactaactctatgcctaaaggcagggccctcatgactctatcacctaccaaaaggctccacttctttatactattggaggggtagaaggaacttcctttctagaccttgaaggtttaagaatttgaatctataaaacaagctgacaatagacagattaacaggagaaaaagcatatacattttttaatgtgggccagatggcagaagcttaaataacaccccaagctacaggaagtgaggcctctgatggggaggtagtgacacaggctgtgggagggggtagggggaggaantctgtggtgagcaaagtttgccttattacactgataaagtggtaattcccctaataaaccttggaatcccctggggttggggattttgaaaacagccctgtgccaacatgggcaaaaagcccggtcactgtgataaatgaggaaacttggcccctcggtttcggtggccagggccacttggtgggtccgctacccccttcggagaggcactaggggccaggaggaatttaccgtctgcaccccca

SEQ ID NO: 53676 - DNA, 539 bp, Homo Sapiens
tgaaggtgaaattcgatttaatttaatggccattgtgtctgacagaaaaatgatatatgagcagaagatagcagagttacaaagacaacttgcagaggaacccatggatacagatcaaggtaatagtatgttaagtgctattcagtcagaagttgccaaaaatcagatgcttattgaagaagaagtacagaaattaaaaagatacaagattgagaatatcagaaggaagcataattatctgcctttcattatggaattgttaaagactttagcagaacaccagcagttaataccactagtagaaaagggaaaataggataaaagaacaaggtgtgagaaggaatagaaggaaacaaacaggaaagatatggctgcaccatgcagtgctactatatgctgagattctacaggatgagatttttgaatagctgaggcagttgcctataatctgtgatgacataaaagtatttgacctaaaatctttttatttgcaaaataataaataaaaagtgattctccctcggaaaaaaaaaaaaaaa

SEQ ID NO: 53677 - DNA, 719 bp, Homo Sapiens
caaaaatccattttaatgttttatcaagttgagatgtctcacatgagtagttagtgctgagaatcagacacaggcacatttgggagcatggcgtggcaagaagctttgctttttcctgttcctattgtactcaaacttgtttctacatttttcattgatttctcttcgtactagcactagggcgcaagagaagccgtactggaatattacactactcagcacaagacaggtttaatctttttcttgggggacaagattggaaaattgaggtctgagcagacctgaagagaggcatccagcaactctgagattaaattcatcattgatcaattcgttattgtttggaattgacgtttagctgtgttcctcactcagatacgtgcatgatagctgcttgctaatttggtcttagctcacatttcacctagaatgtatggtctccctctcccctgcaaaatatcccactgttgctaatctgtctgcctcataatttccatgagattgagcatcttgtttgttttgtcaccactatataacagcatgttggaaacaaagcagtaataaagctagaaaaaccaagcgaatacactggattaaaaaaaatactgtttcctagaattaaagaaataaatgaggccgggcgcagtggtgcctgtaatcccagcagtttgggaggctgaggctagtggatcatgtggccgagatcgcgtcactgcact

SEQ ID NO: 53678 - DNA, 393 bp, Homo Sapiens
ctttgtttttaaattatgctttctattttgagatcattgcaaactcaacacaattgtaagtaatgatacagagggatcttgtgtacccttcacccagcctcccccaatggcaacatcttgcaaaactacaatgtagtctcataaccaggatattgacattgatacagtgaagatacaggacattctcatcaccacagggatccccaggatgcccacttccctccacccccacaccccagccgtgtccctaacccctggcaaccaggaatccactctccatttctataatgttgtcatttcaagaatgttattcaatggaatcatatagtatgtaacctgttttgagcttaaaaaaaaagtatacatgactttaatgaggaaaataaaaatgaa

SEQ ID NO: 53679 - DNA, 768 bp, Homo Sapiens
  misc_feature (718)..(718): n is a, c, g, or t
  misc_feature (729)..(729): n is a, c, g, or t
cttgtgactgccccttgacacacgccctcctcaaatcctaggggaggccattcccatgagactgcctgtcactggaggatggcctgctcttgaggtatccaggcagcaccactgatggctcctctgctcccatagtgggttcccagtttccaagtcacctaggccttgggcagtgcctcctcctgggcctgggtctggaagttggcaggaacagacacactccatgtttgtcccacactcactcactttcctaggagcccacttctcatccaacttttcccttctcagttcctctctcgaaagtcttaattctgtgtcagtaagtctttaacacgtagcagtgtccctgagaacacagacaatgaccactaccctgggtgtgatatcacaggaggccagagagaggcaaaggctcaggccaagagccaacgctgtgggaggccggtcggcagccactccctccagggcgcacctgcaggtctgccatccacggccttttctggcaagagaagggcccaggaaggatgctctcataaggcccaggaaggatgctctcataagcaccttggtcatggattagcccctcctggaaaatggtgttgggtttggtctccagctccaatacttattaaggctgttgctgccagtcaaggccacccaggagtctgaaggctgggagctcttgggggctggggctggtcctcccatcttaaccttngggcctggatnccaaggcctcaaaccagcccaacccgagcttttggacag

SEQ ID NO: 53680 - DNA, 838 bp, Homo Sapiens
atttcccagaatacacaggaccgaaacaggatgtcagagctgccagagactttatcctgaagctttaccaagatcagaatcctgacaaagagaaagtcatctactctcacttcacatgtgctacagatacagacaatattcgctttgtgtttgctgctgtcaaagacacaattctacagctaaacctaagggaattcaaccttgtctaaaagctgctgcccactcctcccctataacagaagatgtgatttgcaaactccttgttttatttgcaagtgcttctgacatcaccagagccagccccatgccaggaactaaggatgtcatgtagatcgtggggacagagatgggtgatggaacttggaagatatttgagtttaccaacatactttaaaagtccttacatcccaaattgtgtttataattattttcttgacttttggctataagatttcgtgtaatttttgaatttggtgttttctagaatttttaaaagccactttgatttagttttaaatatgtttaaaaatagcgattaaaattatgtaagcaaggagcctgttagtttatagatcatgccttcaaaacctctagagttaatttgggtgacttttttaaaaatacgaatgttaatgggtttgaagctttttattaaccttgtaatttagagacatttttaatttgtgtttctcacctcatgctgaagggtgactccttttaacatgccaacaaagattttttttaaacacttggttctttggtgtgtaactttctaagccaaattacgggtattttagtatattctattagcttgccaaagtttgatcaccaagaagct

SEQ ID NO: 53681 - DNA, 620 bp, Homo Sapiens
ggggtcgatggcaagcggccgctggtgaagagagagctggcggccacacctaggggtcagaaggggtgtcaggcagccccagtgggtcaggctgcttgggcaaggagtggggagtagggccaagagagtaggctgcgagtagaacctggctgggactcactgaggcctgtctcgttgcgtttgtagtgctccccgaaggacaccagcccaatggagatggtctgcaggaatggccggatggcaggcgtgaactgtggagagacgcggctgcgtcacccaccgctcaagagagggatggggacagggcaggagcgaggcacagggatgtgcggggaagacacattcattcagtaaacgtttcatgagctcctactgtgtgctgggcatagctctcggctggttcacggacctgatgttctcaaagggaaaacaaatgatcagcagataagcaaagccacgcgcagtatcatgacaaggaatgacgaatggtttggaaaaaaaaaagggcagtaggtggggagggcaccagtgatgactaggggtcaggctacttagcgggtctcggaggagagatctgactgaagcgagggagggttgtccctgcacagggacagagagca

SEQ ID NO: 53682 - DNA, 758 bp, Homo Sapiens
ggtgaagacttcgagaagaggattgttacccgtggaaacaaaactagagactttgattggtagcatccacgccctccctgggctcataagccagaccatcaggcagcagcagagagatttcattgaggctcagatggagagctacgacaagcacgtcacttacaatgctgagcggtcccggtcctcgtccaggaggcggcggtcctcttccacagcaccaccaacttcatcagagagtagctagaagagaataagttaaccacaaaataagactttttgccatcatatggtcaatattttagcttttattgtaaagcccctatggttctaatcagcgttatccgggttctgatgtcagaatcctgggaacctgaacactaagttttaggccaaaatgagtgaaaactctttttttttctttcagatgcacagggaatgcacctattattgctatatagattgttcctcctgtaatttcactaactttttattcatgcacttcaaacaaactttactactacattatatgatatataataaaaaaaagttaaagtttctggcacagtaacacaacacacacacaacacacacccgggcgcaccaaaagcccgggcggcggaaaaacaccggacacacgaaaaggcacacagggagacatacacgagaaaccactgaaccacaaaaccctggcaccaaaggcgccaagactgacccgagcgaaccacaaaaggaaaagcggacacaacacagaaaacgcg

SEQ ID NO: 53683 - DNA, 602 bp, Homo Sapiens
  misc_feature (360)..(360): n is a, c, g, or t
gggcatttcagtcctttcccccacctcagcgtctatggacaatcggggacttcctaagctctgacagtctaatatttccatggaatgtgatttggagtgttccccacaccctggacctctccctagtgattatctagccagctacaccttactcagagcccggctgctctagcaggaatgttgcacagaaacatacatttgcggtttggccacaggtcgcataggtggcttctcccacgggtagtgtcagttgcttcactttaaaaagtcacttcagccccacaacctcactcccaaaagaaaggtttgagagcgctcattttttttctaagtcaccttttataagcctccctataaaantctcacctttcaagtcctaaattagaattgcaagtcatcttttctgaaaactaatgctatcaaagtcctcctttgaaaattaagggtctctttaaaattagaatttataaatggcattcagtgatagtgtacaccaaaattaaaagaccttgactggtgggctttttacgtgtaaggaagaggaagtttaagaagtaggactctgcttgtttcagtagcccatgtactaaaataggaacaat

SEQ ID NO: 53684 - DNA, 692 bp, Homo Sapiens
  misc_feature (529)..(529): n is a, c, g, or t
gcttcgtgctgggcgtctgcttcggcctgctgctcaccctctgcctgctcgtcatcagcatctcgtgggcgccccgcccgcggccccggggcccggctcagcgccgggacccccgcagcagcaccctggagcccgaggacgacgacgaggacgaggaggacacggtgactcggctgggccccgacgacacgctgccgggccccgagctgtccgcagagccggacgggcccctcaacgtcaacgtcttcacgtcggcggaggagctggagcgggcgcagcggctggaggagcgcgaacggatcctgcgggagatctggcgcaccgggcagccggacctgctgggcacaggcacgctggggcccagccccacggccacgggcaccctgggccgcatgcactattactgatgggccctggctcccgctgcaaggcgctcggggtaccggacctgcacatgagctcagagctaccccacaccttcggactgcctcggcccccacagctcccaggtgctactgggcgtggaccngcaccccctgagaggctcccttccccagtcctgccagaagaccccggggggcggggagggggcagcatgcagggtccccactccctctctggggtcgatgaagaggtgaagttgaccaaatgaaagaaaggctgattctcagtgaaaaaaaaaaaaaaaaact

SEQ ID NO: 53685 - DNA, 370 bp, Homo Sapiens
ataacattaaacccagctgatttataaatgaagcaaaagaacaaaactcattcaggataattggttattctaaaatacagtcatttctaaaattatgaagtgttcaggacctttgggagtgaaagaatttgctaaagaaggatcagtgaaaaaaaggaatgatgggtgaagagctgtggagaaggaagagaagaaacagcacaaggaaggaagaatataaaatcagatgtgggaatccaggggaaagtgcaaacgaagcaagattgagaaaattctcaagtttttataaacagttctcacactctgccagttccttggaggtagactttttttttaacttccaactacagtagtgaaaaaaaaaaaaaaa

SEQ ID NO: 53686 - DNA, 755 bp, Homo Sapiens
caaatagaaaaatatttaaatgatctgcctttatacaaagtgatattctctacctttgataatttacctgcttaaatgtttttatctgcactgcaaagtactgtatccaaagtaaaatttcctcatccaatatctttcaaactgttttgttaactaatgccatatatttgtaagtatctgcacacttgatacagcaacgttagatggttttgatggtaaaccctaaaggaggactccaagagtgtgtatttatttatagttttatcagagatgacaattatttgaatgccaattatatggattcctttcattttttgctggaggatgggagaagaaaccaaagtttatagaccttcacattgagaaagcttcagttttgaacttcagctatcagattcaaaaacaacagaaagaaccaagacattcttaagatgcctgtactttcagctgggtataaattcatgagttcaaagattgaaacctgaccaatttgctttatttcatggaagaagtgatctacaaaggtgtttgtgccatttggaaaacagcgtgcatgtgttcaagccttagattggcgatgtcgtattttcctcacgtgtggcaatgccaaaggctttactttacctgtgagtacacactatatgaattatttccaacgtacatttaatcaataagggtcacaaattcccaaatcaatctctggaataaatagagaggtaattaaattgctggagccaactaaaaaaaaaaaaaaa

SEQ ID NO: 53687 - DNA, 620 bp, Homo Sapiens
aggtaatgaattgtctgtggtatcatgtcagcagagtctccaagccccacgaaccctgaggagtggagtcatacgcgaaggccatatggccatcgtgtcagcagagagagtctctgtacacagccccgtgaaccctgaggagtggagtcatacacgaagggcgtgtggccatcgtgtcagcagagagagtctctgtacacagccccgtgaaccctgaggagtggagtcatacgcgaagggtgtgtggccaggctgcagagctgcgtgccgtttgtgtccgagcatcacgtgtggctccagcccttgtttctgccagtgtagacacctctgtctgccccactgtcctggggtcgctcttgggaggcacaggcatgggtgtgtctggcctcattctgtatcagtccagtgtgttcctgtcatagtttgtgtctcccaggcaggccatggtaggggcctcgcaggggccattggggagcacagggccaggctggggtgaggagagctcccctgttttctgtttaattgatgagcctgggaaaggagtgtgttctgcctgcccgttacagtggagcgttccgtgtccataaaacgttttctaactgggaaaaaaaaaaaaaaag

SEQ ID NO: 53688 - DNA, 852 bp, Homo Sapiens
  misc_feature (778)..(778): n is a, c, g, or t
  misc_feature (825)..(825): n is a, c, g, or t
  misc_feature (844)..(844): n is a, c, g, or t
aagaaatcttatatcctctataccaaactttgcttaaggatgagaaatgagatgtgttatgtgagaacattattttgagcccaaaatgtgtcatcacagtttttaaaaatcttatatatgtatttatatgtgtttcgtatttgtatatagtatcaagaattggttctagttcccaaattatcttttcttccttggttttgttctcttggcttgatgttcacattgaatatttgtgtttctatataggctaatgtaaaagatgccaagcaaaccttaagtgaaattgttttctgatttgcatcctgtttagctcttaatgtatctaaggatgttctcatctcaccattctactcatttagtgagttttctgatcttgtttaggcaatatttgcatacttatgcaataagataaaggtacccttgcctgcagtagttctgtttcctgtagaaaagtggataaagagtcccagaagaagttcttactagcttgggagttacctgattaaccagagaaaatttttggcttacttatggaacaagcattatttcttctttgttaggaaagatctaaatatggtccttgacttttaataatcattctttagaatgttaaataaaggcaacccaagtaaagggagaaaatgtttctttgtgcttcctgtttgagaaattcagttgcttccatttcgcatgttctgcacatttatccgatgtaacctcaaaagaatactggtaataaagggaaggaacaccagcaaccatcattgctgattcaagnttaagggtaaaatatggaattttaacctgggatgattatattaaaanctttccttttttttttcantttggctt

SEQ ID NO: 53689 - DNA, 1009 bp, Homo Sapiens
  misc_feature (963)..(963): n is a, c, g, or t
gaattctcgggatcgggctgctacatgtactattttcagtatctgagcaaaacctactgcgtggatgcaactagagagacaaatcgcctaggaagactgatcaatcacagcaaatgtgggaactgccaaaccaaactgcacgacatcgacggcgtacctcacctcatcctcatcgcctcccgagacatcgcggctggggaggagctcctgtatgactatggggaccgcagcaaggcttccattgaagcccacccgtggctgaagcattaaccggtgggccccgtgccctccccgccccactttcccttcttcaaaggacaaagtgccctcaaagggaattgaattttttttttacacacttaatcttagcggattacttcagatgtttttaaaaagtatattaagatgccttttcactgtagtatttaaatatctgttacaggtttccaaggtggacttgaacagatggccttatattaccaaaacttttatattctagttgtttttgtactttttttgcatacaagccgaacgtttgtgcttcccgtgcatgcagtcaaagactcagcacaggttttagaggaaatagtcaaacatgaactaggaagccaggtgagtctcctttctccagtggaagagccgggaccttccccctgcacccccgacatccagggacggggtgtgaggaagacgctgcctcccaatggcctggacgggatgtttccaagctcttgttcccctaacgtctcaacaggcgctcactgaagtgtatgaatatttttttaaaaaggtttttgcagtaagctagtcttccccctctggctttctcgaaagcttactgagcccctggggccccaggcacgggcccgggcaatagaatttccctctttccacaaagctgcccgcttttttctggggcaccctttgaaaccatccagggcgcggtgaaaattcaaaccttanaatgtgtgggccaaggggaagaaggggtttgcgttaaacctggccc

SEQ ID NO: 53690 - DNA, 726 bp, Homo Sapiens
  misc_feature (151)..(151): n is a, c, g, or t
  misc_feature (154)..(154): n is a, c, g, or t
  misc_feature (595)..(595): n is a, c, g, or t
  misc_feature (661)..(661): n is a, c, g, or t
  misc_feature (692)..(692): n is a, c, g, or t
  misc_feature (706)..(706): n is a, c, g, or t
  misc_feature (715)..(715): n is a, c, g, or t
ttttgggcaagctaacatctctggtcgttctcatctgtaaaatgagaataaatgaaacccactaaccagaattggtatgaaaatgaaatgtggcggaaaaaaatgaaagtgaatagtatcaccactgacacacaagcactaaaggcccttnttntctccatcaggtatggatttggggcaacatttggccaggtcttgtttatctttctgttcatctattctgtctaattcagtgctttgtttacaacgaatgtcttacaaatgctgactgaacactagcatacctgcatgaacaacaggtaaataaattttagacgtgttttaatgtttattaatctatcctgtcagagaagaactgccagttatagataaatatgatgccaggtcagggctgaagagttgggcaggttgttatctgcatggggtcactaggttccagtggagaggtgggggctaagctctcacccgctctgcagccacctggcacccggtttcagtttcctgaaagggagccttctacttgctgacgactgcctcatctcttctgaggtttcctctgataaacaatttttctctgcttttttttttttaattntgaaatacctaaaatgtaaaggagataatgtgacacacatttacccataattgagactgccataanttgctataactttttcaaaattttgacttantttcagacttttanaaaaattgnccgggtcgtgg

SEQ ID NO: 53691 - DNA, 687 bp, Homo Sapiens
gcagctcggcacccatggatcgctggtgacacagccctcaacaaaaacatccacgagtccgtcagcgcccagatccggaaaaactttgccaagagcaaatggagacaagcatttaatgccacggccgtcgtcagacatatgagaaaactacacctcggcagcagcctggacagttcaaatgcaagtgtttcgagcagcctcagtttggccagccaaaaagactgtgcgtatgtagcaaaaccagaatccctcagctgacactgaagacgagcctggggtggagaggagggagccggcatctgccgagcacctcctgtttgccaggcgctttctatacttaatcccatgtcatgcgaccctaggactttttttaacatgtaatcactgggctgggtgcagtggctcacgcctgtaatcccaacactttgggaggctgaggcaggaggactgtttgagttcaggagttttaagaccagcctgaccaacatggtgaaaccccatctctactaaaatataaaaattagccgggtgtggtggcgagcacctgtaatgtcagctacttgggaggctgaggcaggagaatcacttgaacccaggaagcggaggttgcaatgagctgagatcacaccactgcactccagtctgggtgacagattgagactccctctcaaaaaaaaaaaaaaaaaa

SEQ ID NO: 53692 - DNA, 586 bp, Homo Sapiens
cagatccagagtccttggagacaacttgataatggggtaagtggaagagaagatgatgatgatgttgaaatgctaattccaatttctgatggatcttcagactttgatgtgaatgactgctccagacctcttcttgatcttgcctcagatcaaggacaagggcttagacaaccatataatgcaacaaatcctggagtaaggccaagtaatcgagatggcccctgtgagcgctgtggtattgtccacactgcccagataccagacacttgcttagaagtaacactgaaaaacgaaacgagtgatgatgaggctttgttactttgttaggtacgaatcacataagggagattgtatacaagttggagcaatatccatttattattttgtaactttacagttaaactagttttagtttaaaaagaaaaaatgcagggtgatttcttattattatatgttagcctgcatggttagattcgacaacttgtaactctatgaacttagagtttactattttagcagctaataatgcatcacatattcatattgttcaataatgtcctttcatttgtttctgattgttttctcc

SEQ ID NO: 53693 - DNA, 499 bp, Homo Sapiens
tttctacttcttcattggaaagtcattcgtatttacttaagttttcaaatatcacagtgcagattagaacaaagtagttgtttataattcttccgcatcctccaagtgtatggagaagctcgcattcttcttgttttgtgctgtcattattttagtttgttatcttcgtctactttagttttctcagataatgtttaaattatttggcaaatcatttctcaattttcaatgcattaatttcctccacctgcttttctggagtttcatgtgatacccactctccccacacaggatgacttctcgagttgaatgttcattccatttattttcattctttcttgcttaatgttgtaaacaggcgaggttctaacttttcatctgtgtactacaagctctcaagttctttcatggggagtttgtatcatggtcattttctagtatttagcattttcagcttttgtttcctgtcaactcaacattaaaagttttttaaaacgtc

SEQ ID NO: 53694 - DNA, 733 bp, Homo Sapiens
ctaatacgactcactaacgccagcgctgtaccacctgcaggtaccggtccggaattcccgggtcgacccacgcgtccgccccctctcagcaatggccaccggccggctgcacacgacttccccctggggcggcagctccccagcaggactaccccgaccctgggtcttgaggaagtgctgagcagcagggactgtcaccctgccctgccgcttcctcccggcttccatccccacccggggcccaattacccatccttcctgcccgatcagatgcagccgcaagtcccgccgctccattaccaagagctcatgccacccggttcctgcatgccagaggagcccaagccaaagaggggaagacgatcgtggccccggaaaaggaccgccacccacacttgtgattacgcgggctgcggcaaaacctacacaaagagttcccatctcaaggcacacctgcgaacccacacaggtgagaaaccttaccactgtgactgggacggctgtggatggaaattcgcccgctcagatgaactgaccaggcactaccgtaaacacacggggcaccgcccgttccagtgccaaaaatgcgaccgagcattttccaggtcggaccacctcgccttacacatgaagaggcatttttaaatcccagacagtggatatgacccacactgccagaagagaattcagtattttttacttttcacactgtcttcccgatgagggaaggagc

SEQ ID NO: 53695 - DNA, 940 bp, Homo Sapiens
ttgaatatgaaagaaacaatgagtttccagtttttgatgaattttgagattgtatttttagaaagatctaagaactagagtcaccctaaatcctggagaatacaagaaaaatttgaaaaggggccagacgctgtggctcacacctgtgatcccagctctttggaggccgaggcaggcggatcacttgaggtcaggagtttgagaccagcctgaccgacatggtgaaactccatctctgctaagaatataaaaattagccgggcatggtgatgcatgcctgtaatcccagctactcgggaggcttagacatgagaatcacttgaacccaggaggtggaggttgcagtgagtcaagatggcaccactgcactccatcctgggtgacagagcaagacttcctctcaaaaaataaataaataaataagaaaaataaattaggaaattattaaaataattttttagaaaagcaacaaaataacaaaaattagtgactgtaataataggaatgtgtgaaatttgtcacagcaataattgactaaaatgaatgtacataattattcagttttcagtttgtgtaataaactctaatcagtataaaggattgactatcctaggaaaaagattagtcaggaatagaagcaaagtagtattggaatctaagaaacattaccatgttgctttatcatgcaggcaacttcattaataaatgacatttcaggtgggagtcacacaaggataacgtcctattggcctcactaaactcactaagatctttatggaaaaaggtacccccgtggctgtcaggaaatcaactacttgttatagtaaagggagcgcctgtcccggcggagcaaggcagacaaggacggcaacggcaggaagacaaccgaaaacacaggggacaaggcgccacaacggatatgacagggaaggacaagcag

SEQ ID NO: 53696 - DNA, 945 bp, Homo Sapiens
gaattatttgtaaacattttgggcttgctgcaacctcatttagagagggttgccatcgatgctctacagttatgttgtttgttacttcccccaccaaatcgtagaaagcttcaacttttaatgcgtatgatttcccgaatgagtcaaaatgttgatatgcccaaacttcatgatgcaatgggtacgaggtcactgatgatacataccttttctcgatgtgtgttatgctgtgctgaagaagtggatcttgatgagcttcttgctggaagattagtttctttcttaatggatcatcatcaggaaattcttcaagtaccctcttacttacagactgcagtggaaaaacatcttgactacttaaaaaagggacatattgaaaatcctggagatggactatttgctcctttgccaacttactcatactgtaagcagattagtgctcaggagtttgatgagcaaaaagtttctacctctcaagctgcaattgcagaaattttagaaaatattattacaaacaggagtttacctctaaaggagaaaagacaaaaactaaaaccgcttcaaaaggaatatcctttgatatatcagaaaaagatttccaaccacggaagagtgaaccagcaactttttggggaaaaacctacaatccaagcaacccaatggctgattttaagaaaacccaaagttcccgtaatctaagaaaaactaactgaaattaaaaaatttattgtaatacttggggggaaactttgaataaatgaaacccttattctggaaaaatggtaccttattcaaaaaggaaaaaccgggctattaattaaggggattttcctaaaataaaccacccttttttgttaagggaaagtggcccaaaaaaaattttattcagtgggggaaaaatctcttatggcaaaatcaacccaaagattctcccaacttgtaaga

SEQ ID NO: 53697 - DNA, 1032 bp, Homo Sapiens
  misc_feature (979)..(979): n is a, c, g, or t
tggaccaagctggtgtgaccctgttggaaaactggcagtatctaccaaaagccgaacatacgtataaactgatccagcagttccactcctgggtatgtacaccacagaaagctatgtccaccgagacattggcaagaatgtttctaaccacacgctgactgtagccccaaacctgaaacaacccaaatgtccatccaccaacccaaatgtccatccacagttgaagctacagtgaagtcacagggtcgaatactactgcacagcaacgaatatgaatgaaaatatcgctatgcacagcaacatggataaatttcacagacatgaggtcaagcaaaagaggtcagagtcctcatcatcaagagagaattcattgtatgattctcttcctacaaaaagtacagaaataagcaaaactgatccatggtgttagaagccaggggaacagttaacaggggagggatactggggaggggcatcctggagtgctggtctacctcatctgggtgttgatttcacgagtattgtcagtttgtttccagactccctgttggagatgtggaaataaaaaccacctaaacaagagcagagaggccatttggtcaaagtttgcaaaggagtcagccatgattgcttgtatttggcaggggtcaaaggcaggcagggactgtgaaatgttatagtgggaaaaaaagggaagggctctgggtgtgctgtgattggagattgttggcatgggggacagagcgggactaactgggaaggggcatcttttggttgggttgggggggacaataccacggcctcgcctgttcccgccccggaaaagccggcagcaacggaccgaccccggactgccacgaagtaatccgcacactaacacccacccccccacagccgccgtgctggcaatatgatccccgcgctctaacgcaaccgaaacaagtcgcacacacgctctccccccgaccccatctagttnctccaccctgctaaagtcacccgagcctccagctcatattccgcgaccgacaa

SEQ ID NO: 53698 - DNA, 830 bp, Homo Sapiens
gcccgcggcggctctggaagctggacgcggaccacggcccgggagctagaaagtgaacgcccgcatagtaaaggacgggaaccctcgttctcagctctcaccgaagtggactttttgcaggggtgtggcggccgggtctcgaccacagcgtggatcaccggctgtttaggaaactggagctgcgcaacgtggggtgcaaaactgccccgcttcctttgacagctcttctcaaccctcacctccatcccccgtcgaccgcaggcaccttcgcttccagatgctgccaggctgtcactcaattcggtcatttcattcatttatcacgacatgggcactggggttgggctaacagcaagagacaataggcctttgttcctatctagttgggtactgcttagcgtgctaagcagatcagtttatttaagtgcgttgcaacgactctctgaggtagaaaatattgttaattccgttcaggatcccggctacataatctgtggggctcaatacaaaatcaacagatgtaggggctccttgttcaaaatcgtatgaagaatttcaaaacagggacaacagagcatgagaaccaagcgcaaagcccactgcagtgcgattgcacaggtatctcaccttgcagccgggcactactcccatttttcaggcaacggaaaccgtggcctcagagaggttcgaactggcatgctcaaagtcacgaacgctggcatggggctggtgctggaactcaagagtcagacagtctggctccaaggtctggagatcccaggctgggccccagatttaatcctgcaatattgactgactggtgtggacaa

SEQ ID NO: 53699 - DNA, 646 bp, Homo Sapiens
atggattttgacaacttcatcagctgcttggtcaggctggacgccatgttccgtgccttcaaatctcttgacaaagatggcactggacaaatccaggtgaacatccaggagtggctgcagctgactatgtattcctgaactggagccccagacccgccccctcaccgccttgctataggagtcacctggagcctcggtctctcccagggccgatcctgtctgcagtcacatctttgtggggcctgctgacccacaagcttttgttctctcagtacttgttacccagcttctcaacatccagggcccaatttgccctgcctggagttccccctggctctaggacactctaacaagctctgtccacgggtctccccattcccaccaggccctgcacacacccactccgtaacctctcccctgtacctgtgccaagcctagcacttgtgatgcctccatgccccgagggccctctctcagttctgggaggatgactccagtccctgcacgccctggcacacccttcacggttgctacccaggcggccaagctccagaccgtgccagacccaggtgccccagtgcctttgtctatattctgctcccagcctgccaggcccaggaggaaataaacatgccccagttgctga

SEQ ID NO: 53700 - DNA, 829 bp, Homo Sapiens
tttctcccagcagtgcttgagaatggggaaggaaagatacaacttccccaacccaaacccgtttgtggaggacgacatggataagaatgaaatcgcctctgttgcgtaccgttaccgcaggtggaagcttggagatgatattgaccttattgtccgttgtgagcacgatggcgtcatgactggagccaacggggaagtgtccttcatcaacatcaagacactcaatgagtgggattccaggcactgtaatggcgttgactggcgtcagaagctggactctcagcgaggggctgtcattgccacggagctgaagaacaacagctacaagttggcccggtggacctgctgtgctttgctggctggatctgagtacctcaagcttggttatgtgtctcggtaccacgtgaaagactcctcacgccacgtcatcctaggcacccagcagttcaagcctaatgagtttgccagccagatcaacctgagcgtggagaatgcctggggcattttacgctgcgtcattgacatctgcatgaagctggaggagggcaaatacctcatcctcaaggaccccaacaagcaggtcatccgtgtctacagcctccctgatggcaccttcagctctgatgaagatgaggaggaagaggaggaggaagaagaggaagaagaagaggaagaaacttaaaccagtgatgtggagctggagtttgtccttccaccgagactacgagggcctttgatgcttagtggaatgtgtgtctaacttgctctctgacatttagcagatgaaataaaatatatatctgtttagtcttaaaaaaaaaaaaaaaaa

SEQ ID NO: 53701 - DNA, 725 bp, Homo Sapiens
gcggagggagtcgagccagcgtcgccgcgatggtgttgttggagagcgagcagttcctgacggagctgaccagacttttccagaagtgccggacgtcgggcagcgtctatatcaccttgaagaagtatgacggtcgaaccaaacccattccaaagaaaggtactgtggagggctttgagcccgcagacaacaagtgtctgttaagagctaccgatgggaagaagaagatcagcactgtggtgagctccaaggaagtgaataagtttcagatggcttattcaaacctccttagagctaacatggatgggttgaagaagagagacaaaaagaacaaaactaagaagaccaaagcagcagcagcagcagcagcagcagcacctgccgcagcagcaacagcagcaacaacagcagcaacaacagcagcaacagcagcacagtaaagggcatacatttcctgctttcaccaattaaccactgaattgctattttttccttttggccagatagctaggtttctggttcccccacagtaggtgttttcacataagattagggtccttttggaaagaatagttgcagtgtttataggatagttgtggtaagaatctagtttattttgcatttggctaattggtctgtgctgcatggttatatactcctggattatagattaaaagtctctgtagacatctctgtgaagagcaagctatcattaaacatgtctg

SEQ ID NO: 53702 - DNA, 634 bp, Homo Sapiens
tttttttttttattttttcctacttaggattttccactctatctttgtggttcatgaggactttgcctcttctcctgcctcattccctgactttctctagttagatgtcagtcctaaataggttttcctcacttcaggcctcacccctcaccttgtttttttgggggctccagggaccaatctggggctggaaatgttaggaggttgccttggtgctgccccagatctgtccagcagggggcagtaagtgatcttggtagtatccctggctgctaagcccttggcaggggtggtcctttctacattcccattcacttaacagctcttttgggattgggtgtttcattccatttctgcccactccctctcctctcctctctggtaggtttaattttatgctttccctgattccagctttctgcttcctgaggactcccgctccccccaccccaaagtttgtctgtggtgttatagtggtaactgcagttcctcctctggaatgtagactgtatatgtttaataactcaccttctctatccttgctcaaaatgtgggataacgcgatgactgtgaccctggttggaaattaacttgttttatgcagctttggagccgacttcatctttgctgtgca

SEQ ID NO: 53703 - DNA, 605 bp, Homo Sapiens
  misc_feature (605)..(605): n is a, c, g, or t
gggaagataaatatttgtaaataaaacctaaagtttaaatgttttaatctgaataattgtacataaaattttgtatctctaacattccaaattactgtcaataaaatatatatttattattttaaatgctatgtgttaatatttcacttgcttgtattagaaaggcaaaatgtaagactttggtatgtgtgacatatgctttatttggctttattttacaagtacagtatctgcaaaaaacaaagtaaccttttttcatacctgccagttttgaatttatatatgttattgaacaaatagtaatagaggattcgctgttgaaacaagttgtccaagcaatgttatattcatttttatacttattgggaaagtgtgagttaatattggacacattttatcctgatccacagtggagttttagtaattatattttgttgatttcttcattttgttttctggtataaaagtagagataatgtgtagtcacttctgatttagtgaaaccaattgtaataattgtggaaatgttttgtctttaagtgtaaatattttaaaatttgacataccctaatgttaataataaaaaagaactattttgcataccn

SEQ ID NO: 53704 - DNA, 847 bp, Homo Sapiens
atcaacgctatgaacgcaaggctgtgatatggaaccagaaggctgtctgaacttttgaaaccttgtgtgggattgatggtggtgccgaggcatgaaaggctagtatgagcgagaaaaggagagagcgcgtgcagagacttggtggtgcataatggatattttttaacttggcgagatgtgtctctcaatcctgtggctttggtgagagagtgtgcagagagcaatgatagcaaataatgtacgaatgttttttgcattcaaaggacatccacatctgttggaagacttttaagtgagtttttgttcttagataacccacattagatgaatgtgttaagtgaaatgatacttgtactccccctacccctttgtcaactgctgtgaatgctgtatggtgtgtgttctcttctgttactgatatgtaagtgtggcaatgtgaactgaagctgatgggctgagaacatggactgagcttgtggtgtgctttgcaggaggacttgaagcagagttcaccagtgagctcaggtgtctcaaagaagggtggaagttctaatgtctgttagctacccataagaatgctgtttgctgcagttctgtgtcctgtgcttggatgctttttataagagttgtcattgttggaaattcttaaataaaactgatttaaataatatgtgtctttgttttgcagccctgaatgcaaagaattcatagcagttaattccccttttttgacccttttgagatggaactttcataaagtttcttggcagtagtttattttgcttcaaataaacttatttgaaaagttgtctcaagtcaaatggattcatcacctgtcatgcattga

SEQ ID NO: 53705 - DNA, 437 bp, Homo Sapiens
gtgttctagtccagtctaacatcagctgttggtcttttggcactgtcatgtccagtaccagcacattcttggctccttgccacatctctggcctcaatgtgggaggcaaagacagtgagcatttccagagtggtgagatgggtgcagcacataatgaggcgatgaccacacagcatctctgaacagcatgtccacacagggctcgaagtcattatgctgcatgtccacctcatgtccacaatagctgagcagttgagattggtggagtggaccttctcattactcatcatctagaggaaggtcctcatcatctctacttctcaaaggggtagaattgaacctgaacctgcttgacagacaagagcccaagcctaaccaaggtggctgccatggtgacccttgccctgaaagccatttccattaatttaaaaattgta

SEQ ID NO: 53706 - DNA, 511 bp, Homo Sapiens
ttttttttttttttttttggggggttgaaaagtggtttaaacctgagactaacttaaacacttccttgaccttcttgttgcctgttcatttttgtgccaaggaagtagctgccccagtgtatgtcttgccttctccgcgtcattgttggaagaggagagatgcatcgagcagtcccagctgcttttcatttattacttcttctttccaggacctgacagaagtcagggaagagtccctgggttatgtccaaacttagcacctgcaattgttgggatgtggatggatgtgtgcataagagagagagagaatatgtgtgtgtgtgtgtgcgtctgcgagcgcacacacatgcacaagtgcgaaggagttgcggttgctccatgttctgacttagggcaatttgattctgcacttggggtctgtctgtacagttactcatgtcattgtaatgatttcactcctaactgtgacatttttatcacatgtgtgaataaatacataaagattggtaca

SEQ ID NO: 53707 - DNA, 570 bp, Homo Sapiens
ggaggcatgaaggatgaccgtcgggacagatactctgcgggcaaaaggggtggatttaatacctttagagacagggaaaattatgacagaggttactctagcctgcttaaaagagattttggggcaaaaactcagaatggtgtttacagtgctgcaaattacaccaatgggagctttggaagtaattttgtgtctgctggtatacagaccagttttaggactggtaatccaacagggacttaccagaatggttatgatagcactcagcaatacggaagtaatgttccaaatatgcacaatggtatgaaccaacaggcatatgcatatcctgctactgcagctgcacctatgattggttatccaatgccaacaggatattcccaataagactttagaagtatatgtaaatgtctgtttttcataattgctctttatattgtgtgttatctgacaagatagttatttaagaaacatgggaattgcagaaatgactgcagtgcagcagtaattatggtgcactttttcgctatttaagttggatatttctctacattcctgaaacaattttta

SEQ ID NO: 53708 - DNA, 499 bp, Homo Sapiens
ggtttatttgcaaaattcctaaaaggaaaaattttatcactgccatcacagcaggtttcctcatccagatgaggaaactagacaaatgctagtgtgttttaactagctaaacaaaactaagttaaatgaacatttaaaagtttccctagcgggccattccttagcaaaatgttggaatccctgttgctacattgactaaaaggtcatgatgaatggaatatgtaagacttggctcatagaaacctaatcagatggttagaggtgttggcagtttaggacctgctgtcataaatgtgtgaacaaccttttgtaacctaacctattgacctgcatgttttttctttaccccaattcattacatggaggctcaatcttgagtttgctttactggttcagcaaaagccaggaagaacaactttgtagtaatcaaaatgttatccaactgtatattgtttactttattgtaaatactggtgaacagtggttaataaatagtttt

SEQ ID NO: 53709 - DNA, 580 bp, Homo Sapiens
  misc_feature (551)..(552): n is a, c, g, or t
  misc_feature (565)..(565): n is a, c, g, or t
gaagctgcagaatgggatgggattagaaaacaacaatctattaggaaagatgaaaggaaggaattccccagtgttcacgctgagaagtcttcatattggaccagtgtgagggggtcttttatactgaggttttaaaaacctgacttcattttgtcctgaatgtagaagtgaagaaggacactagtttcaggcacctgggatggtggaaaagtttattcaactgaggctttccatgcattgggttgaatagctgagggaagctgaagactcttatctgaaaatatgatctgaaaatatttattgtataggaagacagaatgcctgatttctgaagttttcttgatggcccaactaaagaagaaaggcaccaaatcctcactttaacaggtaaatggagatcctgagggctggatacccaagagccaccattttacggattcctcagatttaaaaatgtctcagatagatatttccaaattctatttctattagcctctgtggataaagagttcctgaaactctggttttactttttttggaaaaaaaaaaannaaaaaaaaaaaanaaaaagttggcggcc

SEQ ID NO: 53710 - DNA, 825 bp, Homo Sapiens
cgagtctcgtgctgtgtcggacctgcagcccctggccttccgccaccatggagtacctcatcggtatccaaggccccgactatgttcttgtcgcctccgaccgggtggccgccagcaatattgtccagatgaaggacgatcatgacaagatgtttaagatgagtgaaaagatattactcctgtgtgttggagaggctggagacactgtacagtttgcagaatatattcagaaaaacgtgcaactttataagatgcgaaatggatatgaattgtctcccacggcagcagctaacttcacacgccgaaacctggctgactgtcttcggagtcggaccccatatcatgtgaacctcctcctggctggctatgatgagcatgaagggccagcgctgtattacatggactacctggcagccttggccaaggccccttttgcagcccacggctatggtgccttcctgactctcagtatcctcgaccgatactacacaccgactatctcacgtgagagggcagtggaactccttaggaaatgtctggaggagctccagaaacgcttcatcctgaatctgccaaccttcagtgttcgaatcattgacaaaaatggcatccatgacctggataacatttccttccccaaacagggctcctaacatcatgtcctccctcccacttgccagggaacttttttttgatgggctcctttatttttttctactcttttcaggcgcactcttgataaatggttaattcagaataaaggtgactatggatataattgagccctctggtccaggtctcagtttacctaatattacctcagaa

SEQ ID NO: 53711 - DNA, 576 bp, Homo Sapiens
aagatcctcatgaattaaatagttgatgcaatttttaacgttaattgatataaaaaaaaaaacaacaaaattaggcttgtaaaactgactttttcattacgtgggttttgaaatctagccccagacatactgtgttgagagatacttagagggagggagtaggttttgaagaggttgatggtggtggggagggaaggcctcctgaattgagtttgatgcagagctttttagccatgaagaatctttcagtcatagtactaataattaaattttcagtatttaaaaagacaaagtattttgtccatttgagattctgcactccatgaaaagttcacttggacgctggggccaaaagctgttgattttcttaagttgacggttgtcaatatatcgaactgttcccaagttagtcaagtatgtctcaacactagcatgatataaaaagggacactgcagctgaatgaaaaaggaatcaaaatccactttgtacataagttaaagtcctaattggatttgtaccgtcctcccattttgttctcggaagattaaatgctacatgtgtaagtctgcctaaat

SEQ ID NO: 53712 - DNA, 853 bp, Homo Sapiens
aaacaaaattcatttagtagtggagtggggaataggagtttggatagccttctaattaaaggaagctcgcctttcttggttttgggggttagaggctcttttgggaagatgcatccgagtattgtggcattctgattatgctgccttcacaaaacactcaagtgacctaagtggttatgaagcaaatgcatttatggtgaaaacagtctttgctcattgctttctcttgtttcatttagtgacaaatgatcaagatgacttgattttttttccttcttaacaatgtcttttttatttaaaccaaaggtgaagccagtgtactttctcagtgagttctctgcataaagactaatcagtgggaccaggtaaaaaggtcatataatacattgtggagattgcttacttaatacttctgaaaaatggagtaagggagaaactgtaatgttgcaatatgaacctcccattgggccttccatagggaaagctgtgactactctgaaatggaacctagcattatatccttgtagggtagattataaatcatttccagttcatttctcttagaggtgattacctctagccatcagccttactccatcccatgtttggtatgcaatttgagccacaaggctcgtatcgccaacagctatatacattttgttccatttttctgtcttacagagccatgatagaactgtggttagtgagttaaaattcctggagtaactactgtttttctcctttgaaacttaggtttctaaagttgcacctaaggaatctgtcacattttctgttgaatcatgggtttttggtttttgtttttaacagattttccttctgatccggacttgaa

SEQ ID NO: 53713 - DNA, 430 bp, Homo Sapiens
ggttgatactttgcttgcagtagattttctttaaaagaatgggcagttacatgcatacttcaaaagtattttcctgtaaaaaaaaaaaagttatataggttttgtttgctatcttaattttggttgtattctttgatgttaacacattttgtataattgtatcgtatagctgtattgaatcatgtagtatcaaatattagatgtgatttaatagtgttaatcaatttaaacccattttagtcactttttttttccaaaaaaatactgccagatgctgatgttcagtgtaatttctttgcctgttcagttacagaaagtggtgctcagttgtagaatgtattgtaccttttaacacctgatgtgtacatcccatgtaacagaaagggcaacaataaaatagcaatcctaaagcaagaatatggcaaaaaaa

SEQ ID NO: 53714 - DNA, 718 bp, Homo Sapiens
tttcacctccactagtctgatacagtacatctgtacttccatataccttgcactgattttgtctgagtgccctgggagaagtagaaaatgattgaaagtgacttccgtatctcagcccatgactcagcaaggcagaatggccacccctgccaaagtttgcttctcttttcaacagtgcctcaccctccctctaggattaaagtgcttctgcccttccacgaactcctcctccatttcctttttgggatttgtcaccatccttctattctctggtcttctatttttggtgttgttcaagtgaaggaagagatgttccctctaatttctctctagcccattataacctgctatcttggggcaacttttgatgtatgacatgtcacccttcccaacttggtctcctccaacatgctgtcttcatgtggagccctcaccacaatccctgactccggtcatttgtgcctttctcttgtcatctctgtacactacttatattcactgtgggttgggggagctaattttaagcatgttcagtggcagctcccctccagtttcagtgtcactgttaaaatttatcaaaaagcaacttcactaggggttttcttaagggataaaggccttttacagaagctaaacccttccccacatgtggtagaatgtgctcttctatatctactcctcaataaagcatgttctctgctcaaaaaaaaaaaaaaag

SEQ ID NO: 53715 - DNA, 793 bp, Homo Sapiens
atacttagcggttctacttatgagtatgaatgctcaggaaatacgcactaggatatttactgtggcttgatttgtagtagccaaaaattagaaacaactgagaaagcccatcacgaacaatatgggaaattcttatgtaatactatatatctgtaaaatgcaacaaatgaaatccacatgtattaacagaaagatcccagaattgttgaggggggatcaagttgcagaatgatacagatagtacaatgacttttttgtaaatttgaattaaaagtttcctcataaaactcagtactatctattggtaatggatgcatatatgtatgtacatgtttttgaaacggattggaaggatacagaccaaactcttgatagtggtcacctgtgaagagtggagaagggaaaataatgagtgtgggaggtgggatgggtattggttaaaggggacttcagctttttatataaacatccacttctctttcaaaagacttcaagtaaatataagaagatactgattgattctggattgtggtatagggatatcttgtcttattttttgtacttttctgtatttttaaaatttctcaaaatacgaatgggagtgaggatgggaatgctgtatctgtggaagtcatgttatactggattcatttccaattaaatactaaacattttatagacaatatttctaaaattttatcacggatggaatggatggacttgctctctatgtaatatgaaattaatctattttattaaaatttaaaaggacagcacaaaaaaaaaaaaaaag

SEQ ID NO: 53716 - DNA, 723 bp, Homo Sapiens
  misc_feature (663)..(663): n is a, c, g, or t
  misc_feature (685)..(685): n is a, c, g, or t
cgaggagcgctcagccaacggtggctccgaatctgacggggaggagaacatcggctggagcacggtgaacctggacgaggagaagcagcagcaggatttctctgcttcctccaccaccatcctggacgaggaaccgatcgtgaatagggggctggcagctgccctgctcctgtgtcagaacaaagggctgctggagaccacagtgcagaaggtggcccgggtgaaggcccccaacaagtcgctgccctcagccgtgtactgcatcgaggataagatggccatcgatgacaagtacagccggagggaggaataccgaggcttcacacaggacttcaaggagaaggacggctacaaacccgacgttaagatcgaatacgtggatgagacgggccggaaactcacacccaaggaggctttccggcagctgtcgcaccgcttccatggcaagggctcaggcaagatgaagacagagcggcggatgaagaagctggacgaggaggcgctcctgaagaagatgagctccagcgacacgcccctgggcaccgtggccctgctccaggagaagcagaaggctcagaagaccccctacatcgtgctcagcggcagcggcaagagcatgaacgcgaacaccatcaccaagtgacagcgccctcccgccccggncctgcctcaaccttcatattanataaagctccctccttattttttcaaaaaaaaaaaaaa

SEQ ID NO: 53717 - DNA, 559 bp, Homo Sapiens
  misc_feature (556)..(556): n is a, c, g, or t
  misc_feature (559)..(559): n is a, c, g, or t
aggaagtcacaggccctgtcattgcgcctctcttcccgcagaaacgtgaagagggctggtgggtggtgattggagatgccaagtccaatagcctcatctccatcaagaggctgaccttgcagcagaaggccaaggtgaagttggactttgtggccccagccactggtgcccacaactacactctgtacttcatgagtgacgcttacatgggatgtgaccaggagtacaaattcagcgtggatgtgaaagaagctgagacagacagtgattcagattgagtcctgaggcatttacttttgggtaaaggagagttgagcctgaattaggaatgtgtacattgtaggaatcctggttgtggggaccaggtctgtgggcctcaggtctggccagccagggctggtgctgtccccgcctacctccacttcctttcccttgctcactctggatccagtgacagcaggtgtcatgggtcaagcataaatcatatatagcattttcaggcatgttcctggtagttcttttgagtctgacattctaataaaataatttgtagaanccn

SEQ ID NO: 53718 - DNA, 740 bp, Homo Sapiens
ccaataagaaagactgaaatggtagatttcaaattttatacttaaaagctataattaatatagaaatattttgtttttattttagacagtcttttcacagaaaaaattagtatttagaagttgggatctcgcataggtatgagtagaactgacttacataaagtaatccttaattttttatgagtttagccattttttatacattgcatcattattgccgtattttctaaattatgaactgcatatatttgctttcaaagaagtaatcattatgtgtttgagtagtatagatagctcttcccaggtatcaatagccaaatttgacatgatactgtaatttactagcctttttagaggaaatataatgtgtagacagagcttttaaattatttcccctgtattgtatttggctttttattcctgttgttttaaagtatatgatgctataattccagattatttgagagtgtataacttaatgggataacttgctcagaaatgtttttggtcacatagttttgtttatctggaaacttgtgagatttaaaaattttcggctggatatggtggttcctacctataatactggtgatttgggaggctgaggtgggggaattgcttgagcccaggagcttgaggctggagtgagctgtgactgtgctactgcactccagcctaggccacagagcgagactccatctctttaaagaaaaaaaaaaaagatctttaattaagcggcc

SEQ ID NO: 53719 - DNA, 848 bp, Homo Sapiens
ccaaggaagaccagtaggaaagcaaacccttgactctggcaggatttgcaggcagcaggcagcacccctctgccagccgggccccggctgcagaagtgctgttggtttggatgctgtgtgcctgtcaagattccctccggttttctggctagaaagctcatccgtttccggtttctaagagtcagttcagtggcagagccaccagggaaaagtgaggctcttgggggtggtttgaccctgcttacctgggagcacacttttcccttccccgatgacctgggatggtggccaggccgtgcccttgctgttgctgggcagtgtccttttggaaagggagctgccccaggctttagtgcagctgccaaccctgttaggcctggcctctcgaggcctcttctgatctcaagggtcacaccccctcaaagatcctctcacccatggtagttgctgctcgtggttctgtctgtccgtgcaccgatgcacacaccgcaccccaccactgtactctgaaattggcgagtgagtggagagccagctctgcggagtcatcacgcagccatggttgtgcctgccgttcatggtggtctttcaggttatcttggcaacatgtacattgcttttattttttttcttttttgctttcattgtacagtcagtactataaaatttctcttttgagttttatacctttgtagcattttagatgacattgtgtttgtactttgttgtgtagagtggaagaattgtgttgaataaacccaagatcggaatgcaaatctagttctgggttcactgccttctcacttgtcccctcgcccctagtaactttctgttcctcaccatccgca

SEQ ID NO: 53720 - DNA, 493 bp, Homo Sapiens
cacgaggtttaataccatgtcaaatgcaaacttcaattctccccatttagctttattaaactgacgttctcttcaaaacttcttgctgaatggtactcagatgtgcattcacatacagatgtgttttgaagtgggtgtaccttgctttacctaatagatgtgtaaatagaacttttgtaagtcaaatcccattgtcactttgatttaaattattccagctgtgatgtgtcttcattttatagcagtttgacactggagcttttgagcttttttacctcacatcttttatcaaataatatttactgctttgaaaacagcaacagcattggccagttcagtaggggaagcttgctttattaagacactctggagaaagacgtcagggaatccttgtatatgtcgtgggaatcaactcctcatttatctgttgcgtaagtttaagtttttgtgcatcagtcgggttttctatattttttttaacttaacatttttt

SEQ ID NO: 53721 - DNA, 784 bp, Homo Sapiens
aacattgtttcacttggcggcatgtttttgaaacctgctttatagtaactgggtgattgccattgtggtagagcttccactgctgtttataatctgagagagttaatctcagaggatgcttttttccttttaatctgctatgaatcagtacccagatgtttaattactgtacttattaaatcatgagggcaaaagagtgtagaatggaaaaaagtctcttgtatctagatactttaaatatgggaggccctttaacttaattgcctttagtcaaccactggatttgaatttgcatcaagtattttaaataatattgaatttaaaaaaatgtattgcagtagtgtgtcagtaccttattgttaaagtgagtcagataaatcttcaattcctggctatttgggcaattgaatcatcatggactgtataatgcaatcagattattttgtttctagacatccttgaattacaccaaagaacatgaaatttagttgtggttaaattatttatttatttcatgcattcattttatttcccttaaggtctggatgagacttctttggggagcctctaaaaaaatttttcactgggggccacgtgggtcattagaagccagagctctcctccaggctccttcccagtgcctagaggtgctataggaaacatagatccagccaggggcttccctaaagcagtgcagcaccggcccagggcatcactagacaggccctaattaagtttttttttaaaaagcctgtgtatttattttagaatcatgtttttctgt

SEQ ID NO: 53722 - DNA, 506 bp, Homo Sapiens
cgggaattcggccattaggccatctctaaaattgatctagctgttttatttttatgtactcttagttttatgtaagaaaccttaggatgagctcccttttctaaggtgtttttgttttttgtatgtttgcttttttcctgttttttgttttttccatttacggcagtggtaccatgttttggatgtgtgatgtttatatgggagaacaaaaagctgatgtatagccctgtatacagtgtagatactatttttgtaaaaacacaaggctaaattaatgaacaagaatactgaatatttcatcattaaaaatttcttgtatttcttgtgcattaatctgacgataatttccctgtatattatgttcatttagctgtttgtaatttttgttaattagatcaggttgtctgcatttgttggtgtaagtgaacatcatcacagttatcctgagttgagtttaagccaaatacatgcatagaaaagggtcttcctattaatggaagaaggta

SEQ ID NO: 53723 - DNA, 505 bp, Homo Sapiens
cacgcccattccagctggagtcgtggggctgggcacaggggaatttttccagagctgagcctgacgtctgctctgaagaatgcttagaaggttcccagacaccagagccagatgtcccccaccaccggtcaggacctccttgaggtgcacaagcacggtctcctctgagttcaccccagcccacccccgcacccactaattctgcttttcctgccccttgctccgtaaaagtatcaaatactttctccttggtatctcaaggaggtttctgagataggtagaagtcttgagacggaggctggccatccattcagccctgagcgtgctgagttctgtgtttctctgaatagaggtgtggaacctgaggggccagcaggcctctctgaaggcctccatggagcaaacggagccacctcgggaaagagtttaatggaatatttttgtacccgatgtttacagatgctgttgggaagttatcaataaaaagacaccattactaaaaagg

SEQ ID NO: 53724 - DNA, 656 bp, Homo Sapiens
cattgccgttctaagcagttacctgatgcctgctgctgaagagctgctcacaggaggcggcggcggccctggcactgccccttgcattaggtcttgtgtttgatgtgttcttgtgaatttactttgtcagaacaaaatatttacgcgttgggttcaggaatttcttttagctccccatctggctgtgaaattcaggaaacctcccgttgcctagtaatcaccccatgtaggtgtacattgtgacaaagtgcatctgaccactaaggggcccccttggtgaccccagcacattcacagcagtgttaaaatggcctgcattttggagatgctggctggcctttcagtgcctcccaggaagacacatggcctttccctcttcagatgcctgaagggagtgctttgaggcaggtgatgtgctgggagtgtgggcggcctccctctggccccggggccctctgtggaccttggctccctccgtggacctgggcttcgtggtgagcactgcagcctccctgggcattccctccagcgccagcaccactgcaacatatagacctgagtgctattgtattttggcttggtgtgtatgctcttcattgtgtaaaattgctgttcttttgacaatttaagtgattgttttgtttactgtaagtttg

SEQ ID NO: 53725 - DNA, 577 bp, Homo Sapiens
ccgaatccgggttcatccgacaccagccgcctccaccatgccgccgaagttcgaccccaacgagatcaaagtcgtatacctgaggtgcaccggaggtgaagtcggtgccacttctgccctggcccccaagatcggccccctgggtctgtctccaaaaaaagttggtgatgacattgccaaggcaacgggtgactggaagggcctgaggattacagtgaaactgaccattcagaacagacaggcccagattgaggtggtgccttctgcctctgccctgatcatcaaagccctcaagggaaccaccaagagacagaaagaaacagaaaaacattaaacacagtgggaatatcacttttgatgagattgtcaacattgctcgacagatgcggcaccgatccttagccagagaactctctggaaccattaaagagatcctggggactgcccagtcagtgggctgtaatgttgatggccgccatcctcatgacatcatcgatgacatcaacagtggtgctgtggaatgcccagccagttaagcacaaaggaaaacatttcaatacaggatcatttgacaact

SEQ ID NO: 53726 - DNA, 691 bp, Homo Sapiens
gtggaacattgaaataaaggaagtgttccttagttcccgtgtgaaagcagaggaacccatgacatccaagggcgtgaaaggatcagagctgactggacatagtgagctgccttcttgcgttcgggtgcacccctgttaaacctgatctgtgtcataagtgactccggatgcatcagtgtccaccagttggaagcaatgacaaggatggctggctggtgtttttcagccttccggtttatagactgtatttatctagtggattcctgcaggccccatactgagcctggactgaaagtatccactcggaccatctgttatctctctacactgaaaataaaacctcttccacccaccccattcggttcttctgcctgaccttcaaatgcccatgttggccttttacagcagtgccacggcaccaagcgagctgccacatctcacactctaaagggtttgaactattagttcttgtcattttttaaaaaaaaccattcccaagtgaaattgttatatcgtctgtcttgcgtgtgtcagaactgggtttttgtggaggttcagagcaggcaacaccataagttgctctcagatccttgttctgaagtacattcttggttatctgtacttctgtagctggtgtgatgctgttaattgtatgtaccacacatctccagacgttaataaaggactcaaa

SEQ ID NO: 53727 - DNA, 736 bp, Homo Sapiens
ttttcttcggaacaaccagaggtatcacaaacactgttactcatctactggctcagactgtactacttttttttttttttttcctgaaaaagaaaccagaaaaaaatgtactcttactgagataccctctcaccccaaatgtgtaatggaaaatttttaattaagaaaaacttcagttttgccaagtgcaatggtgttgccttctttaaaaaatgccgttttcttacactaccagtggatgtccagacatgctcttagtctactagagaggtgctgccttttctaagtcataatgaggaacagtcccttaatttcttgtgtgcaactctgttttatcctagaactaagagagcattggtttgttaaagagctttcaatgtatattaaaaccttcaatactcagaaatgatggattcctccaaggagtcctttactagcctaaacattctcaaatgtttgagattcaagtgaatggaaggaaaaccacatgcctttaaaactaaactgtaataattacctggctaatttcagctaagccttcatcataatttgttccctcagtaataggagaaatataaatacagtaagtttagattattgaattggtgcttgaaatttattggttttgttgtaattttatacagattatatgagggataagatactcatcaaattgcaaattcttttttttacagaagtgtgggtaacagtcacagcagttttttttaccaacagc

SEQ ID NO: 53728 - DNA, 433 bp, Homo Sapiens
tttctttttttcctttttctctgttctctacaaatcatttgggtctacatccagcttctcccagcatttactcaatatgaaacttccagttatagattaatttgaattctttgcactaattgtttaaaagaccataggaacctcagaccatccctcttcatggtctcaagagctcccagaatcatcctcttggtaagctaagtagttattagtaaggcccagggacaggactgagaagtaacatcttctattttttatttcagttttcctttaatttggaagcaaacaaacaaaaaacccttcagcttagggttttttcaattgttaaagtaatactgagcttcagttaaggctatgaaagaaaagaaaaaattgtaaaaagtagtaacgtgtgtttttcaagatattgtgggtaaaaacataataaaaagaa

SEQ ID NO: 53729 - DNA, 902 bp, Homo Sapiens
  misc_feature (763)..(763): n is a, c, g, or t
ggacgcgtgggcctccagactggaaaaatgtgttaatctttgcatcatattggactcttgaaggcaatccttcctctggccaggaaattttttaaaaaataatactgtgttgtgtttatctaaatacgtaaactcaagctaccaaagagaaagatgttgtaatcatatctgcatgtcctaaattttgaatttagatattccaatttgcatcagtctttctgtggctcaaataatgatgattatggaatgaattttaatgtccctacttgtgaataattagctttctcaaatgtaggctttttacaaattttaaattttaaaatattagtttaaatgtgtgttatactgataaaatttcatctttcaaattatagtctattattttaaagggatttttcagtatgatatgggccattttgttcatctatcgcaaagtaaaaatgtaaaatccttacagagaattgtttcacaaaacttatatttcatgtcaattgtatttattttaataatagctcacaatgcctttagtaagtaataaagtctcttattagaatcttgtattttttaattgagctaatcaaaataattcagccaagtctatttgaaatagaaaactgtctatttaatatagtaaaatcaatgctccccttaatgttgttacaaagatatggtaactgtaatatgggtaaaagtttattcaaagaaaagagtacttgggtagaaggattcttttaacaaatttgagggagatttgattcctaanttcacatggtcaatttttttataggaaatatggacttcccaaatttatttatttaaaaccttaaaatttgggaaacctgaaaaagaggagtttggaaaaataatttagatccaaaggggcaccatggggaggtattgga

SEQ ID NO: 53730 - DNA, 684 bp, Homo Sapiens
catctggcaacccattatatgtgtcatagtaccatgtagtaccatagagctagacacaggtgccatgttgtgtcttgaaatgtattcaccaggcttccaaaggtttacctcaatcccctttactcaagaagcctcagttctactgacagttggtaataataacctctctgtcataatgtacccaaaatagagtaagaatatcatgcttttcagtaatactccagtgaatgaggctaagagtaccatttttgttcttataaaagaatttttttggacatgaatacaaagatgtcaggttaccaaatcatttgctagtagatcctaacaatatcacctataggaaactgaacgtagcctttaaacattaagtgatgataatggatttggccgggcgcggttgcctataatcccaacactgagaggctgaggtgggtggatcacttgaggccaggacaggaccagcatggcaacatggtgaaaccccgtctctaccaaaagacaaaaacatacaaaaattagctgggtgtagtggtgtatgcctgtaatcccacactattagggtggctgaggcacgagaatcgctgagctggacgcgcagaggtgcagtgagctgagatcgtgccactgcactccagcctggtgacacagactgaagacagactccaaaaaaacaaaacagacatc

SEQ ID NO: 53731 - DNA, 806 bp, Homo Sapiens
  misc_feature (622)..(622): n is a, c, g, or t
  misc_feature (694)..(694): n is a, c, g, or t
  misc_feature (734)..(734): n is a, c, g, or t
  misc_feature (769)..(769): n is a, c, g, or t
cattcctgtctttctgcatgtgtgtgtgtgtgtgggctgggtagggactgtttttgagatcactgggctgaaatgtattctaggggtgaaggatctaggatgtacctgctcgtcatttcctgacttcaccttttaccaattcttttcttaacaaatttaaaattggtcagagcaggagctgctagctggctttttaacagtgtttctcataatggcagtactcagcaaatagtttttctcttgtctcctaaaattaagttgcaagactaatgtaacaaacagtaaaatttaagctaaagaactcagtataggctgggtgtggtggtttacgtctataattccaacactttgggaggctgaggtggaaggattgcttgagcccaggagtttgagaccagcctgggcaacgtagggagaccctgtctctacaaaatttaaaaacggcaacaacaacaaaaaaccctactagctgtgcagcggagtggtgcgcacctgtggtccctaactacaagctactcagaaggcaaggtaggagcatcactggggcccaggaagtcaaggctgcactgttcataccattgcactccagcctgggtgacagagcgagaccttgtctcaaaanaaaaaaaaaaaacaatctcagtaataatgaacactgtggctgggtttggtggctcacacctgttatccccancactttggggaagctgaagtgggcaaatcacctgaagtcnggaattccaaaacaacccgaacaacattttaaaancccctctccactaaaaaaaaaaaaaaaaaaaaaaaaa

SEQ ID NO: 53732 - DNA, 540 bp, Homo Sapiens
ctcgtaataaattgtcatgtttgaaatgtatcatgcttgttttgctctacatagttttttggtactacataactgtagacttaagtatctttttggtggaaataaaatatgaaatctctttaattttgttaatgttaggtctggtattcgttccattaagttccactttaaagtatggaaaaatgttataaacatctgctttaaacaatgaatggtactgcaatagtcctgtaaagaaaaatgaatggagtaaagtccttcaagttttcatttaaagaatggcatagctttataatacattaagtttttaatatgcggaatgtatttaatatcctaaagcgatgaattgtcttggcattatgctatcttatgaaacactttcttactctcacattgtgtctttatagttttcaatatcagcaaaacctttaaatagtcttagttgggtgttgtgtatcattgtacagcaactgttagtacatgtggtatttctgatccatgtaataaagtacatttgtcatgtaaaaaaaaaaaaaaaaa

SEQ ID NO: 53733 - DNA, 707 bp, Homo Sapiens
  misc_feature (154)..(154): n is a, c, g, or t
ggaaaggcagcatagctccacattattcgtaaaaaaaaaacggtatttaaaaagttaaaaattcttaagcccatgtaaaagcttacatattaccacctttatgaactatgcgttactaggccccaaaaacaatttagaaactttaatgttttanaaaaattatagtggctaagttaattaaattttgctagccacagttcatccaagtaatgtcaagacatatttgccattcagttttggtgataaagagcgcaaaagagaatatgtttctgtattgttagtcaagtttaataatgtttcacctaagtaaaactcatcttgttttgtgtgtgaccatcactgaagtatgaacaacaggcatgcaacccacagttaatccacattttcatcatgatgcagcattcacaaatcttattagaaaagttgaatcgcatgactacatttatacaggggaaattcaagcatttgtgtgtgaattaaatgcttcgttaataggataagcaggtgattcatttggaacttatgggatgcagcataaccaggtgaaatctaatggtgatttatttccaaagaccaccaggtttgttcaagtgcattgctagtctgtgtttgtgtttaacccatgcaacaatcctcatgacagtaacaaggattatgaccaataatgtggttctaaagaaaagttgtaaggcaaaaaaaaaaaaaaa

SEQ ID NO: 53734 - DNA, 438 bp, Homo Sapiens
gcccccgtccccggccgccgcgcccgaggccgtgccgcccccgccggcgcccccctcctactcggacaagggcgtccagactcccagcaagggcacgccggcgccgctgcccaacggcaaccaccggtactgccgtctttgcaacatcaagttcagcagcctgtccaccttcatcgcccacaagaagtattactgctcctcgcacgccgccgagcacgtgaagtgagcgcccacactacagccgcagacgctttgcacgccccgctgcgatgcggggagggggccgcccccaggccgcacggactgccgctcctgggaaccccgccacgcacaggcctcggcggagggggccgcagggggcagcgcccgcctggacccttggcacttaataaagaagttcagtttgatgagaaaaaaaaaaaaataaaaaaaaaaaag

SEQ ID NO: 53735 - DNA, 666 bp, Homo Sapiens
  misc_feature (29)..(29): n is a, c, g, or t
agctgccggcagccctgcggctacggagnacaggggtgggaaccgccaaacctctcccttctttttgacttcacccttggataccatcaaggccagaggatggaaccaagataacataaaataggtgctcctttgtgataatgggctatttgtatctctgagggcttccacacaggatggccattcaagaagcttctgctctgcctttcattacagtctatctttagtcctcctaaaccttcagctataatctctatgcaatcaacttaaatatatgtttgtagtattgtccctttctcccaaattccatgtaaaacacttgcctgaattgaattgtttccacaaagttgttttcccctgtggactttgtttatatcagtagtttttattttcccaattttccaaattcaagagtgataattataaatagttgtgttcttgtttgttatctttctcactagaatgtatactctaagaaggcaagaaccttgcttgctttattcattgttgtattcctagcttctgttacagtgtctggcacaagagtaagtgctcaataaaaatttaaaatccacgtgtgaataaatgtgattaccatgtgccctaccgtatattgagaaaaataagaatacatgtgaaaagcacgagattaaaaaaaaaaaaaaa

SEQ ID NO: 53736 - DNA, 766 bp, Homo Sapiens
atgacataacaagtggttgatcatactgtaaaactcaaatgtgaagggaaggctggaacctactggaaactgaagatctaacgaaaagaaggaacttttaggaactagcagagacttcaaaatgttgagaactctcttttttcataagagaagataaaaactctgatggtcacactcataaagacaaaaaacaaataaaaaacaaacaaaaactcagaatcacaagagcaaagaaaatgtaggtaaaacaataacagaagaggtaaagaaatttatgtgaatgggacactctggggcacagaacagaagaggagaagaaacatgaaagtaatgctctgcacaaggatgtctgagtgtccttgattccaagggcatttaaaattagccactggatgagaaccatgaaatgccatgactcttacagctcccatgaaagacattggatggaacttatcctaactggaccaaattctaaaaaattttacatgatattataatgagttgaaagttgaaaaaaaaaagctcttctagattaccaagaataaaacacaaatttctagctgactgaattaattctcatctctctatagaaagatcatagaaattttttttatcatgcaaagaaatagctaaaaatttacaaaaatatagacgtgcattaggcagttcatgaataaatggttttttccttttttctccagaattgtgatgttatggtactttcggtttaaattgtattatcaggattatattcatggtagtaatt

SEQ ID NO: 53737 - DNA, 620 bp, Homo Sapiens
gcggcgctgcgcgtgcgttgttgagtgttcgggacgccggcctgcaggcgccatggtcttcctcaccgcgcagctctggctgcggaatcgcgtcaccgaccgctactttcggatccaggaggtgctgaagcacgccaggcacttccggggaaggaaaaatcgctgctacaggttggcggtcagaaccgtgattcgagcctttgtgaaatgcaccaaagcccgatacctgaagaaaaagaacatgaggaccctctggattaatcgaattacagctgctagccaggaacatggactgaagtatccagcgctcattgggaatttagttaagtgccaggtggagctcaacaggaaagtcctagcggatctggccatctacgagccaaagactttcaaatctttggctgccttggccagtaggaggcgacacgaaggatttgctgctgccttgggggatgggaaggaacctgaaggcattttttccagagtggtgcagtaccactgaggactgttgctgtattgattaggaaaagagacagagtaatttgcagtttgtttgatttatacttttgtttatctacaacccaataacagacatgagggatggccctgtctctctggga

SEQ ID NO: 53738 - DNA, 708 bp, Homo Sapiens
  misc_feature (635)..(635): n is a, c, g, or t
  misc_feature (662)..(662): n is a, c, g, or t
taacacagtatttattttgttgcttaagctgtccagcttggctattaggagttctgccaggttggctactatgtccctttgatgtgcccatccttttgatttttgagcacttcttactttctggcactacaagatgccccaggttcatcttggatattccctgccccaaccctagaatccctagaatcaacccctgctccaaagagccctggttccttttgttggagaatcatacttagaaaccaagatctgggcattagatgtgcttgttgctactgggatgtcactgtttgtagcagagttgagaaatatgtatgtatattaatccatgcatatgtacacatctataattatttatgtgtgtacaaagctaaacatgagtttgtactgccgtcttcaactcaaaatttgtcccaaaattttgtggcatatgtttagattttaaagttgatattttccctattgacagaataaactcattaaacgaaaaaaaaaaaaaaaatcacaaacacaaccttgtcggccgcctcgacccagtcgactctagactcgagcaagcttatgcatgcggccgcaattcgagctcacttgcccaattcgccctatagtgagccgtattacaatccactgcccgncggtttacaacggcgggactgggtggngtaatagggagagggcccgaccgatcggctttcaaacagttgcaca

SEQ ID NO: 53739 - DNA, 622 bp, Homo Sapiens
  misc_feature (563)..(563): n is a, c, g, or t
gtttaaaaagattgtttttgtcttttggtttcttcctttctcctggagaaatgatctaccagtcaaggcaatatgtagcagatccctgggaattaaaggtttgcccatttgttcactgtatttagtccctgctacattccaggcattgtactaagtatggggaaccacagagaagacattccctcagaaactgctgcagtgctttcgcttatccctacctaaaaaaccgtcaatgtgaaatcatttccttgattataactataatgataatggattagtttatataaacctatgtttagacaagttcaagacaagcgtctttctataaaaagtattgaaaatgaaggaaatgagatcatgtttcaatttattaaagcagggaagagcgttctgtggttagttcgtgtctaggatttgagtgccttactgaatgcatttaccagcaaacatgtagcaatctgttctctcattgtgattgtggaagaagctcatgtaaaatgatagtcattaatgaggaagtatggcgtggtacttattctgtaagttcagagtatgctgagtgntaatagattatcatattgcctgaaaataaattcatgatgacatgaaaaaaaaaaaaaaa

SEQ ID NO: 53740 - DNA, 635 bp, Homo Sapiens
  misc_feature (552)..(552): n is a, c, g, or t
actgcattccaggttgggcaacagagcaagactctgtctcaaaaaaaaaagaagaaagaaagaaattgatccctcataataggctgtatagcagattctactgcaaaggctatggttgcacaacagacttctttgaatttgcttgctaaacttttactggataatactgggattacaggtgtgagccactgtgcccagcctctcctgtttaactgtattcattctaatgtttacttacttctttaatttgtaaaattgggtcacttagagttttttagcctatcttgccatttagccactgttactgataatttggatggaaaagaaaaataaattatatcacctctcaaaaaaaaaaaaaaaaaaaactcgaggtcgacggtatcgataagcttgatatcgaattcggcacgagcttttgcatattgtaactaaatttaagaataattcagattaagtagttctgaaatttggtatagatagcatagattgtctcatgctcatgagtgacataatgaccctggattctgttacatacttctaaagctctgncttgtttgtaggtgcagcagctgaaatctcttctcagttgtttagctttagctatgctgcctggagtctttcccatgcaggtg

SEQ ID NO: 53741 - DNA, 888 bp, Homo Sapiens
tgtgtctcaggaagctgctcaggtcttggagtcagcaggagaagggccattagatgtaaggctacgaaaacttgctggagagaaggaagaactactgtcacagattagaaaactgaagcttcagttagaggaggaacgacagaaatgctccaggaatgatggcacagtgggtgacctggcaggactgcagaatggctcagacttgcagttcatcgaaatgcagagagatgccaatagacaaattagcgaatacaaatttaagctttcaaaagcagaacaggatataactaccttggagcaaagtattagccggcttgagggacaggttctgagatataaaactgctgctgagaatgctgagaaagttgaagatgaattgaaagcagaaaaacggaagctacaacgagagttacgaacagcactggacaagattgaggagatggagatgaccaacagccacctggccaagcggctggagaagatgaaggccaataggacagcacttctggcccagcagtaggaaaaccacccttcaacctgggtgatgctccttggggccctacctagagggactgacttttgtccattgacacaaaccccttttagtactgttttgagttttgtcattaaaacagccacctttgtattttataatttatgacagaatgaagtcattttgaatctacatgaatgaacactttggattttgttgtagtttgattctagggtagaaccagtccatgctggttttattttttatctcccctaattgtagaatcatgtttactcaacatttttccccagcctgcctcagtaactggggcactcggaagccttgggcacgggggttctgggaaggacagacagccaattctatggaggggctcc

SEQ ID NO: 53742 - DNA, 516 bp, Homo Sapiens
gctgcagctctactgggccatggactccacatttgagctctgcaagatctgtgctgagagcaacaaggatgtgaagattgagccgtgcgggcacctgctctgcagctgctgcctggctgcctggcagcactcggacagccagacctgccccttctgccgctgcgagatcaagggctgggaggccgtgagtatctaccagttccacggtcaggctactgctgaggactcagggaacagcagtgaccaggaaggcagggagttggagctggggcaggtgcccctttcggctcctccattgcccccacggccagatctgccccccaggaagcccagaaatgcccagccgaaagtgagactcctaaaggggaactcccctccagctgcgctgggaccccaggaccctgccccggcctgaaggccagggcacccagatgtgctgctcaagggagccccaagggctggaagggggttgtgaaaccgaaataaactgccaagcctggtctgtcaaaaaaaaaa

SEQ ID NO: 53743 - DNA, 722 bp, Homo Sapiens
gcgtccgctctggggagctaggaaggggtgtgctgagttctataatataagctgccatatattttgtagacaagtatggctcctccatatctccctcttccctaggagaggagtgtgaagcaaggagcttagataagacaccccctcaaacccattccctctccaggagacctaccctccacaggcacaggtccccagatgagaagtctgctaccctcatttctcatctttttactaaactcagaggcagtgacagcagtcagggacagacatacatttctcataccttccccacatctgagagatgacagggaaaactgcaaagctcggtgctccctttggagattttttaatccttttttattccataagaagtcgtttttagggagaacgggaattcagacaagctgcatttcagaaatgctgtcataatggtttttaacaccttttactcttcttactggtgctattttgtagaataaggaacaacgttgacaagttttgtggggctttttatacactttttaaaatctcaaacttctatttttatgtttaacgttttcattaaaattttttttgtaactggagccacgacgtaacaaatatggggaaaaaactgtgccttgtttcaacagtttttgctaatttttaggctgaaagatgacggatgcctagagtttaccttatgtttaattaaaatcagtatttgtctaaaaaaaaaa

SEQ ID NO: 53744 - DNA, 847 bp, Homo Sapiens
ccagcgcgacaagaaagtctccttaaccaaaactgccaagaaaggcttggaattgaaacaaaacctgatagaagagcttcggaaatgtgtggacacctacaagtaccttttcatcttctctgtggccaacatgaggaacagcaagctgaaggacatccggaacgcctggaagcacagccggatgttctttggcaaaaacaaggtgatgatggtggccttgggtcggagcccatctgatgaatacaaagacaacctgcaccaggtcagcaaaaggttgaggggtgaggtgggtctcctgttcaccaaccgcacaaaggaggaggtgaatgagtggttcacgaaatacacagaaatggactacgcccgagctggtaacaaagcagctttcactgtgagcctggatccagggcccctggagcagttcccccactccatggagccacagctcaggcagctgggcctgcccaccgccctcaagagaggtgtggtgactctgctgtctgactacgaggtgtgcaaggagggcgatgtgctgaccccagagcaggctcgcgtcctgaagctttttgggtatgagatggctgaattcaaggtgaccatcaaatacatgtgggattcacagtcgggaaggttccagcagatgggagacgacttgccagagagcgcatctgagtccacagaagagtcagactcagaagatgatgactgaaagggactcgggactgaaggtctcctggaagcttctgggtctcactggaccatcaggactgctgccgcccctctggagagagcagctttttatttgtctgtagacagggaacatgatgggcactgacctcctgtaaag

SEQ ID NO: 53745 - DNA, 618 bp, Homo Sapiens
  misc_feature (592)..(592): n is a, c, g, or t
ccaagcaaggccacattgtcgccatcagcagcatccagggcaagatgagcattccttttcgatcagcatatgcagcctccaagcacgcaacccaggctttctttgactgtctgcgtgccgagatggaacagtatgaaattgaggtgaccgtcatcagccccggctacatccataccaacctctctgtaaatgccatcaccgcggatggatctaggtatggagttatggacaccaccacagcccagggccgaagccctgtggaggtggcccaggatgttcttgctgctgtggggaagaagaagaaagatgtgatcctggctgacttactgccttccttggctgtttatcttcgaactctggctcctgggctcttcttcagcctcatggcctccagggccagaaaagagcggaaatccaagaactcctagtactctgaccagccagggccagggcagagaagcagcactcttaggcttgcttactctacaagggacagttgcatttgttgagactttaatggagatttgtctcacaagtgggaaagactgaagaaacacatctcgtgcagatctgctggcagaggacaatcaanaacgactacaagcttcttcccagggt

SEQ ID NO: 53746 - DNA, 1010 bp, Homo Sapiens
ctgccatctggcctttcaggtttggatatgacaatgaagggtggtctagtctagaaagatcagctcacctcgctcaatgaaacaggtgcagatttcataacaattttggagagtgatgcttctaagccctatatggggaacaatgactctaaccatgtggctaggggaaaagttgggtttctatacagactttggtccaagcacaaggtatcacacttgggggattatggctttgtcaagatacccaattgtgaaatctgagcatcaccttcttccgtcaccagagggcgagatcgcaccagccatcacattgaccgttaacatttcgggcaagctggtggattttgtcgtgacacactttgggaaccacgaagatgacctcgacaggaaactgcaggctattgctgtttcaaaactactgaaaagtagctctaatcaagtgatatttctgggatatatcacttcagcacctggctccagagattatctacagctcactgaacatggcaatgtgaaggatatcgacagcactgatcatgacagatggtgtgaatacattatgtatcgagggctgatcaggttgggttatgcaagaatctcccatgctgaactgcagtgattcagaaattcagatggcaaaattttaggatccctgatgaccccactaattatagagacaagcagaaagtggtcatagaccacagagaagtttctgagaacattcatttgtaatccagattgggatcctacaaagaaggacacaattatgaaaacaacataatttcatatgaatactcccaaatagttttgatgagacatttaagaccaaggaaagtcattggctggggaaaatctaagcaacaaaacgttggtagactcaagacgagcagcttactgacagtgggcaaattcaattgagcacgctcgcttcagaaaccatggtaccttgcgcggaaactaccccattgtaaccaggtgctagtaaacattcttcaaagcagaacggacag

SEQ ID NO: 53747 - DNA, 501 bp, Homo Sapiens
  misc_feature (19)..(19): n is a, c, g, or t
  misc_feature (484)..(484): n is a, c, g, or t
ccttccttgctgaccaagnaggaacagaacacagagcagcctggcagtgagccaagactgcgccactgcactctggcctaagcaacagagggagactccatctcaaaaaaaaaaaaaagattatttctctaacttactggtttatcttttgtagcttatttcaggtgatttgttgtgtttgtctatagagtaaaataacatgtctaatgagttataatttaatgtccttccattcaatcactgtatttcaaatttattccaatattttggaataagcttccaatattttaacttaaatagggaaggtcatacttggtattttcctgacctcagctggaatgccttcatagtgttcacatgaacacatttggcctgagagagacttattatgccgagaatgtgtgtaaccctttttacttaggaattgtgggtggagtttttccccccgcccaagaatgattgttaatttccgtccatcattttnctttgattgttcttcat

SEQ ID NO: 53748 - DNA, 924 bp, Homo Sapiens
  misc_feature (13)..(13): n is a, c, g, or t
  misc_feature (16)..(16): n is a, c, g, or t
  misc_feature (20)..(20): n is a, c, g, or t
  misc_feature (34)..(34): n is a, c, g, or t
  misc_feature (38)..(38): n is a, c, g, or t
  misc_feature (49)..(49): n is a, c, g, or t
  misc_feature (57)..(57): n is a, c, g, or t
agcctttcagggnagnctgnaataaggggccagnctgnaaccagcctgnaaacccgncaatgtgactgtggacgtttttgtgcagtggttccaagatttgaaggagtgctactcctcaaaacgtcttttctactggtctctatggtgggctttcgccacagcaggttttaaccaggttttgaactatgttcaaatcctgtgggattacaaggcgccatcccaagattcttccatctataatggggccgtagaagctattgcaacctttggaggggctgtggctgcctttgcagtgggttatgtgaaagtcaactgggaccttctgggagagctggctctggtggtcttctcagttgtcaatgccggttctttatttctcatgcattacacagccaatatctgggcgtgctatgctggctatttgatattcaagtccagctatatgcttcttataaccatagcagtatttcagattgcagttaatctgaatgtggaacgctatgccttggtatttggaatcaacacctttattgccttggtgattcagaccatcatgactgtgattgtagtagatcagagagggctcaacttgccagtcagcattcagtttttagtttatgggagctattttgcagtaattgctggaattttcctaatgagaagcatgtatattacctactcaaccaaatcccagaaggatgtacagagccctgctccaagtgagaatccagatgtgtctcacccagaggaagagagtaatatcatcatgtcaacaaaactctaacctcatcgcacaaacgcaacagtggctttcaaagttatgcaataataaggaaagattttgagatgggtggcatatgttttgccataacttgacatgctttgcaaatctggattcaatggaccttcaaaacccacaaacct

SEQ ID NO: 53749 - DNA, 529 bp, Homo Sapiens
cgcagcacgtgcgcctccactaagctcgagacccggcctgtgctgccctgcccgtctcagggccaccaagtctgacccacacagcgtcactcactcccacacacaccccctggctctgctgaggttactgccttaccctgggcctcagccccaccttccaaagggaggagcatcattccttccttaccccctttctagctgtgtgatgtagaccaaagtcgttgcccctccctgggcctgggaaccagtcggaactgggttccagtccagctgtgctgtgtgagcctgtgcaagtgacatgacctctctaaaccttggttttctgctctctggagcggtgaaccggtggttgtctgcggggaagagatgataaagagcacgggcacggtctggttcatttctgtatctaccccccttccgcccacgcccccgaccctttgctcaataaacattccgcactccaaaaaaaaaaaaaaaaaaacactagcgtgcggccgcaagcttattccctttagtgagggttaatttt

SEQ ID NO: 53750 - DNA, 642 bp, Homo Sapiens
cccacgcgtccgggatgccaagtaccgtgacggcagaggtgcagcctcagtgtggaagagccgtgggattctcttcaggcactgaaaacccacatggagtgaaggctgtcaccagggggcagcgctgtgccatcgccctgtggttcaccctggaccctcgacacagcgagcgggacagggtgcaggcagatgacctggtgaagatgctcttcagcccagaagagatggacctctcccaggagcagcccctggatgcccagcagggcccccccgaacctgcacaagagtctctctcaggcagtgaatcgaagcccaaggatgagctatgacagcgtccaggtcagacggatgggtgactagacccatggagaggaactcttctgcactctgagctggccagcccctcggggctgcagagcagtgagcctacatctgccactcagccgaggggaccctgctcacagccttctacatggtgctactgctcttggagtggacatgaccagacaccgcaccccctggatctggctgagggctcaggacacaggcccagccacccccaggggcctccacaggccgctgcataacagcgatacagtacttaagtgtctgtgtagacaaccaaagaataaatgattcatg

SEQ ID NO: 53751 - DNA, 857 bp, Homo Sapiens
  misc_feature (848)..(848): n is a, c, g, or t
gagcctggagaggcacaaggaacagctgctggctgcggagcccgtgcgcgccaagctggacaggcagcgccgcgtcttccagccctcgcccctggcctcgcagttcgaactgcctggggacttcttcaacctcacagcagaggagatcaagcgggagcagaggctcaggtccgaggcggtggagcggctgagcgtgctgcggaccaaggccatgcgggagaaggaggagcagcgggggctgcgcaagtacaactacacgctgctgcgcgtgcgcctccccgatggctgcctcctgcagggcactttctacgctcgggagcggctgggggcggtgtacgggttcgtccgggaggccctgcagagcgactggctgccttttgagctgctggcctcgggagggcagaagctgtccgaggacgagaacctggccttgaacgagtgcgggctggtgccctctgccctcctgaccttctcgtgggacatggctgtgctggaggacatcaaggccgcgggggccgagccggactccatcctgaaacccgagctcctgtcagccatcgagaagctcttgtgaaataaaagcagggttggcctcagccctgtgggtctgtctcatgctctccctgttcctctccccgccaccccagggcctccaagccacctctggaaatacttggctctgccccatgggcacgggaggggcgccagccgtggagctgtggaattgggccccgtggcagagccccaatcccttggggggcttgtggggaatgccccccaagccccccgaggggaagaggccctgggggacacccaacaaattctaaggcccctcccctagcctggcntttgggtaa

SEQ ID NO: 53752 - DNA, 888 bp, Homo Sapiens
  misc_feature (705)..(705): n is a, c, g, or t
  misc_feature (733)..(733): n is a, c, g, or t
  misc_feature (798)..(798): n is a, c, g, or t
gtgggtgcgaggcgtgctcctggctgttgcagattgctgcacccgggagctcttagtggacagagctagaggatatgtgcacgtacttccatctctctctctgtctcatctattcacagctgggaatgatactaatacctccgattttagcccagcaccacagggtacgttccagtttttctctctttccatagctgtaaggccctttctgggaatggttctcattctccttaatctattattgggtcagttttcctgcatgtccccagcctcccatcactgccacccactccccacagagatgccctgctcatccgactggggctttgactcccacactgtgtacccctcttgtgtggacgccctgctgccaaaaccttcagcaaacagctttccaaatggaagttgtcactgtcagggcctttacaatcagcaacagcaaaatctacatgctgctgagggtcctgcctcattaagatgcaataaatatgtaagtacataaaaacagcaatagaagaaacgtaatgctttattctcaaatatgatgtctacatagaaaagccaaaattattaagaatagtaagaattcacccagcactttgggaggccgaggcgggtggatcatgaggtcaggagatcgagaccatcctggctgacaaggtgaaaaccccgtctctactaaaaatacaagaaattggccggggncgcgtggcgggcgccctgtggtccccanctgcctggggaggcttgaggcaggaaaaatggcgttgaaacccgggaaagcgggagctttgccantggagcccgaagattggcgcccacctggcaagttccgccaatttcccaaaccctgggggcggaaaaagaaggccgaggaactttccgttt

SEQ ID NO: 53753 - DNA, 573 bp, Homo Sapiens
ggccattatggccggggaatccatttgtcatgatgtatttttaagctgttctgcagattggggtgttattatatggcaacaggagaatgtcaagccatctttgagtttttatccagctacttctgttgtttacgacgttgcctggtctccaaaatcatcctatatatttgcagctgcaaatgagaacagggtggagatttgggaccttcatatcagcactttggaccctctgattgtgaatactgctaaccctggaatcaagttcacaaccattctctttgccaaacaaacagattgccttctggtaggagacagtgatggacaggtttctgtgtatgaactgagaaatatgcctactgttttggaaactggccggggagatataatggatactttgcttggatccaagtcaaaccaatcagcataattcatcattcctaatatttttcttgtagttgttttaaaaaaggaattaacatccaatattctgtattacatactgtacaccagattttgatttcagaaaacaatatttgatgtataacttccacttaatttaaatttaataaactt

SEQ ID NO: 53754 - DNA, 662 bp, Homo Sapiens
aacctgattttatggattttgagttagattctctaccctctatcaatactaaaaatagattaggagggtttttttttctgtttatcatgttgaatttcattgacttaattagtctttaaatttgaaaacatgttttagggagtttagttctagaaatttctcttagattgaagtgacagaatctgaaagaaaagaatatgattgagctatttgttttcctgaacacctcaccttttatgatgcaataagttactctgagtttcttggcagagtttttgacagctgttgctttcaatggattccattcctgtattccttatgggaggttgtttttaaaatagactactgcgattgaaatgaactcaatatgtagttaagttatagttttcttcaatgtatttttagttacttgggtcacaaatgttcaatttcagcatattttagggtgagtaatcaaaaatgtgaatttgcctttgatttcctaccactgtctgagctttcataaagcattctctttagttgtgatttgaatctatagtctgtttctaaaagacattggtctgtttcttaaatgatctcccagcccatggaaataatgaaggtgtacctcagaagatcaattaaggtaaatttggaattcatggtgttttttgaaattaagg

SEQ ID NO: 53755 - DNA, 624 bp, Homo Sapiens
ttgacaggaaggtgacccccctgcaaaaggagctgcaggagacgctgaaggggctgctggggagcgccgacaagggcagcctcgaggtggccacgcagtatggctgggtgctggatgctgaggtgctgctggacagtgacggcgagtttctgcccgtaagggactttgtggcacctcaccttgcccagccaactgggagccagtcaccacctccagggtctaagaggctagcgttcttgcggtgggagttccccaacttcaacagccgaagcaaggacttgctgggtcgctttgttctggcccggcgacacatagtggctgcaggcttcctgatagtggacgtcccattctatgagtggctggaactcaagtctgaatggcagaaaggcgcctacctcaaggacaagatgcgcaaagcggtggctgaggagctggccaagtgacttgtgccagcagcatggactgcgtgcctctccgccggaggtctagctgtgggcggccaagaagggtcacccttgaggacaaacctctgtgcaggaccttggccagagtggggagggtggccagccactctgagggacagaacgtcctcttgtgtataataaacctttaattttggtgttg

SEQ ID NO: 53756 - DNA, 392 bp, Homo Sapiens
gtcgacttttttttttttttctttttttgagacagagtcccactctgtcacccaggctggagtgcagtggtgcaatcttggctcactgcaacctccacctcccaggttcaagcgattctcgtgtctcagcctccccagtagctgggactacaggtgcgccatgacgcctggctaatttttttgtattttcagtagagacggggtttcaccatgttggccagtctgctttcctcctaacctcaagtgagccgcctgcctcgaagatgctttatttataagcgctttggacacactttaataaatgctctattgtatacagttgaactctatataacattttgaataatattgttaatgcttaccctaagtactactatcatctctggtcgacg

SEQ ID NO: 53757 - DNA, 619 bp, Homo Sapiens
attttatggtggcttctatgcagtttattaatattgtagtccattcagtagaagatatgaatttcagagttcacctgcagtatgaatttaccaaattaggcctggacgaatacttggacaagctgaaacacactgagagtgacaagctttcaagtccagatccaggcttacctggacaatgtttttgatgtaggagctctactggaagatgctgaaactaagaatgctgccttggagagggtggaagaactggaagaaaacatttctcatttatctgaaaaactgcaagacacagagaatgaagccatgtccaagattgtggaactggaaaagcaactcatgcagaggaacaaggagctggatgtcgttcgggaaatctacaaagatgcaaatactcaagttcacacattaagaaaaatggtcaaagaaaaagaagaagcaattcaaagacagtctaccctggaaaaaaagattcatgagctagagaaacaagggaccattaaaattcacaagaaaggggatggggatatcgccatactgccagttgtggcttctgcacattgtccatggggtcagaagtggtagcaggtaactctgtgggacccacaatgggggccgg

SEQ ID NO: 53758 - DNA, 752 bp, Homo Sapiens
  misc_feature (13)..(13): n is a, c, g, or t
tggaccccccttngaggtagcccgccattgtgttggtacccgggacttcggccattatggccgggaaggacaccaggacccaagaagataaaaggagagatgttgatctggatttgtctgataaagattacagtagcgatgagtctatcatggaaagcataaaacataaagtgtctgagccctcgagatcctcatccctaagtctgagtaaaatggactttgatgatgaaagaacttggactgaccttgaagagaatttgtgtaaccatgatgttgttcttgggaatgaatccacttatgggacgccgcagacatgctaccctaataatgaaataggtatcctggacaaaacaataaaaaggaagattgcaccagtcaagaggggagaagacttgagcaagtccaggaggagcagaagtcctcctacatcggagctgatgatgaaattctttccttctttgaaaccaaaaccaaagtcagattcacacttgggaaatgaactcaagttaaacataagtcaagaccaaccacctggtgagtcagagcattataaaatatgtatcagaatggtagaaatttaacattaatcagtatgcttgcagaatgcttaaaatcctaactttccttaatgctcaatagaattaagtcaaataattgggtgattttgaaaaatttgatttattttatgggtctatatgaggctttaaaaataattaggttttaataaagtggagataccatcaaaaaaaaat

SEQ ID NO: 53759 - DNA, 846 bp, Homo Sapiens
agcggggggcggcctgggactcgggggcggggtcagtcatataaggctgtgcccagcgcttttggaagcagtaagtccagcccgaggctaaggaggtgttaaccaccgaaggggggtagaatgtttttccccaccagaggaggcagcgaccacgtctcctctatggaggcattcaagagccgtccagctgaagcagcatcactgtctgagctcggaaggcacaatccacataggtctgcatggtccacagagctgcatacccacggggccagcgggaggtgggcagctgccgggctctcttctgaagcagacaggatctcactctgttgctgaggctggatcacagctccctgcaaccttgaactctccctcaagcaattctccccactctgccttccaaagcactagcattataggcctaagccaccactcccatccactgtagtgtaaactgtctccttcaatgtttccaatagttgcggagcagatcagataagggttcttcctgtctgttgcttcaagtttcattctctctttaaacaatacaaggttggcttccatggttccttcttaaagaatgttgaaggtgtgtcttcagattcatttagtgttcgtggaaccccagggaaagctgatgtaaaaacctcttttttctcccatatgtctcaaaaagttgtattttctgggtccaagggatctgcaagcctcctaaaggcatttccattgtcactaacacagtgtgtgaactgtaatctggcacgtatagttccaagaactctcatatagatgctgaagaacattgtgaaggttactcgtgttacaactgtgagtcattactagaggaac

SEQ ID NO: 53760 - DNA, 519 bp, Homo Sapiens
tttgttttgaagaggggatattatatttattgttgtttactgaatcctggtgtgaaagcatatcagatatgtatgaactgctactgctgtacttccgatttacggacatcattttattgctatttgtagacgtgataacatgaacatgagtacctatttatgtgggccttcagtggatgggcagtgccactcaggtctctggggtttccctctctaattttaagtaaattgacatataactactatgcttataaaaatgaagtaaggaaaacaagtagtcctgtttgccactaaaaacattttcaaaggaaaaataaaatgaaagtactttttactttttatgatactcagaaattaggatgaagaacttttaaaattgctgaagatcaaagaggttatctctgccagtcacaagtgtggctggtgtcattctgggtctgactggagccctcctggactgtttctttaatttcaaaagccctgcagacatagtacctggtcagaactatgcctcggttt

SEQ ID NO: 53761 - DNA, 683 bp, Homo Sapiens
gattttgccaactactagtatagactcaaatttgctatttaatttttaaaatacaatttattttgtaaatcctttaaaaaatatttggttagttttggattagaaatgatttatgttagccatgtgttgaagatgaaattggcatcagtgtagacggtgctgattgggaaaagttcatgattaggaaattcatgtaagactttttaagagtattttttaggttttcactcaatctttcctgtcacagtaacgtgaaaactgattattctttactccaagagaatgttttaacccaagcaagtatctaatactagagcattggttctgacattcattgtaaatcagtgaactgtaagatactgtctaaaaaatgtacatttgtaattagtgcctttattcatattttgaaataagttcttagttttatattatacctgttctttagaagtcatgttagcagctaattatttcagtgatgaaataatttgtgttttatatcccccttcacctccatgtattggttagcacagtttatagtaagtgaaaagcaagggacccacctacattaccttcaggagactgttctaccttttaatttgaaaacaaggaaattaaattttaacagaaatcttttaagtatgttataaccaaagtgttcaattatccttgcaagttcaaataca

SEQ ID NO: 53762 - DNA, 536 bp, Homo Sapiens
gcacgaggatacacggaacgttatatgggtcaccctgaccagaatgaacagggctattacttaggatctgtggccatgcaagcagaaaagttcccctctgaaccaaatcgtttactgctcttacatggtttcctggatgagaatgtccattttgcacataccagtatattactgagttttttagtgagggctggaaagccatatgatttacagatctatcctcaggagagacacagcataagagttcctgaatctggagaacattatgaactgcatcttttgcactaccttcaagaaaaccttggatcacgtattgctgctctaaaagtgatataattttgacctgtgtagaactctctggtatacactggctatttaaccaaatgaggaggtttaatcaacagaaaacacagaattgatcatcacattttgatacctgccatgtaacatctactcctgaaaataaatgtggtgccatgcaggggtctacggtttgtggtagtaatctaataccttaaccccacatgctcaaaatc

SEQ ID NO: 53763 - DNA, 534 bp, Homo Sapiens
ttccagggaaaatgatgtcatgtggtggtccaacttactggaaccaaagagacagtactttgcaaagaaaaggatcactgccaggtgcactggaattgctacagtttagtccgcatgatctctcctgaaggaggaagcctgtttcaaaaatagtttccatcatgagtctatcaatgagctcccacctctccagccagcctagaaagcaaacgagctgcccacagttctctgccctgtctgggaggttgaggccacagtgtatagactggtaagccagacaggcctcctcccgcaagctgctaccttgctttcacctgtaccttggtccccgggcagctagctataaagcaagagggacaggagcccagaagagacactgaggacaagagatcacaccagagtacatgtctctgcctctgttttcagtgtggctttggacaggaatatatgaataaatcactgccatacaggttttccaatacacaagtgctagaaaatacacacaattccccaatgcgtaaaaaaaaaaaaaaa

SEQ ID NO: 53764 - DNA, 817 bp, Homo Sapiens
  misc_feature (725)..(725): n is a, c, g, or t
  misc_feature (766)..(766): n is a, c, g, or t
  misc_feature (781)..(781): n is a, c, g, or t
  misc_feature (812)..(812): n is a, c, g, or t
  misc_feature (817)..(817): n is a, c, g, or t
agggtaatcctaagtcatctcccaaaagaggatttttcagggaagaaacagatcatttaattaaaaaccttctgggcaagagaattagcaaacttattaattcttctgatgagctccaagacaactttcgagagttctatgacagctggcatagcaagtccactgactaccatggtttgttgttaccgcatatcgaggggcccgaaatcaaagtctgggcccagcgctacctacgttggattccagaagcccaaatcctaggtggtggccaagtggccactctgagcaaactcttggaaatgatggaggaagtccagagtttacaagagaagatcgacgagagacaccacagccagcaggccccccaggctgaggccccctgcctgctgaggaactctgcccgcctctcgtctttgtttcctttcgctctgctccagcgacattcctctaagcccgtcttacccaccagtggctggaaagctttgggagatgaagacgatttggccaaacgagaagatgagttcgtggacctaggggatgtgtgacctgtttgttgagtgattgtgaaagaggaatgtgggagattgggacagctgatccctggatttgtgtcacgctacagctcatgctggctgggtccttagcccggcactccgttagaataacctgggccttcgggaaaagaggtggctctcattatttttcatgatttctaaagactatgncattaaaccgcatctgtagtattattaattggaaggaattnatactgaccgtaatnggttgtggcgtttctgatgctagtatatcanaccan

SEQ ID NO: 53765 - DNA, 711 bp, Homo Sapiens
aagcaggctggtaccggtccggaattcccgggatctggtattttgatgccaaggagcgggcagcagccaaagacaagtatcagctagcatcaggacagaaaggtgtccaagtacctgtatcacagccgcctacgcccacctagtggccagtcccagagccgcatggcagacagcttaaatgacttcaggagagccctgggcctgtgctggctgctccttccctgccaccgctgctgcttctgactttgcctctgtcctgcctggtgtggagggctctgtctgttgctgaggaccaaggaggagaagagacctttgctgccccatcatgggggctggggttgtcacctggacagggggcagccgtggaggccaccgttaccaactgaagctgggggcctgggtcctaccctgtctggtcatgaccccattaggtatggagagctgggaggaggcattgtcacttcccaccaggatgcaggacttggggttgaggtgagtcatggcctcttgctggcaatggggtgggaggagtacccccaagtcctctcactcctccagcctggaatgtgaagtgactccccaacccctttggccatggcaggcaccttttggactgggctgccactgcttgggcagagtaaaaggtgccaggaggagcatgggtgtggaagtcctgtcagccaagaaataaaagtttacctcagagctgca

SEQ ID NO: 53766 - DNA, 618 bp, Homo Sapiens
  misc_feature (618)..(618): n is a, c, g, or t
ttagaccagtgtcttctcctagccccatccctcactctatcacttgctcctactttcgtcatatgacatgcctgctcccctttcaccttctgccatgattgtaagcttcctgaggcctccctagaagctgagcagatgccagcaccatgcttcctgtagtctgtagaaccataagccaaataaacatcttttctttataaatttataaattacccagtcgcagatatttatagaaagaacagcctaatacaggtgctaaatacatatctgacaataaatggtagttatctcttagaactgttatgaggattaaacgagttacagtgtccatcttaaaaagataattctgaaaaaaatctcataggttcactttgccttgtcaagaatatgattaccattaacttctgtagataggaaaaaaatgtgctgagctccaaaactgacagacattttgctaaaacaatatcaaatctcattaaaatgatgacagttatttcaatagttgacagtagctatcccaatacaacctaacaaggcattttctcttcagaatcactcgatcatatggccatttccctaagcttttatagctattgcccagtgtacactgaagacaan

SEQ ID NO: 53767 - DNA, 583 bp, Homo Sapiens
  misc_feature (528)..(528): n is a, c, g, or t
  misc_feature (553)..(553): n is a, c, g, or t
cctctagattttgtacctgaagccttgtttggaattctaggctttctagatgatttctttgtcatctttttattgcttatctacatctctattatgtatcgagaagtgataacccaaaggctaactagatgaaaaagaaaacaaaactgagtttactaggatatctgagctaatgtagaacatcaaacagaaggacccatggcagtataaagcaatgaagcaatggagtattatctcacaaatataaaaccactataagacaaacatttgattatcatttgacaaatacctaggtataactggaattttcatgtttgaagttctaatattaagtttagaattataatgatctacagttgtatcttgattctatgttgcctggaaaaaatatggaattatataaaaagggatgcttttatatatttttcttttccccagaattacttagattaattagatgtatagtaaaatattgttaaatgtcagtttatccatcttatccttctcagcaggtacctatatgataantatatagctgtgaaactcatctaanatatttttgttccaataaaatattatatac

SEQ ID NO: 53768 - DNA, 613 bp, Homo Sapiens
  misc_feature (498)..(498): n is a, c, g, or t
gggtacagcgtattcccaagagagtttattttcctttctccaattaatgtggtcataaatttcggtaaaatcaagaaataggtgaagtgcaagctagtttctataatgaccattaaaaaaattctgctgtgtaattcttgccagttaaaattataacttgcaaatgagcagaataaatgaggtttttttcaattaaaaattactataaatccaggaggcaaactattttagcactcagattatctgatttaatacatattattgaatatcagtctcaaattttgctaaatgcttatcagcatgaaatatgttgatcagtgatgagttgggcttaatgcaaagatcctaatttaataaagaaacctgtaaattactgttacctaaaatatatgtgtatattaatttcacatataaaggtagatttttcaaagaaaaatttggtaggcggtagtttagaactctgatcaggtactacatcaaccaaaagaggaaatactntaaaaattccttttagcaacctgagcaatcttattctcgtaacaatagtagtaatttgggacattgcaaatgtttatcatgttgtaaagtagcatcagttgtatcctttcataaa

SEQ ID NO: 53769 - DNA, 1753 bp, Homo Sapiens
  misc_feature (1209)..(1209): n is a, c, g, or t
  misc_feature (1371)..(1371): n is a, c, g, or t
  misc_feature (1436)..(1436): n is a, c, g, or t
  misc_feature (1494)..(1494): n is a, c, g, or t
  misc_feature (1515)..(1515): n is a, c, g, or t
  misc_feature (1522)..(1522): n is a, c, g, or t
  misc_feature (1566)..(1566): n is a, c, g, or t
  misc_feature (1688)..(1688): n is a, c, g, or t
  misc_feature (1753)..(1753): n is a, c, g, or t
cggaggggaacacagacccaaccaaaaaaccctctacaaaaagcacccaggctgggtggtgaattccgcacgaggctcagtactgggaccaactaataggtagattttaatatggtggttttgttttggttttgtttttactacggtgctgatgtatatgtaatgtctaaaaaaagttatttgtacataagtttttacaatactgcagatatcactgggtctactatctgtaaaaaatatacatataaatatatatatactgtttgtttaaaatagagtatttttatttcattccttaactcatcatcacagcagtggtattgcacttcacatgacatctaattactaatttgtactgtatgacctctggcaacttgctccattttattcagatttttctagttttctgtttttactttgcacattgagcattgcttatttccttttaagaaatgtacagaacgctgaaatgtagaaatgaagtgatgttgacataccacttttaaagaaaacaacaacaaaaataaaagattatctgaatcaatccaaagtatagtttattttaagaccctcactggatctccaatcttaattaagcacacatattatttcctgggttttaaactaacctgcagcatcttttcctcaaaattttggatatcacttcctttaagacattttaatttacccggggagaagaattcaattccttttctccaacacttttggcaatttcaaactggccaccaacctggaatggactacccttttccttgaaaatttaacctgggtttggcgacttccttgaaaagcggaatcggtggtcaataaaggggggtaaaagggccaaggacaaaaacgtccacaccccttttgtgcacctatgggtaaacccactcaacatggtgcaaatattccccacgttcttatgggtaaaaaaaaattttcataccaataaaaccccccacttacaaaaaaacacaaaaatcttccccccataaattttttttccccccacaaacacttctttaaaagattaatccccacttttctcccccgcgcgccggaacacaagaggacacaattaacaccgggcgaaaaagcatgccccccctccccccccccccgcgactgtgtggggggccaccaaaaaaaaaaaaaattatacaaacaatttcaaatcgccttttctcctggggggggggtctngtgcagtcataaaaaaacaccaaacaccacacataattcaactctccccccccccgaacaacaccaaaaatatattctttttttgggaaacacggggggctggctcatatagaggtcaaaaacaactacacaacccaaaggagggccctccttcgttctctntgttacaccacccccccccaaagccatttctttcataacaccactctttcgtccgacggccaccnatcatggtgtgtaattaacacgttggccacacacacaacccaccccttgcgttcgttncttttgtattaaatacccaanccaccgntccacacagatattttctccttgaaaataaaacccaccaacgangaccaccacgaccgtttcggttccttttttttatcccccaacttccttttcatcgacacaaacacgccacccccgtgactgtttgctgttgtccaagtaattctcacaccccaacccgcccnccctccaccaccccggtctcgctaatactattcccctcctacaatattgtgtctatcctccactn

SEQ ID NO: 53770 - DNA, 632 bp, Homo Sapiens
cgcgtccgagtatctgcacaattagaaaagtcctcagaagctttttcttggagggtacactttcttcactgtccctattcctagacctggggcttgagctgaggatgggacgatgtgcccagggagggacccaccagagcacaagagaaggtggctacctgggggtgtcccagggactctgtcagtgccttcagcccaccagcaggagcttggagtttggggagtggggatgagtccgtcaagcacaactgttctctgagtggaaccaaagaagcaaggagctaggacccccagtcctgccccccaggagcacaagcagggtcccctcagtcaaggcagtgggatgggcggctgaggaacggggcaggcaaggtcactgctcagtcacgtccacgggggacgagccgtgggttctgctgagtaggtggagctcattgctttctccaagcttggaactgttttgaaagataacacagagggaaagggagagccacctggtacttgtccaccctgcctcctctgttctgaaattccatccccctcagcttaggggaatgcacctttttccctttccttctcacttttgcatgtttttactgatcattcgatatgctaaccgttctcagccctga

SEQ ID NO: 53771 - DNA, 748 bp, Homo Sapiens
ctcctctgccagttttttaaatcagatcaccctccatgttgttcctgacccacaggggaagctgtcctcagttgtagccgtcttgactggatgagtcctggcagtctttctaggcgaaccaagaatgtttgtgtgagggaaggtgtttgctgttgctttactgctgtctgtatgtgccagtgctggaacagaatttggaagattctgaataattagttacttattctcaaagaaaatctttgaaagaatcaggaggtcaagtcaagaacatgaaaatttatattttagtacagtagaaagaacattgggctctgggaattttatctgggttttctcctggcttttttttccctctgtgtaatttgggtaaatcagcctccctagctttcagttttctcttctgtgaaacaggaagactgaaccacgtaattaatatccaagggtcccttccggctctaaaaggctatgattctagatgagaagttatatcaagaaagatgtggccaatcagattgagtcatccaggcatacctttttagcttctgtttgtggagttgtctccagataagaggagatgtgccttcccaataactctttttttttttcctttcagaacattttccagatggccgaggtcacagcagagagatgtggccacctagctttccttatcccctttccttctcttaacgccatctcttaatctttcatgtccatgtcagacgagtaaccatacaaaaaaaaaaaa

SEQ ID NO: 53772 - DNA, 633 bp, Homo Sapiens
  misc_feature (560)..(560): n is a, c, g, or t
  misc_feature (585)..(585): n is a, c, g, or t
cggcacgaggctgaaaagtagcgtgctattcgtcctgtaggtgctgtggtggatggacctgggcagagggcacttctctctcttacctctcttgcactttctgtctcctgtctcttctcgcccctgccgcctgccccagcttccccgactccatctgcagctctgccattgtgacatttcctgttacccagcccaagttttcatcgtctgctcaataccgtgggttcttcttcgtcctctgtcctctgcccagtgtgaggccatcaccatgtgagaagacatcttggcctgatttgctgccaccagcgtcccctccctcagtgggcccgaactcgccagccccagctttcagtggagaaagcggtcctctgaaatggtttcctcccaacccccgcatttaaagggactcaaggtgcctgccacttcctcagcgaagaagtctgtgttcctccccgtccttgccagtggcgatcatcccttcacaatcccagagtggcaggcgggaccagccccatggtctggctcctgtcacctgggtccgtgccagcacaatctgccanagttctagagaccctgttcccttcnccatcacctcacatgcttcttctgtgtgtatttctttttgtttttatg

SEQ ID NO: 53773 - DNA, 468 bp, Homo Sapiens
aaaaaatggagggattattcttccagtagttgaacactgtcatccgtttcagctgacagctgctcaaatcatttaagaaggagttctgacattcattttcattgttttacttttgtcttcctcactagtgtaaacaaaaatttcaaccagcattcatgccgaacctatacccattcttcagtgcctagctgtacagttatcagggatttttattcgtagtctaattttgtcaaatcatggccaaatcgcagtgatagttgactttggatacaaggtttggcaaaaaaaaaaatattaacaaaatattctgtaagaatcaattggctatatggaatttaggataaagaatatttacaataaagaatatttacaataaagagtttattattatttgtaagttgtgagcaacaaacataccctttatctctgtaaaatttatacacacaaaaaaaaaaacaaaaggcggcc

SEQ ID NO: 53774 - DNA, 555 bp, Homo Sapiens
gagtttgggagaacagttcttcacaataaggcaatggtttgagaggccaggcaaataatctttctcaccgtagaacaaaaagttacaaaaggcataatcggaaatagagactacatacttgagtttatggggttgtgtgttgaaggttcaatgcttgcatgtgtttatttatttcaagagggaaagtggtctgtactgctttcatccttgccactgtcttgcttttattttttactctcccactgagcaagcgtctgtggtcctatggtatcaaccagtatctttatagcaataatttctttaattcccttttctctctctttccaattatttaaccagttacttccacctggacatacgataggaaattcaaactcaaaatatgaaaatggatcttaataactctcccttcatatcttttcacctatttccagtccttatcatagtggataaaaacctcagactcatccagaaagctatatgatgcactagtaaaacaaacaaagatattcaaacgtgctgtgggttcaaatggtatacaatttggcagctgtt

SEQ ID NO: 53775 - DNA, 501 bp, Homo Sapiens
aaaaatgccaaagtttgaaaaataggtatgtttgttctaaatgtttaagtgcttctctgttaggttctggggcttgcaatcatttgaattgttctgtttcacaataaaggagattcactgggttctgcattttcaggattcaatagaactgctccattaaaaaaataatccttagcaagcattcgaatcctaactgctttgatgcacttgccctcgggcacctgtcatttccaatatggtaggtgtcaaagtcaaaagtatttactgggagaaaaaagagaggagtggttgtagaagtctccctaaatcagacatgtcaagcaatcagccaacgtggtgtatttctcattcaatattttagtgtgaattgagacactgagataaagacatcgtgcagagataaatggggatacagttaaatgtagcaactcttgagttcattttttcccactgtagcaaaattaatgctttctctttattgaaataaattgctcattcctc

SEQ ID NO: 53776 - DNA, 398 bp, Homo Sapiens
gcgtcgacctacatttgaaaatacttgctgtcatgaattgtcttgagatttaggcttttccacttttcaggaaatctagtagttttttgggggttttgttatgttttccttggttctgccctatgccaacctgctagtttccctttttattttagcctgatgaatcttcccttttgctttcagtactaaccattgctggtagttcttaacaggtctagcttttaccaatattgtcaagttagcaatattagctcctggggccctagtactctgtacttccacccctctccccaccagtaccatgctgcctgttcacatgatggacaccagctctgatattcaccctaagatataatccataagatgacaaacttgtattcaacaccgactcctactct

SEQ ID NO: 53777 - DNA, 718 bp, Homo Sapiens
cacgcgtctccgtcacaaagccacagcagtggagaatttagcctgcttccctaccaagaggcttggtccagcagtggtagcagtccaatccagtacttgaaaagacagaccagatcaagcccagtgctccagcacaaaatatctgaaacactggagagtcgacatcacaagatcaaaactggttcccctggaagtgaagttgttactctacaacagtttttggaagaaagcaataagcttacctcagtacagataaagtcctcaagtcaagagaatcttttagatgaagtaatgaaaagtttgtctgtctcttctgactttttgggaaaagacaaaccagttagctgtggtctggccaggtcagtaagtggaaaaaccccaggggacttctatgatagacggacaactaagcctgagtttttgagacctggtcctcgaaaaactgaagatacctacttcattagttctgcgggaaaacctacaccaggcactcaaggaaaaataaaattagtaaaagaatcttctctgtcacgacaatcaaaagatagtaacccttatgcaactttacctcgtgcaagcagcgtgatctcaactgccgaaggaactacacgaaggacaagcatccatgattttttgaccaaggacagtagactgcctatatcagttgattcaccaccagctgctgctgacagcaacaccactgcagcatctagtgagt

SEQ ID NO: 53778 - DNA, 527 bp, Homo Sapiens
  misc_feature (472)..(472): n is a, c, g, or t
  misc_feature (487)..(487): n is a, c, g, or t
tttacaaaatccaaaaaaatctgaattctaaacacatttagtcctaaaagttacagataagggattctggacttgcgattctaagtctttgttcgtttttattgcattttctgagccaacataaccattatttaaaaacaagttgctgtagtaactctacattacagacctcccccaaactcagcagttcagagcatgtattctcactcagggctctgcttccttgtaggtagatgtgtggatcggtgagggcagttcttatttgtatgccttattctggggcccaggctgaaggggcagtggctatccatgataagcttttctcaaggcaccagcagaagtacaagaagtcaaggccaactgcataagcatagttcaaatgtctggttatgccacatctgctaagattgcattgaccaaagcaagtcacatgatcatgcccaaagacttaagagtgggtagtagactgcanccaccatgcagccangcaaactacagagccaagcctataacatcactggagagag

SEQ ID NO: 53779 - DNA, 585 bp, Homo Sapiens
ggatttatcattctctctgcctgcccacccccttttttgtatagcccaagaaccacttccatgccatactgtaacattccaacatctttagctgatcagatctctccatatcctctcttgccagctttttcccgtgctcccccaactatgtatcagataagattctttgatcccgactctgtgtgtgcgagcacgcgtgtctgtgtttgtgtgtgcatagttctgtggttttagacacgctttcttgtagtgcttctgcaaaaaacaaaaaagggacttattttgcattctcaatggtgtttttaagggaattaggcagaacagatttctaggttgggtaggccactgcattctcttttgtttgcaaattggtcaacaaaatttgcaaagtgatttcaggagagagcagctttgaggaatgtggaaaatcataattgccgtctggaccattgattgattgtgaccagtagcagaagggtgcctgttacatagagaggctccttctgtccaaatgaatttctgtatactcttctataaataaaagggaggaatatattctgctggaagcccatgaaccatcgctga

SEQ ID NO: 53780 - DNA, 563 bp, Homo Sapiens
agcggctgtggccagggcccctgcttcccgcctttgctgcacacactagccttttctgacactgaagtagtaggccagagtttggagctgctgcatctgctgttcctgtatcagccagaggctgttcaggtcttcctgcagcagtcagggctgcaagccctggaaaggcatcaggaagaggcccagctccaggatcgtgtgtatgctctccagcagacagctcttcaagggtgatcttgtttctcaatgtcactcattcccctctctcttaacatcaagcttgtttgtccagtagagcctttggagatttaggaccataatgaggtctcatgttctctgctcccacacctaagccaagacctttgggtcccagctcctccccttccactcagcactatccaggcaggaggaccaaaagggactcagtgtggtctacttactctggggccctagaatccctgcccccccgccacccttcatgtttgcttcagcagctggtagcttttgatgagacagaataaagttttatttttatattaaaaaaaaaaaaaaaaaaaataggt

SEQ ID NO: 53781 - DNA, 478 bp, Homo Sapiens
  misc_feature (1)..(1): n is a, c, g, or t
ngtcatccctacgaaaaggatgaaaagccagtcaacaaaagtgagcattgtcctgtgctttcacattctttctgcatggagaaagtaatgtatgcacaagtgtggagatgcccagcaccagccaatttatttgatcaatgaggagcatatacacatggctcagtcttcacctgcaccatttcaagtactggtaagtccttatggcttaaatgggacgctaacaggccaagcatacaagatgtcagacccagccactcgtaagtggattgaggaatggcagtatttctacccgatggtgctaaaaaagaaagaagaatcgaaagaggaagacgagttgggatatgatgatgatttccctgtggcagttgaagtaattgttggtggtgttcggatggtttacccttcagcatttgttttgatctctcagaatgacatcccggttcctcagagtgttgccagtgctggaggccacattgca

SEQ ID NO: 53782 - DNA, 386 bp, Homo Sapiens
ttttttttttttttttttccggctgaaaggattttacatttattcaaagtcaaaagggaaaagaaatccaagaactacagaagagcagttgaagtgatttatgcttgatttctaaatgcaacttatgtttatacataatttaaaactcaaagaaagcatgcttatacaatcatgtgcaactttaaactttaagaactctggatgaatacatggtggcaacagtccatgacacctgaaaacatcatttgtggagtggcgtagagttcagtgttcgcagtcgcatattacaaccatgtttcacacagccctgctcggtttgattttctccacgtgggtgataattgtcttcagttgctgccaagtgattttgcaaatttcatttataa

SEQ ID NO: 53783 - DNA, 674 bp, Homo Sapiens
cccacgcgtccgaagagattcctcaggaggaagtggaaacctctgaaaggagaggaaaccgactcttttgcaagaaaactgagcgccggctggaaggcctaaggaaagcagccgatggctcccaagacaactctgtccggccagtactccagggcaacttcaaccccactaggacccaggccaaaaccatatatatatatatatatgaattaacgcaaaacagagccactttggtgcctacccctccacaagtaggtaggcacatccaggtagctctgtcagaagatgggacctggcgccttgcaggggtagccctatggagatccagaagccccgtttcgagctacgaagtctctcttctactgcagtcttctctccaacgtggagatctagcaacttccctccccctgggattccctgtgaatccactctagttgggatatagcctctctacagctcagtgacgtagcgcgccaaaaccaagtacccaccccggcaactggaagacctagctgtcctccatcccgcctccgcagtcgataatctccaggatccaagcaaagtgcctgtccacgttgtcaccagatccacaagcgcttttgatgagagctgctaccctttttggaaacacgattccctctccctagtagagaagaatctattcttctgggctg

SEQ ID NO: 53784 - DNA, 633 bp, Homo Sapiens
cgacacggagcccgacgagttctctgactttgaccgactccgcacggcactgccgacctccgggagcagcgcaggagagctggagctgctggcaggagaggtgccggcccgaagccctggggcgtttgacatgagtggggtcaggggatctctggctgaggctgtgggcagccccccacctgcagccacaccaactcccacgccccccacccggaagacgccggagtcattcctggggcccaatgcagccctcgtcgacctggactcgctggtgagccggccgggccccacgccgcctggagccaaggcctccaaccccttcctgccaggcggaggcccagccactggcccttccgtcaccaaccccttccagcccgcgcctcccgcgacgctcaccctgaaccagctccgtctcagtcctgtgcctcccgtccctggagcgccacccacgtacatctctccccttggcgggggccctggcctgccccccatgatgcccccgggccccccggcccccaacactaatcccttcctcctataatccagggcggaagggggcctggctccatccggctgccccattccggctccctgggagatcagtgttgtgagtgcatgtgaaatgggggatcc

SEQ ID NO: 53785 - DNA, 692 bp, Homo Sapiens
  misc_feature (603)..(603): n is a, c, g, or t
cactttttcccctcctatggacccaggtcggtttacataaaaccgtgtcattacagtagtttgtaacatttgtagattggatagcatttttatgatttgatgagtttcttgtaaggttaccgtttctaagagttgtgctttatggccactgagagaattcagaataaattgaaagatggagtctaaaaattattagctgttacaaatggaacatttcattataacgtgatcactttgacttgagcaaatggtttaatttttatcttaaaaatcagttaagaatatataaaatcctactttggccaagtttgtttcttttcattatagtttatatgaaaagatcaccttaagtgaaattattttcctttaatcttttatgtatttattcacttttggaagctaggaatgagcaacacaaattttactctgaagtcagaagagctcatatataataattctaatgtcccacctattttcacttgtccattccatgtaccagcttagttatgatacttagtcacataattatctttgataaaggtagaggcacaaagaggcaaactaagcaagtcaaattctaatgtgtgtacttcataataattntttatccattttcatctttatattctgtaacatgaaacttacctaatcttcaaatgttagcttcattttttacctttgaaatacttaat

SEQ ID NO: 53786 - DNA, 675 bp, Homo Sapiens
cgtccgccttttgggagatgattaaagagagaggttgagagagagagagagagagagagagagagagagagagagagatgtttcgtcctcagcttttgcttccattttttttttaagaactctgggctaataacttctaatctttatagaatatttcaaagaaatatatttgttcttaaagatacataggtttgagatattgagtgctacaagcatttattttggttttaccttaacatattatgattcctcagttttgttggcatttagtaattatgtttatgtttttatcttatcaaaaaatgtcttcttacctttgatatttataatcactcctcggtcatgtaaatagtttgctttatattttactgttttaaagtctgtgaccttacctgccctcttctgtagcaaagtgcagcatttaactcaggaagctatattccccccaagtgtcattaatatttgcataagattaaaaacactccagtcggccgggcgcggtggctcacgcctgtaatcccagcactttgggaggccgaggcgggcggatcacaaggtcaggagatcgagaccatcctggctaacacggtgaaaccccgtctctactaaaactacaaaaaattagccgggcatggtggcggggcacctgtggtcccagctacttgggaggctgag

SEQ ID NO: 53787 - DNA, 813 bp, Homo Sapiens
gtgagtcagacagagcatcgctgcccgtgatagccactgtttttgataaactcaaccatgagtataaaaagtacctggatgccgagcagagttatgcgatggcggtggaagcaggcagagccgaagcagcccgctcctcaagaggccggtgcggacccaggcggtgctggaccagtcagatgtgtacacccatgtcctgtcagccttcgtggaaaagaaggagatgcctcataaatttgtgatagccgtgctgatggaatacattcgttctcttaaccagtttcagattgcagtacagcattacctacatgaacttgttatcaaaacccttgtccagcacaacctcttttatatgctgcatcagttcctgcagtaccacgtcctcagcgactccaaacctttggcttgtctgctgttatccctagagagtttctatcctcctgctcatcagctatctctggacatgctgaagcgactttcaacagcaaatgatgaaatagtagaagttctcctttccaaacaccaagtgttagctgccttaaggtttatccggggcattggtggccatgacaacatttctgcacgaaaatttttagatgctgcaaagcagactgaagacaacatgcttttctatacaatattccgcttttttgaacagcgaaaccagcgtttgcgagggagccccaatttcacaccaggggaacactgtgaagaacatgttgcttttttcaaacagatttttggagaccaagctctaatgaggcctacaacattctgaaatcacttgctgttttttatataacaaatgtgtca

SEQ ID NO: 53788 - DNA, 496 bp, Homo Sapiens
cattctgaggtaggagaattgtttgaacctgggaggcggaggttgcagtaagccaagattgcaccactgcactacagcctgggcaacagagcaagactctgcctcaaaaataaaaagataaaataaattcctatttgcatttggataacttaggagaacctgtcttccccggtttgctgacggaaagtcaattgtctgaagtactaagctgacattctcagtttttgctttaggtttgggtattcatttaaataataatctcacaaataatgaaatagtttctgggggaaaaattattataaccttatgcccatatctaaccccattcccttgagccctggtcagtgccaagtgccagtagcttggcacaaacattagtgccctgccaaaccccaattcctctcccactcttttctcacatagctcagctggccgcaccttcatggctaaacaacctgagctcttggagatgccctggctcccctctctctgctcc

SEQ ID NO: 53789 - DNA, 731 bp, Homo Sapiens
ctgtacaacagggtagaaaatgataaaaatagactattgactgacccagctaagaatcgtgggctgagcagagttaaaccatgggacaaacccataacatgttcaccgtagtttcacgtatgtgtatttttaaatttcatgcctttaatatttcaaatatgctcaaatttaaactgtcagaaacttctctgcatgtatttatatttgccagagtataaacttttatactctgatttttatccttcaatgattgattatactaagaataaatggtcacatatcctaaaagcttcttcatgaaattattagcagaaaccatgtttgtaaccaaagcacatttgccaatgctaactggctgttgtaataataaacagataaggctgcatttgcttcatgccatgtgacctcacagtaaacatctctgcctttgcctgtgtgtgttctgggggaggggggacatggaaaaatattgtttggacattacttgggtgagtgcccatgaaaacatcagtgaacttgtaactattgttttgttttggatttaagggagatgttttagatcagtaacagctaataggaatatgcgagtaaattcagaattgaaacaatttctccttgttctacctatcaccacattttctcaaattgaactctttgttatatgtccatttctattcatgtaacttctttttcattaaacatggatcaaaactgacaaaaaaaaaaaaaaa

SEQ ID NO: 53790 - DNA, 445 bp, Homo Sapiens
tttttatttatatttataaaatttattcaaaacatacatactgctggacactgttaatgcataatttgggataaaacattacttggaaagaatctttgtactcagaaaccatgaagaagctgcactccttcagattcctatatcctttaaacaagtgcatgctatgattacatcttaacataaatcttctttcaattcaaaatgtttcatgaatgagatccatgtcatctaaaagcagaatttttaaatttttgcattggatgtgatgaaagaaataataactttagtagtatatttaaaagctgcatgactctatttcatctctattaagtaaaaacaaatttagaatgtgtatatacacatacatttcctagtgctgtccactgaggactagaagcagtgataccccaggaacaatgagaatacccagtccctagatcataga

SEQ ID NO: 53791 - DNA, 505 bp, Homo Sapiens
agcatggggtgctctacgtctattggggcatgtttgaggccggcgaccgccaggtcaccctcagcgacctgcactgcctggacctgcacaggatggaggcgtggaaggccttggtggagatggacccagaaactcaggagtggctggaggagacggactcggaagaggacagtgaggaggttgagggcgccgagggtggggtcgacgacgaagacagcggagaggagagcggtgcggaggactgagagcccctgccaggggcgcctggcaagtgctgtgcccacgtccgcccaggacccagccgtgttgagtgaagctcttggggccagcgtgcgtcctgacgcacaggagagagctgaaggtgggtggcccaggccagggtgtgaactttctcccatggtttagtctctgacgcggcactgggccggaagttcaactgagtgcagtgcaggtggattccctcagcagcctgtgtgttgtgtgaaataaattggacttgaaacaa

SEQ ID NO: 53792 - DNA, 563 bp, Homo Sapiens
gtccgatgccttacaaactccagaggccatattcaaaacagggtcttctcagtgtatgcaaggggctgcagcccctcttctcttcctccccaggttgaacaatacggacagttttcacacatatctacctgtataaccctctgtacctctcataactggtcaacgactgtaacaggttacatcaggtgtttttctacatactttttacacagattctatgcgattaatgtaatttaattcaatgcatcattttattgtactagttcttaggcttgtccttatttttttctaagtgattgtggtttttctcgtggtttttattgtaaaaaatgaaaggctgttgatgcttattctctgtaactaagaatttttaccttttgggggaaaaaagcattgctatgaactaatgaattgaaacttcatttactcattgtaaatacactattgtgcaaaaaaagttttcactcaattgaattgctagtgttaactgaattttgtctagacaccatttctgttgatgaaataaagacatatcattatgcattgtaaactgaaaaaaaaaa

SEQ ID NO: 53793 - DNA, 734 bp, Homo Sapiens
gaatcccttagcgggtacctaccaggaggatcagggcaaggtccctctccagctgcaggtgaggcctgcggaactcagcttggatggcagcctttggtgggccgctgtggcccgcacgtctctgttctctccaagtaacatgcgacggtgtctggtgtcacgtctcgcctgagaagcccgtcttaggaaagcttagcttgaacacagtgctcgggaggtttctgctctgtctgtcatggcagtctcttggtttgtgtctggccaaggccatgcgtgtgcctcggaccgagccccagcttaggcgagggagtcaggctggcttcggccctcggttttcattcaggccaccctgctcatggcccttcctggccgcctgccacaccgcaagctcgctggggggacactagaagcaccgtggcctgggattccatctggagctgtccgcaggcaccagccccagcctcccaccacgctcactgcctggcttggaaaagttaagaagcccctcaggaagagaatcgaggccaagttcctctgcgccgagggccccgagcatatccgccaaggctcagctgcagtgccaggcggaggaggaagatccagaaattgtgaacaatgtttgatttagtagcgtgacttgcctttccctttaaaacatcttttacaaatctgtcttggaataaagtctattttctgccttttggtttttaagctctgaaaaaaaaaaaaaaaaa

SEQ ID NO: 53794 - DNA, 481 bp, Homo Sapiens
tagcgaggcctgggtggcgcttcgctgagctaccgggaaaaagaatatttgacaaccagctccttgaagagcggaaccggcgccgtcggtgagggagcagccggctgtgctgtcagcggggcctggcggtggaagcgcctccagtgtgcatgagcgtgtctgaagatggggggctcagggggcacgtttgcgtttggacctgtctgtgcgttctcctgcgtggcagtcctgatttccatgcttctggagaatccatttcgttaacactgaaagccagttctcttttcctggcagtttttttcattttatttttggcattttttacaagataccgttcgggaaaggcttttgaaaggacggaagcgtattcactgtgcgccagtactcctggctgtgctgtggtttctcccgacgtgcacatcgatctcgtatgtgtggcatctgatattaaacgggaggttttaaaaaaaaaaaaaaaaaa

SEQ ID NO: 53795 - DNA, 541 bp, Homo Sapiens
aaggtagcgaggcctgggtggcgaattcggcacgaggcagtgtttctcgatccttttgatgcctgtggcttaattgttgccaaatatttctccctcccctctgtggtcttcgccaggggaatattttgccactatcttgaagaaggtgcacagtgccctgctcctctttcctatgtccccagacttctcttagggttctcagacgccatgactttcaaggagagagtatggaaccacatcatgcacttggaggaacatttattttgcccctattttttcaaaaatgtcttagaaatagcctctgaaattctccaaacccctgtcacggcatatgatctctacagccacacatcaatttggttgttgcgaactgactttgttttggagtatcccaaacccgtgatgcccaatatgatcttcattggtggtatcaactgtcatcagggaaagccagtgcctatgggccaggatctacttctttcaccccactggaatatgtcccaagcctgagtcattcagcctgcagcaatccctgagaaaa

SEQ ID NO: 53796 - DNA, 749 bp, Homo Sapiens
cccccacctagtcttcttgcagaacaaagctcgccgagaggacttctgtcctcggaagctgcggcagatgcacctgatgattgaccagctcatggcccactcccacctgcgtcacaagggaactctgtccatgttacaatgcaatgtcttcccggggcttccacctgacttcctggactctgaggtcaacttattcctggtacccttcatggacagtgaagcagagagtgaaaacccaccaagagcaggacctggttccagcccactcttctccctgctgcctgggtatcgtggccaccccagtttccagtccttggtgagcaagctccggagccaagtgatgtccatggcccggccacagctgtcacacacgatcctcaccgagaagaactggttccactacgctgcccggatctgggatggggtgagaaagtcctctgctctggcagagtacagccgcctgctggcctgaggccaaggagaggaatgtcatgcaggggacctcctgggtccgcagtgtactgcgagggagcacagatgtccatccaccgctggggtggagagcggcagacaggcctgatggatgagggatcgtggcttacccggaccagagacatgaggtgtcaggccaggccaccaacctcagttgcggctgtaccgggggtgactgtgagcgatcccaacccaaacctgaagatgggggagcccgtctgtgttcccacaaaggacagcatggacggagtctgatg

SEQ ID NO: 53797 - DNA, 650 bp, Homo Sapiens
ttccagagtcagacatatctaggtttgaaaactggatctgccacttatcagttatgtgaccttaaagaactccgttaatttctcagagcctcagtttccttgtctataagttgggagtaatattaatactatcatttttccaaggattgatgtgaacattaatgaggtgaaatgacagatgtgtatcatggttcctaataaacatccaaaatatagtacttactattgtcattattattacttgtttgaagctaaagacctcacaatagaatcccatccagcccaccagacagagctctgagttttctagtttggaagagctattaaataacaacgtctagtgtcaattctatacttgttatggtcaagtactgggctcagcattttacattcattgtctctttaagttctagcaatgtgaagcaggaactatgattatattgactacataaatgaagaaattgaggctcagatacattaagtaattctcccagggtcacacagctagaactggcaaagcctgggattgatccatgatcttccagcattgaagaatcataaatgtaaataactgcaaggccttttcctcagaagagctcctggtgcttgcaccaacccactagcacttgttctctacaggggaacatctg

SEQ ID NO: 53798 - DNA, 542 bp, Homo Sapiens
gcacgaggtgaacagttgaaaaatggaattgactttcactcctccaggtccagaaggattctaatacacaaaccataagcaagagttgtttctgttattttgtccacagaacagaagctgaaaaagcatattgcttgcatttcagccagtccccttaatactttgagaacactgggatgtgatgtctccgtctgccacctcagaatcatttgttcctacgagaaggccaagagtggtacttgctttgatcactgtttttaaatagaagacacattggtagaaatctttcatataatatgttgctgcttttgggggggtgttggggagtaccaaagaggtctgcatgcatctgcagtgtacactggcaaacaaaagatttgtcattcccgttgtcctgttgtgcttcctttccacctctccctggctgttcccccacccccttgttccttttgtaaaggatgcaggtgtagtcttgtgccagtctgtgacataacacctgaacaatttctatggtatcctacccatttgctcagattcaaacc

SEQ ID NO: 53799 - DNA, 603 bp, Homo Sapiens
ttttttttttttatttttctttttttttcccaagatccaactacgagctttttaactgcagcaactttaatatacgctattggagctggaattaccgcggctgctggcaccagacttgccctccaatggatcctcgttaaaggatttaaagtggactcattccaattacagggcctcgaaagagtcctgtattgttatttttcgtcactacctccccgggtcgggagtgggtaatttgcgcgcctgctgccttccttggatgtggtagccgtttctcaggctccctctccggaatcgaaccctgattccccgtcacccgtggtcaccatggtaggcacggcgactaccatcgaaagttgatagggcagacgttcgaatgggtcgtcgccgccacggggggcgtgcgatcggcccgaggttatctagagtcaccaaagccgccggcgcccgccccccggccggggccggagaggggctgaccgggttggttttgatctgataaatgcacgcatcccccccgcgaagggggtcagcgcccgtcggcatgtattagctctagaatttacacagttatccaagtaggagaggagcgagcgaccaaag

SEQ ID NO: 53800 - DNA, 698 bp, Homo Sapiens
cactataatggactaacaatcttttttttataggaaaatattctttaaaaaaatcacattacttgtgtatgtagttcttacgagcgtgtttaattccaaaggtaaaattttctaatacctgacttaaaacaatggcatttatttgtaaataaaaataaaagtaaagataatatagtctataatgtatatctctgtctctgattattatgaaatttctaacaaagaccatctatttgtgaagcatctgcattaaaacacgcaagccagttttattaagaaggtatttaaggccaggtgcagtggctcacatctgtaaaccccccactttgggaggcaggaggattgcttgagtccagaaactcaagaccagattgggtaacatagagagaccctctctctacaaagaattagttgggtgtggtggcacacacctgtagtcctagctacttaggaggctgagtgggaggatcgattgaacacaggaattagaggctgcagtgcagctatgattgcaccactgtcctccagcctgggtgacagagaaagactgtcttaaaaaaaataaaataaaataaaaaaggtatttaagacttctaggaagagactagctgattaattcaaattaggtactctccaataaagcatttgaatttgtatgatgagttcagagtctttaaaaacttaaaaaaaaaaaaaaa

SEQ ID NO: 53801 - DNA, 715 bp, Homo Sapiens
  misc_feature (197)..(197): n is a, c, g, or t
  misc_feature (473)..(473): n is a, c, g, or t
  misc_feature (562)..(562): n is a, c, g, or t
  misc_feature (579)..(579): n is a, c, g, or t
  misc_feature (581)..(581): n is a, c, g, or t
  misc_feature (625)..(625): n is a, c, g, or t
  misc_feature (641)..(641): n is a, c, g, or t
  misc_feature (648)..(648): n is a, c, g, or t
  misc_feature (687)..(687): n is a, c, g, or t
  misc_feature (695)..(695): n is a, c, g, or t
  misc_feature (700)..(700): n is a, c, g, or t
gtaatatctaatatttaatttattagatagttatctcaaacatttagtatctagtaaataaacttattttatattactatctaggggacttatttgaaaattactgcagaaatgatgacctggtaacatttggaagattttgttatggtgtcactgtcattttgacataccctatggaatgctttgtgacaagagangtaattgccaatgtgttttttggtgggaatctttcatcggttttccacattgttgtaacagtgatggtcatcactgtagccacgcttgtgtcattgctgattgattgcctcgggatagttctagaactcaatggtgtgctctgtgcaactcccctcatttttatcattccatcagcctgttatctgaaactgtctgaagaacaaggacacactccgataagattatgtcttgtgtcatgcttcccattgggtgctgtggtgatggtttttggatcntcatggctattacaaatactcaagactgcaccatgggcaggaaatgttctactgctttcctgacaatttctctctcacaaatacctcanaatctcatgttcagcananacacaactttctactttaaatattaatactttcaatgaattgantgctttaaaatatgtntttttcntaaactttaaaacacataacatttaccctgctttaatcngtatttangttanaaaaaattaatattt

SEQ ID NO: 53802 - DNA, 690 bp, Homo Sapiens
gctgctgtgtcccgcggcttgcgctccgtagtggactccgcgggccttcggcagatgcaggcctggggtagtctcctttctggactgagaagagaagaatggagaagcccctcttcccattagtgcctttgcattggtttggctttggctacacagcactggttgtttctggtgggatcgttggctatgtaaaaacaggcagcgtgccgtccctggctgcagggctgctcttcggcagtctagccggcctgggtgcttaccagctgtatcaggatccaaggaacgtttggggtttcctagccgctacatctgttacttttgttggtgttatgggaatgagatcctactactatggaaaattcatgcctgtaggtttaattgcaggtgccagtttgctgatggccgccaaagttggagttcgtatgttgatgacatctgattagcagaagtcatgttccagcttggactcatgaaggattaaaaatctgcatcttccactattttcaatgtattaagagaaataagtgcagcatttttgcatctgacattttacctaaaaaaaaaaagacaccaaatttggcggaggggtggaaaatcagttgttaccattataaccctacagaggtggtgagcatggtacatgagcttattgagaccatcatagagatcgattcttggataatgatttat

SEQ ID NO: 53803 - DNA, 970 bp, Homo Sapiens
  misc_feature (926)..(926): n is a, c, g, or t
taaaatattaagtgaatgctttgcaagtttgactgtatgcaggtttatatcagaaggtgagattgaataatgcttgatgcagaatcgaaacttctcatttatctgtatattatgtttacttctaaggatatagcacaaagggaacattttttgtttaaagtgaactacagctgtgctgtgaagagagttctttataaagcctgtaggttcttttaactttggtttaaaatgtaagataggaaaatgttggatatttgaggccatgcttaatatatttatattgcagtatcctttaaaagcaaaaaaaaaaaaatgcatttatattacagttttcctctatgaaagtccttacttatatgatacaagcactgtgttttgtgcttaaactcttcagcggggtagcatcaaagttcttggggaaggatcgtatatgtgggtcccttccctagaagaatggttgctgatatggctactgcttctacatcttgagttttttaatttactttttttacactgtagcattgagactgcttgattcaagtctggtgctttgccagatgtattaatttccataaatgctttgtgagtttggttaaaatgaagattcacttgggaaaacactgcagctttagtctgtgttactatcttgttatgagtatgtaaaagtaaaatgcatgtgaatttatcatatttgcactatgaaggtatttgggtaaaatacaaaaacttttaagattttaagggcctttcttccaacagcttttatagttagcagccattctttattttctggatagccaggtttttatccggcttctagtcagggagctcctattcccttcaaaaattaccggcctgactagtgagcaaagtcttgaattatttcaaaagccttaaataccttctctaggtaaaaaccttggtanattaaaaacggaaggcatttgtcacaacccttttctgagaaggg

SEQ ID NO: 53804 - DNA, 478 bp, Homo Sapiens
  misc_feature (21)..(21): n is a, c, g, or t
ctaaagaataaagttattttncaaagtgtaacccatttttagcactgacatagcactgacagtagctgctgatctcattatgggctaaaataagacaatattcaaaggtcagagatatctagccagaatctgatggaggctggatttcagattttgttacagaattagacagaggaacacagaggggacaggctcagttagggtggaggtgtggggtagggaagcaggacttgatataaattattggaatcattgtcttttaaaccagtggtttatgtcagggtatagcgtttcaagggatttgagggtcagatggggaaatgtagccccttattttgccagtgtgaagcagataccctgcttttctttacagtagcggagtcagcttaagagctttaaaggtcctaaacttcaaaaacattacagtgccccatcctccgccttaatgtaattccaaatacaaacaatactaaactgt

SEQ ID NO: 53805 - DNA, 635 bp, Homo Sapiens
cccacgcgtccggtaaaaattatgatgttacttgtggagaaactaaaaatgttgtacaactgaccgaaagaaaacccttggggataagtttagtgaggggattggaatccccaaaaagataacatttttcttctgcttttaaaaactgaaattccctgttctagttcctaacaattctcattacatactatgccagattacaaaatacttatttttaaaatgaaatctatatattgactttcttatcaatcatcttactgtgcaatcaaaattagagtactttggtttgaaaacaacacttagagcctccagataacttttaagacttatttagctttgtgggtggtattttcatgcaaataagtaagggtgggttttatattttgtagaagttttcggtcctattttaatgctctttgtatggcagtatgtatatattgtgttaagttcctcaagaatctccttaaaaactttgaagttaatacttttgtgcaactgtgttttgaataaagccatgacagtgttaaaaacaaacaaaaaaatttgcagtactcctgattattcttttattgtttttgactgttccctgtttttttctgtgactgctgtaacttaaagtttttgaaactgaattg

SEQ ID NO: 53806 - DNA, 570 bp, Homo Sapiens
ttcagtgattgtacaagagcagtggagttttctccacaaagtagagaaaatcatttgtgtattgttatgcaaatagcttacagaactattaataattttgttttctttaatttgtaatttcttatgtaactagtccatttgctttcacccagtgatgagcatcttacctgcttcactcggtagcgctccattcctaatctttttaaggacaaattcatcaacttggcgttaaagtctatcagtaacatgatcccagctacttctccagattcctcttgagctgtccttactacatgtgcactacactgcagccacactgtgtgacttattccctggggtttctattgtttctgccttgcttttctcatcctttagatattagcattattggctgggcacagtggttcacacttgtaatcctagcactttgggaagctgaggcaggcagatcacttgagcccaggaattagagaccagcctgggcaacaaaaatgtcggctgcagtgagctgatactgctgtccaccctgggcaacagggtgtgagacctcatctcaaaaaaaaaaaaaaa

SEQ ID NO: 53807 - DNA, 709 bp, Homo Sapiens
cgcgtccggtcacagcaccaggtacatgcagttcagcaactcgccaaggttatgggctggcaagtactgagcttcagtaatcatgtgggacttggacctatagagagcattggtaatgcatctgccatcacggtggcctccccaagtggtgactatgctatttcagttcgtaatggacctgaaagtggcagcaagattatggttcagtttcctcgtaaccaatgtaaagaccttccaaaaagtgatgttttacaagataacaaatggagtcatcttcgtgggccattcaaagaagttcagtggaataaaatggaaggtcgaaattttgtttataaaatggagctgcttatgtctgcacttagcccttgtctactatgattttttccagatgtttcctaaagaagtttccagaaactttgacttgaaatgtttgcagatcaactataagcacaaagaagagataacttccaaaagagtgctgtttttaaaaataataattaggaaatgtttatttagcactttcaaacttttcactttataaatgacaagtgctttgaaatgcagaagtttatgtacagttgtatatacagtatgacaagatgtaaaataatatgtttttcatgcagtttaaaatattactaacttaagggtttctatgtgctttttaaaatattccttctttgatgttgacatcaaataaagtatgtgg

SEQ ID NO: 53808 - DNA, 634 bp, Homo Sapiens
gtgacggcagatgctggtacttgggccaaggctgcaatcagtgattcagccgactgctctttgagtccagatgttgatccagttcttgcttttcaacgagaaggatttggacgtcagagtatgtcagaaaaacgcacaaagcaattttcagatgccagtcaattggatttcgttaaaacacgaaaatcaaaaagcatggatttaggtatagctgacgagactaaactcaatacagtggatgaccagaaagcaggttctcccagcagagatgtgggtccttccctgggtctgaagaagtcaagctcattggagagtctgcagaccgcagttgccgaggtgactttgaatggggatattcctttccatcgtccacggccgcggataatcagaggcaggggatgcaatgagagcttcagagctgccatcgacaaatcttatgataaacccgcggtagatgatgatgatgaaggcatggagaccttggaagaagacacagaagaaagttcaagatcagggagagagtctgtatccacagccagtgatcagccttcccactctctggagagacaaatgaatggaaaccaagagaaaggtgataagactgatagaaaaaaggataaaactggaaaagaaa

SEQ ID NO: 53809 - DNA, 720 bp, Homo Sapiens
  misc_feature (633)..(633): n is a, c, g, or t
acgccaagctctaatacgactcactatagggaaagctggtacgcctgcaggtaccggtccggaattcccgggtcgacccacgcgtccgaacaacaacaacaaaaaacaagtccaaactgatatatcctatattctgttaaaattcaaaagtgaacgaaagcatttaactggccagttttgattgcaaatgctgtaaagatatagaatgaagtcctgtgaggccttcctatctccaagtctatgtattttctggagaccaaaccagataccagataatcacaaagaaagcttttttaataaggcttaaaccaagaccttgtctagatatttttagtttgttgccaaggtagcactgtgagaaatctcacttggatgttatgtaaggggtgagacacaacagtctgactatgagtgaggaaaatatctgggtcttttcgtcagtttggtgcatttgctgctgctgttgctactgtttgcctcaaacgctgtgtttaaacaacgttaaactcttagcctacaaggtggctcttatgtacatagttgttaatacatccaattaatgatgtctgacatgctatttttgtagggagaaaatatgtgctaatgatattttgagttaaaatatcttttggngaggatttgctgaaaagttgcacttttgttacaatgcttatgcttggtacaagcttatgctgccttaaattattttaaaaaaataaa

SEQ ID NO: 53810 - DNA, 734 bp, Homo Sapiens
ttttttttttttttttttagtattcaacacttgcagttttaaaaagatcaactcagactaaacgctagcacaatcatgcatgccccgtggtgccgcggcaccccagaggctctcagggtcagcaggaagtcctttccttgtcatgtcaaaccaaaacagcggcccgcaggtcggggggcacaggcttcagggctgctccactccagggaggctccggccactttctccacaaccatttggcattgctttcccactgccttcattttcttgttcaaatcgtctttaaaattcttcttcagttaactgtacagtaccccactggggctggagcctgaggctagagccacatatatatatatgcatatatatacatgtacagctttcttttaagaatgcattctctcttgctgagggcaagggtggacaccgctggcctccagtccctctggtcactgcccgtcactcatggcccagatagatccaggccactgcgggccagaggagccctgccacagacctcaaggcccaagcagagtgcagcagaatttttttcccctaaacacaaaaacagtccccagatgtcccactgctctggaggggccaggacactgctgagatgccacactggaagccgctggggcagggacagagagagtggagagagaggagtgctcaggggccgccctcaggggctccagggtggggagctcagcctacccttgaagacagctgcc

SEQ ID NO: 53811 - DNA, 695 bp, Homo Sapiens
  misc_feature (327)..(327): n is a, c, g, or t
tttatgtttgtgctgtgtgccaaaatgttttctgtgtggactgtgatgttttgttcatgattctctacactgttgccctggctgtattcataagattccagctccttcaggtgtttgattccagcatgtagtatacattgtatgtgttaaaaagaaatttgcaactgtgaataaaaggacttctttagaagaagcttcatttaaaacatgaaaggataatctgacttaagaaactttttgctaagaaaaggtaatattttattaaattttaaatttgtgttgtcacagaaatacctgaaattcagtagtacttcattcaattaattntgttttctattattttgagttatactgttttcaaagtcattatgcagtatgtataaacttataagaattaaattgatgtgataattttatgtttttataattaaatatagaatctttatgatttatgttaattcattaatttagtgtaagaagaaagttaagtctgaatgtaaattcagtgtaagatgaaaatttatcaatacttatgaaattaggctgggcgctgtggctcacacctgtaatcccaacactttgggaggctgaggtgggcagatcacttgaggtcaggagttcgagaccagcctggccaacatggtgaaaccccgtcactactaaaaatacaaaaaataattagccgggcatggtgg

SEQ ID NO: 53812 - DNA, 617 bp, Homo Sapiens
atgtgtgatttgcggcggccagcggcaggtgggatgatggacttggcctacgtctgtgagtgggagaaatggtccaagagcacccactgcccatcggtgcccctggcctgcgcctggtcctgccgaaatctcatcgccttcaccatggacctgcgcagcgatgaccaggacctgacccgcatgatccacatcctggacacggagcacccctgggacctgcactcgatcccctcagagcaccacgaggccatcacctgcctggagtgggaccagtcaggctcccggctcctgtcagcagatgccgacgggcagatcaagtgctggagcatggcggaccacctggctaatagctgggagagctcagtgggcagcctagtggagggggaccccattgtggccctgtcctggctgcacaatggtgtgaaactggccctgcacgtggagaagtcgggcgcctccagcttcggggagaagttctcccgagtcaagttctcaccgtcgctcacgctgttcggcggcaagcccatggagggctggatcgcggtgacggtcagcggcctggtcaccgtgtccctgctgaagcccagcgggcaggtgctgacgtccaccgagagcct

SEQ ID NO: 53813 - DNA, 584 bp, Homo Sapiens
tttccttttgagtagagaaattatgtgtgtcatgtggtcttctgaaaatggaacaccattcttcagagcacacgtctagccctcagcaagacagttgtttctcctcctccttgcatatttcctactgcgctccagcctgagtgatagagtgagactctgtctcaaaaaaaagtatctctaaatacaggattataatttctgcttgagtatggtgttaactaccttgtatttagaaagatttcagattcattccatctccttagttttcttttaaggtgacccatctgtgataaaaatatagcttagtgctaaaatcagtgtaacttatacatggcctaaaatgtttctacaaattagagtttgtcacttattccatttgtacctaagagaaaaataggctcagttagaaaaggactccctggccaggcgcagtgacttacgcctgtaatctcagcactttgggaggccaaggcaggcagatcacgaggtcaggagttcgagaccatcctggccaacatggtgaaaccccgtctctactaaaaatataaaaattagctgggtgtggtggcaggagcctgtaatcc

SEQ ID NO: 53814 - DNA, 697 bp, Homo Sapiens
gttaactctgttaagtacccaagctgcttgtcttccccaaagagtgctttattaacaagaatctgtgaaaatcacatttaaacactgttgcatgttgtaagaccaggtggtaccttagtaacctaaaacttgcaagagaatattaatggtagctttagaagactcaggaggagaaactgacttcagagttggaagatgttgcaagtcgttcctttttctgtccttcagggactgaagaactgggaggctgcccattgtttggttgccagtcatacaaattaaaatcatatttccttccatgaatggaagaaacacactattggtttttccccttggaaacagcaatcccaaataatgtcggcttacaaaaaaaaaaagttaccacttttttagagtccttccctgtaacattggattttttttttcccttatgagatccacctaaggccattgacgtggcctgcgatctcagtgacaatgatctgcttctggatctcactgttgcctttggttagggaacacaactagtaactctgcagagtgccttctcccgcagccctactggaacacagcagagtctgtgccatgaagcagttacagaaacagaattgatgtgctgctaaaaaaaaaaaaaaaatggggcccgaaataaaagaatatatagtactcacctcagttccttccataagaagggggg

SEQ ID NO: 53815 - DNA, 837 bp, Homo Sapiens
  misc_feature (772)..(772): n is a, c, g, or t
agccttttgccagcttgaccgaggccgtgcggagctcagttccccgactgctcatcaaccgggacttggtggggcccttggcttggcatcctcgcagcagggacgtggcccagctgggggacgtggttcacggcgtggaaagcctagtggagcttctgggctggacagaagagatgcgggaccttgtgcagcgggaaactgggaaggtacagactgctgaggaggaccatccaaggggctgcccttctcactgctctaggcttgatggaccagacaaataggatgatggctgcccccacacaataaatggtaacataggagacatccacatcccaattctgacaagacctcatgcctgaagacagcttgggcaggtgaaaccagaatatgtgaactgagtggacacccgaggctgccactggaatgtcttctcaggccatgagctgcagtgactggtagggctgtgtttacagtcagggccaccccgtcacatatacaaaggagctgcctgcctgtttgctgtgttgaactcttcactctgctgaagctcctaatggaaaaagctttcttctgactgtgaccctcttgaactgaatcagaccaactggaatcccagaccgagtctgctttctgtgcctagttgaacggcaagctcggcatctgttggttacaagatccagacttgggccgagcggtccccagccctcttcatgttccgaagtgtagtcttgaggccctggtgccgcacttctagcatgttggtctcctttantggggctatttttaatggagagaaatctggtctttcccgcatgaaatacattttagtctcctcaa

SEQ ID NO: 53816 - DNA, 510 bp, Homo Sapiens
  misc_feature (506)..(506): n is a, c, g, or t
  misc_feature (508)..(508): n is a, c, g, or t
  misc_feature (510)..(510): n is a, c, g, or t
ggatgtgacagaagtacagtcatagctcagtagctatatgtatttgcctttatgttagaagagactttcttgagtgacatttttaaatagaggaggtattcactatgtttttctgtatcacagcagcattcctagtccttaggccctcggacagagtgaaatcatgagtatttatgagttcaatattgtcaaataaggctacagtatttgcttttttgtgtgaatgtattgcatataatgttcaagtagatgattttacatttatggacatataaaatgtctgattaccccattttatcagtcctgactgtacaagattgttgcaatttcagaatagcagttttataaattgatttatcttttaatctataacaatttgtgttagctgttcatttcaggattatattttctacaagttccacttgtgggactccttttgttgcccctattttttttaaagaaggaagaaagaaaaataagtagcagtttaaaaatgagaatggaananan

SEQ ID NO: 53817 - DNA, 549 bp, Homo Sapiens
  misc_feature (476)..(476): n is a, c, g, or t
ctccacgattctggctgtttgcccaggaacttagggtgggtacctctgagtcccagggacctgggcaggcccaagcccaccacgagcatcatccagtcctcagccctaatctgcccttaggagtccaggctgcaccctggagatcccaaacctagccccctagtgggacaaggacctgaccctcctgcccgcatacacaacccatttcccctggtgagccacttggcagcatatgtaggtaccagctcaaccccacgcaagttcctgagctgaacatggagcaaggggagggtgacttctctccacatagggagggcttagagctcacagccttgggaagtgagactagaagaggggagcagaaagggaccttgagtagacaaaggccacacacatcattgtcattactgttttaattgtctggcttctctctggactgggagctcagtgaggattctgaccagtgacttacacanaaggcgctctatacatattataatatattcgcttactaaatgaaaaaaaaaaaaaaaaaaaactcgagtgggg

SEQ ID NO: 53818 - DNA, 655 bp, Homo Sapiens
  misc_feature (612)..(612): n is a, c, g, or t
ttttttttttttttttttaatcttaatatttttacattattatattgcattatttattttttctaagttccagaataatagtgtcattattatagactatatgttttgaagtttgatattataatgggatattcattttttgttcttttcttgactcctttctcaagtgtgtgataaggtctgctgataaaatatttaaccccaagaaagtgaaaactaatataaaattagaaagacctatccaaattagacagtcaattccattaaaataagaagtgagaaaaacaatgttgggcattgaggtgtaaattttgcccagatgtatacccagtgtgaaatatcttctaataaaaatatatttggctcttatccctgcacatgtagaggcataaaaattggtaaacatgtcccgctgtgtagaactttaaaaaaaaggcatttttgaaagtgttgagtggcactgataactggtgaagcctacagccatccgcccaaaagtctgttctgatggcactgagttttcattgttctggatgtataagtctgtgtgtcaggtacagctgggcccagccagcttgagtcactcttgtacaagcttgtttttttctgtcntgtgaatgcacttgataatttaaaaataaaaatatctgtttct

SEQ ID NO: 53819 - DNA, 832 bp, Homo Sapiens
  misc_feature (625)..(625): n is a, c, g, or t
agaagaagaaactgctcaagaagcaggagcagctgaagctgaagcaactgcagaaagaggagaagcttcggaaacaggctgcctcccccaagggcgcctcagtttccattaatgtcaacaccagccttgaagacatgaggagcaacaacgttgaggactgcaagatgatggtgagctcaggagataagatggaagatgcaacagccaatggtcaagaagactccaaggccccagatgggtccacactgaaggccctgggcctgcctcagccagacttccacagcctcatcctggacctgggtgccctctcctttgtggacactgtgtgcctcaagagcctgaagaatattttccatgacttccgggagattgaggtggaggtgtacatggcggcctgccacagccctgtggtcagccagcttgaggctgggcacttcttcgatgcatccatcaccaagaagcatctctttgcctctgtccatgatgctgtcacctttgccctccaacacccgaggcctgtccccgacagccctgtttcggtcaccagactctgaacatgctacatcctgcccaagactgcacctctggaggtgcagggcacccttgagaagcccctcacccctangccgcctccaggtgctacccaggagtcccctccatgtacacacacacaactcagggaaggaggtcctgggactccaagttcagcgctccaggtctgggacagggcctgcatgcagtcaggctggcagtggcgcggtacagggagggaactggtgcatattttagcctcaggaataaagatttgtctgctcaaaaaaaaaaaaaaaaa

SEQ ID NO: 53820 - DNA, 565 bp, Homo Sapiens
taaataagagctttaactgctttaaaatatggctttctatgcctctcaattctgagtggacttatgtgatatatatatgtatatgttgatcagatgtaaatgtggaatgtaaatggagatcttttccttctcactgatcccatcaataccatttgaaacatacttataagcagtggtggtagatagtattaaggaaaaaatatctgtgtctgatttaaatcctcaggtggcagcttaaacgagctgcctcgtgtgtgtacacatagatatgtgtttgtatgtgtgtgagtttcagcagagatagagaacatcaggtgagcagccttgatttataattctggctatacatcctactgtacctctgtcaagggggtaatgagagaaaagatggaatcagtaacctaaagtttaggaataatcacatgttgcatgggctcctgcctgagtgtagagatggaatagtctgtacgtgtatgtgtgatcggtgacacccaggtttgctcaatgtcattttggctgctttgaacatcagaatcccttttaaaataaatgtttgcttattatg

SEQ ID NO: 53821 - DNA, 582 bp, Homo Sapiens
  misc_feature (551)..(554): n is a, c, g, or t
  misc_feature (557)..(558): n is a, c, g, or t
  misc_feature (560)..(561): n is a, c, g, or t
ggggatgcaacacatcttgaagataacgaatgtgatatcaaattggcaggggatagtttcatagcttttatcttgagaacatggtgtctggagttaaaggtattggcatactccacacatctgtaccattcttgagtgatcgcttaggaatgaatgtgatttgaactcattcatgttgagagggtgtcaaattgagaaccaggtagatccccaccacctacagtaaaaaggaccctaaagtaaattggttgaagaaattagatcccaaagattcttggtgaattttgaagtcttcatcagtatatccatattaaaacgagatgacagaagccaaagtaattatgggctgacaggacaactggatcagtttcattaaaaagggcaaacttgaagataaatcttttgactccagctctttagaggatctaaagtgaccttgatggacagtggaagaaatcacaacatggaattcctcgaataacaatttattgactttaaataattttgtctaatgctacatatacacaattaaaaaaacctttacacaaaannnnaannannaaaaaaaaaaaaaaaacatgt

SEQ ID NO: 53822 - DNA, 605 bp, Homo Sapiens
aatttgtaactcctttttttttaatttcacaaaagttttcacaaggacaacgttatagaagaaaacccccagcagtggctaggtcatgcagaaccattaattgtcataccttggcccattctattcatccttgttgcactttagagagagaagtaagctatgtgagttttacaatgcttttaaactgtcatatttcctgttgagcactttaactggcacattcttatagttataaatgttctgagggcgtaactttataacctcctttgcaaagaatgcatgaagagctcttcatgatccaatactaggggatacatatatatagttatatatatagttatatatatataattatatagttatatatatataattatatatagtttatataaagagatagttatacataatataaatcaatatatagagagacaaaaataatttgaaaaaattcttccactcatagggcttgataatttacatgtatacaattattccccaccacaatactggtttgaatactacgctgcccctgtctttggtgtgggggagggtggaggttctgactgagcctcaccatttgtcagtaaaagtgcttgtcaatt

SEQ ID NO: 53823 - DNA, 749 bp, Homo Sapiens
aatggacaaaagaaataccagatcaatctaaagagtcattcaggacctatccatgtgctgcttataaataaagagtcgagttcatctaagcccgtggtttttcctgttcccccacctgatgacctcacacagccttcctcccagtccttgactccagtgactccacagaaatccagcatggcaactcaaaatctgcctgagcaacatgtctctgaaagaagccaggctctgcagcagacatcagctacagatatatcttcaggatctattagtggagatatcattgatgagttaatgtcttctgacgtgtttcctctcttaaggctttctcctaccccggcagatgactacaactttaatttagatgataacgaaggagtttgtgatctgtttgatgtccagatactaaattattagattccatggaaacttgggactgttatctacctctaactgtgtaacattttagacttcttaataacctaaatatttaaaataatgaatgtaacaccttttttagttcactgattctgaagtgttcttccctaatactttctttacttcacaaaacttcaaccataaaaacaaagggctctgattgctttaggggataagtgatttaatatccacaaacgtccccactcccaaaagtaactatattctggattcaacttttcttctaattgtgaatccttctgttttttcttcttaaggaggaagttaaggacactacaggtcatcaaaacaag

SEQ ID NO: 53824 - DNA, 645 bp, Homo Sapiens
aaaaggtcattattgtctatattccaagtggaattaaatgtagtcacagagattcctaacattttccttatatttaagggaaatcacttctaaaaaaacacactaatcagaactgtgatgctctaattagaaacaactcatctggccaactatttgctgctcagagtttcttatttcttagatgaaaaaaactcatcagttatattcatgtgatcgcggctaaaaagtcagtattttctttttgttctaatgtggcttcatttgaaatttctcagattctacattgtactaattatgaataacaaattataaattaaaaactcttaaagagaaaaacttggcttaaaaaaatcatttcatatctccttataagcctttgtcctctaggttgtaatgactctgacttcccacctgtgatggaaagctaagagtcacaaggtcactatgtttactcttacgtaaaagatagtacacattttggctaggctgtttacttcaaaaggcaacctataggtttctacacaaaaagaggcacacatttgcatttgcattagtataatatgcatttgtacggatattgctttaaaaatttatgtaatctactaatgctatttattactcattccactgatccctgaagtctct

SEQ ID NO: 53825 - DNA, 716 bp, Homo Sapiens
tgcagaatggctcccgcaaagaagggtggcgagaagaaaaagggccgttctgccatcaacgaagtggtaacccgagaatacaccatcaacattcacaagcgcatccatggagtgggcttcaagaagcgtgcacctcgggcactcaaagagattcggaaatttgccatgaaggagatgggaactccagatgtgcgcattgacaccaggctcaacaaagctgtctgggccaaaggaataaggaatgtgccataccgaatccgtgtgcggctgtccagaaaacgtaatgaggatgaagattcaccaaataagctatatactttggttacctatgtacctgttaccactttcaaaagtaagttctccatcccataaagccatttaaattcattagaaaaatgtccttacctcttaaaatgtgaattcatctgttaagctaggggtgacacacgtcattgtaccctttttaaattgttggtgtgggaagatgctaaagaatgcaaaactgatccatatctgggatgtaaaaaggttgtggaaaatagaatgtccagacccgtctacaaaaggtttttagagttgaaatatgaaatgtgatgtgggtatggaaattgactgttacttcctttacagatctacagacagtcaatgtggatgagaactaatcgctgatcgtcagatcaaataaagttataaaattgcaaaaaaaaaaaaaaaaa

SEQ ID NO: 53826 - DNA, 566 bp, Homo Sapiens
tcatccagctggccaaggctgtactgcggatgctcctgctgctctggttcaaggctggcctccagacttcaccccctatcgttccactggacagagagacccaggcacagcccccggatggtgaccacagccctggcaaccatgagcagtcctacgtggggaagcggtcaaaccgggtggtgcgaaccctccagaacacgccgtccctgcactccaggcactggggagctccccagcagcgggagggacggcagcagcagcatcacgaggagctgagtgcgacccccacccccctggggctgcaggagaccatcgcagagtttttgtacattgcccggccgctgctgcacttgctcagcctgggcctgtggggtcagaggtcgtggaaaccctggctcttggctggtgttgtggacgtgaccagcctgagcctcctgagtgacagaaagggcctgacccggagggagcggcgggagctgcggcgccggaccatcctgctgctctactacctgctgcgctctcctttctacgaccgcttctccgaggccaggatcctcttcctgctc

SEQ ID NO: 53827 - DNA, 500 bp, Homo Sapiens
acaggtgtgagccaccgcacccaatcctattaggtttctttgaatcccctcatggcctgcctggtttttgctcagcctgtcttcagcttgaggagctgggaagctctggtggatgctatgaactcacttgctgaagagcagcgttcaggtgcatccccagccagggcacgtggctccctcagccatgaattcacttctcttcaggaggtttggcttggcatgaaaatacttcattcagagtatgggcaaatgcttctggaaaacccttccctgaagagagagaacgtgtgtgtgtgtgtcggtgatcacaccctcccatccttcctgcctcctgccccaaaccccgggttcctgggtctggaagggccttctctccaagctgggagctcctgggcccccaccattcactttttgtccttgctgctggcaaacagtaaagaaactcactttccctgtggcacgttatgcttcagaattaaaacaatgaagattaaaatttg

SEQ ID NO: 53828 - DNA, 589 bp, Homo Sapiens
cccaagcagcctaccatagtgtcctcctttttttgcgtgtgtgatggggtttcgcacttgttgcccaggctggagtgcaatggtgcaatctcggctcactgcagcctccgcctcccgggttcaagtgattcttctgcctcagcctctcgagtaactgggattacaggcatgcgccactaagggaggagaccactcctcatattgtcttatgcccaatttctgcttccaaagaaagaagaagtaaaaactaaaaggcagaaatgaaatccacaggcagacagcccagcgccacaccatgggcctggtagttaaagatcgagccctgacctaatcggttatgttatctacagattacagacattgtatagaaaagcactttgaaaatccctgtcctgttctgttccattctaattactggtgcatgcagccttcagtcacttactccctgcttgctcaatcgatcacgaccctctcatgcaaacccccttagagttgtaagcccttaagagggataggaattgctcactcagggagctcagtttttgagacgtgagtcttgccaatgctcccggccgaataaagcccttcc

SEQ ID NO: 53829 - DNA, 897 bp, Homo Sapiens
cctgcttgacctatgctccaggaccctgccctcaacccttgtcagctccctaagtcttcctgtttcccagtctcagattgagtgggtgctctcattggcctctctagctaggccgtctccctggtcagcttccttgagcctgggccactcctccctggccttcttacctctgccaagagcctccagatgtgcctgcagcctagtccctgcccaagcttctcccccagccaccctctgcccctgtggtagagcccactataggcccaggcgccttacgtgcttctcccctggacctatgtgcatccctcacctgccagttatgtggctgccaagccccacaggctgtcatggtggctcttgccacacttcccttcctgagctgacctgacctcactgccacctcttgcattgggatcctgagggctggcccctgctcactgatgggccctcccaggcccgtcaagccctggtgaaggagcttagcttgtcttcttggcaattcacaatgcctcactccacaccctaaaactggagcgtcccctatggtctcctgctgtggcttgggtgccgggcgtctcccgcctccaggatctcctctcacctgcccccattaaagctctgccactccaaaaaaaaagaggggacagaaccgaaaaagaacacgaagcaacaaaagaccacgacggagaaggaagaagcccgcaaacgaccacccggaacgcccacaaaaaccaacaaaacaaggggggggggcgcccccctagaaagattccccccgcggggggggccacagagatttagccggcaccccccacgtttgtttttgggagaaagaggggggggcccccaattaagaggagagaggccccataatatattaacgcccgagggcgccca

SEQ ID NO: 53830 - DNA, 783 bp, Homo Sapiens
gcatctggtgggtttagatcccggcacacagatttaggctcatcctttgaccttgggcactgtccagagggtggggatgtggaggctgggctagggacccagagtaaaacagtgaggggatagatattcagggagaagaggaaagggcagcaggtaggcggtggataggaagcctggattgcaatttgaactcatcagtaactccctggctgcccctgggcacaagccttcccttctctgaaccttagtttccccttctatccagtgagaagattggtcaagataatctctaagctttgttccagatctgatagactaagaagccacttcctttgcttccacttcctttggcagcacagtgttgcaacatctgtacttggatccccttcctttgacaagaatcttgcaacatgccaccctgtattagtttccttggaaagcacaattttgcaaaaggcctccctgaatcccatttttcaaatgctgatagaatgacacatacctcctctccacttagtggcttagcttgcgttttaacttttcctttcacacccatcatacatactgttctgtgactccccgaaagagggattctctctacattctgaaatttgttgtccctatcctggtattgagaagtcaccttcctgatacaaaaagaaggaacaagttgggagaccacagtgactcaacgacagtaagttcctgggatcacctgaatcagaaccagctgttaaaagggcagatttgtctcaaaaaaaaaaaaaaaaaaaaaaaaaaaaa

SEQ ID NO: 53831 - DNA, 890 bp, Homo Sapiens
gcgattggtgtgacaaaacggccacctcctaagtgggtggatggagtggatgaaattcagtatgatgttggccggattaagcagaagatgaaagaattggccagccttcatgacaagcatttaaacagacccaccctggatgacagcagcgaagaggaacatgccattgagataactacccaagagatcactcaggcatgaagaatcgagaggaaagatcccagcattttttcgacacatcagtaccactaatggatgatggagacgataacactctttaccatcggggttttacagaggaccagttagttctggtggagcagaacacactgatggtggaagagcgggaacgagagattcgccagattgtacagtccatttctgacctgaatgaaatattcagggacttaggggcgatgattgtagaacagggtacagtccttgacagaattgactataacgttgaacagtcctgtatcaaaactgaagatggtttgaaacagcttcacaaggcagaacagtatcaaaagaagaatcggaagatgcttgtgattttaatattatttgtcatcatcattgtgctcattggtgtcctcgttggcgtgaagtctcgataagtggcattggggttttcgtgggggccgcgcgggtggatctcccgggtggggagggggcttgggcctgcgccccgccagctgcccgcaaaaggggcaccccccaggaatctgaggggcgtcgggggcaaccgaaccttttgcatccccggactccccccttccctaatcctgctcaagcgggcccgggggaaaggggtttttgtttttccctccctgggggagaatttaaggacctttggatactgctgccaaataaaaattggggttctggga

SEQ ID NO: 53832 - DNA, 636 bp, Homo Sapiens
  misc_feature (580)..(580): n is a, c, g, or t
aaaactgaagagtttggaaatttgccaccctcaggagcggaacattttcaatcggatctttggtggtttccttatgaggaaggcatatgaacttgcgtgggctactgcttgtagctttggtggttctcgaccgtttgtggtagcagtagatgacatcatgtttcagaaacctgttgaggttggctcattgctctttctttcttcacaggtatgctttactcagaataattatattcaagtcagagtacacagtgaagtggcctccctgcaggagaagcagcatacaaccaccaatgtctttcatttcacgttcatgtcggaaaaagaagtgccattggttttcccaaaaacatatggagagtccatgttgtacttagatgggcagcggcatttcaactccatgagtggcccagcgaccttgagaaaggactaccttgtggagccctaagaacaccacatttgttgaaaactagcactctacccacagtgacgtggtatctgatgaagacctgatcgagtgtattgattttagtattgcttcgtgtcctccacacaggaggaggatgtattcagcctttangatgatcagaaaagcaaaaagagagagtggccggatggggctgaggggagaaagat

SEQ ID NO: 53833 - DNA, 820 bp, Homo Sapiens
  misc_feature (583)..(583): n is a, c, g, or t
gcctgcacagcttataacagcactctagctctagctatgacactttatggtgttagtgggtttttttggtggttggtatggaggaggggctgggctacaagttttagattatgtttcttattgcgggtttttaaaaattcttgaattaggcctatttgctcttttgttctctattgagttagcaaattcagtttttccaagatgccctgaaagtatgatcatacatgtatacgaaatggtccttgggtccagctggcaactcctgtgcacccccgacctggattctgccttccttgaagtgagccttggaagaaacaagtgctcatgctccctgacattattagctgccacgatgaagcctcagtcccaaacaccccagcttcctgtctaactcaagagctaatcctgtgtttaaatcttaagagtgtttagatcttaggccatgccatgaattcccctggttgactgcatttgtgaaaatgagcttcccattattggctcttaagtaatggagatgagggggagtcctgctacacagataagtgcatcataaagttacataattaaaataactgagctctgngctatcaacaggcccatcaagcagtccagaatagagtctagaaatggacacaaattaaatgagagttgaaatatgataaaggtagcagtgaaattagtagagagatgatgatgtactcaaataaatagtgttggacaactgggacaatattttgggaaaccaattggatttaattactctgtcaaaatcccgataaagcaaggatttcacatgtcacaatggattccatgttgagaa

SEQ ID NO: 53834 - DNA, 545 bp, Homo Sapiens
cgctccaccattttttttttttttttttttctgagatggagtctcgctctgtcccccaggctggagtgcggtggcccgatcttggctcgctgcgatctccgcctcctgggttcaggcggttctgctgcctcagcctcctgagtggctggaattgcggtcatgcgtcaccacgcccggctaatttttgtatttttggtggggacggggtttcaccatgttggccaggctggcagctgggctcttaatgttacttattgtaactcacttcctgtaagactcaatctactcttcaagttgatgtaccctctatgactgtaattcctgaaatctgcagttatgctgtggtgatcttaagcgtgtcttgagttccatgcaaattcaattctgttgataatgtgtccataatcaaatcatcatcttgcaatgcaagggctaccccataattatcagacattaaaatagtttatttctttttccattctgtaatcttaaaataacatcagcttcagtgcctgttcacaatacaaaaaaagtcaaaaaacaaa

SEQ ID NO: 53835 - DNA, 731 bp, Homo Sapiens
gcgtccggcaattggcaaatcatgcttggttgtgttaggccaaaatactagttttgctttctttaccttttctatcttgatgaaaatgttgcacattctatagttgcaaaacacataaaaggggacttaacatttcacgttgtatcttacttgcagtgaatgcaagggttacttttctctggggacctcccccatcacccaggttcctactctgggctcccgattcccatggctcccaaaccatgccgcatggtttggttaatgaaacccagtagctaaccccactgtgcttccacatgcctggcctaaaatgggtgatatacaggtcttatatccccatatggaatttatccatcaaccacataaaaacaaacagtgccttctgccctctgcccagatgtgtccagcacgttctcaaagtttccacattagcactccctaaggacgctgggagcctgtcagtttatgatctgacctaggtcccccctttcttctgtcccctgtgtttaagtcgggatttttacagagggagctgtctccagacagctccatcaggaaccaagcaaaggccagatagcctgacagataggctagtggtattgtgtatatgggcgggacgtgtgtgtcattattatttgagttatgctgttgtttaggggtaaataacagtaaataattaataataataataataataataataaagggagctgacgttcttaaaaaaaaaa

SEQ ID NO: 53836 - DNA, 858 bp, Homo Sapiens
  misc_feature (662)..(662): n is a, c, g, or t
gttatgtgacttgttgaactttttaaaaagtgctacttttaaaatcccagatactctgaattttagaaaacaaactaattctgattgtgtcgtgcccaagtacccttttttttttaatgaatagggaccaatgccacattgctttttatatttctttcttttttaatgttgccaaaaccaaaagtagctttgttttcctttgtattttgctactttgcagtatttgtgtgtgtggttttttttccttaatttgaaagggacagcactgtgtatgtttataaactaaatgaagataagatattattttgtataaacattcatctgagaacaatcaaagcagtagccacatggtgctggctcctttgcagcacaaacctggtcattttgatgactgtacaacaggaagacttgaaaaatcacgtggattcatattaccaccgctctcatttcatggagtcttctgatcaaaaaagctcacgtcgtatttcttcttttcctttctcttttctagaaattgggtgtttgtaccagaatggaattttgcttctcggttatcctgtgcttcagatgattataatctaacccaaactagcatgtgtttctgcagtttgttacacacctaggatcatattgcattcatcactttaaacatcatgtttcangttttggtcaatacttgacaagggtgcccaggacaggaagacgtgtactgctgagtgttccttcttgccctttatcagcagcttgcccagctcttgagtacagtggtggggactaaaaatgtgggcatgtggagaggggtatttgccctggggggatcctgataccctgggctgtccccatgctgtgttgggagga

SEQ ID NO: 53837 - DNA, 747 bp, Homo Sapiens
caaaaggttgagagatgatcttaattttccttttctttacattttcatgaaggcacggagtgtgaatgtgaagacacaagctctttctggatacagagaccaatttagtttggagattacaggtcctatcatgcctcattctctgcattcactgaccatgctgctcaaatcttcacagagtggatctttctctgcagtactgtatccacacgagccaactgctgtatttaacatctgcctgcaaatggacaaagtacttgatatggaggttgttcataaggagcttactaactgtggtttgcaccctaacactctggagcaacttagtcaaataccgttacttgggaaatcatctttacggaatgtggtgctgagagactacatttataattggagatcctgaacaccaaagtaagcctaaaaggaatctttgaggaaaaaagccttctagcaaggaaattcaagattcttgaagttgaaggaatatactgaaatgtttataaacataacttttactacagtagcatctaaggttttaaatgtgttttactattttcagattagatttttagatataaagatgaaaaactcagataactcaaatgagatatctatatccctacaacctaattgtatattgagcagaaactgaattaatatgcttccttgcaaatgggaaatcccatagcagttacccccatggcattgtgactaatggcatcagggcaaaaatatgttactttacga

SEQ ID NO: 53838 - DNA, 549 bp, Homo Sapiens
ggggctgaatcacataggagttaagggaatgaagttcctgtgtgaggctttgaggaaaccactgtgcaacttgagatgtctgtggttgtggggatgttccatccctccgttcagttgtgaagacctctgctctgccctcagctgcaaccagagcctcgtcactctggacctgggtcagaatcccttggggtctagtggagtgaagatgctgtttgaaaccttgacatgttccagtggcaccctccggacactcaggttgaaaatcgatgactttaatgatgaactcaataagctgctggaagaaatagaagaaaaaaacccacaactgattattgatactgagaaacatcatccctgggcagaaaggccttcttctcatgacttcatgatctgaatccccccgagtcattcattctccatgaagtcatcgattttccaggtgttggtgaactgcctgtgactcctctcctccccggcccctacccctcagggataatgagttcattgctgggctagatgttttagccatgattctgcctctgttttata

SEQ ID NO: 53839 - DNA, 471 bp, Homo Sapiens
  misc_feature (434)..(434): n is a, c, g, or t
ccgggatatcaggatgtgggagcacaggtgccaccacagcactagtgatggagagtcattgcccctagacttctgggacagtgagactgtgaggaaagctgaaatgatactgggaaagggtgaaagaaaggatgtaggtggaatttatttagtattaatgtaggtacacataccttatggcaacattcctagcactctaaattctagatttgtatagtttctgtcaatatcttttgtaagcttaatcaatacagggcatgacaagtatgtgtcacatacttttttttccacgaagaaaaaaaataagtaggaattgggtgctttgtttatcaaaatttgtatttcctttataaataaactttgaaataaaggttgaaaattagtatcttttctagccgagccaccattgtttttaaaaatcctctttgaaacangtgtgtgtgtgtgtgtgtgtgtgtgtgtgtgtgtgtg

SEQ ID NO: 53840 - DNA, 723 bp, Homo Sapiens
  misc_feature (17)..(17): n is a, c, g, or t
  misc_feature (585)..(585): n is a, c, g, or t
  misc_feature (634)..(634): n is a, c, g, or t
tttttttttttttcctngggcagaaaacttggcatttttaggcgtagataccttaccttacaatgccaaaatgaatttaattccagtactcaggtttttccctttaacagactctatgtgtatcagggctttctaatgggtttttcctcttcgtttttaaaatgtgagtagcatttgaccaatttccagtgctcttagcattttacttaaagaacaaccactacaaaagaaaatctttgtaatttgattgtcttttgctttgcttcattaatgcctaagaacttaagaatactcctacctcattagctactcaagatgctgtgacgatcaaatctattctacataatgcgtttagaaacaaagacttgggtgaaaaatgaaataagtatattctgacttggctattgaggggaaaattcagtattaagtgttcctcacaggagatatgttagcagaatactataaaagtttgaaatttttaaaaagtaaaagtacttaaatttaggtatctctcctgaaattctttgcagttcattttttatggcagttaatccagtgaaacactcaaaagtttttttttttttnaaagtgtttttccagataaactgtagggtgaacattcacataatcacanatatgtaattctgtaattgtggaatgcttgtatgctttgttttcgtacatcttccatggagatgtctgaatataatactccatctgtga

SEQ ID NO: 53841 - DNA, 627 bp, Homo Sapiens
atttcctaatgtataccagcctactgtactatttaaaatgctcaatttcagcaccgatggccatgtaaataagatgatttaatgttgattttaatcctgtatataaaataaaaagtcacaatgagtttgggcatatttaatgatgattatggagccttagaggtctttaatcattggttcggctgcttttatgtagtttaggctggaaatggtttcacttgctctttgactgtcagcaagactgaagatggcttttcctggacagctagaaaacacaaaatcttgtaggtcattgcacctatctcagccataggtgcagtttgcttctacatgatgctaaaggctgcgaatgggatcctgatggaactaaggactccaatgtcgaactcttctttgctgcattcctttttcttcacttacaagaaaggcctgaatggaggacttttctgtaaccaggaacattttttaggggtcaaagtgctaataattaactcaaccaggtctactttttaatggctttcataacactaactcataaggttaccgatcaatgcatttcatacggatatagacctagggctctggagggtgggggattgttaaaacacatgcgaaaaaaaaaaaaaa

SEQ ID NO: 53842 - DNA, 785 bp, Homo Sapiens
ctgcagactgggttctagagaggcagagtctttaagagtattcatttcttctggaaggtggagctttacccaaagtggaagttagccttgctcaaagatgtgttttgtggtaggtggtaaaaataaataaataaataaataataaaaaaagaaacatgtattggaggtaatttgacactgctgctggcagtagttctctattcaccattttaaagcccattcaggttctctcttcctgaaaagaactgattgctgtgtttacatgaaatgacattggagtcagatggtctgttttaaagatttccatgacagcctcttttcctgagttggagagattggaggtggtctatccgtacgatgtggaatcaaacggtgggtttcttagtagctaaagaagccatgtacttctagtgtgtttctcagaatatcaactcatgttcttcagatgcttttctttttttaatggtgagggaaaaggtataatttgggattccacagtgccttgcatatagtaggcgcccagtaaatacttgttgaagcaaaccaagtttcccaagtcctcatctcttatagtgaccaagacatctttctcctctgaagggcttggcagttgtggctaaaaaaattaagcagtatcattatttgcttgaaattcatatatacacgttctgtatgaattcagtatgttgccaagacatgatttttctcaattgtattttctgtaaatattcctggcacttgaactgtaagtaaggcaacgtgttcactttgaaacaaaaaaaaag

SEQ ID NO: 53843 - DNA, 551 bp, Homo Sapiens
cttttatgcatctcagttaaacacgtgcattggtagtatcaacaaatttgcaatatagaagttgaagatagttttttacctcactttttaggaggttgtattcaaaattaaaatctcagaatcttacaggacatttaaagactcatgttgatagcatggaggagaaggaaagaagtcacagccttctactcagttgtaggtcttcttgtcatccagctgtcacactgacaaaaagaaaagatgatacatgttttttgctcagataagaagcctgacattaaaagatgtcatatttttttctccacatttcaaaaagttgtccttctcatcactgcacagatctgtctgaaagcctcagtttctgagtgacccaggaacagatcagaaatggagcatggccttgtcctttaatggggatgcaaataaagtttgtggggttaaaagttataagacagcagtgataccccactctctccattattgtccagcggggtgacataatgacaggttaaatatttgtgattccttgattaaatattatttaaagaaat

SEQ ID NO: 53844 - DNA, 977 bp, Homo Sapiens
  misc_feature (864)..(864): n is a, c, g, or t
  misc_feature (902)..(902): n is a, c, g, or t
catgagtcattttatcagaatactctaaatgacaaaatgactcatggtttcttataaaatctcttgaaaatactgaaatcaaaaggttaatgattttttgttcattctgatttgtcattttattatctgttatcggtctaaagtgctaatttacccatttgatttttctgctagacagataacttttaatttttcaaatttggcagacacttttttttttttttgaaaatctttccttccagatctgttgcccactgaacagccacccgtccctcactgtcctggtgtccgattgggctggatggtgttggggcatgatgtgtggaggaactggaaggtgctttaggtctggttcagggtcgggcattctttgttgtttgcacatctttttaaattttacaccttttcttaagaattctaatgccgtcttaagtttttataccaataatgctgagctttaagtgtaggatctggtagtacagacagtgtgatggatgatgctgctggttgtaaatttcatcgtgtgtgtctaattttttttcctgttgaatgggtaaaaacaaaacaaaactttttttagaagatgaatttgctgtcatgttttgtggaatgagggaccgttgagctcactaccacctggagtttgagttgaagcatgaaaatggtgcccatgcctgacgctccagcgcctggatctgcacgtgcccttgtagaggatccttaccgtcctagagagcagacgctttctgaaaactacttgctccaaaagaccctctgagttaacgtttcagctgtatcattagacttgtattttagagcgtgtcacttcctctgaactgttactggcctgaatggagtcctggnacgacattggggtttttccctctaaggagaatacaagnccttaattaaacaatactattttaggcaaaaaaaaaaaaaaaaaaagggcgggcccggctcctaaaggtatcccc

SEQ ID NO: 53845 - DNA, 892 bp, Homo Sapiens
aaattttaactttgtatatttgttatctatcaggctaatttttttatgaaaagaattttactctcctgcttcatttctttgtcttatagtcctccctctttgcaccttcttctcttccctcagtgcctggagctggtactgggcccctggccccatgagcagtttgccttcttgagtcactgcctgtgtagtacatacctgaccgggagtccaaaccaccttggtgctctgaagtccactgactcatcacacctttcttagcctggctcctctcaagggcattctgggcttgtaaacagacataggaagcctctgtttaccctgaagcaccactgtccagcccattggttcccactggcagcatggtagagctgagagaaacaggctctcagggtacctgacttgaggggaatcgtttcatgaagctgaacttcaagcatatttccagtacattctttcagagtctgtttttccatccaaatataagccccaggccattccacttagtgtcttttcaatgataggcaagaatgatatctgagttgaacttcggtgcttctgttgtttgagtttactgtgcctggtggtatattgggcattctttggattgagtgttctgaggtgagagagtcttcccgaggcatcctgtctgtgcttccaaccctgaacaagaccttacatgagagatggactgatggactgcggcaatcctgggctgtcaagtggatagatagttaaaaagcattatactgtgggtaatgaaaagggaggaaaaaaaaagaaagaaaaggaattatagacccccaggggtcagccaggttaagagctctacccacacctgtcaaccccctctctcccccagttttaggttctgagcagtacttggacttga

SEQ ID NO: 53846 - DNA, 534 bp, Homo Sapiens
cgttggagtgctgggcaatggaacttcaaattcaatgtcccccatcagtgaggggagtcgggaggtgaggcctgtaggccaaccaattggtggagtctcagcgatagcccaggtgagaagtggttcacccagaggggcagggtgggggcctcgggcagatctgtccctcttggcccctctgtcctcaaatgtccaaaatgttggaggacctctgttcatatcccacgcctgggctcttgccagcagtggagttactgtagagggatgtcccaagcttgttttccaatcagtgttaagctgtttgaaactctcctgtgtctgtgttttgtttgtgcgtgtgtgtgagagcacatcagtgtgtgcaggctgtgtttccccatttctctcctcccttcagacccatcattgagaacaaatgtaagaaatcccttcccaccaccctccctgcctcccaggccctctgcgggggaaacaagatcacccagcatccttccccaccccagctgtgtatttatatagatggaaatatacttt

SEQ ID NO: 53847 - DNA, 608 bp, Homo Sapiens
caaaactatcacacaggatagataagaagattggttaaacagttttgtgtagatctttttggtgctgaactatgacatgagccttatagattgtaaaatagggatagttggaactaatgtacagaactaaattttttaaactttatttgctgttaaattctgtgaagtttcagttatctaaaataaatatacacaaatatgaaatataatgtttcagattgcaaggtaatatgtaatagtagtgtttgtaagatactcttgtctaatattaactagtagtattttgatttgtacagtcataatttgttaaaatgacttcatttaacattcactgatgtagattaataatgtaagttctgatttaaagaatggtggcaaaatggtgcatgtaatacttttgcaagtgttggggagatcggtatgttttgaaaagagtaatttaacttttgggtgccaggaaatgggttttctcaaagtccattgccggcaatgggcaggcctgcaaatactggcacagagcattaatcatacaccttattaacggtgaggtgaataactttggcaataacagttttagagaacatgtttccacaaacacacacaacacg

SEQ ID NO: 53848 - DNA, 698 bp, Homo Sapiens
aatttaaaagggtaaaccttgggtgttatttatttattaccacaagaaagaaagaaggaaggaaagtgagcgtgcccttgatacttttctggggactgtaatgtaagcagaaattgagacaagggtccttggaactggctgatagttttttttcttcctaatttgcccaaataggacaaataggttgattggttcagagcatttctgcaattacactaaaatgcttggttctgggattgagtaggtgtgaccatcaaatgaataactctgtggagcagtcatttaacatttcaaaaagttataaaaatgtctgaaaatgcaattttaaaaaagcaaaaccaaatgagtccagagcagcactgtccagtagaactgtctgcagtggaagatggaaatgtctgcgctgtcctgtagagtacacgtggtcctatgtggctgccgagcatctgaaatgtggttaatgtggctaagaaactgtgtttttaactttatttaattttaattcatttaaatttagccatatgtggctgatgcttaccatgttggggaacgtaggtctagagactttagaaaagttagtatgagtgaagtaggaacttggtccttggacatttgggatttgaaagaaaggcggaggaaaggcattataatttgaccagaactctagcttatggtcttatcttaaaaaaaaaaaaaaa

SEQ ID NO: 53849 - DNA, 620 bp, Homo Sapiens
  misc_feature (580)..(580): n is a, c, g, or t
gcaagcagcgggacctgaagatcagccggcgcaacgtgttgtctgacagccggcccgccatggccccgggctcctcccacctaggggcccccgcctccaccaccactgctgctgatgccacccccagcggcagcctggccagagccggggaggctgggaagctggaggaggtgatgcaggagctgcgggccctgagggcgctggtcaaggagcagggcgaccgcatctgccgcctggaggagcagctgggccgcatggagaacggggatgcgtagggccacagccacacgccaccttcatctcctccgccgcccccttcccactcagcttctgccagcgggtcgcaccgggctagctggctgcccagagcctctgaggcagcgcaggggtcagttcccacccccacccgtcccaggcccaggccgaagccagcgcccagctttcctcactgttcctgtggaggatgtctacgcccaggcgagctcctcgacctctgagggaccatctccccgaccactgcccagccctctgctccctccccagaggaggcgggagggtgggctctatattttcattccanataaaattctctttctgaaaaaaaaaaaagaaaaataggt

SEQ ID NO: 53850 - DNA, 714 bp, Homo Sapiens
ggcacgagggccaaccctcccttctgcgaggagctcatggatgccatggtctctcactttgagagactgcttgagagctcaccggagcccctgtccttcatcgtgttcatccctgagtggcgggaacccccaacaccagcgctcacccgcatggagcagagccgcttcaaacgccaccagttgatcctgcctgcctttgagcatgagtaccgcagtggctcccagcacatctgcaagaaggaggaaatgcactacaaggccgtccacaacacggctgtgctcttcctacagaacgaccctggctttgccaagtgggcgccgacgcctgaacggctgcaggagctgagtgctgcctaccggcagtcaggccgcagccacagctctggttcttcctcatcgtcctcctcggaggccaaggaccgggactcgggccgtgagcagggtcctagccgcgagcctcaccccacttaacatatcctgcggggaggaggagccccaggggtgctagtctggactgctgggactcgggcccctggggcctcagagggaccccggctgccactgacatatgaagattacggttctgccagggctcccctccctgcctgtccccaagtcctcacctcaaactccctccaagtcccatgtatataggtcctgatgccttcccaaccccgcccctcaccctgttgccaccttgtttcatttgtaaaa

SEQ ID NO: 53851 - DNA, 931 bp, Homo Sapiens
  misc_feature (706)..(706): n is a, c, g, or t
gaacaaatagggctcctgtatcaggaataccgagataaatcgactctccaagaaatcgaaaccaggaggcaacaggatgcagaaatagaagacaataccaatgggtccccggccagtgaggacaccccggaggaggaagaagaagaggaggaggaggaggagccggccagcccaccagagaggaagactctgccccagatctgcctgctcagtaacccccactcaaggttcaacctctggcaggatcttcccgagatccggagcagcggggtgcttgagatcctacagcctgaggagattaagctgcaggaggccatgttcgagctggtcacttccgaggcgtcctactacaagagtctgaacctgctcgtgtcccacttcatggagaacgagcggataaggaagatcctgcacccgtccgaggcgcacatcctcttctccaacgtcctggacgtgctggctgtcagtgagcggttcctcctggagctggagcaccggatggaggagaacatcgtcatctctgacgtgtgtgacatcgtgtaccgttatgcggccgaccacttctctgtctacatcacctacgtcagcaatcagacctaccaggagcggacctataagcagctgctccaggagaaggcagctttccgggagctgatcgcgcagctagagctcgaccccaagtgcagggggctgcccttctcctccnttctcatcctgccttttcagaggatcacacgcctcaagctgttggtccagaacatcctgaaagaggttagaagagaggtcctgagcggggagtgcactgcttttggatgctcaccaggagcttggaaaatgtgggtggaaggcatgcaaacgaggggcgtccaggaaaattggagccgcacgggaacacgatgatccagcatttcggaaaaaaagaatggagttt

SEQ ID NO: 53852 - DNA, 933 bp, Homo Sapiens
tgtggaggacgtcgtgctggactgcctgttggacttcttacccggggggtgaacaaagagaagatcacaccactcacgctcaaggaagcttatgtgcagaaaatggttaaagtgtgcaatgactctgaccgatggagtcttatatccctgtcaaacaacagtggcaaaaatgtggaactgaaatttgtggattccctccggaggcagtttgaattcagtgtagattcttttcaaatcaaattagactctcttctgctcttttatgaatgttcagagaacccaatgactgagacatttcaccccacaataatcggggagagcgtctatggcgatttccaggaagcctttgatcacctttgtaacaagatcattgccaccaggaacccagaggaaatccgagggggaggcctgcttaagtactgcaacctcttggtgaggggctttaggcccgcctctgatgaaatcaagacccttcaaaggtatatgtgttccaggtttttcatcgacttctcagacattggagagcagcagagaaaactggagtcctatttgcagaaccactttgtgggattggaagaccgcaagtatgagtatctcatgacccttcatggagtggtaaatgagagcacagtgtgcctgatgggacatgaaagaagacagactttaaaccttatcaccatgctggctatccgggtgttagctgaccaaaatgtcattcctaatgtggctaatgtcacttgctattaccagccagccccctatgtagcagatgccaactttagcaattactacattgcacaggttcagccagtatttacgtgcccagcacagacctactccacttggcttccctgcatttagaaatattttaaaatgtcctgtgggggagcccttttagccaggacggggggaaaaaaaaaaaaaaaaaaaaaa

SEQ ID NO: 53853 - DNA, 746 bp, Homo Sapiens
ttggttcttaaaatctatcacttttcaccttacacttgatgtgtgaaaactataaaaacaatgtgtgaaacccagggttctaaaatacaagcatagattttatcagggtgttttgtcaaagcaggttattcagtgattcctccccaccattcttaagaacgttaaataatgctgttgtgttagctctgagtagaaaggaaaaagtaaaacctctgtttggaggtaatattgggttgaattctgactgcccctttctagctggacctttaacaaatcacccaatcttttttgtgtttctctaaagtcatttatacattaaatgtaattatagcaactgtggggttctgttgagaattaagagctaacactatatatgtaaagtttccagtactagtcccagaatttagaatatgctcaacacaaagtaaacagcattatataagtttatatttttgtgagttataaagtactttgatatattctcattaaatctgtaaatcacctctataagtaagtggtaataataaagcagatatttttgtccccatttaaaaaatgaagaaattaatgcttaatagggtggtaccctggaaaggatctgggaagtggtagaaatttctggtctgtacttttacaaatggagcccttgggaggtgggttaggtcaaaagaaagcttttacttaacgttgtcttatttccagtctaattttaacgctgtagcagaaccagatggtgagaaaatctg

SEQ ID NO: 53854 - DNA, 500 bp, Homo Sapiens
ggaccagggctgcgacggccatgctggggcaggtgagtgctctgttagctgctcccagtgctgtccccaggctgcagttctggtccctggttgtcaggtaggaagggtgcacttgaagcaggtgctcatctcggttccttaacgtttatagtctgacccctcacttaggctttcctctgccaccccggtccagggaagaggctcgctcccgcccatggtcatcactggtctgtctgctctgttgtctgttctttccctgactccctcccaccgaaggcctgatggctactcacccctctgggatggctatgggagaggaggagtgatggggaccgccaccttttctgcaggaaatgtgcccagcagctcttggtcaaagcactgttgctataagctatctctgggatgcctctaggcccccttccctctacacacctctgggaaaagattacactgtattaactctcgaggagtttcctcaccaataaacagacaacctc

SEQ ID NO: 53855 - DNA, 620 bp, Homo Sapiens
aaaatccaaccctgtcagaatcatgctgttctctttgctgacactgtgaccctgggtcgggacagaccagcagcaatctgtctttagaatctctttccttcctccccttttgcccccgtggggctcccggcatcctgaaagccagcaaagcctccagcatcttttccatcctgaggtgcctcccagtggcctggcttgtcggagcaagtttcatcagccctagggaaaacacggccctcctgggaacctccttacctggagtaaccggacaccttagacggaggtgcctgagggtggggtgggatttgcagggtcattatcagaacatgaggataacttccttgcccctgctctgtagccacctccttggcaccggcctctatttgtcataaggcggcgtgggcgaggcctgacacaggccagccttggcacgaggggggccaggggttctgagaagcgctgccctgtgagagccatgctggccttcgtctccatctctggttgacgggctgtccgtgtgcctcctgtgtgtctgcagacaagtcttgctgtgctttatttgtgaaactttaatgaggaaaaaacaaataataaatgttctcgttttgaaactcaaaaaa

SEQ ID NO: 53856 - DNA, 686 bp, Homo Sapiens
ggcacgaggggagcgtgtcagtccgtgatcctgggtagatagagcagggcagcgacggaagactgcctataggacattcacgctgggatgagaggggcctgagaggcctgggctttgtgacagggaaacttggataaaggatggtgcgattcttccgggggctcgccggttctccagcccggactgctgccagaggcttcctggaggtggcagctttcttcaaaggcaccatcccggagcgcaagcccctgatgggcgcagaaaattcgggacagaccacgtagaggtgggctcccaagcaggtgcggacggcaccaggccgcccaaggcatcgctgccacctgagctccagccgcccacaaactgctgcatgagtggctgccccaactgcgtgtgggtggagtacgcggacaggctgctgcagcacttccaggacggtggggagcgggccctggctgccctggaggagcacgtggctgatgagaacctcaaggccttcctcaggatggagatccggctgcacaccaggtgcggaggctgagccatccctgctggactccctaccgcaggacggagtccaggacgcagccgcagcctccttccttcacaccccctcacagactccttgtgtccaacgggaataggaagaattagttactgacttcacctgagaaaaaaataaattc

SEQ ID NO: 53857 - DNA, 647 bp, Homo Sapiens
ttgaatttatgtgacactatagaagagctatgacgtcgcatgcacgcgtacgtaagcttggatcctctagagcggccgcctactactactaaattcgcggccgcgtcgacgaacatctgttttctgatatttagacacttcctcttccattgctgtttcctatgactcatgcacagttatttgttcaggtttcatggaatttcccaagtgtatttacctttgtttggtttttaaaatgtaaattatattgccccaataaatgagtatgtgtgtcagggggactgtggctgggtcattgcatgtggaaggggagtttacagaagagaactcctagaagagctttacttaactatgaaaattttcaaagaataggacatttctaataagtccctaagagtgtcctgaaggacatgttttggttctgaaacatagtttctataatcgtccttaaaaaataacttgtttctgcttaataggctttactatgaatatacctccatatattattaagttagaatgtgagaaaaggagataatttttgaagtacaaatatagggagttagtgagtgtaggcattctgactgcctagtcataactttgatgaagtacaaataccaccatccttaatttgaagatagcagtcgccc

SEQ ID NO: 53858 - DNA, 820 bp, Homo Sapiens
accagccatgtccaagaggagcagatcgaagtggaggaaaccattgaggctgccaaggctgaggaagccaaggatgagcccccctctgaaggagaagccgaggaggaggagaaggacaaggaagaggccgaggaagaggaggcagctgaagaggaagaagctgccaaggaagagtctgaagaagcaaaagaagaagaagaaggaggtgaaggtgaagaaggagaggaaaccaaagaagctgaagaggaggagaagaaagttgaaggtgctggggaggaacaagcagctaagaagaaagattgaacccccatttccttaattatttcaggaataattctcccgaaatcaggtcaaccccatcaccaaccaaccaaccagttgagttccagattctatgtgaattaaaaagtcaatatatgtataattctgagatgacttaggttggacattcaatgttgtgctatgaatttcctctttatgcagagtatctgtttgcttgcagagtggctttctggcttgctgccagcctgtgcatggtccacgcttatgagttcaggatctacggcaatgtgaatcattcagatgtttacaataaaaaacaccacatgagtaaatgaattcactaatgttaatgttaaacttcatggaaaaatagtcctttgaaccttcggtggttagcaattaaagaccctgagttatgtgcaataaatagtaaataaagttataccgaatgatgtattttttgctgtggttgttacttaattaaaataccttaaagatggcaccaatataaagtatataccagtggactattgacctc

SEQ ID NO: 53859 - DNA, 912 bp, Homo Sapiens
  misc_feature (657)..(660): n is a, c, g, or t
  misc_feature (663)..(663): n is a, c, g, or t
  misc_feature (666)..(666): n is a, c, g, or t
  misc_feature (670)..(671): n is a, c, g, or t
  misc_feature (681)..(681): n is a, c, g, or t
  misc_feature (684)..(684): n is a, c, g, or t
  misc_feature (688)..(688): n is a, c, g, or t
  misc_feature (694)..(694): n is a, c, g, or t
  misc_feature (714)..(714): n is a, c, g, or t
  misc_feature (717)..(717): n is a, c, g, or t
  misc_feature (722)..(725): n is a, c, g, or t
  misc_feature (729)..(729): n is a, c, g, or t
ccacgcgtccgcccacgcgtccgactagttctagatcgcgagcggccttccctactcactttccccttgcggcaccaaatggtcactccttccagagcaaaaactggcactcatagcaagccagaacccccatccccatcctcatgggtctgtggctgggtgcaggccatcaaaatggacaccacgagacagaagtggggactgcctggccacctagcgccttcccactccttaagcaagcacaaagaagatgaggcagagaattgtcagagctgaaagttcctttggttgctcacaactcaggtatgcacccatgtggcagccaggcagcggagccctactagactgccagtctcatgcacccagacctgtggccagattgtggcctctggctgcctcaggcattttcctctttgcattgggttttcctgcattagtaactacagctgcaacagacatcctccacattgtgcacactggttttgcctttgtcctcaagagttgatacttggcattagcatgaaacttgtgggtgtgggaggatggagagagaactctaacacaaaacatcttattaaaattgtacttgagagacaaaaaaaaaactctgttgtattttgacagaattatttttattaaaatacacatccatgagcnnnnaanaanaaanngaaaaaaaanaanaaanaaaaanaaaaaaaaagagaaaaaaanaanaaaannnngganggggggggggggcccctttaaaaaaaacccctccagggggccccaagatttaaccccaacccccctttttttttggacaaaggggggcccccataataaggggccccaaattaaaaaacctagggcgacgggcccccctctctttttaacaaccccccgcgaactgtggagaaaaaaatgtct

SEQ ID NO: 53860 - DNA, 772 bp, Homo Sapiens
  misc_feature (15)..(15): n is a, c, g, or t
  misc_feature (763)..(763): n is a, c, g, or t
  misc_feature (770)..(770): n is a, c, g, or t
gggagtagagggagnagggcaggtggaactggggcagaatctagtcatgccctaaagctagtcctgtaaacaatggtgccccagaaagctgcaggtggtgtttggagaagcagttacttttcagttacaagacccatctccctagtctcagccttacaacaccacgggactaaggaagagcacttccttgcctccgtaaggccagaggaagaaccatcccaatcatttgatctccagctccacagtagagagaaacctacaaaatgtcaaaccagcttcccgactcccaggagctcaagccaagcccagaggcagtggctggggtccctgcaggtcatgaggggcctatgcctttactccttttaaacaccagcacccgtcttttccccaacctaaaaccaaccaccagcatttcactacaggaccaaatggaaaccgagggaaccctgggtcttgggaagaacaacaggaaaccaaggtctgacctagggttccctcccagtcttcacatcactctggcctcatcaccaaggtgacagaggacacaggggagggggaaaacccacacacactccttggaatgggtcctgttatttatgcttgctgcacagacatattagaagaaaaaaaaaagctttgtattattcttccacatatgctggctgctgtttacacaccctgccaatgccttagcactggaaagctttttgcaatatgctggggaaaggggagggagggaatgaaagtgccaaagaaaacatgnttttaanaa

SEQ ID NO: 53861 - DNA, 547 bp, Homo Sapiens
gtccggtgaggcaacaggcacccgaagtccctcgtccttccctctgtgtgctctgaatatgtccttgtccttcctgacccatctctgaccagctgggaacctgcttggggtccccctcaaacctgtgtctggggtgtgggctcacagatccctatcagcctggttcgtgggagggctcttcctaaagggacccccatctctaagtcactctgaaagggagttgtggagaggagacgcctccagactctcagaagttttgaggactgaactgggtcactcgggatctgtgttcgaatcctccccacccctttctttgtggagtttcctaacctgctgctgaagcacaatgttttggtgctttcttttctcatttgttaaaggcagtgtccaaaagccattccagatgccaagaccaggggcttatttctagggaaggtaggtcggtttccatgtttccctcccgttatttttattttttactttttgcctgagacaagccgagtatgaggtggtttgatttaagaaaaatcaatgaaattgtttacta

SEQ ID NO: 53862 - DNA, 417 bp, Homo Sapiens
ctggaattagaagatcatcaaagcagactggagcagaaactgagagagaaaatgctcaaggaggagagccagaaagatgagaaggatctaaacgaagagcaagaagtattcaccgagctgatgcaagtgattgagcaaagggacaaactcgtcgattccttagaggaacaacgcatcagagaaaaagccgaggaccagcactttgaaagcttcgtattctccagaggctgtcagctgagcaggacttgaggaggcccgtagtccctctccctggctgcacgttgggaccggatcaggccaagtgcaccacacaccctcatgggtctttctgcaggatttatcatccctggaacttaagttataccttactgcattttttaaaattaaaattctcttgcacgcaaaaaaaaaaaaaaa

SEQ ID NO: 53863 - DNA, 924 bp, Homo Sapiens
ctgagcttcagcccactgagagtttacctctggagttcagtgatgacttggatgttgtgggtgatggtatgcagtgtcctccttcacctttgctttttgatccttcactaacccttgaagatcatttagtcaaagaaattgctgaagacacagtggatattttgggccagatgcagatggctggagatgggtgcagatcccagggatctcgaaattctgagaaagcctctgcaccattgtctcagagtggattggctactgcaaatgggaagccagaacccacttctattagttgatagtttggggaaccattttactttggtggatttaaatttctcgttcttcaaagaagtatttctgatcatctctcacaaaacacaggcaacccagactaccttgtttttcttctggattgagtattatagtcaaacgtaaagccaaattttgaggacgtggaccgtgggtttcttcccactcagggcaaggaagagaaagagagataatccctatcaaagcttctgggattatttgggactatacctaaaaggaaagtgacatctttgtaatgggatttcccaagtcatggatagaaatccacttaagtagctaggtgggagctgtctttgtgagtggtgtctttgagatactgatggccctaatatcggttatctctatctgaagacctgcagtttagcttttcttcacctctacttaattgggcagtctttaacccctttccctggtgaactctggctttttatcctctgagaaaacagcccacaggactgggtcctccttatccgtcttgcttttaacctatgtaaatttctgtggttgctatcttatgtaaaatatagtaaaaatttattgtatatagtttctattaaatgttaaagaaaatgttatgaaaatatcaaacagtca

SEQ ID NO: 53864 - DNA, 700 bp, Homo Sapiens
cctcccatcacacacgcgagcataggacacacacacactcacacctattagatccgtttccattgaagaatattacgctcggggacaagccaggtgcacgaccaaaaatttaaaaaaaaaaaaaaaaggaaaaaagaaaggaaagaaaagaagaaaacccctcttctggctccaggaaacaagcttcaacccattgcacacaccggagaaggggtttccccctgcccgcccgcccgccccccaactacctccccgctcctgccagtgtctgcctctctgcccccacgggggtttatttgatctcacattaaccaaggaggagaatgtgagaaaagggggaaaatgcccaggaggaagcaggagcagcccaagcgccttccctcacatgttagtaggcaggaagaggcggagggagagctcagtgaaggagaacactggtatggaaactcttcaaagactccgtcagaagcatcctatggggaagtccaggagaactataagttgtctctggaggaccggatccaggagcagtccacgtccccggacacctccttgggaagcacgactcccagcagccacacgttggagctggtggcactggacagtgaggtcctgcgagactcactgcagtgtcaagatcacctttccccggggagtgtcttctttgtgtgacgatgacccaggctccaacaagcccctg

SEQ ID NO: 53865 - DNA, 954 bp, Homo Sapiens
atcaaattataatgatagtataattatccctttttaatattggggaaagaaaaatgaaaattcattagttaattactgctttgtgttgtgtgaatttattaacaaataacattattacatataggtcattgttaacaaacaaacatccctgaaaacctctgtgaaaatttaattttttatatcctgattaatatattgtgactttaggcccatttttcatgtgcttcactttgatagagttaatccataaaattgctctttactttagcttatcaaatgaagtattattttgtggactggaggccaaaaagtcaatgtgagcttctcacaggtttttaaagctccactaaaaataattatccacttgtctttacttttgttgaccagaatagttggtaactctgccagagcctgtacttacctgccaaaaacaattaaatctggttaatgcctgaaaccaaatctctcagtctcaagtgttatactatccaagttttaaatggaaaggtaaactgtggagtaatgaaattttggttttactgtaccttttgctatcaagataatattcatgtttgaaatcttgtctttatttggaatttagttactgtctgcttttaacctttgctttcctaaagaaagttgagatccagagagttcaagggattggggaacaagagaaggcgtcaagtcatttgcacttggtacctgtacagttaggtaaataaaaactaattaataactcggttaacgacaacacaggacaacaaaaaaacaatagacaaggaacagaagcgaaacgacaaggaaaaaacgaaagacaagaaaagatacacaaaagcgaaacaaagacacggcagccaacaagcagaatgcacgcgacacatgaagaacaagacacagagaaagagagcgagaacagcagcaaggtgacgagcgagagacgaagaaagaaaa

SEQ ID NO: 53866 - DNA, 535 bp, Homo Sapiens
tctaatacacttaagctgcagtcccaaaattaggggtccttcagtcttggagactataagggagcctctgcacccagggaaaatgttaccctttacaggggggaagggtaaaccagtagggaatacagtacaatcccaaccctactgggaggggcgggagggaggtgttgccgtcactgtattaagtcgatgttgggaaacgttttaacatctggagcctttgtgggtggaaatatgtctccagttacaactccgcagtggatgtgaagaagcaaaaaaaaaaaaatctattcagtctactcacaaaacagtacattgtggaatattatggggaattgtaccaaaacaagaaccatataaatgatgcctagggacaagaaagaggaacaattctatagcgcacaataaaggaaacctaagaatgggagttacaaatagtaaagaagcttttttttttttttttaatttaaagtttttttatgtaagttttcccacatgatggggccttgttttgcatgttgatgaagaactacac

SEQ ID NO: 53867 - DNA, 810 bp, Homo Sapiens
  misc_feature (405)..(405): n is a, c, g, or t
  misc_feature (645)..(646): n is a, c, g, or t
  misc_feature (767)..(767): n is a, c, g, or t
ggtatttttatatggctttgcaaaatggatatattttccaaattatgagagtatttatatatgcaatatttatcaagggctataaaaaacatcatttttttcatccattatttccagttttgggaatgtattttaaggaaatcattttaaagaaggaaaagctgtgcatacatagttatttatggcagtattatcttcattagtgctacagcaaaatagaacaacttagaaaatgcagtggagaagaaaaccctacataaatgtgaacacagtcatgtaaaaatatgtgtgtaatgtaaacaaaaatgaattttaaaaaagattatccatgtaaaagtacgaggaccagaagggggagcatggagaagtacaatagtcatggttggttaagactatgggtggaanactttcttataattttctttttttttttttaataataaaattcctaaaagagggttggaaaactgatgttgggtttgggatttgatattttggggattattatatggttgactgaggaaagcaaattcttttgtgtggagagggatttatgatcagttatcatgtaccacagtatacaaggggtgattccctgaaagcacaaacctgtattttcccggttctcaaataaatttacagggnncactctttatccatttcctgtttggaaaccagggcattttcgggaccaagaacccaaaaaaattgattccaaagaaaaattccagaaaaggcctggattctgaccagggaggaaaaaggcngaaaaagaccccaataggatttaagagaggaagtggttaaatt

SEQ ID NO: 53868 - DNA, 506 bp, Homo Sapiens
  misc_feature (480)..(480): n is a, c, g, or t
gctggggctgcaggtcagtgaaacccacgcagcctaggccagagcactttactccaggcagggcccctgcccctgttggccacagcttatgggccctgccctctttcttcacaccagccccttggccagcctgccgcaggcatctcagggccatgcagatcccaggctgtggattacgtcactgcaggaactgcttctgaaaggctttggccttcctcagtgagccctggaggggttggccttctctcctccctgcctagatcagtccttctccaaaaggacctgggagctggcagcctgggcaggggggctgaggcacgtggtagccctctttctgtgaatggggtggggctgtgggggcagctggggttggaggatgagagctcctgaggggcagaggagcagagatgcatcagctcgcctgggactggctctgtgataaaaagacccctcccgctgggttttcagaccccatgttgntggtcaatgaaataaagcatcttaca

SEQ ID NO: 53869 - DNA, 630 bp, Homo Sapiens
gactggatcttctatcattccaattctaaatccgacttgaatattcctggacttacaaaatgccaagggggtgactggaagttgtggatatcagggtataaattatatccgtgagttgggggagggaagaccagaattcccttgaattgtgtattgatgcaatataagcataaaagatcaccttgtattctctttaccttctaaaagccattattatgatgttagaagaagaggaagaaattcaggtacagaaaacatgtttaaatagcctaaatgatggtgcttggtgagtcttggttctaaaggtaccaaacaaggaagccaaagttttcaaactgctgcatactttgacaaggaaaatctatatttgtcttccgatcaacatttatgacctaagtcaggtaatatacctggtttacttctttagcatttttatgcagacagtctgttatgcactgtggtttcagatgtgcaataatttgtacaatggtttattcccaagtatgccttaagcagaacaaatgtgtttttctatatagttccttgccttaataaatatgtaatataaatttaagcaaacgtctattttgtatatttgtaaactacaaagtaaatgaacattttgtggag

SEQ ID NO: 53870 - DNA, 568 bp, Homo Sapiens
atcggcacgagagacagtcagtgtaggcgacctgactgaggtcaaagggcagaccagcggcagtgtctggagctcctaccgcaagagctgcgtggacatggtcatgaagtggctggtgccggagagcagcggccgctacgtcaacaggatgaccaatgaggcgctgcacaaagggtgctccctgaaggttctggcggacagcgagcgatatacgtggatcgtgctgtgagggccaggccgccccggacactgactccaactacctccgtggcctgggaccggcccccttcctggggtggcctcttcctggccggctggcccaccgactgatgaccggcactagtgttagcctgcggaacggggctgggcagggcagcctctgttggcctgagggtctggacgctttttatttatgcctatttaagttgggaaggggcagagagagggcgccccctgccccaccagcctgagtgccccgccttcaccccgagctgggcatgggcctggcccctcgtgcatttgcccttttctcggctacagctgtggacgttgccctcggggaggtcga

SEQ ID NO: 53871 - DNA, 632 bp, Homo Sapiens
cgcgtccgcttgatttttaatcccacgaggaagctgcctgaacaggacatcgcacaaggatcctacattgccctgccattgacgctgctggttctgctggccggttacaaccatgacaagctcattcctttgctgctgcagttgacaagccggctacagggagtcggcgcgctcggccaggcagcctctgacaatagcggcccagaagatgcaaagagacaagccaagaaacagaagacaaggcggacgtgaggaggaaggggacagttgcagtctcacttgggacaggccacagccaggggtccggccactacccgcccgtgggataaaagccaaaagcatgcgtcagctaacttcagcctgtgctgctgggcccgcaccccatgtcccttgtcactgtggcatcctgcacccatcctcacccctccgtagagcccctcgtgcaatgcaatgaatggaccctcctgtcactctgctgaacagaatttattttctgagtcaaatataatttattattatttttgtcaaagaagtatttaagctgtgctgtggtgtgagaatgtcattcttgatcttcagccttcgtttgcaagaagagttccagttgatgtggtgtttggttccatggcggg

SEQ ID NO: 53872 - DNA, 645 bp, Homo Sapiens
tgtagcctcgaccttccaggctcaaaagatgctcccaccacagcctcccaggtagtgagtagctggtactacaggtgtgtgctgccacacccgactaatttttttgtagagacggggtttcgctgttcccaggctggtctcaaactcctgggctcaagtgaacctcccgcctcggcctcccaaagtgctgggattcctttctttatttctgtagaatctattttatggttggcattttgggggaagatttcgatgggttccacattcttgctttagttgttgtagagggatttgggtgtttctacccaaggcattggtctagcttttcctacaatgaacctatctttggaggttcaagctccccaccttcccccactgtggtgacctgtggccacttgcagaagggatggtgcctgacccactgccctagccccacgctatgcaccaaacttgttctccccgtcctggtccagggctggggtctttagagactgacagcctctgccccaggcctgagtccttagcaagggttgggtaaggaggttttaagggagaaggtccagtccttagcccttgaaatacaaagctcttctgacactgaatttggatgcaccttgttttatataataaatcgtgtttcacaga

SEQ ID NO: 53873 - DNA, 554 bp, Homo Sapiens
ttttgtgctactacacatcaggacttttgaagcatccaataaatccatttaataagtatgagcatgtgtctgagtggacaagaaagtgaaaccatccatgctacattggataatttttcctcccccagactggatagggaatctcaactttcaaaatagagtatcctggctccatttacaaagctgcacaggtattaaagatcgtgctgcctttgttaggcagatttggaggggaggcccaacagcaaagatggagaggaaaaagggagtggagcttgtggaacaggaagccccccagggtctgtgcagggctgctcagctcttgaggatgttgtggatggtgaagtggtgatggtgtcctggagcagcccagcacctccactgggcccagaaggtcttgacttcggacacttacccctgtttcacaagtgtttataaagctgtttttgcttttgtttttctcctaaataatccttacttggtagttattaatccttctttgggggagggacagggctttaaaactgaagaaaataattttcataaaaatatca

SEQ ID NO: 53874 - DNA, 707 bp, Homo Sapiens
gagctcagcagggtctgcccactccctacgctggccacataggcctccaggagccctcagtgagagggaccagcatagctgacccccagagtgtggtgggcgccggccctgcccgaggcccagtcggggccctttctgcagatctacctctggctcagcgcacgccccctgccctgagaacaggaaagggcccggaagggctgactcaccgggccgacgctcacacgaaaatgggatgcactttatttgctggtgcaaaggcaggtgagggtgcctcctgtgtgaccgttggccctcctgcctggtggcgctgaagggaaggagccagtgagcctgaccccgggaggggccgtccccgtgtgccgcgtttggcggggccccaggcggctcccccaggcccgggtctggggccccaggctttcccctgcctcgcggcgggcgtcccgtgctttgggtttcttggtttgggttttttaatgccagttctcagtacataagtgcattttgaaagaggttccagctatcacttgtaaccatatatatatacatatatattctatctacaaagtgtttatttgcgagatgtttcaacggtgagttcgggccccgccgccttgtgaccatctgtccccggtcctcgtccgcgcccgcgccctggtccgagtggcgtgggacgggccatcactgttgtattaaatgactgtatc

SEQ ID NO: 53875 - DNA, 657 bp, Homo Sapiens
  misc_feature (598)..(598): n is a, c, g, or t
  misc_feature (634)..(634): n is a, c, g, or t
tttttttttttttttttggatgaaaactccagcctttcctgactcacctccatcttcggttcttcagttttctgagaagagttgggatatgtgggaaggggcatgggagctcggcagcctccgcctgccaggaaggcagtttcgcctctgcaggaaagagcagagcccgtgggaagccctgggtgagggtggcgcagccggcccagcacgcatggtattgccagccacggggggcctgcgtgtagtctctgctccctgcatttcaccttctttgttgactttccttctctgttttcccccatctgtttgccagaggggtgggactggcaacagaacagccgtggctgctttatctctcctctccacggtgtactcaggcctgagtggtgactcacgggagcctggccacctcgcagctgttcgccccctcaacctttgaactggaactgctggctcacacagggttttcgacaactgcagctgaatctcatggaaaagctggattcctctgccttacgcagaaacacccgggctccatctgccaggtgcttgccactggtcctggcagaaatggcggctgctgaaagtgaccttccanatccttggtggcacttcagcgccacaggctctccantaaaaaccctcgtgccgaattct

SEQ ID NO: 53876 - DNA, 940 bp, Homo Sapiens
  misc_feature (940)..(940): n is a, c, g, or t
cttttaactagcttctacatggcaagctgtttcagtttgcaaaatcactgcccagcatgtttgaagtcagttggcaccttaaaacacctgttctccagccctggacagtggagagaatctgtaaaagtgtgaccccctctaagatttcgttttaaatgatcagattcggttccagttttattcttgttgagtttttccctatgaaggctccttttgaatgtgtcttgagacccaaattgagcatgttgctgttattcctgccctgcacctgtggagcaggagtggcagggctggctgtgctgggttccagctcgctcccaccgagggactagcttggcctttgcgctttgattccagatagtaagatgagtggaagtgtttatcgagcatgcaaaagaaaccctcacggtaagggctctgggagttgtgtctgtgtgacctgagagtgatccatctcctgcctgtgtgaggtagcagtgggcacttttcattgagacaaactccaggtgtccagagggggttctgccccttgtgaaggcccattcctggcacttagagacagaaagaactcagcaatctttcgttctaattatattcggtctttgaaactgacaatcttgaaatgggaatactgtaacaatatgtttctgggaattgtggtctttaaaaaggatctcggtgaggcaattgatttatcaaaggcaaaaattaaaatgaaaaaaaaaaaaaaggggggcgacaggaatattcccaagggccaagttaggtatccagctttgtacaagggccattaggagcgttaaaaacagagggcggtaaagtggagggaaatgtacaggattggagaccactggcgggaatgaaacaaaacggaataaagatagaaaatgtggaacagatacaagaacaaagaaaagtgagtgctgatattaggtcttcn

SEQ ID NO: 53877 - DNA, 554 bp, Homo Sapiens
tcagctcggtaccagtgctactccacaaacaggtgcagtatatcatctcccagatggtgtcagcacctgctcccccaggaatatgttgtggtccctgaaggccatcacatccaggtacaggagggccagatcacacacatccagtatgaacaaggagccccgttccttcaggagtcccagatccagtatgtgcctgtgtccccaggccagcagcttgtcacacaggctcaacttgaggctgcagcacactcagctgtcacagcagtggctgatgctgccatggcccaagcccagggcctgtttggtacagacgagacagtgcccgaacacattcaacagctgcagcaccagggcatcgagtacgacgtcatcaccctggccgatgactgagccccgagggcccaacacagatcatggatttgcggccagctctcctgggggtagggggccaccaggactcacctccctcttcatttaggatctccagatactgaatagccagcatcctctcattcccagggagccagacctgtgctgtttgtggaggtagcact

SEQ ID NO: 53878 - DNA, 707 bp, Homo Sapiens
cgtccggtaaattaagcccaaagatggggagaaaggaaaaggagagacaaatatagtccatactgagtgtcatcaacaatccagactgaagtcttctattttaatctcaatccccttttctgatttgccacccatgcctcttcaggctggaaacaatctcttggttccctaaagcactttcttctgactgctgtgattcagtgaaccttgccctttgctttctattacttgtgcatttgcctcacctgacaatgttttaaatcgcctttgtatctccttagctgctcaataaatatttgaatgcatcaattaagaatgtatgtgacaataattttgaaatggaaattgtgaggtttattttactaggttattggaggcagttaagtttcttaatgctatacctgattctgccaaagtcccttggacatttgaaaaccttttcaatcttttaaaaatgcaaaagatacttagagggaaaggtattaattaaatttagtaaaaacaaatatattcaatgctttaaattccaaagtagtgataaatacaaacatttcaagatatttgcaatagtaatgttttgaaattttggttacaaagtcacaggtcttgccaatactgttgtagtttcttgcctatatccgtaatttgaaggaaatgggtgagagtgattaaagaagtgtaattactgtaattttttccccctattg

SEQ ID NO: 53879 - DNA, 481 bp, Homo Sapiens
tgcaggcggcacagcctggggccctgtgatcctctggtttcttccattggggcggagtcgggggtggagggagctggccacaacccactgctctgatgggtggtttgtccaaggatgctgaatgtaatgcctggtcaatgtggaagcccatgaggttgcccagggaagcctccaaaagctgggatgcttgagggtatccaagttgaaaaagacaaaatctgaccatcagccagtgacagtcctggcaaatgaaggtggggcggggcagtgaggggtgggagaaggtgaatgattcattattccaccccgaggtttgctggggtgaggggaagaatcgatgctgctttgggaactgaaggtttttctgttgggaaggccctcttggttttggagagaaagacaagttatgagtagctgctaccctggaacggtgggcagagagcctactaggaaatgtgcagaataaactattttttgaagg

SEQ ID NO: 53880 - DNA, 525 bp, Homo Sapiens
agatctttggtgttctctctgtggccaccatcaagtttgagatgctgagcacagccccacagagtcagctcttcctggctctggctgacagcagtatctccacgaagggcacaaagagtggcacctttgtcatgtataattgtgcccgtcttgccacactctttgagagttacaagtgtagtatggaacaaggtctgtaccccacttttcctcctgtgagcagtctggacttctcactgctacatgatgagggtgagtggttgttgctcttcaacagtatcctcccctttccggatctgctgagccggacagcagtgctggactgcacagccccggggctccacattgctgtacgcacagagatgatatgcaagttcctggtacagctcagcatggatttcagctcctactacaaccgggtacacatcctgggggagcctcgaccacacctctttggtcagatgttcgtccgcctgcagcttctgagagctgtgcgtgaggtgctccatactggcctggctatgc

SEQ ID NO: 53881 - DNA, 397 bp, Homo Sapiens
aatgatatggaaggatactcaaagtatatcaagtgagaaaagatctaggaacaggatattattattattattattttattttttgtagggacagggtctcaccatgttgcccaggcttaggagcaggatattagctaactcgtgttacttctgaaaatctttgaagctccccctgctcttttttccagaagtgtaaaaacaagcatgtatttagtattacacatttttaaaaaatgaaaaaatgctgctgtgtgaatgaaagagtatacatcgtgttgctccagatggtaaaactagagtagaatttactaaaataaagtttcagcacgtaaagtaaagcacttctctgctcttggccattttagacactaaccatctggagcaaccatgtaactct

SEQ ID NO: 53882 - DNA, 896 bp, Homo Sapiens
aaaaggcccctgcaaagaagggagagaaggtacccaaagggaaaaagagaaaagctgatgctggcaaggagcgggaaggtgctggagatcgcaagtgaagtgtgtgcattttttataactgtacttctggtgactgtacagtttgaaatattctttatcaagttttataaaaatgcagaattttgttttactttttttaagctatgttgttagcacacagaacacttcattgttgtttttgggggaaggggtatgtgtcactaatagaatatctctgaagctggattgatacggggaaaacatctttcccttctagttttgagagacttcctcttggctcccaggaggagggatttcctgactttgacacacatggccaccttggcacaaaagccttgtggtatggaaaaacaaattcgtttttatgtcttcttttccctttccatctttcagcatagacttaacccttaagcccagacatctgttgggacctgacccccggtcattggttaccagtgtgtctggcaatctggactttccagtgatgccactgagatggcacctgtcaaaagagcagtggttccatttctagattatggatcttcggataaattctgccattttcatttcacttcctgaaagtcagggttggcttgtgaaaagttgttaaacaacatgctaaatgtgaaatgttaaccctctaaactttccctgttcagagcatcagatgaggacttcattgggttttataatggctgatttttggtaatccattgaaaaaaagagttgaaaattgtatactgttaatgactgcctgccccatgtctgcctgaaataccatgatggtttatggaaaagatctttaataaagctggatacagtttgaaaatccagtt

SEQ ID NO: 53883 - DNA, 453 bp, Homo Sapiens
ggaaagtgagggggttgcgcgcccgagtgcaccatgctgccgtgaggccgaaaggggaggccgcccccggccccgcgccccctgccccggaggcgacccctccgccggcctcggccgcggggaaggactgggcgttcatcaacaccaacatctttgccaggaccaagatagaccccagcgccttggtgcagaagctggagctggacgtgaggagtgtcacttccgtcaggagaggtgaggcaggctcgagtgcacggagcgtcccttccatcaggagaggtgcagaggccaagaccgttttgcccaagaaggagaaaatgaagctgaggcgtgagcaatggttgcagaaaatcgaagccataaaactggctgagcagaagcacagggaggagcggaggcggagggccacggtggtggtgggggacctgcaccctctcagggatgccctgcccg

SEQ ID NO: 53884 - DNA, 394 bp, Homo Sapiens
agaaaggctgatgcagcaggtgagtgggcactttccgggccaggggagtagaggaaggggcgaggttcgcaggggctgcagggaagacccgcaggacacagaagagcagctaccgcgcttggaagggagtctcgtttcttacggagaattgggagctgaatctgaggatctctgcctggctttgcttctgcctgccttctccgagttcttcatttccttctctgcaatgtaaacatgtgactcctagagcccccagtttcttctggtccttggaagcttggccttctggcctctgaggcaaaggtcagtgatactgatgggagggtaggtcggactcttggttgcaagtggcagaaacccaagtcagggcagtttatgcaaaaaaaaaaaaaaa

SEQ ID NO: 53885 - DNA, 627 bp, Homo Sapiens
  misc_feature (576)..(576): n is a, c, g, or t
ggcacgagggctactgacatagcatctatcttgaaattcatttcattcatgcaaagttgtccagcgctcacacagagagcagagttgggccaaaggaccttagcttttatcatgtctcccttttttttgactgtgctaaagcattattttgcttttctgtttgttaccaaatcctttatcttcaatggttaattttttgtttatatatttggttaaacaggaaaactgtggtatgtctgtgtgtaatggtaaaatatatatcctgggcggaagacgggaaaatggagaagccacagacactattctctgttatgatcctgcaacaagtatcatcacaggggtagctgcaatgcccaggccagtgtcctatcatggctgtgtgactattcatagatacaatgagaaatgctttaaactctgaagacaggatacctcaccgaagaagccacactgatccaagatgggaggttttaaaaactctacagtgggaacttcacatatctcctttgtgccatatgcaaaaaatagtaaaaataataatttggtgcctttctcctcaaaatatcaatctttcanactggtataaagcctttcctataattgaaaaaaaaaaaaaaaaaacgattg

SEQ ID NO: 53886 - DNA, 846 bp, Homo Sapiens
  misc_feature (606)..(606): n is a, c, g, or t
gtggattaggtatagtgccaacaaattgaatgataaaacaacataatacgtagttattttgatagtgatgaatcctaagttatgtgagttgttcgttgtggaacacattgtgtaacagactcctgggtgtttttctttctcattcgaatctaccacagttggtcatatccaaccctcattcagtatttctatcaagaaagagatgctacaaaaaaaaaaaagaaaaaacctttatgtatacagacgtaaacctcagaatgtatgttgagtccccactgtcatctaccaagacttgcacccccctcattatctaccatgactgtctctcagcctcacgggccctcagcactttgtgttttgacccccagcaccgtgtcttgtgaactcccatcaccttcaagaaagcttccgaggtaagaattttatggtcatctgggacaacttaaatctcccttctgctgtcatagttcttccaactcagttgcctttttttttttttcgtactcatcactgacttgaagcttagtatctggcttccttaaggatgtactttcatgtacagattaatacttatatgagacgacacgacatatgttagggctgaanggcatgacgctgcattttcctgttacttaactatgtggtaattcatattccggaaagtctgggatctcatactcttcacacctacacgaggtggtcctccatgggagctaaagcctccactggggcgcatttacctccaatagggcggagtggcgcgagagctatttcagggttgcttatctaggaatctgcaggtttctaatgacgaagggatcttggggaaaaccatcgcgtcggaat

SEQ ID NO: 53887 - DNA, 569 bp, Homo Sapiens
atagctgatatcgaatcgtatcggcattatggccggggattctcctgcctcagcctcctgagtagctgggattacaggcatacaccaccacacccagctagttttgtattattagtagacacgggggtttctccacgttggccaggctggtctcaaactcctgacctcgtgatacgcccgcctcagcctcccaaagtgctgggattacaggcgcgagccaccatgcccggccagtgtcctttcttatacacgtacatacatgatgatggcttgagtcagctgcagggcagtgggcttaatgagagggatctttgtaaagacagctcttcacttcagctcagtagctttggtcataggcaagtttgttttccattatcataatttgatgattcttgtgatgaattcaatgctagttcttaaagaactcttttatttctgtatgtggagctaatgtttaccttggaaattttgcaaaatacatgtaagaaagaaataaaatatattttgaaaatgtaaaaaaaaaaaaaaaaaaaaaaaaaaaaaacatgtcggccgcctcggcctatgtg

SEQ ID NO: 53888 - DNA, 870 bp, Homo Sapiens
caccaatgccagcatcatgctatttggtccaggcgccgtcagcgaggtgagcaacggcacgtcgaggagggcaggctgcgtctggctgctgcctcttctggtcttgcacctgcttctcaaatttgatgtgagtgccacttccccacccgggaaaggctgccgccaccaccaccaccaacacaacagcaatggcaacaccgacagcaaccaatcagatatatacaaatgaaattagaagaaacacagcctcatgggacagaaatttgagggaggggaacaaagaatactttggggggaaaaaagttttaaaaaagaaattgaaaattgccttgcagatatttaggtacaatggagttttcttttcccaaacgggaagaacacagcacacccggcttggacccactgcaagctgcatcgtgcaacctctttggtgccagtgtgggcaagggctcagcctctctgcccacagagtgcccccacgtggaacattctggagctggccatcccaaattcaatcagtccatagagacgaacagaatgagaccttccggcccaagcgtggcgctgcgggcactttggtagactgtgccaccacggcgtgtgttgtgaaacgtgaaataaaaagagcaagaaagaaacaaggaaacaaaataagaccgtctgacagcaacaacggtcccacaaacaagtcacaaaaagataccggttaaactttgttgtgagtgtgatcattttagctaatgaacatcagggataacaggggattcggatcataattaattgcattgaataattatgagcggatatgaggtctagaacttagtggaaaaaacgagacacaattaaaaaaattacattgagaagggtgga

SEQ ID NO: 53889 - DNA, 552 bp, Homo Sapiens
  misc_feature (407)..(407): n is a, c, g, or t
  misc_feature (409)..(409): n is a, c, g, or t
  misc_feature (478)..(478): n is a, c, g, or t
  misc_feature (488)..(488): n is a, c, g, or t
  misc_feature (546)..(546): n is a, c, g, or t
  misc_feature (550)..(550): n is a, c, g, or t
gaattcagccaggatttattgagttggcatcacagacgctgacagcctccaagtgaaaacccttctcttgaatatgtacaggtttcccatccacataccaagctgatgaggatcccatcgttcttccccagtcctgaggagcccccctcgccatctgcaccttccatagccaaatcagggtcattggactcagaactttcagtgtccccaaaaaggaacagcatctctcggacacacaaagataaggggccttttcacatactgagttcaaccagccagacaaacaaaggaccagaagggcagagccaggcccctgcgtccacctctgcctctacccgcctgtttgggttaacaaagccaaaggaaaagaaggagaaaaaaaagaagaacaaaacccagccgctctnanccccgggggtgaagtcacgcacacctggttttcctggggggcatagggctgggcattctgagaaaaggnagaatttaanggcatggggccggggttgaaaaggggacagttcaaaagctcaaaagccaactgcatcntttnac

SEQ ID NO: 53890 - DNA, 655 bp, Homo Sapiens
tacttagctccttcaaactcaggtttgtagcatacatgagtccatccatcagtcaaagaatggttccatctggagtcttaatgtagaaagaaaaatggagacttgtaataatgagctagttacaaagtgcttgttcattaaaatagcactgaaaattgaaacatgaattaactgataatattccaatcatttgccatttatgacaaaaatggttggcactaacaaagaacgagcacttcctttcagagtttctgagataatgtacgtggaacagtctgggtggaatggggctgaaaccatgtgcaagtctgtgtcttgtcagtccaagaagtgacaccgagatgttaattttagggacccgtgccttgtttcctagcccacaagaatgcaaacatcaaacagatactcgctagcctcatttaaattgattaaaggaggagtgcatctttggccgacagtggtgtaactgtatgtgtgtgtgtgtgtgtgtgtgtgtgtgtgggtgtatgtgtgttttgtgcataactatttaaggaaactggaattttaaagttacttttatacaaaccaagaatatatgctacagatatacgacagacatggtttggtcctatatttctagtcatgatgaatgtattttgtataccatcttcat

SEQ ID NO: 53891 - DNA, 641 bp, Homo Sapiens
ggggagaatcgcttaaacccaggcggcagaggttgcagtgagccaagatcgcgccactgcactccagcctcagcaatagagtgagactgtctcaaaaaaaaaaaaaaaaaaaaacctgccaattttcaaacataccgtagagattattttcaggtgccattttatagtatagcagcagggcttttactctgtgtatgcacagatgcagtctggggcatggtttgtgtgctggactttctcatggccatcatcagtatgcttatggatttgatgacaggcatagcctgggcatatcacctcattggtaaagggctagagcctttcttttttatggcacttctttttttgagatagggtcttactctgtcaccctggctagagtacactggtacaatcacggctcaatgtaggcttaacctcctgggctcaggtgtatgtcactatgcccggctactttttgtattttttggtagagacggcttcgccacgttgcccaggctgcaagcgatatgcctaggctcaagcgatctgcccacctcaacttccggaagtgctgagattacaggtgtgagccactgcacccagcctttgttttattttttattttttgagaggtatgattctttctagagattttttct

SEQ ID NO: 53892 - DNA, 499 bp, Homo Sapiens
ctttgcatttcagatccacacaacttaaagatctgctgccgagtgaatggggaagtcgtccagagcagcaacaccaaccagatggtattcaagacagaggacctgatagactgggtctcccagtgagtgacaagggctgtcctgccagccccgctccacctgccacacatgtggaggctgacctgagccctccacctttggctgtggcactcagccagcccctggtctcactgggtccttttgctttgctccaggtttgttaccttttacccaggggatgtcatcctaactgggacccccccaggtgtcggtgtattcaggaaacctcctgtctttctcaaggtaggttagcgaaaagcaaagagagcaagggccccaaaggctgggcaggcttggctcagacttgagaagtacaggcttgtgtatgtgtctgacggaagggctgacaccgtcatggcctgctctgttgcagaatggggatgaagtccagtgtgagatt

SEQ ID NO: 53893 - DNA, 616 bp, Homo Sapiens
gccaggccttacagtggggcaggcttagtgactgtgcctcagttatgctgtacctgggagtgggcaggccctctcccatgtcaccatcaaaacccactgatgaaggctggtgggagtctgagggctgcacccgggtatggtgagttcccctcagggattgtgctgagcgccttggcctggcttcttggctccgcccacctgctctccctgccaccaagttgtcttccccgggtggcatgtgccacttggctgcctcgtgcctgggcacagtggtgcctattatgggccctccaggtggctctggtgctcagcctgctgtgagcaggaacagctgagtcccaggggttcttgcacacagcagggctcgggtttgaatccaggctctgctgcttggtcgctgcatgagcttctgctgtgctgacctctctggtttgtctcgtcatgtgtaaggtgacaccagatacctacctcttagggctgccccgagactaaaataagaccatgtgcatgaaccacttaccaaagtgcctgttgctctccaggtgtgcctaccgcatgttgccgctgctgtttctgctgggacgtctgactccagttccttctcccctctccagtg

SEQ ID NO: 53894 - DNA, 918 bp, Homo Sapiens
  misc_feature (669)..(669): n is a, c, g, or t
ttctaggtcaccatcagaaaagctaagtttgctgtatagtgaggatcaggagatctgatcctgattgcagaaccttccctgattacagaatcttgggtaagtgcctcccttctgtcctcagttctcaaacaggataataccacataaccttcctaactgtccaggaatattttgaaaattaataagctcctatctgggaaagtagtctaaattctgagaagggaagggtggagctaagtccattgatagttccagtatagaaagtgcataagcaacagagggctttgtaatcttacatcccttgataaaagatactacagtcaatctcctgtagtagttccacagttccatagattacatttttccttggagcatcctatatgcagcatagtttagtggttaagagcaaatacttcctgaatttaaatcctggctctgccacttaactatgtgatcttgggcaagatatttactcactttatacctaagttcctcgtatatgaaacagaggtgataataatagttcctacttcataggattgttgagaggattacatgtaaagtaccaggacagtgcatggcacatgtaagtatttgctttataataattatggttctgttagtcctgataatctcatgttttatctacacatttacacctacttctanaagcagtggatatatttcttttttgaattgtgtaaaaaaaaaataatatttaataccgttgggtttctctcctcattttccagaagcagcagttaccactagaactgaatttcgaaatatgacttctggcttgtcttaccaatctaaaaaagtttcaaatatattgatcatatttatttatggagggaaattccaggaactataattttagctagcaggtcaaaccaatttataaataagcaaatcttt

SEQ ID NO: 53895 - DNA, 602 bp, Homo Sapiens
atggagctttcataaaaatgggatgcattgaggacagaactagtgatgggagtatgcgtagctttgatttggatgattaggtctttaatagtgttgagtggcacaaccttgtaaatgtgaaagtacaactcgtatttatctctgatgtgccgctggctgaactttgggttcatttggggtcaaagccagtttttcttttaaaattgaattcattctgatgcttggcccccatacccccaaccttgtccagtggagcccaacttctaaaggtcaatatatcatcctttggcatcccaactaacaataaagagtaggctataagggaagattgtcaatattttgtggtaagaaaagctacagtcattttttctttgcactttggatgctgaaatttttcccatggaacatagccacatctagatagatgtgagctttttcttctgttaaaattattcttaatgtctgtaaaaacgattttcttctgtagaatgtttgacttcgtattgacccttatctgtaaaacacctatttgggataatatttggaaacaaaagtaaatagctttttcaaaatgaacaaaacaacaaaaatagacaaaaagg

SEQ ID NO: 53896 - DNA, 684 bp, Homo Sapiens
cgccgtcgaccccgcgtccgaagagaacttacttcaggtggtgtggcactccatgcaagatgaatttatacgccagtataagcactttgaaggtttgatagctcgctgttatcctggatctggtgttacaatggaattcactattcaggacattctggattattgttccagcattgcacagtcccactaaaccttgtgaaagaagaaaagataactgaatgaagcatttgagtataacagacactataccaaaataccaagcaactgttttgagaacccagacttaaaattttatgtattattaaatgttagataaatgggtagtaccatactacaaatatttaaatgcaaaattaccaacctatatagcagttttatttgccctataggttgcatactaacttaagcattcatgtcaccataaaatgcctttagcatttctcaatgactggatgggaaattttcctttattgcctagctgcttgtgtttgagtggttgtcctatgagcaatgcatttggagttcttcagctttcactacttctctgttgcttgctaatcatgtaactactaaaatactgtacaaaattgttttttcacactaacaaatgtgtatatggagaagagggctcatgtgatgatcatttgtgaacttagatttttgaggattatgtgactagtaata

SEQ ID NO: 53897 - DNA, 629 bp, Homo Sapiens
ttttttttttttttttttgaaatcaaccaattgttttgaagttctatggaaactcagtgcagaactagactattttgcgatatcagtgctaaatataatttcctgatgataacattttcatattataagttgtaaataccatgaaaatccatccctaagtaatagattatcagtcagttgactctccactaaacagtattataacgatcagctgaagaaagttttcagctattgcccaatgcataaaatattttgggagctcaaattttttaaaaatctattttaatccccaaatagcagtataatagttaatcatctcctgaacaggttggttcccagaaaccaaaatcattttccactcagtgttgttgtagatctcaattaaagaactaacccaggatacctgaactaaagagaggtggcactgagtttccatagaacttcaaaacaattggttgatttcacttaaaaaaaaaaaaaaaagtcattcaatatacagaaaattactcccctggtcagtactgttagccccagataatctgaaaaaatttgttcttaaaaaaaaaaaacaatttggaggccaggcatggtggctcatgcctgtaatcccagcacattgagaggtcgag

SEQ ID NO: 53898 - DNA, 839 bp, Homo Sapiens
  misc_feature (533)..(533): n is a, c, g, or t
  misc_feature (704)..(704): n is a, c, g, or t
catgttcttttatgccatctctagcagtaagtcctccaatgtcattgtcctgctattagcacagataatgggcatgtactttgtctcctctgtgctgctgatccgaatgagtatgcctttagaataccgcaccataatcactgaagtccttggagaactgcagttcaacttctatcaccgttggtttgaggtgatcttcctggtcagcgctctctctagcatactcttcctctatttggctcacaaacaggcaccagagaagcaaatggcaccttgaacttaagcctactacagactgttagaggccagtggtttcaaaatttagatataagaggggggaaaaatggaaccagggcctgacattttataaacaaacaaaatgctatggtagcatttttcaccttcatagcatactccttccccgtcaggtgatactatgaccatgagtagcatcagccagaacatgagagggagaactaactcaagacaatactcagcagagagcatcccgtgtggatatgaggctggtgtanaggcggagaggagccaagaaactaaaggtgaaaaatacactggaactctggggcaagacatgtctatggtagctgagccaaacacgtagggatttccgtttaaggttcacatggaaaaggttatagctttgccttgagattgactcattaaaatcagagactgtaaccctnttgccttacgttcattttatcaagcatagcttgggatttataatgcttgtgtgatctacatcagttagcatcccacacctcctcatctgatccttgcccattaaataaccaagaaagagggtatctgttcttttc

SEQ ID NO: 53899 - DNA, 866 bp, Homo Sapiens
ggtccggaattccgggataccgactgctatatgtgcaggaacttctagaggatggccagatggatcagtttcacaaagctctgatagagctgaatatggactccccagaagagctgcagtcctacatccagaagctcagtatagcagtggagcaggctaagcagaaaatcctccaagcggaagtcaacctcgaggtggatgtggtagacagcaagccagagacccctgacctggagcagctggagccgtctttggaagatgtggaaagcatgaatgattttgatcccttgttttcagaggaaacacctggagtggagaagccggtcaccactgttcagcccgtgtttaacttggcagcatatcatcagctatttgttgggacagaaagaattcgagctccagagattattttccagccatctctcataggagaagaacaggctgggattgcagagactcttcagtacattctggacaggtacccaaaggacattcaggaaatgctggttcagaacgttttcctcactggcggcaacacgatgtatcctggcatgaaagccagaatggagaaggaactgttggagatgagacccttccggtcttcttttcaggttcaacttgcctcgaaccctgtgctggatgcctggtacggtgctcgtgactgggccttgaaccacctagatgataatgaagtttggatcaccaggaaagagtatgaagaaaagggaggagagtacctcaaggagcactgtgcttccaacatctatgtccccatccgcctgccgaagcaggcctcccgctcctcagatgcccaggcatccagcaagggctccgctgctggtggaggtggtgctggtgagcaggca

SEQ ID NO: 53900 - DNA, 746 bp, Homo Sapiens
  misc_feature (746)..(746): n is a, c, g, or t
cacgaggaggaaaaaagagagaattgaaggcagctcttcagtctcaagaaaatctcatacatgaggccagaatacaaaaggagaagttacaagaaaaagtaaaggcaactaacactcaacatgctgtagaagctataagtttggaatctgtgagtgcaacgtgtaaacagctgagccaagaactaatggaaaaatatgaagaactgaagaggatggaagcacataacaatgaatacaaagcagagattaagaagttgaaagaacagattttacagggtgaacaaagttacagttctgcactagaaggaatgaagatggaaatctcccatctaactcaggagttacatcagcgagatatcactattgcttccaccaaaggttcttcctcagacatggaaaagcgactcagagcagagatgcaaaaggcagaagacaaagcagtagagcataaggagattttggatcagctggagtcactcaaattagaaaatcgtcatctttctgaaatggtgatgaaattggaattgggtttacatgaggcaaaagagatttcactagcagacctccaggagaattatattgaggcattaaataaattagtgtctgaaaaatcacaactacagaaagatttgatgataccaaatctcagctggagattctactcagatgtgcaaaaacaaatgacagatctttaacaacacacacaaacactgagtcaagatacgagtcagccaccatggcagccn

SEQ ID NO: 53901 - DNA, 770 bp, Homo Sapiens
gtggaagagtcctcaccactgcaagagccagccaagccaggcatgcaggcaccacccctggtccagaccctaaggcctatcagcttctatcagcccgcagtgcctgcctgctgggcctgttggccgccaccaacgcgctgaccaatggcgtgctgcctgccgtgcagagcttttcctgcttaccctacgggcgtctggcctaccacctggctgtggtgctgggcagtgctgccaatcccctggcctgcttcctggccatgggtgtgctgtgcaggtccttggcagggctgggcggcctctctctgctgggcgtgttctgtgggggctacctgatggcgctggcagtcctgagcccctgcccgcccctggtgggcacctcggcgggggtggtcctcgtggtgctgtcgtgggtgctgtgtcttggcgtgttctcctacgtgaaggtggcagccagctccctgctgcatggcgggggccggccggcattgctggcagccggcgtggccatccaggtgggctctctgctcggcgctgttgctatgttccccccgaccagcatctatcacgtgttccacagcagaaaggactgtgcagacccctgtgactcctgagcctgggcaggtggggaccccggtccccaagacctgtctttccctcaatgcttgcaccatgcctgagtgcctgcagcccaggaggcccgacaccggtacactcgtggacacctacacactccataggagatcctggctttccagggtgggcaagggcaa

SEQ ID NO: 53902 - DNA, 705 bp, Homo Sapiens
gggcggtggagacctcaccctccttaccgtcagaagtccacgtgaaggctgggctaatgctcctggatattcatttacgaccttcctctatggccccaagagtagtcctaggaagcccactgatccccaacgggagcaagacttctaacggctgattggtatggaccgagattatctttcaattgaagtgactaatcgagatgtaatatagaaaccagtctccatgtgtagattaagctgtccccagggaagcagagtgcaagagcagaagagccccaagcagactatgtctttcaagatgtacagaagactgacaacaggccagtgcagactttgcttcctccttttgtttcaaaggaccttatctacccattaacacttgttagagacacctcagtcgggccacaactgtctctgtttcaactttaagcccacacactctgtagcttttctaaaacagtacattccattcatgcagtagatatgaaggctttttccaagtttgtcatataaagtaatcaaattgttttcaccgtttaagacagttatttttaatgggaattttgctgttgcacaatttgagaaccagcccatttcataataaaagattaatgttgggccttgttgttaatattgcatctcagatgtgttcttgtaggaagatctgttgaaattccaggtgctgggatcatagcacttggactg

SEQ ID NO: 53903 - DNA, 544 bp, Homo Sapiens
gtccacggtccaggtccatctcagcagcgtgagggtgcactcagggtgttgttagagcgtctcgtgtgtgctagacgcacccctactcgttcctatagaacacagaggacataggaaacccttaaaacacacatgggattctctggtcacagttttgggttcaggctatgctgctttgggcaggtggagcaccccccgaggaagcctgcaagtccagggcacaggctgccttttggagggagggctggcccataggtgctgctggctccccgccaccagctgggcctcagccctcacggcattcctgctgagcaccgtggggcacccagggagcaggggcgtcagggatcctgctgccggcacccctgtgccgctggcatgagggccgtgtccccactgtgaaggatgaagagcaaggccctcaggacccgtgtcctcagagcaccacacactgagcacccagagacagcgggcctggcagcgggccgggccatgcagggagcgcctccctatgttgcctgccactctgggcaccggccagcac

SEQ ID NO: 53904 - DNA, 470 bp, Homo Sapiens
cacaatcacgcaaccatatcaagctgaaaatgtcacccctatctggagagttggacatgttttattgggaatatattttttatctctgactctgttaccgaacgcattggttggctaggttcggtaataaatatgtgaaacattttatttaaaaaaaaaaaacctcgtgagccactgcaactggctcttttaaatgtaattttatttatttatttatttttgagcctgttttgcagcctttacaaaaatcagggttttcccacaagatcatgaagattttcatataagggacctctgaccatttgtgttggcgttggcagtaaaggtcaagcaggaataaggtaataacattcaagctccccacctttggccaggttcctgcctttctagttcatattttggccaaacctagctactcgccaggctgaggcaagagaatcacttgaacccgggaggcggaggttgcaggc

SEQ ID NO: 53905 - DNA, 485 bp, Homo Sapiens
ctgtttatcctcttgccatagtagcagctccttcagcctagatccttgaagacttggagcagagcctccagtcagtgctcagtggatgtataacatgaaagagaataaaatctttgttattataacctagtcaaatctgactgctacagttggtattaattaatgtcttctttaaaggaacatttatcaaataaacacatctcagataaaaacagttgttctcccatggtgtatgtatcttcatgtttgtccttagtggttataataatctgtataaattatgaagagaatctgctggaatgattagtaaggtgctttatttgtgggccaaatagtagcaggtattagatacgttggtgggccaagaaatgaagggaagccaagaatggagtgatacatcttacaaaagagaccaaatttcatacccgatgacatcaaattttatacctaatgatgtcaaatataggccatttgtttcaggaaaa

SEQ ID NO: 53906 - DNA, 665 bp, Homo Sapiens
  misc_feature (8)..(8): n is a, c, g, or t
  misc_feature (577)..(577): n is a, c, g, or t
cactcttnatttggtgtctgggcttttttcaaactccgtagaaggtgcccagacttccatttatttggcctcttcacctgaggtagaaggagtgtcaggaagatactttggggattgtaaagaggaagaactgttgcccaaagctatggatgaatctgttgcaagaaaactctgggatatcagtgaagtgatggttggcctgctaaaataggaacaaggagtaaaagagctgtttataaaactgcatatcagttatatctgtgatcaggaatggtgtggattgagaacttgttacttgaagaaaaagaattttgatattggaatagcctgctaagaggtacatgtgggtattttggagttactgaaaaattatttttgggataagagaatttcagcaaagatgttttaaatatatatagtaagtataatgaataataagtacaatgaaaaatacaattatattgtaaaattataactgggcaagcatggatgacatattaatatttgtcagaattaagtgactcaaagtgctatcgagaggtttttcaagtatctttgagtttcatggccaaagtgntaactagttttactacaatgtttggtgtttgtgtggaaattatctgcctggtgtgtgcacacaagtcttacttggaataaatttactg

SEQ ID NO: 53907 - DNA, 658 bp, Homo Sapiens
gccaagtcatcctttctactgcttttgaggccctccctcagctctctgtgggtaggggttacaattcacattccttattctgagaatttggccccagctgtttgcctttgactccctgacctccagagccagggttgtgccttattgtcccatctgtgggcctcattctgccaaagctggaccaaggctaacctttctaagctccctaacttgggccagaaaccaaagctgagcttttaactttctccctctatgacacaaatgaattgagggtaggaggagggtgcacataacccttaccctacctctgccaaaaagtgggggctgtactggggactgctcggatgatctttcttagtgctacttctttcagctgtccctgtagcgacaggtctaagatctgactgcctcctcctttctctggcctcttcccccttccctcttctcttcagctaggctagctggtttggagtagaatggcaactaattctaatttttatttattaaatatttggggttttggttttaaagccagaattacggctagcacctagcatttcagcagagggaccattttagaccaaaatgtactgttaatgggtttttttttacaattagaagattagataaaaaatattaaataaaaaaaaaaaaaaag

SEQ ID NO: 53908 - DNA, 568 bp, Homo Sapiens
ataaaatccatggaaagatgttgcatttgtggaataagtgcttacttgaaaagcatgttcttcttttattttcttactgttaagaatttttatttgtaggatgtttgttttaatttaatttttttaagggatgggggccatcatgtggaaaccagaaaatggggaaagtgtgaactatccagacaaagattcattttgtgtctatatttgtttttaattggcctcatttcaaatgtattaaacagttccatacctggattgggtgtttgtaatggttaccaaaaaacaaacaaaaaaagaaagaaaaagaaaaaaaaaaagaaaataattggtgacatgcttttatcactactttatttttcaaattaacatgtaaatattggtaatccattgggatttggtttggctaacctgttaataaaaatatgggaccattatccttttaacaaggctagaatgtcatttttttctttttcaaacatttacctgatatttggtggccgcacattctggatgcattattataattctgttgactgtaatgacttagaatttacaacatttttgg

SEQ ID NO: 53909 - DNA, 961 bp, Homo Sapiens
  misc_feature (699)..(699): n is a, c, g, or t
tttcgaatatcgtcgaccacgcgtccgtcacgcgtccggtccaggctccttgcctaattttaagcaaggaggtggatctctgcaaacctacactgtctatgacagctctagttgtacttggtgtgactaaatacctcaaaggcaacctgcttctgcaggttttgaagtgtcagcttcataagacactgaggtttagaattgtttgattctagaccataactgaagggcataaatggaaacaggatatgaagggaaacaagtagcatcatggagctgaaaagtggtgcatcacccaatggctagcacaaacaaggatcacactgtccattctcttgtctgctaaattaagcattttcttgcctcctttgcttcatcttttcacaacagctggatagagggatcagaaatgactgtgtcatggtgctcattcactgcaaactcccagttgcaagctccttggctcccccggagggagcaagaatctcatagttcagagacacagagggccttttagccctaatgaccttttggatgggactgcaactcatgactatcctgatattggaagaaaggactttgttaatcttctcccccatagctctgctgcgtaggtctacatcttactcagaatcactacacattcctttagtcttcctccaagctccagagccattggtacaaatgctttattgaaactanatacataatacacacaatgagatgaaaccaatatagaagtccgcatagtcatcataatcccgttccttggccggttgaggcaactcagtggctgaccccagtcaagccaacccgcagcttcacctcccacttcaagaattgatgcctattctttttggatttccacaggtattaaataaggtggtctgagggaacaaacacacaccgcctccctccagcaaaacgtcccacatctgtcgaagggcgggccgcctcaaaatat

SEQ ID NO: 53910 - DNA, 567 bp, Homo Sapiens
caagagataaagaacaatgtgcgtgaagagaacataccagcatcttcactcaacaaaggaaagaaattgatgcattgcagaagccatgaagaggtcaatactgaactaaaagcacaaataatgaaagagatccgaaagccaggaagaaaatatgaaagaatcttcactttactgaagcatgtgcaaggcagtttacaaacaagactaatatttttacaaaatgtcattaaagaagcatcaaggtttaaaaaacgaatgctaatagaacaactggagaacttcttggatgaaattcatcgaagagccaatcagatcaaccatattaatagcaattaaaagaaaatagaatgtggccacttatttcactatcttcttcaaatacaaagtaaatacaagactgttgtgatcttgcattcattttctgacatgcattgttggctatttgaaatactaaaagcaaatctacagatcctttttccatcattttacagtgaccttttcttcattttggtttatttttgtaatgtgaaaagtatcactctaaaaaacatttttaatttaacaaac

SEQ ID NO: 53911 - DNA, 755 bp, Homo Sapiens
cagcatctccagtgacaagtttgagtatcttttcaattttgacaacacctttgagatccatgatgacatagaagtactaaagcggatgggaatgtcgtttggcctggagtcaggcaaatgctctctggaggatctgaaacttgcgaaatccctggtgccaaaggctttagaaggttatatcacagatatctccacaggaccttcttggttaaatcagggactacttctgaactctacccaatcagtttcaaatttagacctggagaggccaacagccactgctacctttgtagtcttcaaaatattgaactgcaggtcccaagatgcatttcaggatttaagacaggtgcactaatgataaccattccttcaccaagtagcaacattcttgccagagttcttgggaaacctgtttttttctctactctccatctctgctgctctcatgctttaaattgataaaatatgggctcaaaaaaagaaagccgccaaagactcttatccttattggtgccccatcattggccaccccagccataggtgtgtgctgttggtgggaaatggtctccttcctcagcgttgtgtttgggttactggtgaggccagctcacagagtgacatcatggtcaccagtacatgtcgctggagtaaaatcttgcctttagaaactaggttgagctgttcagaaaggtcaattctcttctgtattccccctcaacatttatctgggtctaaagctcagcactgagtcacaa

SEQ ID NO: 53912 - DNA, 557 bp, Homo Sapiens
  misc_feature (258)..(258): n is a, c, g, or t
cagcggggctgcccgggttacgctggccacccgcacctggtcctgtggcttcgaccactagtcagcaaggccccggagaggccagcgaagaggaggggctcgttggctttacggagacgcgcggagcaccctcaaggtgccacacgctcgcctgctccctgttcctacatcctgggcgtcttcccaggctgtcatataactcctgagaacagtggttcttaactctgtaagtatatataccctcgtacgccttatggntggatgcgttacagccatttccatgtagatgtctgtgcatacgttcacacgcaaaactctccgcagttttggagatctccgtgttcagtcgtacctcacgtgatcttgcactgccaacattgagaaccctggccttagactatgcatctcccaaacttaattatctgtctccttcctattttcccaagacttggcaggcgtctaggtcagagttgttcaaactgagggttatgaactagtgtgtcacgaaatcaatttaataggttgcaaccaacatttttttgaaaaaaaaaaaaaaa

SEQ ID NO: 53913 - DNA, 341 bp, Homo Sapiens
ctgaaataatttttcggatatacttttatatttgaaattagttgaacataagatgatcatcaagcttgctataagttttaagctattgctacatttgaacaaagacccacgtacttatcttagaaagtacttaggatatctttgagattaatggtgctacatcactctacagtactatgtaaaatgaatggagctgctgttcctttctagctagctgtttgtgtagttcatattaatttaccctgccttttatttggattgtctgatttcttagttgtacacatgaacctcattatttgcctggaataagtaatcaaataaaattgctttgaaaaaaaaaa

SEQ ID NO: 53914 - DNA, 713 bp, Homo Sapiens
ttttgcctttccgtttctgtctatgatgtaggcttctgaggagaaccaagaagcttggctttagtggtagaatgacagaacttagggatcccttgcaggctagaacaaagttctgacccttagaccaaatctttatgttaagagttttccagaattcaaaaaaaaaaaaatcaatcaacacaacacacacacacatacatacacacacactgcctttaaaaggaggagccaatatttgttgtacctgtgaactgaggaattatagataaaccttaggtcaaatcatttcacaattgcattggtggtattgaaaaatgatgagatttctctgacagagagctttgtcctagtttttgttcttcataggtcaaaactggcaatattctcttgtctgcaagataaagtgtttgtgcttctatcaccatatgcatgaacatgtaagaatcagatacaatttctgcttcatcagtttcacatgttcatgttgtcactgaaaaaatgcatctactgtttatagctcccaaggagaccccaaatcctttttttttcttttgagatggagtcttgctcttgttgcccaggctggagagcagtagcgcgatctcagctcactgcaacccccacctcctgggttcaagtgattctcctggcctcagcctccccagtagctgggatttacaggtgccccgctaccatgcctggctaatttttgt

SEQ ID NO: 53915 - DNA, 480 bp, Homo Sapiens
ttgaatttaggtgacactatagaagagctatgacgtcgcatgcacgcgtacgtaagcttggatcctctagagcggccgcctactactactaaattcgcggccgcgtcgacgagtaattagctatagattccactggccttaaacatacaattaagtgtatacatgatatagtgcacacacaaaagccacctttaattattgaaataacctgtattctttttggaaatcatttaagtttggtattgaagtactatattttttgtgcatcaatgtatttttctatttacaagcctatgtaaaagtgaagtgtatcttcagtgaaccatgtgccaattaagctgtaataaaaaagtggtctagtctgtcaaaaaaaaaaaagtcgacgcggccgcgaatttagtagtagtagtcgacccgggaattccggaccggtacctgcaggcgtaccagctttccctatagtgagtcgtattagagctt

SEQ ID NO: 53916 - DNA, 500 bp, Homo Sapiens
gcacaaactggtaatctcccacttgtcttctccaaatatgacagcaagatttgattgttttcagtattatgtagtaaacatgtttcagaagcatgattttaaaattggcctcctcaaagtttagcgtcttgcataatgatgatgtacgtctctggcatattacattttcctttgtatatcattattgaggttatttgtctgatatgacccaaagaggcaaaactcagcacagtcctttctgcagtattctaaaggtcatcaaacttcagcctagtgagtctgcttgtttgatttggccggacattttaagcatggcagaagtggtacaagaaatcatggtattaagttgaaaccacaccccttagaaaaatccttctattaattcaaataatttgacgatgcttatgcggtttctgaaaagaagcagtcgttgctgaaattgatgtgttgaaataggaagcacagatttgtattgtcttttggcttcctggctttaaaaa

SEQ ID NO: 53917 - DNA, 934 bp, Homo Sapiens
gacaagtgtttcctgtcagccaccgagtgcctgcagaagatcatgaccacggtggacccacgggagaagctggaggtgctggagaggacatacggggaaattgagggcacggtgtcgagggtattgggccgggagtacaagctgcccatggacgacctgctgccacttctcatctacgtggtgtcgcgcgcccgaattcagcacctgggagccgagatccacctgatccgtgacatgatggaccccaaccacacaggaggcctgtatgacttcctgctcacagccctggagtcctgttacgagcacatccagaaagaagacatgaggctgcaccgcttacctggccactggcactccagggagctctggtagcctggcctttcctggacagactgaagagctgagcagggcactgccagcctgtccctcattacccaaggcaaggggcaggacaggccctcagaagcagctcttggaggagatgagcattttgttttgcacaggaagatgctgctgctgccctgactgggatgagggtgaggggtgacgggtgtggccctggatgtggtggttttcccttggccactagcccatcttcaatgaccccttaatctgcagcagctcacaggctggggggtgaggagcccctggcttctcttagcctgaggctttctccccagttccagagcctctccgggcctccgtgctgccatctgtacaatggggggaatgagcaccctgtaaaggaccctccgtttctttttgctggaatcccgagtccttttgggaaaactgactttatctggcggggctgtatttgacccttggcaggctctaaaccccccctgggggatcccagcccccccggaagggcccggagaaccgtggcaatggcggggtcgggtacccctcgacgaaaggggggcccctggag

SEQ ID NO: 53918 - DNA, 372 bp, Homo Sapiens
  misc_feature (201)..(201): n is a, c, g, or t
  misc_feature (229)..(229): n is a, c, g, or t
  misc_feature (245)..(245): n is a, c, g, or t
ttttttttttttttaaactggaagaggatgcacaggggaagaaattgaaaaaaaaattttgttggcttttgtttacctggcgtgtgtggcagccggctcgctccctctctctgcttgctatccctgacctttctttctttttgctccttttcaaaaaaaatattaatttcccccttctgtcgtcttctcgcagccgtatangtagatagtagggccgggccccccgggncccttttccccttttnaaaaggagaaaagggagggggaaaattttttcccccccccccaaaaaaaaagggggggcccccccttttttttttttaaaaaaaccccccggggggtttttttaaaaaaacccccccggccccgccc

SEQ ID NO: 53919 - DNA, 363 bp, Homo Sapiens
cttctactactaaattcgcggccgcgtcttcctccctatggattgttaagggccctgtgcatatttgcatgtagccaaagattcagtctcttgcaggaactctggttgtcaactggtgatcttgcctttgtcttttctcatagttctgcctgtggcgcctgtcactagcagtcaaataaggacaattttaccattctctcctgctgctctaatttttttttagtgccggtacatgaatttgttattctttataattccctttgaagttggaaatccaaggggaatctaaaaccgaccagatgtttctgctgctggaaaggaaagagagtaaggattaagtttaacaaaaacttggtctccaga

SEQ ID NO: 53920 - DNA, 635 bp, Homo Sapiens
cttgctgtgtctggatattgtcacatgaggacttgacatgcggattgtggcagcctctgtgaccaagagaggaagacaacagcagcatagaaacctcaaatgaaaaatctaacatctcaagctactaatttagccaaccttggcatcagctatctctggtcttagtatatgaggcgataagcccccactgttcaagttgggtgtctatcaattgctgcagaatagaagttaatgaggcttcctcctcctggataccctactagaccctgacatgcccattcagtcacaggcagaaagggaagcacagggtaaggagacctggctgactgtgccagacgcagatcttacctgtcctgcttagaacactcaaagctcaattggttaaacaaaaaaaaaaaaaaaaaatcgctaatcggcggccgcaagcttattccctttagtgagggttaattttagcttggcactggccgtcgttttacaacgtcgtgactgggaaaaccctggcgttacccaacttaatcgccttgcagcacatccccctttcgccagctggcgtaatagcgaagaggcccgcaccgatcgcccttcccaacagttgcgcagcctgaatggcgaatgggacgcgccctgtagcg

SEQ ID NO: 53921 - DNA, 955 bp, Homo Sapiens
  misc_feature (791)..(791): n is a, c, g, or t
ccaaaatgtttcaaaaaatcagacccagttcaggtaccgtggaagacagctgtcatggagggggcattgcttcccaggtgctggggaaggcttccaggtacaatccacaccacccactctttgctgttgctcccatccttgagggtttaggaaaagagtcagtgggctctgagtagaagcctgggagcctctctccagtgacatacatgggaaggaacttcctgaactctatttcaatactttttgaggccttttctttttcttgtctgtgtttggatgagatgatatggagggtgcatgtatcttccctgttataaattctgagagggcagaggcctatgtctgcttcttcacctcttcctcggcccctaacacagtgccttcatgtgctttacatgtaccaagtcctcaataatccttggtaatggattattatttcaatgtgtgcttatctgtgctctatctcataaactaagaaagtacagactgagggcagcaggtccagcctgtacttacagagtatgccctataaatccattaggaattataggccaggcaccgtggctcattcctgtaatcccagcactttgggagaccaaggcaggtggatggcattgagtccaggagttcaaggccagcctgggcaacatggcaaaatctcatctggacaaaaaattagccaggtgtggttggtgcatgcctgtagtcccagctactcaggagctacttagtgcgggaggatcacttgagtcccaggagtttgaagcctccaagtaaagcctgtgatcttncccactgcaactccacgctgggttgaacgaaccaagtaccctggtctcacaaacaacaatagacacaaaatgggaactgcggcacatgctatggcaacaagctcttttagaacaacatcttatcccgcaggtcgctctcgatgtaccacctctgaaagagaccg

SEQ ID NO: 53922 - DNA, 580 bp, Homo Sapiens
ttttggccaggctggtctcaaactcctggccttaaatgatcctcccacctcggcctcccaaagtgctgggattacaggcatgagccactgcacccggccactttttttttttttaaagaaaaatgctctgcatggattggagacacagcaataactactgttgccatggaagggttaacagtgtaggagctggtttatcagtccgctttgacatacagctaaaggaaatttatgtttgggggaaaaaggccctctgttcactttaaaattcagtgtggacttatgccaaagggggctgtttaagttgaaagaagccaagttaagtttggcctcttgcctggaatcacttgaattctgaaatttcactgcgacggacatgtgccttgtcacattttccattgcttaatcctgaagtttggtgcaagtctctctgcacctattaaaaagtgatgtatatacttccttcttattctgttgagttgtatagaattgtcttttgtatttaacactttgtaattttcacaatattttttaatttaaataaataaacacattttttccctcctgggaagtcatgaaa

SEQ ID NO: 53923 - DNA, 942 bp, Homo Sapiens
ggaggttgcagtgagccgagatcacgccactgcactccagcctgggcaacaagagtgaaactccgtctcaaaaaaaaaaaaaagaaagaaaaacggcttgcaggggacttgagaaaacaatggggtgagaaaaggttgtggtaaaaggatgtgtttatattctgaatttctgaattctgggctatggcattcttgacaatttttcttaaaaccagagagtgaaaggcatattataaaacaatcaaatatcttttagagtatggacaactattatatatcaataaaaaattaattagaaaaaatatatcttttagagaacacaccaccttatcccacccatgatatatggatgtgtgatggagaaagattatttaactatttttttaaatgtgtaaagcagcagggcatagggggcttacgcctgtaatcccaacacttggggaagctgaggtggggaggatcaccttaggtcaggagttcaagaccagcctgccaaccaacatggtgaaaccccatctctactaaaaatacaaaatttagccagccatgggggcacatgcctgtagcccccagctagtcgggaggctgaggcggaaaatcacttgagcctgggagggtgaggttgcagtcaatgagattgagcatgatggtattcagccggggggaagctaattctgttcaaaatttaataataatagttagttactaataattactaaggtttagacctggttgggaatgagggaattgcggtttgtttacagggcggtaagaaaattggcttggaagggggaaaggatattcaattggaaatatttcttggggaatttagaccattcaagacaaatgggggggatcccgaagaaatgagcgcaaaagaagagggaaacaatggtggacccaaaaggaaagacacgcaaaaaagggaaactatgcggactc

SEQ ID NO: 53924 - DNA, 623 bp, Homo Sapiens
  misc_feature (530)..(530): n is a, c, g, or t
  misc_feature (556)..(556): n is a, c, g, or t
  misc_feature (563)..(563): n is a, c, g, or t
agatgagttgcaccttgttttttttttttacttggtctctttggcatttttccattttttaatgtatctagacaactacatttttaatgcttacatagtatatttccgttatattaaggaatcataatttatttgaatcacttataaatggatttttttctataaaattggctgtaagccagagtatatcaggtactataaatacatcactaatttgaaacaaataatggctcaggcaatcccctgtctggaatatttccagtggtggaatgggttttgctttgggttgcgtgcacgcgcacgcacgtgtgtgtcttcgctttactgtttttctgttctaattttgaggaagaaagattcccagaaataacctgtccagttcagttaaaatatttcattcatgtgagaatgcacacattttagagtgtttagaggtatatctttcaaagtgctttctattatgtttgtgggttaatcgattttaggaatgggttgatttttttgtttgtaattttaaaaaattatttcanaaacaactacttgtaattaaattatnttttcanaactgtgattttggttaaatttattttactaatcactagttttaaacgtgatatgactat

SEQ ID NO: 53925 - DNA, 713 bp, Homo Sapiens
agaattgagctgtacagatctggcatgtcacttccttgggcttgtgtcatcagcagttgtgaagtccccattggggacttggtagcatggaaagccacacaaagatgtgctgcatctgttttgtctgtgtgggtacttgttttcaataatatttgtctccttgcctaattttatttgtctatgcacatgtgtgcgtgtgtgtgctcgaatgcatgcgtgtatatgtgtttagggtctcttcccagtgatccgtaactcaccaaaaatcacctgtttttcccaaaattccctggagcagtaaattaccattcttaaagaaggatagagaaaggccaggtgcaatggctgacacctgtaatctcagtgctttgggaggctgcagcaggagactagcttgaggccagtagttcaaggctgtatgccacacctccagactgagcgacagggtgagaccctgtatcttaaaaaaaaaaagaagaagaagaagaagaaggataaagggaaaagctatgtacataattattattctttttcaacaataaaaactttccaggtagaagtgtgtctaaagtatgttactataaaaattctaattaaataatgggttttgtacctgtgaattattattaaccactttttaatggatgtttctctccatacttatcttccaggtggcataaaatgccagtaaaaacaaatccagttcccaagag

SEQ ID NO: 53926 - DNA, 681 bp, Homo Sapiens
  misc_feature (621)..(621): n is a, c, g, or t
aggaaatcctgatttttagctacggttggtgtgcactaagtcatcttcagaagttggtaggattctgtgagtccagaggacagagcttatagaggcattagtattgtaggactaattgtggatcctgggtgccctgttaaagtaacccttgtcatcatttatgctaaagatgatacccttctggcagtttgccacagtacaattcagatgcatctgcttttaacccttttccgttatcattggaagtctgacagtgcgctgcataaacaccttgagtaccacagcattccgtaatatcaatttctagaagaagcctctttctaatagtagtgtggccggtgcttattaatcatctagctactgagttactgtattggattaaaatatataaagagagagcacaccaaatctatgcagattcctttatcctagtatgtcagtttccttttctatctctcatttttaccttatttactgtaacaaagattgttgattttaaagacttatgggtaccgtgctctctttttagttaggtaggttaaatgagtattcataaaagcaaatgttatttttctacattatgcagatattgaaattgtgtattatgagcaccagtttggntaagtactttttgtggaaccagttagagctaatatctaaaaaaggaagaaaatgatttgt

SEQ ID NO: 53927 - DNA, 633 bp, Homo Sapiens
ggaaggcaacggcagcgggatcgggatgaacagcggcggcggcttcggtttgggcttaggcttcggcctcacccccacgtcggtgattcaggtgacgaatctgtcgtcggcggtgaccagcgagcagatgcggacgcttttttccttcctaggagaaatcgaggagctgcggctctaccccccggacaacgcacctcttgctttttcctccaaagtatgttatgttaagtttcgtgatccatcaagtgttggcgtggcccagcatctaactaacacggtttttattgacagagctctgatagttgttccttgtgcagaaggtaaaatcccagaggaatccaaagccctctctttattggctcctgctccaaccatgacaagtctgatgcctggtgcaggattgcttccaataccgaccccaaatcctttgactactcttggtgtttcacttagcagtttgggagctataccagcagcagcactagaccccaacattgcaacacttggagagataccacagccaccacttatgggaaacgtggatccttccaaaatagatgaaattaggagaacggtttatgttggaaatctgaattcccagacaacgacagctgatcaactacttgaattttt

SEQ ID NO: 53928 - DNA, 697 bp, Homo Sapiens
  misc_feature (41)..(41): n is a, c, g, or t
cgggttcatcgtgtgtcccctgccctccaggccactacatntgagaaagaaaccaaccagtgcaaggaatgtccacctgacacctacctgtccatacatcaggtctatggcaaagaggcttgtattccatgcgggcctgggagtaaaaacaatcaggaccattcggtttgctatagtgactgctttttctaccatgaaaaagaaaatcagagtttgcactatgactttagcaacctcagcagtgtgggctcattaatgaatggccccagcttcacctccaaaggaacaaaatacttccatttcttcaatatcagtttatgtgggcatgaggggaagaagatggctctctgtaccaacaatataacagactttacagtaaaagaaatagtggcagggtcagatgattacacaaattttggtaggggcatttgtatgccagtcaacaattattccttctgaaagtaagggtttccgagcagccttatcatcacaatccatcattctggcagatacattcataggagtcacagttgaaaccacattgaaaaatattaatataaaagaagatatgttcccagttccaacaagccaaataccagatgtgcatttcttttataagtcttctacagcaaaacatcttgtattaatggccgatcaactgctgtgaaaatgaggtgtaatcctactaaatctggag

SEQ ID NO: 53929 - DNA, 536 bp, Homo Sapiens
tatcctgagtatgtaactaaacaattttgtcttcaaatttttatccaatatccattgcaccacaccaaatcaagcttcttgattttcaaaaataaaaagggggaaatacttacaacttgtacatatatattcacagtttttatttataaaaaaaatttacagtacttatggagagccagcagaagacatcagagcactcacttcttcccatctttgttaaggttagcgaattacccatggacactgttaggtgaggctcattcggcagccctgaaaacaaacctggtcacactgtctttaccctctcccttcagataaagcacttcgattatctattgatctgcccagttttcaagtcatgcgaatactaaaaaggttacatcatctggatctgtaccttggctatataagcatgttttccccctattctatgtttctttttttggtgaacattgaaaaacaggaggtgacttattactgttaattaaaactaaatgaaaaatgtcaagtctttaaaacagtgagcttgtaactct

SEQ ID NO: 53930 - DNA, 482 bp, Homo Sapiens
  misc_feature (11)..(11): n is a, c, g, or t
  misc_feature (95)..(95): n is a, c, g, or t
  misc_feature (458)..(458): n is a, c, g, or t
ttcgattaaanaaaaaaaaaaagaatgtgctccttatttctcattgctgtagaatacttaggaatacacatctactaatcacaattaaaaaatangagaatctttagaaacatcattgctttctggaggtagaaattttgaacttgaaggttgtagttccaggcaattttgtgcccttgaggtgtccaattgatagtatagcttgcctctgctaataaatacacaaaagttttctttcctgtgattttcagaaattatttttggaatacaaagattaataaggaatatgtgatgtttatctcctgcatttcaaaatcttctggattttttttgaggcatgaggagcaggtaatgagattttttttctgaatatcttgattctctcccttaacccagattttgcatattatgcattgctcatttgtcacctacaaaaataaaggttaatgattatttgnttgcttttgtctatataagctccc

SEQ ID NO: 53931 - DNA, 601 bp, Homo Sapiens
caagagcaaaactctgtctcaaaagaaaagaagaaaaaaagtttgtagatgctgagcagaaggcaacttaaatctgaaagtaagtccaaaactgtgcttattggtgcggaactgctcctgtcacacccccgatctcttcctctctcttaccttgacctctgttcctttaaggaaagaaacgtccactctgctccagtcaaccccactgctggtgtcctctgcactgccttgcactccctgaagagagcctgggcaacagagcgagactccatctcaaaaaaaaaaaaaaaaaaaaaaaaaattggggactatgtatatagatttactacactgaagccctccagcagtctaagaactgatgcctctaacgaaggaaaggactgcatgtttctgatgaagctaccatgacctaccagatttccaacgcctgccaaaattaatctatttgtctgtggtagaagaggccataccattgtggcccttgaaacttactgtatgatgttttatttagtgaacagttcacatacgcaaatggttgtaactgatactgctgaatatattgtaagaacagaagtgttaagtatgtataacacttcttttg

SEQ ID NO: 53932 - DNA, 422 bp, Homo Sapiens
gtgaataagtttcttgagatctgatggttttacaaaggggagctcccctgcacatgccctctctcttgtctgccatgtaagatgtgcctttgcttttcctttgccttctatcatgattgtgagttctccccagccatgtggaaccgtgagttcactaaacctctttcttttataaattacccagtcttgggtatgtctttattagcagcatgagaacagactaatacacctgccaagaattttttctatattttggccagattgtatagttttttatggtgggagggtgaatctgacacaagctatttggtgtcaagtatccaagtcacatactaatttatttttaatgtaaagctatacaaccttctttctatacctaaatttttaattaaaatataataattaaaatattactaaaaatt

SEQ ID NO: 53933 - DNA, 458 bp, Homo Sapiens
tctcaagggcaattgagatgtcagtgaggctgtgattaaatgtattggatattagaggattttaaatacaaacaagtattataggtgttaccactgaccccgaaggtaagatttactgtgaaaatttataatgcaaggaagaatgatcaagttggctgtcagaacaacaaaatattacaaaccaggatgtctaagagcagaagtccgtggttgccacctctcaagcctcttagcttaatccaatctaggatgcatttccactctgcaacaaacagtatttatttttgccttatttgcagataacagttttaatgcaggtactgcccatggattagctttgagcagtgtctttttgctttggtttttttatttgtttggtttgttttgagactgagtctcagtcctccagcctgggcaacatagcaagactcccaccccttaagaaaaaaaaaaaaaaa

SEQ ID NO: 53934 - DNA, 528 bp, Homo Sapiens
ggcacgaggacggaccagatgggtccagcagtgctgggtcaaggccaggaggggcagccggaagcgcgcgcatgctctggactcctgcagccgccgaaacggccaatcgtgtttaaggagaaactaacaatgaaaacggactcgttgatggaggaaaagttggaatgcagcctctggtgctgtttgagcgatccctctatcccgggtcgctgctgtgttctggaaaggcgcattgtaccctggatgcagcaggaatcctattcatcttcttcaccgatatggtctgtggactctgatgagccaaatctgacatcagttctggaacgtctagaagatactaaggagaacagttcggtgaggaaagaaaccaagctattttctcttttcctcatgaacattatatttagaaattaaatgttaagtgataatattatataaaaacatgattaacaactgtaatcttagaggaattaaagtctgggtattttaagtcctccaaatcttaaaaaaaaaaaaaaaaaaacactt

SEQ ID NO: 53935 - DNA, 1631 bp, Homo Sapiens
cccacgcgtccgcaagcctgggtgacgagtgaaactgtctccaaaaaaaaaaaaaaatctagaattctgggaagtacattataattggcccttcagaatagattcccagtccctggtggtggctcacctttataattttaccataagttttacctaattcgtaagtgggcagttttagatagataacattctgggggggtagctagggatttacctttggtcatccttttcctggcacttctctggaattccctttatagatgtacaggttttggctttaacccactggaagatggctggtacaattcataaaggggtggtgatagaatccacatgggctgtcaagaaggagatcttaccaagggacagttgactgactagtctcagatggtttcatatcatttatactggggtaagagtaacctagataactggggcgtcgtggtgcacacctgtagtcccagccactctgaggcaggaggacggcttgtgcccagaagtccgaggctgcaggtgcagctgtgatggggctacggcactccagccggggcaacagataacggaacctccatactctttaaaaacaacacaaacgggccgggggtgacaaaaggcaaagcctgaaaccccaagacacctgggggaaggccaaaggccgcgacggaaccaccgtgaaaggacacggacccttgaaaacacagccgagcgccaacatgtgtgaacaccccaactctctagcacacagtttcgacacaatcgctgggctaggaggcagcgaccctgggggcagacacacaatatgaacagcgaaagagagaaaatccgcgcaccatcgggacaacgggggcaatcaaaaggcaacaagcgcacacaagcagacctagcgccgggcacaatcagagaccgtctccaacgacaaggacgccctagacggacaaatctacatcgcatcggcaacgactcatactaaccacacatgcacggcggcacacacatgcgctcgacaagacagcagcagcatatcaagaaaaagactctccccgttcatcttctgctggtgaataaattacgaccccagccgacaccagacaccaagcacaccacgagatcaaaaccacgccaacaacacaaaaatcacaacgcaccaaagcaccaaaccagcccaccaaaccacacacaccaaacgaacacgcacgacacaacagaaacagcaccacaaaccacatcaacacaaaaagagaccgacactaggcccgacaacacacagcaacaccacagactacaacaaaccaaacaccgaacagcaaaaccaccgccaaataaacaacaaaaggaaacaagagaggcggcgaggacagaagaaaacaccacaaaagcaagaaaccacacaaacgcagagaaagcatacagaaaagaagagaagaaagaacaacaggaaaagagagagaacaaagagcaaagaaagcacgaaacgagaagaaaaaggagaggaacgagaaagaagagaaagagatcagtcatacaagaacagaaaatacagccaggaaaaaacaaaacacatacagagaacaagaaacaaaaagcaagaggagaaagagcgcaaagagacagacacgacaaaaacaccatag

SEQ ID NO: 53936 - DNA, 559 bp, Homo Sapiens
  misc_feature (36)..(37): n is a, c, g, or t
  misc_feature (89)..(89): n is a, c, g, or t
  misc_feature (368)..(368): n is a, c, g, or t
  misc_feature (397)..(397): n is a, c, g, or t
  misc_feature (513)..(513): n is a, c, g, or t
  misc_feature (545)..(545): n is a, c, g, or t
ttatgaattttaaagaattttgtaactttaaatctnnggaggaagtattctgcttcatcaggtggtctatgcgaagaagcgacactgcntaaagtggcatcctgggattttgttgaagccacacaaagaacaaattgcagttgtttgaggtagattatttcccgatcgattgatgcctatgtgtgatagtttgttacgccactgaatgcttatgcccactttatttgaaacagcttacatgaacatatgtcaggattttttttcaaaagaaaattcaggaaaaatatttcaggaatttgaagctgattatagaagtacatgtaaatataagctttcagttcattcactgttaccagaggcagactctngaaagttttgtttcctagtagctaaatanaagacaattttatatggagctatggtatatatagtatctataagctatacagccatattaaactcttgaggaaaggcattccttcctcatggcactacctgaggaattttatcccnagggttctttctttttttaaaaatgaagagcngggcttgcctttgt

SEQ ID NO: 53937 - DNA, 637 bp, Homo Sapiens
gtacttatagctaacggaaagggcactctgtttcgggaatacagatttgcctagaggtatcctattgcagtcaaagaaagagcaatgagggatagaaaaggttagtgatggagacaccaacgctgcattttacaacaaacaatgtaaaaactttacggattgcttcttctaacttactacagtatacattcctctcaggtgggaaaattgttgagttttttcttaagatagaaaagcaattcagacaatctgaaatctccacaagaaggataagaagcacagcagaagctattctaggcaggaagtcaatccattcaactgtctgtgctccatagaaacaattgtctgcactgggagtcgtacgaggtacagacaacagccagacctctgatcctctcattagtgatttcagaagaaattaccagtcagctgagtaattcactgagtaaacatttggcactgacagaggttagacggataactatttgtatcaccatattcatgaagctggaatattttccattacttgtatcatatatgaatggaagatgttaaaaggcctctcatcttgtaagatggatatgaaagaacactttctgagaaatgaaattattcacacaccagcgaggtggatgga

SEQ ID NO: 53938 - DNA, 702 bp, Homo Sapiens
  misc_feature (673)..(673): n is a, c, g, or t
attaaatgttgttggtcttttatttgggggatgccttattagctttttaaaaattagtttttaatagcagcatttgtttaagaaggaagaaaaaatgcttggtggtaccttctggaaggtacattaatcttgttaatgacaccacagttcatggttggcaaaacaggacttttgaatcaacctgtattgtgtgtgtgaatgtgtatgtgcttgagaaagaaggccagggcactaaagatacatgagaagtgcatgaagacaggatgcaggatttcctatgattttatgttgttcttaattaggaagcatattggcagcaaatgctaacatgtgttaggatgtttagctgaagccaaataaatgttttctattacaactctgaattccatgcctggtcggaacccgtgcttttctgctcatggcttacaaaatcccgttaaaagtcatctcaagggccaattttctgttggctcacagagcaaaatgactttcaccacatgttttcctgaagggttatctacaactccgggtggaagtcaaagattggaagaggatgacctctgatcctggaactgcattgcttggtggtcaggaggggttcttagtaagcaaactcagtttaatcccagagtcggaagtgggtgtcaacaagccaaagcaacatccctttcanctctgctgcttttttgtcttggtggagga

SEQ ID NO: 53939 - DNA, 559 bp, Homo Sapiens
ctctgcttcctgtttgtttgtttgtttgtttttgagacagagtcttgctctgtcgccggggctggagtgcaatggcgtgaactcagctcactgcaacctctgcctccctggttcaagctattctcctgcctcagcctcctgagtagctgggattacagggccacgcctggctaatttttgtatttttagtagagatggggtttcaccatgttggtcaggctggtctcaaactcctgaccttgtgatctgcccacctcagcctcccaaagtgctgggaagacaggcgttagccaccgtgcccggcctctgtttcctgttattagtgattttcctgcccaagattgcaacaacaaatatgtagaactacagactgtttagaatgctgagactgttctaagaaactttcaaaaacagtagcacttcaaggaatggtcactttctatgaaagaaactggtttgatagccataatcttattgctagctgcttttagcaaaagtcttttcttgaaaccaccacctatactctttaaacaaataaaaactaaaatctcttgaaaaa

SEQ ID NO: 53940 - DNA, 905 bp, Homo Sapiens
aggaacaatggcgctgtcttcagtggcacagtggagcagctctgaagatgcaaagatacacgaaaaaacttccagaacatctgggagaatatttaatggaaaatcgcttggttaaaacctgacacttttaacaggtatgtgttgttttagtactttatgattgagcatagcatttaatccacacctagactaaatcaaattttttttgtcagtgaacagcgttctgagtgtggacgagtagccagtgaagataatgaatgtcgaatgtgactgactagcagcttcattttgaagtaggttgtatggcttaaaagttctgtagtatttgtactataatacttgccttttagcattaccttggtttgtagtcagtgtcacagaagtgcagtttaatgtattatgtgtacatatacaaggtctgattggtctaatcaatgatgaaacctatcccgaagctgataacctgaagaaaaataagtacggattcggcttctgagattaagaccagtaattcagaggtggagtaaattttgttgccgtgattttataacagttgtgttataaaatcctgggtttttttttctgccaacagtgagggtcgctgtctgcccattgatagaggccagattgtcttggaagttccaaagttgcaacgatttctgtaagtggagtttttctgtttgcttagagatcagtgaatattgtgtccttggtcttatctgtgatgatcttatcccgaacctgaacttctgttgaaaaaaaaaacttttacggatctggcttctgagatggaccgttataaggacaatatttttttttaatacttttaatgcytttacatatgttgtaatgtttgtagtcttgtaagaatctcgtgtttttcctttctagggstagtgcccgag

SEQ ID NO: 53941 - DNA, 495 bp, Homo Sapiens
gagaatccaagctcctgaatctttttttttttttttaatagagacggggtttctccatgttggtcaggctggtctcgaactcgctacctcaggtgatccgcctgcctgggcctcccaaagtgctgggattacaggccaccgcgcccggcctccaggctcctgaatcttttgttttcctgtttcgatttttctgggttaatttataacacgatcttgtctcagcttttccacagagccctccccttcacccttccctcattgttcaggaaagcttaggccacgtgacagtgaggggagtgcccccacaatgattatgtcagcagctgcttggaggcctgttcatctactacccacgtttccagggagccctgcgaggaactactcatcacggtcctggatggagggggctgtgtaactgcagctctcctgagcccagactaacattttattgcctgcaaatcgtgcccctgttctctttctaggactactcatctc

SEQ ID NO: 53942 - DNA, 457 bp, Homo Sapiens
gtgctggattcggcttagcagaattggcaagacctgcacatggcaacatattattcatttttcaggataacaaaaaataattaaaagtaacattggcttaacactggtatatagttcagtatgacttctctcccctcaacctctggaataggttcaaattgatgagaatttctgattagagcccttaatgttgagttttttgaaaagttttatcaagtttcatatatacctatattgatggtaagttgctggtcttgccatgggcaaagagagaaaaatgatactgagaccttgtaaagaatagctggacatggaggcgcacacctgtaatcccagcaactcagaaggctgaggcgggaggattgcttgagcccaggagttcaaggctgcagtgagctacgatcatgccactgtactccagcctgagcaacaatgcatgacccaatctcttaaaaaa

SEQ ID NO: 53943 - DNA, 667 bp, Homo Sapiens
cggacgcgtggggaaagtatggtctgtggcactgacatctttgtgtgtttggaggtgactggaacacggatccacccctggaggaaggtggccgtgaaggaggccagcctcagctcagcgttctactctcatcgctcttactcccgcctttttagtgcctgccctactccaggataattgtgcttttcttttttcagttaaatgttagcattgctatttttcattattgcaaagcagcacatgcttgttacaaaaactttggaagtgtagacaaataaaaagaagaaaaagctacttccaaatcctacttaccccaaagacaagatgatcatttagtcatatagtatcatacatatatatatgtacacatatattttaatgtaagtgtagtgtcacaatatcatgtatagtctttcataaaacacgttggcacttaatatcttatatgaacaactttctagagcaacaagcttagtttacagcaattgtaatgtaagagtactcatttacatagctacagcatcctttgtttacctcatctcttatggtttgatgtttaggttgtttccaacttttctccacctaaacagcattaataaatgtggttttagtttcctcttaaaaataaaaatcaacgtgtcatcatcgaacacaccgtcaacgacag

SEQ ID NO: 53944 - DNA, 700 bp, Homo Sapiens
ggagcaagcttgatcagaatcttcatggtcattaccaatcagtctgacaaaatagttctctggtagtcagcattcatttaaggcagcttgcctgataatttcctgtgttatgtgaagtgtcttgcactttcacatgttagctataattccttaaattacttaactgaaatctgtaatagagaaccattttggcatttgaacagctattttacatggagaaaaagcaaacacatctgtttgctttacccagaaaaactgactttctggtttcatcttcatattgtttagtagcataatgagagtagtcctttatctttctctaatgttagtaaatatattctgttagtaggaagttctgaaattgaagggaaaatatatttaaggaaataaaggaattcaatacacccttcaaaagtcaccaaatactgaaaataagagatgagtccttaaaacctgagtcaaaaaaggtccagttttacagcctgcaattaattcagggctgcgttggcattaaaaaagaaaatatatatatatatatatatatatatatatatatatatgtatattatatatacagtagcttacacttaaaagaggaaaaatttgcattaacattgcatattctgatatgtaccatattaacacataacaggcattttatttatgcttcatagaatcagacagacacaactttcaaaaa

SEQ ID NO: 53945 - DNA, 376 bp, Homo Sapiens
  misc_feature (34)..(34): n is a, c, g, or t
  misc_feature (84)..(84): n is a, c, g, or t
  misc_feature (116)..(116): n is a, c, g, or t
  misc_feature (199)..(199): n is a, c, g, or t
  misc_feature (347)..(347): n is a, c, g, or t
  misc_feature (365)..(365): n is a, c, g, or t
  misc_feature (371)..(371): n is a, c, g, or t
gcaagcctcgctcagtcttaagcaagaggggatngattcgcccgcagcactgagaatccaggggcaggcgggatggcgttcagncgctgttgctagaaatctctgtctttactctnttttgaaggcagcatggcagggtgaacacaagcacagactgaaggcagcttgccgcggttcacatcctgggtcacaccacttncttaccatgtcacgtggggcaaattatgtaacttctctgagcttgctttcctcctcttgaaaatgggggttaacaatggataataccccactttccatagggattgtttgtttaaggagacttattaaatgaagggctggggtattcnattgggcttcaaaacctncttaantcccc

SEQ ID NO: 53946 - DNA, 836 bp, Homo Sapiens
catatactggcaatcctcagtacacttacaacaattggtctcccccagtgcaaagcaatgaaacgtccaatggttatttcttggagagatcacatagtgctaggatgacacttgcaaaagcttgtgaactctgtccagaggaggagccagatgaccaagatgctccagatgaacatgagtcgcctccacctgaagatgccccattgtacccccattcacctggatctcagtatcaacagaataaccatgtgcatggacagccatatacaggcccagcagcacatcacatgaacaaccctcagagaactggccaacgagcacaagaaaattatgaaggcagtgaagaagtatccccacctcaaaccaaggatcaatgaaatgcacataattaactggttccatcaagactgtgcacccaggccttacagtccaacctttttctgtgtctggctaatatttaaaactagaaaaactattcctaatcaacatggagtggagagtttattcactgtcttatctgcagaaatttgctgtcaatatataacccgcctgcagtggaaagtgtatagtgttttgtaataaatggcctgatgctaatgtgtaaatggcaaaggtgtatatagtatattaatgttgactgttaattcttaagcaagaaacttttttcttgatgagactcacagatctacacaaactacaaaagttaattttcttgttacacccactgcactctgcaaccagtgttgcctgcctcatggcagttggatcagctcctttacaaaaaagaaaaaaaaaaaaccaacagcaacaaaacagagcccatccatgtcagccac

SEQ ID NO: 53947 - DNA, 583 bp, Homo Sapiens
  misc_feature (467)..(467): n is a, c, g, or t
  misc_feature (471)..(471): n is a, c, g, or t
  misc_feature (476)..(476): n is a, c, g, or t
  misc_feature (483)..(483): n is a, c, g, or t
  misc_feature (491)..(491): n is a, c, g, or t
  misc_feature (494)..(497): n is a, c, g, or t
  misc_feature (505)..(507): n is a, c, g, or t
  misc_feature (521)..(522): n is a, c, g, or t
  misc_feature (536)..(537): n is a, c, g, or t
  misc_feature (540)..(541): n is a, c, g, or t
  misc_feature (557)..(561): n is a, c, g, or t
  misc_feature (577)..(577): n is a, c, g, or t
aagaatgtcgattaaaatcactctcagtgcttcttactattaagcagtaaaaactgttctctattagactttagaaataaatgtacctgatgtacctgatgctatggtcaggttatactcctcctcccccagctatctatatggaattgcttaccaaaggatagtgcgatgtttcaggaggctggaggaaggggggttgcagtggagagggacagcccactgagaagtcaaacatttcaaagtttggattgtatcaagtggcatgtgctgtgaccatttataatgttagtagaaattttacaataggtgcttattctcaaagcaggaattggtggcagattttacaaaagatgtatccttccaatttggaatcttctctttgacaattcctagataaaaagatggcctttgcttatgaatatttataacagcattcttgtcacaataaatgtattcaaataccaatnccanaaaanaaaaaanaaaaaaanaannnnaaaaattnnnaataataatatttnntataattaattttnnttnngggggctctttttttnnnnnttggtgtgggtgcttncttttt

SEQ ID NO: 53948 - DNA, 494 bp, Homo Sapiens
tcacaagcccggctatcagcccggatgacagtgacgaggagaactgagggcacgtggggtgcggcagcgggctagggcccagggcagcttgcccgtgctgccgtgcagttcttgcctccctcacggggcgtcacccccagcccagctccgttgtacataaatgccttgtggcagagctcccggtgaacttctggatcccgtttctgatgcagattcttgtcttgttctccacttgtgctgttagaactcactggcccagtggtgttctcactcctaccccacccaccccctgcctgtccccaaattgaagatccttccttgcctgtggcttgatgcggggcgggtaaagggtattttaacttaggggtagttcctgctgtgagtggttacagctgatcctcgggaagaacaaagctaaagctgccttttgtctgttattttatttttttgaagtttaaataaagtttactaattttgaccaaaaaaaaaaaaaa

SEQ ID NO: 53949 - DNA, 881 bp, Homo Sapiens
  misc_feature (846)..(846): n is a, c, g, or t
  misc_feature (855)..(855): n is a, c, g, or t
ataaattaaacgttaatggtttcttatgctctttttaaatataggaatatcatgttaaagaaagtgagtgtatcatttctattaacagtaatttttctaaaaatgaggaaggaagtagcattagcagtaaagacccacaggccatgacctttttgatcactctgaggacaatatttaaatgacaggaaggtatattaatgtaacaagcattcatttaaggaatagaccattttctctgacctcttcttcaggaaagctttcacactggtatttgtgatctcaccattatgacatccatccccctagctcaccacatagcacatagaatgatatttttgatttgtaagaggccatccaggtactaaggacccaaggcatacagattcacaaaattaactaatctttttgcctcagaataccaaaacaacaaaattataaagctgtatttggacaactaaaaaacaccaaactatctcattgcaatttgtattttagcagatttcagcaactatcctaaacaatgttattgtgttccattttaactgggataaatgtttttgtaaaaatacaaccatagaaaggcctctttgttacaaaatgatttgcaaagaaataactgctttgtttgcaagattaaattagtgttggcaaaataaagttctaaagataatactaaacactttatgcttatcagccaatatctacataagctaaaaattgaatacagttccctttataattttgaatgacaggtttttaacatctttttttaaaaccttaaaaaatcacctttttcgtttaatggtattaattttttaaagtatttgtaaagtggtggcctttacnaatggatgnattaattcctaaacctgcctgttgga

SEQ ID NO: 53950 - DNA, 581 bp, Homo Sapiens
ttttttccagatttggggtataggtctcatctcttcaggttctcatgataccacctttactgtgcttatttttttaagaaaaaagtgttgatcaaccattcgacctataagaagccttaatttgcacagtgtgtgacttacagaaactgcatgaaaaatcatgggccagagcctcggccatagcattgcacttggcctcatgctggagggaggctgggcgggtacagcgcggaggaggagggaggccaggcgggcatggcgtggaggaggagggaggccgggcggtcacagcatggaggaggagggaggcgctgctggtgttcttattctggcggcagcgcctttcctgccatgtttagtgaatgacttttctcgcattgtagaattgtatatagactctggtgttctattgctgagaagcaaaccgccctgcagcatccctcagcctgtaccggtttggctggcttgtttgatttcaacatgagtgtattttttaaaattgatttttctcttcatttttttttcaatcaactttactgtaatataaagtattcaacaatttcaataaaagataaattatt

SEQ ID NO: 53951 - DNA, 550 bp, Homo Sapiens
  misc_feature (12)..(12): n is a, c, g, or t
  misc_feature (34)..(34): n is a, c, g, or t
  misc_feature (547)..(547): n is a, c, g, or t
gcaatccatccnctacgactgactctgcacctgnccctttgccagacagctctgtctccccatgtcctctggaacagctgggcatgggtcatggccattcatgacccttaagtgccacccttcttggaagaccccctccagaagcatactggaagccacctctggaaaagcctcatatggtgatatgccaaaatatttatgtcaatgtccaaacaaagtccaatgccatgagactgaagtctttgtggaaaccactgttacagacaagcttatttccaaagccacctcatttccaaacatctcactcaggaagggaggctcaatgtaacctcaggggccagttttagcatttgaaatggttctgcttggaaaatgatgccctgcaactaaccctggtctttcccatggcaatttaaccacatttggaaggcactgcttcagctgagtttatgaacaatgaatgccaaccttcaggttctagaagattggttgcactcccaaacctttattctattatattactattaaaatattctaattttgctantga

SEQ ID NO: 53952 - DNA, 774 bp, Homo Sapiens
gttaacctaacgaaatttccatgaagaaccaagtcagggcagcatctccttagtcccagctcaggctctctgccttccagaggccgcttctccagtgactaacctcctcctctggctcctccttgcagacagttatcccttgtttagaacacgaatttccatttacctggtgggaacacgaaacaggagtctcttctgttctgcaagtttgatgggtaagaggtagccttttttcaaagtaggatttcctttttcaactgttccaggaaagaatctctaagactgggtagctcacagccagccaaaggcagctacatttccacagaagcccgtccgctgcctccgtggcttctccagccattgaactggtcccacacgcaccccaggccccactcctcggcagtttcaggtgtagctgtggggcccgttcctaggtctgtactcactttagggaggcttcactgactaggctttcctcctgcatgtcgaatttccttcagctttaagaggaagagtggaataaatattctaagtgatttaatgcacttcgacttgtatacaactttctgtgtcagcgacggtatctatagccctttatacgagcgatggatcttgagctctccttccatggtgtaaatagggatcgtattctcgacaactgctggtagcaaatccatctgtggtgcaatacacttgtgatccaagctcttcaatccagatgcaactacaatggatttcactagaaaaacacacaacaaaccaaaaacaacaccc

SEQ ID NO: 53953 - DNA, 651 bp, Homo Sapiens
gcacgaggggttcaggtccctttcagagatataataagcccaacaagttgaagaagctggcggatctagtgaccagatatatagaaggactgcagccactgattctctcttgtccttcacatcacccatgttgagacctcagcttggcactcaggtgctgaagggtaatatggactcagccttgcaaatagccagtgctagttctgacccaaccacagaggatgctgacatcatttgtattatgttccaaggctactacagagaaggctgcctgctatgtatttgcaaggctgatttatggtcagaatttccctctgatatgtctagggtgtgatttaggtcagtagactgtgattcttagcaaaaaatgaacagtgataagtatactgggggcaaaatcagaatggaatgctctggtctatataaccacatttctaagcctttgagactgttcctgagccttcagcactaacctatgagggtgagctggtcccctctatatatacatcatacttaactttactaagtaatctcacagcatttgccaagtctcccaatatccaattttaaaatgaaatgcattttgctagacagttaaactggcttaacttagtatattattattaattacaatgtaatagaagcttaaaa

SEQ ID NO: 53954 - DNA, 769 bp, Homo Sapiens
  misc_feature (661)..(661): n is a, c, g, or t
  misc_feature (696)..(696): n is a, c, g, or t
  misc_feature (735)..(735): n is a, c, g, or t
  misc_feature (762)..(762): n is a, c, g, or t
  misc_feature (766)..(766): n is a, c, g, or t
cctcattctactaatgtgatgctttcattatgtccctgtggattagaatagtgtcagttatttcttaagtaactcagtacccagaacagccagttttactgtgattcagagccacagtctaactgagcaccttttaaacccctccctcttctgccccctaccacttttctgctgttgcctctctttgacacctgttttagtcagttgggaggaagggaaaaatcaagtttaattccctttatctgggttaattcatttggttcaaatagttgacggaattgggtttctgaatgtctgtgaatttcagaggtctctgctagccttggtatcattttctagcaataactgagagccagttaattttaagaatttcacacatttagccaatctttctagatgtctctgaaggtaagatcatttaatatctttgatatgcttacgagtaagtgaatcctgattatttccagacccaccaccagagtggatcttattttcaaagcagtatagacaattatgagtttgccctctttcccctaccaagttcaaaatatatctaagaaagattgtaaatccgaaaacttccattgtagtggcctgtgcttttcagatagtatactctcctggtttggagacagaggaagaaccaaggtcagtccggtcnctttttcaagctcaaattgtatctggacccttccnttaaagtttatgtgtgtgggggagaaataaaatggtgcnccttaactttcttgactttaaaaaaanttantta

SEQ ID NO: 53955 - DNA, 493 bp, Homo Sapiens
gcacgagggggttccaggcagctgtgtggacccagggacagacattcaaagggacgccagccatccttggtgacaggggccccaacttagcatcccttcccttccgttaggaaggagatgaccggaagcaaccccttcacagacacgagcacatcggcaaaccctatgaaagtggaattttctaacaaaataaacttgcttgtttgatctgttttctgtaacttttgctaaatactttatacatttttcatgttaaagagccgtgtctcccgccagcactcctcaccccggtatgaatgtgtttcctccacattgtatatccttccaccctctggctgcctagatcagtaaataaaattgatgtaatataatttataagtaacactgttgaaaccctgatcccagtggaggctgtaatccacctgcccccgcaccacccccctgacccctgttaccgcatttgtgtgtattaatgctgaagaattaaatgttt

SEQ ID NO: 53956 - DNA, 632 bp, Homo Sapiens
  misc_feature (604)..(604): n is a, c, g, or t
  misc_feature (606)..(607): n is a, c, g, or t
  misc_feature (613)..(616): n is a, c, g, or t
  misc_feature (618)..(624): n is a, c, g, or t
gggggttcaagcaattctctgcctcagcctcccaagtagttgggattacaggcacctgccaccatgcctggctaattttttgtatttttagtagagacgggggttttactatgttggctaggctggtcttgaactcctgacctcgtgatccacccgccttggcctcccaaagtgctgggattacaggcatgagccaccgcacctggccttccctgcttcctctctagaatccaattagggatgtttgttactactcatattgattaaaacagttaacaaacttttttctttttaaaatgtgagatcagtgaactctggttttaagataatctgaaacaaggtccttgggagtaataaaattggtcacattctgtaaagcacattctgtttaggaatcaacttatctcaaattgtaactcggggcctaactatatgagatggctgaaaaaataccacatcgtctgttttcactaggtgatgccaaaatattttgctttatgtatattacagttctttttaaaacactggaagactcatgttaaactctaattgtgaaggcagaatccctgctaatttttcagattaaaattctctttgaaacccncnncccccnnnnannnnnnnccttgtcg

SEQ ID NO: 53957 - DNA, 564 bp, Homo Sapiens
  misc_feature (531)..(531): n is a, c, g, or t
  misc_feature (538)..(538): n is a, c, g, or t
  misc_feature (550)..(550): n is a, c, g, or t
gtcttatgcttatggacattgtatatttgtattttatgaccaagtagaccaagtcagaaagatctctctcgagcgtaccataaacctgcagagagaagtctcgaaaggctccaccaggtaccaagggcagctgcttttcctgtcttttgtgcatgggcgacccattacagtatgagataagattgagttctgatgcgttaaacggaggtggcagaaatttgtcaagaaggccttatccatttcgattgtgtgacagattgaaatttattgtttacattggggaatgtatctcaaatttttaaatagaagagtaataaacagactttaaagcaaatattaagatttttactcattcaaggcaagtaaatgaatggaattatctgagctctatggcactggttgtttagagtgactgatgaagtgcaactttcaaaaacatttttgatgacatcaccagcctactgcagaagtgcagggcccagtaaacacatgtattattgaagatgaatctgttgtatgtatcctgtcaanatattcnataatggaatanatctggaaagtgga

SEQ ID NO: 53958 - DNA, 695 bp, Homo Sapiens
gaaaggaaaagactgttccaagcttgggaaaaagtgtatttatcagcagttagtgagaggaagaaaaatcagaagaagttcagaggaacacctaagacaaaccaggtcggagaccatgagaaacagcgtcaaatcatcttttcatgatcccaagctgaaaggcaagccctccagagagcgttatgtgacccacaaccgagcacattggtgacagaccttcggggcctgtctgaagccatagcctccacggagagccctgtggccgactctgcactctccaccctggctgggatcagagcaggagcatcctctgctggttcctgactggcaaaggaccagcgtcctcgttcaaaacattccaagaaaggttaaggagttcccccaaccatcttcactggcttccatcagtggtaactgctttggtctcttctttcatctggggatgacaatggacctctcagcagaaacacacagtcacattcgaattcgggtggcatcctccggagagagagagaggaaggagattccacacaggggtggagtttctgacgaaggtcctaagggagtgtttgtgtctgactcaggcgcctggcacatttcaggggagaaactccaaagtccacacaaagattttctaagggaatgcacaaattgaaaacacactcaaaagacaaacatgcaagttaaaaaaaaaa

SEQ ID NO: 53959 - DNA, 467 bp, Homo Sapiens
gcctgtgactccagagtcctatcttactgtgacttaaagtttgatggagagaaagctgtaggatccataaattctaccaggaaaccagggtcttcctgttcctagcactgagaatgggcacccagtggtccaagaacactttctgggctaacatagtcctcacacagggctgagaaagaaagtgtctcctttcctggaaagcacatgtaaaagttaagggcctgaatctcttctaaaccaataattgacctctaggcacccaccataatactgctaccttcagggcagaagacactgctctttgtaacccagccaccaccaaaaagcaaacagaaagaaggaaggatggttaagccattggataatactgaatctgtttccctaagtgacttaaccttagagcaagcacaacatccaggttaattttttgtaagatttctccttttattattgccctcatcatagtt

SEQ ID NO: 53960 - DNA, 614 bp, Homo Sapiens
agaacccaaggaaggcgagcggaagatttacttggcaattgaaagtgccaatgaactggctgtgcagaaagcaaaggcagaaatcaccaggctcataaaagaagagctgatccggctgcaaaattcataccaaccaacaaataaaggaagatacaaagtcttatagacatccggaaaaaagatttttacctgtgctggtctatgatgtatgtggcagttgctgtctgcagtttacaatgtattgtaaatgaagattttttaaattctatcttgctgattttttttaaatataagaaactggtacttggtaaagaaatctgtccgtaagtacccccacaatcagtcaaactatatttaaagccagcctgttttcagagtatgatgtcctttaatgtaaactcaaatatcaatattttaaatgtccggataatattctagaggtttaaaaaatggaaatatttgaactttctattgaagacaataaagtacacaagtcgttaaggggctattcactttatcctgtactttcaatgaaattgtgatcatttcctaagaaaaggtaaaattcactatcatattttgtgtccccaccttgatgttacatgactctggaa

SEQ ID NO: 53961 - DNA, 1029 bp, Homo Sapiens
ctccggatatctttggtgacttgtccactccagtgtggcatcatgtggcagctgctcctcccaactgctctgctacttctagtttcagctggcatgcggactgaagatctcccaaaggctgtggtgttcctggagcctcaatggtacagggtgctcgagaaggacagtgtgactctgaagtgccagggagcctactcccctgaggacaattccacacagtggtttcacaatgagaacctcatctcaagccaggcctcgagctacttcattgacgctgccacagtcgacgacagtggagagtacaggtgccagacaaacctctccaccctcagtgacccggtgcagctagaagtccatgtcggctggctgttgctccaggcccctcggtgggtgttcaaggaggaagaccctattcacctgaggtgtcacagctggaagaacactgctctgcataaggtcacatatttacagaatggcaaagacaggaagtattttcatcataattctgacttccacattccaaaagccacactcaaagatagcggctcctacttctgcagggggcttgttgggagtaaaaatgtgtcttcagagactgtgaacatcaccatcactcaaggtttggcagtgtcaaccatctcatcattctctccacctgggtaccaagtctctttctgcttggtgatggtactcctttttgcagtggacacaggactatatttctctgtgaagacaaacatttgaagctcaamaagagactggaaggaccataaacttaaatggagaaaggaccctcaagacaaatgacccccatcccatgggagtaataagagcagtgggcagmagmatctctgaamatttctctggatttgcaacmccatmatmctmaggmctctmtamaagmagmaggaaacatagaactcagagcaagatcctttatcmactctcgatttttcttggtctcagtggaagggaaagccatgatctcaagmagggagcccagtgagtdgtgcwttctagaatkgagtt

SEQ ID NO: 53962 - DNA, 744 bp, Homo Sapiens
atttctagcagtgatgaaaatgaatcttcacaaaacacttcgagcactgtccagtattctaccgtggtacacagtggctacagacaccaagttccgtcagtccaagtcttctcaagatccgagtctacccagcccttgttagattcagaggagcggccagaagatctacaattagtagatcatgtagatggcggtgatggtattttgcccaggcaacagtacttcaaacagaactgcagtcagcatgaatccagtccagatatttcacattttgaaaggtcaaagcaagtttcatcagtcaatgaggaagattttgttagacttaaacagcagatttcagatcatatttcacaatcctgtggatctgggcaaatgaaaatgtttcaggaagtttctgcagcagatgcttttggtccaggtactgagggacaagtagaaagatttgaaacagttggcatggaggctgcgactgatgaaggcatgcctaaaagttacttaccacagactgtacggcaaggcggctacatgcctcagtgaaggactagtagttcctgctacaacttcagcagtacctataaagtaaagctaaaatgattttatctgtgaattcagattttaaaaagtcttcactctctgaagatgatcatttgcccttaaggacaaaaatgaactgaagtttcacatgagctatttccattccagaatatctgggattctactttaagcactacataaactgacttt

SEQ ID NO: 53963 - DNA, 697 bp, Homo Sapiens
aaggagaacaagaccgcgggcccggggaccaccggccaagacagggctgaagcagaggaggaagaggaagagtgagggatggagaaagggcagaggaagagacatgagaaagggagaggaagagaagcccagctctgggaactgaatcaggaaactcaaatcgaatagggaagtaaaaaaacaaaacaaaaaacaaaaaaaacaaaaaaaaaaccctatttaaatgaaaggagtttaaaaacattttttaaggagggagaaaggagaaattttggtttttcaacactgaaaaaatactacctataggaaagtctgtcaggtttggtttttttgtacaatatgaaaaggatattatctacctgttctgtagctttctggaatttacctccccttttctatgttgctattgtaaggtctttgtaaaatcttgcagttttgtaagccctctttaatgctgtctttgtggactgtgggtctggactaaccctgtggttgcctgccctcctgagcctccgccttcccagcagcggcaccaaggggccttagggagccccaaaacctaccactcgcgtgttccccaagcgcctggctgctgcttcttgcttcccgtcccccagccccatgctcccttttacattctgtgtgtatctaaaggatggaaaaataaaacgcaattaaaaataaaaaaaaaaaaaag

SEQ ID NO: 53964 - DNA, 600 bp, Homo Sapiens
aaagaagtacaggataggaagagcataatacactgtttttctcaacaaggagcagtatgtacacagtcataatgatgtgactgcttagcccctaaatatggtaactactctgggacaatatgggaggaaaagtgaagattgtgatgttgtaagagctaaatcctcatctgtcatatccagaaatcactatataatatataataatgaaatgactaagttatgtgaggaaaaaaacagaagacattgctaaaagagttaaaagtcattgctctggagaattaggagggatggggcaggggactgttaggatgcattataaactgaaaagcctttttaaaattttatgtattaatatatgcattcacttgaaaaactaaaaaaaaacaataatttggaaaaacccatgaaggtaactaacggaaggaaaaactaagagaatgaaaagtatttgcctctggaaagaacaactggcaggactgttgttttcattgtaagacttttggagccatttaattgtacttaaccattttcatctatttctttaataagaacaattccatcttaataaagagttacacttgttaataaaaaaaaaaaaaa

SEQ ID NO: 53965 - DNA, 815 bp, Homo Sapiens
  misc_feature (815)..(815): n is a, c, g, or t
ggcagcatctatttctcaagcccaaagggccaccttacccgactggggttggagttcttcgaccagccggcagtccccctggcccgggcatttctgggacaggtcctagtccggcgacttcctaatggcacagaactccgaggccgcatcgtggagaccgaggcatacctggggccagaggatgaagccgcccactcaaggggtggccggcagaccccccgcaaccgaggcatgttcatgaagccggggaccctgtacgtgtacatcatttacggcatgtacttctgcatgaacatctccagccagggggacggggcttgcgtcttgctgcgagcactggagcccctggaaggtctggagaccatgcgtcagcttcgcagcaccctccggaaaggcaccgccagccgtgtcctcaaggaccgcgagctctgcagtggcccctccaagctgtgccaggccctggccatcaacaagagctttgaccagagggacctggcacaggatgaagctgtatggctggagcgtggtcccctggagcccagtgagccggctgtagtggcagcagcccgggtgggcgtcggccatgcaggggagtgggcccggaaacccctccgcttctatgtccggggcagcccctgggtcagtgtggtcgacagagtggctgagcaggacacacaggcctgagcaaagggcctgcccagacaagattttttaattgtttaaaaaccgaataatgtcctatttctagaaaacacacactacaaaaaaaactcagactagttctctctccctcgttgccgaattcggcacgaagn

SEQ ID NO: 53966 - DNA, 638 bp, Homo Sapiens
  misc_feature (602)..(611): n is a, c, g, or t
  misc_feature (613)..(631): n is a, c, g, or t
ccacgcgtccgcaggaagatatagacattgagggggtacagtcagaaggacaggacaatggggcggaagattctggggacacagaggatgagctgaggagggtggcagagcagaaggaacacagactgccccctggccaggaggagaatggggaagacccgtatgcaggctccacggatgagaacacggacagtgaggaacaccaggagcctcctgatctgccagtccctgagctcccagatttcttccagggcaagcacttctttctttacggggagttccctggggacgagcggcggaaactcatccgatacgtcacagccttcaatggggagctcgaggactatatgagtgaccgggttcagtttgtgatcacagcacaggaatgggatcccagctttgaggaggccctgatggacaacccctccctggcattcgttcgtccccgatggatctacagttgcaatgagaagcagaagttacttcctcaccagctctatggggtggtgccgcaggcctgaagtatgtgctatacacacacacacacacacacacacacacacacacacacgatgcatttaataaagatgagttggttctcnnnnnnnnnnannnnnnnnnnnnnnnnnnnaaaaagg

SEQ ID NO: 53967 - DNA, 634 bp, Homo Sapiens
gccagactctaatacgactcactatagggaaagctggtacgcctgcaggtaccggtccggaattcccgggtcgacccacgcgtccgcgttaatgttttcagtcattgtgtgtcctttgttgctgccaatgtctttggactgtaatcagtgcatccacacctcccaggatccagtgctccctctcagctcagtctcccctctctccctgtcctgcattccatcccagctcctcagcatggcctcagtgggcgcacccatgcctcccgcagtccaggtgagcaggggagcaactgagcaggaagaggatggatcaacaagggtcacggggaataggggacccacggggtgtgacctgcttgctagagaactgtgaacatgtggctctggatagagtgactgctgctccatattagcttccagagggtgagtgagggacagaatatttccttcataatggtcatgggtgaatgctttctgctgtaagtgtcttttagagtaggaatcagcatagtgggatgcccagcaggcacaaactatgggtccagggagtctcagcggggaacttctatcagtatcaataaccattggaaggagaaatgattcatgtgtgaaaaaaatctcagatccatcaata

SEQ ID NO: 53968 - DNA, 837 bp, Homo Sapiens
  misc_feature (832)..(833): n is a, c, g, or t
  misc_feature (835)..(836): n is a, c, g, or t
tatagggggctatgcagaattcctgtaccaaattggcttgttggatgagaagcaaaaaaagtacttccagaagcagtgccatgaatgcatagaacacatcaggaagcagaactggtttgaggcctttgaaatactggataaactactagatggcgacttaacaagtgatccttcttacttccagaatgttacaggatgtagtaattactataactttttgcggtgcacggaacctgaggatcagctttactatgtgaaatttttgtcactcccagaggtgagacaagccatccacgtggggaatcagacttttaatgatggaactatagttgaaaagtacttgcgagaagatacagtacagtcagttaagccatggttaactgaaatcatgaataattataaggttctgatctacaatggccaactggacatcatcgtggcagctgccctgacagagcgctccttgatgggcatggactggaaaggatcccaggaatacaagaaggcagaaaaaaaagtttggaagatctttaaatctgacagtgaagtggctggttacatccggcaagcgggtgacttccatcaggtaattattcgaggtggaggacatattttaccctatgaccagcctctgagagcttttgacatgattaatcgattcatttatggaaaaggatgggatccttatgttggataaactaccttcccaaaagagaacatcagaggttttcattgctgaaaagaaaatcgtaaaaacagaaaatgtcataggaataaaaaaatatcttttcatatctgcaagatttttttcatcaataaaaattatccttgnnanna

SEQ ID NO: 53969 - DNA, 783 bp, Homo Sapiens
gattgtggacacactggagcaagtagaacttattgaccttggggacccggatgcagcagatgtgttcttgccttgcgaagatcctccaccaaccccccagtcgtctggggtggacaaccatttggaggagctgagcctgccggtgcctacatcagacaggaccacatctaggacctcctcctcctcctcctccgactcctccaccaacctgcatagcccaaatccaagtgatgatggagcagatacgcccttggcacagtcggatgaagaggaggaaaggggtgatggaggggcagagcctggagcctgcagctagcagtgggcccctgcctacagactgaccacgctggctattctccacatgagaccacaggcccagccagagcctgtcgggagaagaccagactctttacttgcagtaggcaccagaggtgggaaggatggtgggattgtgtacctttctaagaattaaccctctcctgctttactgctaattttttcctgctgcaaccctcccaccagtttttggcttactcctgagatatgatttgcaaatgaggagagagaagatgaggttggacaagatgccactgcttttcttagcactcttccctcccctaaaccatcccgtagtcttctaatacagtctctcagacaagtgtctctagatggatgtgaactccttaactcatcaagtaaggtggtactcaagccatgctgcctccttacatcccttttggaacagagcacggtataaataataaactaataataatatgccaa

SEQ ID NO: 53970 - DNA, 688 bp, Homo Sapiens
tcccgcttcactccctgaagttcattgccacccttcagtacatcgtgggccgcagcaggaagcaaagcaaccccctgcttatccacgtggacaccaaggcgggccacggggcggggaagcccacagccaaagtgatagaggaagtctcagacatgtttgcgttcatcgcgcggtgcctgaacgtcgactggattccataaacagttttcgtgcttcctcctgacagcgacagaaaacctcaagggctttcccacgttgacaccaagaaaccactgggcataatgcttccccacgggaacattattcctgcactcacaggctacagttgaacagaactgccgtgggaattttatcttttttaggcttctcctttttagcaaggccttggtgtttctttttccaccctgtctaggcacatgtggttttttggtgttttttttaagggcatgttgggataaatagctaaatggcaacaaacacattgtgaatattagaatgctgaattaaggatcatagtcgggcatacttatctatatccataacctttatatctttaaataaatgtgagaactgtaaaaaaaaaaaaaaaaaaaacttgggggggtggcccgtgccccaattcccccttattgggagtcgtattaacaattaacatggccgtcgttttacaacgtcgtgaatggggaaa

SEQ ID NO: 53971 - DNA, 794 bp, Homo Sapiens
agaggccgagccaagcggcggcccctcttatgctgggaggatgctggagagtagcggctgcaaagcgctgaaggagggcgtgctggagaagcgcagcgacgggttgttgcagctctggaagaaaaagtgttgcatcctcaccgaggaagggctgctgcttatcccgcccaagcagctgcaacaccagcagcagcagcaacagcagcagcagcagcagcaacaacagcccgggcaggggccggccgagccgtcccaacccagtggccccgctgtcgccagcctcgagccgccggtcaagctcaaggaactgcacttctccaacatgaagaccgtggactgtgtggagcgcaagggcaagtacatgtacttcactgtggtgatggcagagggcaaggagatcgactttcggtgcccgcaagaccagggctggaacgccgagatcacgctgcagatggtgcagtacaagaatcgtcaggccatcctggcggtcaaatccacgcggcagaagcagcagcacctggtccagcagcagcccccctcgcagccgcagccgcagccgcagctccagccccaaccccagcctcagcctcagccgcaaccccagccccaatcacaaccccagcctcagccccaacccaagcctcagccccagcagctccacccgtatccgcatccacatccacatccacactctcatcctcactcgcacccacaacctcacccgcacccgcatccgcaccaaataccgcaccacacccaagtcgcactcgcagccgcacggcaccggctctcgc

SEQ ID NO: 53972 - DNA, 721 bp, Homo Sapiens
ggcgagttgttacctgcgtcctctgacctgagagcgaaggggaaagcggcgagatgactgaccgctacaccatccatagccagctggagcacctgcagtccaagtacatcggcacgggccacgccgacaccaccaagtgggagtggctggtgaaccaacaccgcgactcgtactgctcctacatgggccacttcgaccttctcaactacttcgccattgcggagaatgagagcaaagcgcgagtccgcttcaacttgatggaaaagatgcttcagccttgtggaccgccagccgacaagcccgaggagaactgagactctgccttaccaccgcagtgcggggcacctctcccagcgtttctccggtttgccaatcctcttaagtattcctgtctccaaaggaccggctctccatggctcctgcgcctcgtgctttccgcgtacagaagtgcttgcccggggagtcccgcctgacctgccttcatgtggacccttagaacagcactgggagaccagcaggactcctgagaactgtgctggtggagaggtcctagagccggcgagcgtttgagaagagggcatggcgctggagtgagatgggatttggcgtctcgtttttggctaattgattgtcattggctttttccataaagtttagaaatcgttcagtcaaaaaaaaaaaaaaaaaaaaaaaaaaaaaaaaaaaaaaaaaaaaaaaaggg

SEQ ID NO: 53973 - DNA, 721 bp, Homo Sapiens
ccacgcgtgcgccagaaggcaatgtttctgcagagcctggtgcaggaggtagaactgaacatcgtggccggttatgggtctcccaaagatgtggctgtatacgcggcgctggggctgtccccgagccagacctacatcgtgggccgtgccgtgcggaagctacaggcgcagtgccagttcctgtcagacggctatgtggcccacctgggccagctggaagcgggctcgcactcgcatgcctcctcgggacccccgagagctgccttgggcaagagcagctatggtgtggctgcccccgtggacttcctgcgcaaacagagccagctgcttcgctcgaggggccccagccaggcggagcgtgagggcccgggaacaccacgcacaccctggcacggggcaaagcacggagcatcagcctgaagctggacagcgaggagtgaggcccacaccagcctggacctgggttatttattgacacacccaaggggcccgaggggctgcgtgtgggaggctggggacccagacttttggccccagcgctggccccccaagcccacacctatatctccgtgtgctcctcggtgttacttccctttcatatgaggggaccagcgccggggggagggaggagggcgtgggcatgggcgcagaggcttttccagtgtgtataaatccactgacacataaaccgccactgcaccccaaaaaaaaacaaaaacag

SEQ ID NO: 53974 - DNA, 459 bp, Homo Sapiens
  misc_feature (28)..(28): n is a, c, g, or t
  misc_feature (268)..(268): n is a, c, g, or t
  misc_feature (372)..(372): n is a, c, g, or t
  misc_feature (385)..(385): n is a, c, g, or t
  misc_feature (405)..(405): n is a, c, g, or t
  misc_feature (409)..(409): n is a, c, g, or t
  misc_feature (423)..(423): n is a, c, g, or t
acctgctgtcagggaacacacagctganttggggggaggcctggtaacactggcctaacttgatctctgttccccagggttgctcctggacgccaccaacaactttagctatgttttctacatgtccagcttcttcctcatctcagctgccctcttcatgggtggcagcttctacgccctgcagaagaaggagcaaggcaagcaggctgtcgcggcggatgccctggagcgggatcttttcttggaagccaaagacggtcctgggaancaacggtcccctgagatcatgtatgttaccagcgtctaagacccagggttcatctgtgtgaccagtgtctgagtcctgggatcactgagtgaacactgtctcancccaacccagganggggacctctagctccttcnccangggcttgggtgaanagtacccaggaagcccgggctgtccaggctctgcaa

SEQ ID NO: 53975 - DNA, 846 bp, Homo Sapiens
  misc_feature (615)..(615): n is a, c, g, or t
cacgaggccgggccccaactctggtaccgggactttctgcagctggtggagccgggcggaggtggcagcgcgaactccctgcgcatgtgccgcccgcagcctgcgctgcagtcactgcccctggagtcgcggagaaagggccgtaaccggaggacccacgcccctgagcctcgcgctgagcgggggccgcgcagcgcaacgcactggtgaccagactgtccccacgccgggaaccaagcaggagacgacaggcgagagaggagccagacagaccctgaaaagaaggacgggttggggccgggcacattgggggtcaccggccgatggagacaccaaccgacaggccctggctgagggcagctgcgcgggcttatttattaacaggataacccttgaatgtagcagccccgggagggcggcacaggtcgggcgcaggattcagccggagggaagggacggggaagccgagctccagagcaacgaccagggccgaggaggtgcctggagtgcccaccctgggagacagaccccacctccttgggtagtgagcagtgagcagaaagctgtgaacaggctgggctgctggaggtggggcgaggcaggccgactgtactnaagtacgcattaacgcattatcgccaagctggaatggcccagcagaaaaaaaaaaaaaaaaaatggcttatccggccgctgctacttaggacgtaatgtaggcctttgtggggtattatttgaaaggagagatagattcacttcgtgcccttatccttttggctttgctcgtttgccccaaaccggaataaagcaaaattggtgcatgtctaatgtcaccggaatgattcc

SEQ ID NO: 53976 - DNA, 658 bp, Homo Sapiens
ttttttttttttttttttgaaaaaaatgagaacttggctgccaacttcctcctggagtcagaactttgatgacgagtgatgccaggaagccaggccaccgaagcccccaccctacccttattccatgaaagttttataaaagaaaaaatatatatatattcatgtttatttaagaaatggaaaaaaaaatcaaaaatcttaaaaaaacaagcaaacagtccagcttcctgtcctcctaaagtggcccctgttcccatctcccgggccagacagctgtccccccgtcctcctccccagcccagcctgctcagagaagctggcaggactgggaggcgacagatgggcccctcttggcctctgtcccagctctctgcagccagacggaaaggcggctgcttgcctctccatcctccgaaaaacccctgaggacccccccccatcctcttctaggatgaggggaagctggagccccaactttgatcctccattggagtggcccaaatctttccatctagggcaagtcctgaaaggcccaaggccccctccccagtctggccttggcctccagcctggagaagggctaacatcagctcattgtcaaggccacccccaccccagaacagaaccgtgtctctgataaaggttttgaagtgaataa

SEQ ID NO: 53977 - DNA, 832 bp, Homo Sapiens
  misc_feature (587)..(587): n is a, c, g, or t
  misc_feature (761)..(761): n is a, c, g, or t
  misc_feature (808)..(808): n is a, c, g, or t
tctaagttccaagtgctttggcacctgcctcccaggagccctcccccgctgcttctgctgaggctgatggcaagttaattcaggacagcagaagagaaactaaaaatgttgcatctggaggtggtggggttggagatggtgttcaagaaccaaccacaggcaactggagaggaatgctgaaaacttcaaaagctgaagagttattagcagaagaaaaatcaaaacccattccaattatgccagccagtccacaaaaaggtcatgccgtgaacctgctagatgtgccagttcctgttgcacgaaaactatctgctcgggaacagcgagattgtgaggttattgaacgactcattaaatcatattttctcattgtcagaaagaatattcaagacagtgtgccaaaggcagtaatgcattttttggttaatcatgtgaaagacactcttcagagtgagctagtaggccagctgtataaatcatccttattggatgatcttctgacagaatctgaggacatggcacagcgcaggaaagaagcagctgatatgctaaaggcattacaaggagccagtcaaattattgctganatccgggagactcatctttggtgaagagaactatgtaatactgagactttgttgactcaaaacttgctagttactgcctacctgagtagaatcttatttatgaactcctgtgtattgcaatggtatgaatctgctcatgtggagactggctataaactgaaaagtgtattccanattgcagaacacatcacacatttaatcccaaataataatggctgttntctaaaaaaaaaaaaaaaaaaaaa

SEQ ID NO: 53978 - DNA, 852 bp, Homo Sapiens
  misc_feature (767)..(767): n is a, c, g, or t
ttgcttggaggttggcggcgcggggctgaaggctagcaaaccgagcgatcatgtcgcacaaacaaatttactattcggacaaatacgacgacgaggagtttgagtatcgacatgtcatgctgcccaaggacatagccaagctggtccctaaaacccatctgatgtctgaatctgaatggaggaatcttggcgttcagcagagtcagggatgggtccattatatgatccatgaaccagaacctcacatcttgctgttccggcgcccactacccaagaaaccaaagaaatgaagctggcaagctacttttcagcctcaagctttacacagctgtccttacttcctaacatctttctgataacattattatgttgccttcttgtttctcactttgatatttaaaagatgttcaatacactgtttgaatgtgctggtaactgctttgcttcttgagtagagccaccaccaccatagcccagccagatgagtgctctgtggacccacagcctaagctgagtgtgaccccagaagccacgatgtgctctgtatccagaacacacttggcagatggaggaagcatctgagtttgagaccatggctgttacagggatcatgtaaacttgctgtttttgttttttcctgccgggtgttgtatgtgtggtgacttgcggattttgtttcagtgtactggaaacttccattttattcagaaatctgtcatgttaaagcctgattaagagaaagtttatatctagtgctgtatgtcggnttttcccctcatcaggtgacatctcatacatgtctatattgcctcagtgatagagccactctgcgaagagttactgaaaacgttt

SEQ ID NO: 53979 - DNA, 668 bp, Homo Sapiens
gcatcttcaaaattgaggactcagcccaggtggcccggctgtggggcatccgcaagaaccgtcccgccatgaactacgacaagctgagccgctccatccgccagtattacaagaagggcatcatccggaagccagacatctcccagcgcctcgtctaccagttcgtgcaccccatctgagtgcctggcccagggcctgaaacccgccctcaggggcctctctcctgcctgccctgcctcagccaggccctgagatgggggaaaacgggcagtctgctctgctgctctgaccttccagagcccaaggtcagggaggggcaaccaactgccccagggggatatgggtcctctggggccttcgggaccctggggcaggggtgcttcctcctcaggcccagctgctcccctggaggacagagggagacagggctgctccccaacacctgcctctgaccccagcatttccagagcagagcctacagaagggcagtgactcgacaaaggccacaggcagtccaggcctctctctgctccatccccctgcctcccattctgcaccacacctggcatggtgcagggagacatctgcacccctgagttgggcagccaggagtgcccccgggaatggataataaagatactagagaactgaaaaaaaaaaaaaaaaaa

SEQ ID NO: 53980 - DNA, 1100 bp, Homo Sapiens
cgcctcgcttgctcctgccgggcgtgcagggccccgccgccgccatgtcgggctcgttcgagctctcggtgcaggatctcaacgacctgctctcggacggcagcggctgctacagcctcccgagccagccctgcaacgaggtcaccccgcggatctacgtgggcaacgcgtctgtggctcaggacatccccaagctgcagaaactaggcatcacccatgtgctgaacgcggctgagggcaggtccttcatgcacgtcaacaccaatgccaacttctacaaggactccggcatcacatacctgggcatcaaggccaacgacacacaggagttcaacctcagcgcttactttgaaagggctgccgacttcattgaccaggctttggctcaaaagaatggccgggtgctcgtccactgccgggaaggttatagccgctccccaacgctagttatcgcctacctcatgatgcggcagaagatggacgtcaagtctgccctgagcatcgtgaggcagaaccgtgagatcggccccaacgatggcttcctggcccagctctgccagctcaatgacagactagccaaggaggggaagttgaaaccctagggcacccccaccgcctctgctcgagaggtccgtgggggaggccgtgggcaaaggtgtcccgagctgccatgtttaggaaacacactgtaccctgctcccagcatcacaaggcacttgtctacaagtgtgtcccaacacagtcctgggccactttccccaccctggggagcacataaagaagcttgccaagggggggcgtccttgctccccagttgtcctgtttctgtaacttatgatgtcttttccctgagatgggggctcagagggggaaggcctgtggcttgcatgcttcccgatggsccacggcaggagggtgtgtggaagtgtaaggcctaagatgctcacagaggtccctcatgacctcccttccccaactcccgaatcctctcttgagtgttgtrcctcaamaccttgagccctagtaaargaadtatgcaawggaggcamtytcccmccamgtctgtgcccssacykktcccmamrccttccmacctcgtg

SEQ ID NO: 53981 - DNA, 876 bp, Homo Sapiens
  misc_feature (818)..(819): n is a, c, g, or t
  misc_feature (847)..(847): n is a, c, g, or t
ggtgccctcagggctcccagacctcaagctcctccaggtggtctatctgcactccaacaacatcaccaaagtgggtgtcaacgacttctgtcccatgggcttcggggtgaagcgggcctactacaacggcatcagcctcttcaacaaccccgtgccctactgggaggtgcagccggccactttccgctgcgtcactgaccgcctggccatccagtttggcaactacaaaaagtagaggcagctgcagccaccgcggggcctcagtgggggtctctggggaacacagccagacatcctgatggggaggcagagccaggaagctaagccagggcccagctgcgtccaacccagccccccacctcgggtccctgaccccagctcgatgccccatcaccgcctctccctggctcccaagggtgcaggtgggcgcaaggcccggcccccatcacatgttcccttggcctcagagctgcccctgctctcccaccacagccacccagaggcaccccatgaagcttttttctcgttcactcccaaacccaagtgtccaaggctccagtcctaggagaacagtccctgggtcagcagccaggaggcggtccataagaatggggacagtgggctctgccagggctgccgcacctgtccagacacacatgttctgttcctcctcctcatgcatttccagccctttcaaccctccccgactctgcggctcccctcagcccccttgcaagttcatggcctggtccctcccagacccctgctcccactggcccttcggacaggccctccccttctgttctctctttccccgnnccttcctctctctctctctctctctctnctctctctttccggggggggggggggggg

SEQ ID NO: 53982 - DNA, 582 bp, Homo Sapiens
accgatgtagattatgaaactgcatttattcattaccgtctggcttctgagcagcaacacagtgcacaagctatgtttaatctgggatatatgcatgagaaaggactgggcattaaacaggatattcaccttgcgaaacgtttttatgacatggcagctgaagccagcccagatgcacaagttccagtcttcctagccctctgcaaattgggcgtcgtctatttcttgcagtacatacgggaaacaaacattcgagatatgttcacccaacttgatatggaccagcttttgggacctgagtgggacctttacctcatgaccatcattgcgctgctgttgggaacagtcatagcttacaggcaaaggcagcaccaagacatgcctgcacccaggcctccagggccacggccagctccaccccagcaggaggggccaccagagcagcagccaccacagtaataggcactgggtccagccttgatcagtgacagcgaaggaagttatctgctgggaacacttgcatttgatttaggaccttggatcagtggtcacctcccagaagaggcacggcacaaggaagca

SEQ ID NO: 53983 - DNA, 736 bp, Homo Sapiens
gcgtccgccccgcgtccgcccacgcgtccggccagtgagcttctaccatcatggacctattgttcgggcgccggaagacgccagaggagctactgcggcagaaccagagggccctgaaccgtgccatgcgggagctggaccgcgagcgacagaaactagagacccaggagaagaaaatcattgcagacattaagaagatggccaagcaaggccagatggatgctgttcgcatcatggcaaaagacttggtgcgcacccggcgctatgtgcgcaagtttgtattgatgcgggccaacatccaggctgtgtccctcaagatccagacactcaagtccaacaactcgatggcacaagccatgaagggtgtcaccaaggccatgggcaccatgaacagacagctgaagttgccccagatccagaagatcatgatggagtttgagcggcaggcagagatcatggatatgaaggaggagatgatgaatgatgccattgatgatgccatgggtgatgaggaagatgaagaggagagtgatgctgtggtgtcccaggttctggatgagctgggacttagcctaacagatgagctgtcgaacctcccctcaactgggggctcgcttagtgtggctgctggtgggaaaaaagcagaggccgcagcctcagccctagctgatgctgatgcagacctggaggaacggcttaagaacctgcggagggactgagtgcccctgccactccg

SEQ ID NO: 53984 - DNA, 602 bp, Homo Sapiens
taggacgatggtggcccctatggcgaatctgaggctcctgcgccacctggcccgggcacccgctggccctatcggtcccgggacacccgccgctccttcccagagcccgaggagcctcctgaaggtggaagctatgctggttccctggctgagccctacgaggagctggaggcggaggagtgcgggatcctggacggctgcaccaacggccgctgcgtgcgcgtccccgaaggcttcacctgccgttgcttcgacggctaccgcctggacatgacccgcatggcctgcgttgacatcaacgagtgtgatgaggccgaggctgcctccccgctgtgcgtcaacgcgcgttgcctcaacacggatggctccttccgctgcatctgccgcccgggattcgcacccacgcaccagccgcaccactgtgcgcccgcacggccccgggcctgagccctggcacccgctggccgcccacccgcgcccgccactcggggcccctgccgcgcatcctgcagcccgcttatgcgtatgtgcacggggccgcccgcctggacctggagaagggacctacggacgcctggaagctgcgacgccctgcactgctc

SEQ ID NO: 53985 - DNA, 935 bp, Homo Sapiens
  misc_feature (802)..(802): n is a, c, g, or t
  misc_feature (807)..(807): n is a, c, g, or t
  misc_feature (815)..(817): n is a, c, g, or t
  misc_feature (915)..(915): n is a, c, g, or t
gatgatcagcgtcaagaacttcatcctggcagccgacgtcatgaagagcatttcgctgctgcgctaccaggaggaaagcaagacgctgagcctggtgtcgcgggatgccaagcccctggaggtgtacagcgtggacttcatggtggacaatgcccagctgggttttctggtgtctgaccgcgaccgcaacctcatggtgtacatgtacctgcccgaagccaaggagagtttcgggggcatgcgcctgctgcgtcgggcagacttccacgtgggtgcccacgtgaacacgttctggaggaccccgtgccggggggccactgaagggctcagcaaaaagtcggtcgtgtgggagaataagcacatcacgtggtttgccaccctggacggcggcatcgggctgctgctgcccatgcaggagaagacctaccggcggctgctgatgctgcagaacgcgctgaccaccatgctgccacaccacgccggcctcaacccccgcgccttccggatgctgcacgtggaccgccgcaccctccagaatgccgtgcgcaacgtgctggatggggagctgctcaaccgctacctgtacctgagcaccatggagcgcagcgagctagccaagaagatcggcaccacaccagacataatcctggacgacttgctggagacggaccgcgtcaccgcccacttcttaccccggggatgccgtcaccaccagcacacggaactaacctcccaccccccttttggtacaaaacccaaaggaaaaacattttttttgcttgaaaaaaaaaaaacaaaaganaccanccggcaannnaagaaaacctccaggcaattcttttgttccggtggcgcggaaaaaaaagggtaatgtgaaatatggcccacatttggcacaataaggttggtttctcnctggaaaccccgagcttttt

SEQ ID NO: 53986 - DNA, 730 bp, Homo Sapiens
ttttttttttttttttttgaaagggctacaatagtaagtttaatcttgatatgcaccagaaggtccacacaggagagagaccatacaattgtaaggaatgtgggaagagttttggctgggcctcgtgtcttttgaaacatcagagactgcacagtggggaaaaacctttcaaatgtgaagagtgtgggaaaagatttactcagaattcacagcttcattctcatcaaagagtgcacactggagaaaagccatacaatgtgatgagtgtgggaagggcttcagctggtcctcaactcgtctgacccatcagagacgccacagcagagaaacacctctcaaatgtgagcagcatgggaagaacattgtacagaattcattctctgaagtgcaagaaaaagttcacagtgtagaaaagccatacaaatgtgaggactgtgggaagggctacaacaggcgcttgaatcttgatatgcatcagagggtccacatgggagagaaaacatggaagtgtagggagtgtgatatgtgctttagtcaggcctcaagccttcgacttcatcagaatgttcatgttggagaaaaaccttagtgatgtgatggtgcaataaagtcttcactcagtcttcatgaatgcagtctcatcattagattagcaaacttaactcctcgaagactgtgtcttctcgcttgttccctttccaataaactcctgttatcattggaggcgttt

SEQ ID NO: 53987 - DNA, 532 bp, Homo Sapiens
cagggctaccgcatggagcagcctcgaaactgtgacgatgaagtgtacgagctgatgcgtcagtgctggcgggaccgtccctatgagcgacccccctttgcccagattgcgctacagctaggccgcatgctggaagccaggaaggcctatgtgaacatgtcgctgtttgagaacttcacttacgcgggcattgatgccacagctgaggaggcctgagctgccatccagccagaacgtggctctgctggccggagcaaactctgctgtctaacctgtgaccagtctgacccttacagcctctgacttaagctgcctcaaggaatttttttaacttaagggagaaaaaaagggatctggggatggggtgggcttaggggaactgggttcccatgctttgtaggtgtctcatagctatcctgggcatccttctttctagttcagctgccccacaggtgtgtttcccatcccactgctcccccaacacaaacccccactccagctccttcgcttaagccagcactcacaccactaa

SEQ ID NO: 53988 - DNA, 789 bp, Homo Sapiens
atggggcaagacagaaaagtgcctgagctggggaagccggggtgtaacttcctgctgcaccctgcgcctccagaggtcctccgtagggtctttcttgggatagtgttctgctcctgcttttctgtcctgggcatgggtccagggcctgacaccccctccccgcccctgtggccctggccactaaagcttcagactcaagtacccattctgttttcccccagcaacgcccctccaaacctccagcctccctgtctccagctgcctgggcccggaagggctttggttccttctctgggtctgattttctcactgaactccaccgaccaactgccctaagcccccagggcctccagggcccaggttcgagacccaaacccccaaaatccaaaacttctcttgaaaagttcagggaccgtccaggggagatggggaggagatatggagtgagtcacctgctccagaagatgccagcttctctctccagggtgcttagttggctttgcccacccctcactccccagggagctctggggacagcttcctcacacccctgtcccacccacacagctgccctagctgaccccgagaagtgctcttggctgacccctctggtgtgtggtgaggggctttctcttccccttcctgtttcagacccccccatttcccgcacatggtgtggggggctgggggaggtccaagcagagtgttttattattatcgctttatgtttttggttattggtttttttgtatagacccaaagcaagaaaataaaaataacacggatgaa

SEQ ID NO: 53989 - DNA, 670 bp, Homo Sapiens
taagaccctgtctctattaaaaaaaaaaaatcaacccttcttccccaccaaaccacccaactcctctctactcttatccttttatcctctgtctctgcttatcacctctcttgcgtatttctggatctccttccctcctttctcgtccaaatcatgaaatgtttggccttagtcaatgtctatgcccgtcacataacagccgaggcaccgaggcccacagggaagcagctgggagcttggaaacctggtctcttgaatttcaaacctggtttcttacaggtggttgtctggggtgggtggagtggcgacaggatagagctgaaggactatgcaaatgaggaagtaagtcagggcgggctttgagaaggggacccatatcctacaggcaaaaagcaggctaggtgaccttgggacactacgctaagggagggaggctaaaggcggccaggtttgcagtgcgggaagatgagcaggccagtgggaggaggggcagggcagggctgtagttggtgactgggtgttcattttagctctaagaaaaaaaatcagtgtttcgtgaaggtgttggagaggggctgtgtctgggtgagggatggcggggtactgatttttttgggaggttatgagcaaaaataaaacgaaacatttcctctggaaaaaaaaaaaaaaa

SEQ ID NO: 53990 - DNA, 817 bp, Homo Sapiens
ggacgcgtgggtgaggatagaagtatctgcctgcagccaagacttcattttgatggcaaatacattgtctgtagttcagcacttggtctctaccagtgggactttgccagttatgatattctcagggtcatcaagactcctgagatagcaaacttggccttgcttggctttggagatatctttgccctgctgtttgacaaccgctacctgtacatcatggacttgcggacagagagcctgattagtcgctggcctctgccagagtacaggaaatcaaagagaggctcaagcttcctggcaggcgaagcatcctggctgaatggactggatgggcacaatgacacgggcttggtctttgccaccagcatgcctgaccacagtattcacctggtgttgtggaaggagcacggctgacaccatgagccaccaccgctgactgactttgggtgccggggctgcgggttttgggtgcaacctctgcggcagccgactgcatgaaccaaagttctcacctaatggtatcatcacgcagtgcacaatcatttatctatgttttgccaggggccagggctcggggtgggggagggcttgttttattgacatacaacgcagcatgctaatggggtacaccattgacttcatttgtacttagttatgttggtcagtgttagaggatgcattttgggttcatctttcttgagtggagtattggttttaagtaaagaaagttaaatgatccattaatctgctaattggttgccctatgaatcacattgtctgttattaaagccttttacccttaaaaaaaaaaaaaaag

SEQ ID NO: 53991 - DNA, 831 bp, Homo Sapiens
  misc_feature (794)..(794): n is a, c, g, or t
ccgagcccctcttcactgacgagttctaccccaacttcgcagagggcatcgctctttcagacccggttgcaaaggagagctgcatgctcaacctgctgctgtccctgccggaggccaacctgctcaccttccttttccttctggaccacctgaaaagggtggcagagaaggaggcagtcaataagatgtccctgcacaacctcgccacggtctttggccccacgctgctccggccctccgagaaggagagcaagctccctgccaaccccagccagcctatcaccatgactgacagctggtccttggaggtcatgtcccaggtccaggtgctgctgtacttcctgcagctggaggccatccctgccccggacagcaagagacagagcatcctgttctccaccgaagtctaaaggtcccagtccatctcctggaggcagacagatggcctggaaacctctggctaatcgggccatccgtagagcgggaaccttcctgaggtgtccttgggccacccccaagtgttgggccatctgccaagagacagcgacccaaagccgaaggacaggtggcctgggcagatctcgcccaggtctgggagccccaggctggcctcagactgtggttttttatgtggccacccgagggcgccccaagccagttcatctcagagtccaggcctgaccctgggagacagggtgaagggagtgatttttatgaacttaacttagagtctaaaagatttctactggatcacttgtcaagatgcgccctctctggggagaagggacgtgacnggattcctcactgttgtatcttgaataacgctgctgc

SEQ ID NO: 53992 - DNA, 585 bp, Homo Sapiens
  misc_feature (561)..(562): n is a, c, g, or t
  misc_feature (566)..(566): n is a, c, g, or t
  misc_feature (576)..(577): n is a, c, g, or t
  misc_feature (581)..(582): n is a, c, g, or t
  misc_feature (584)..(584): n is a, c, g, or t
agaggtggcccgtaagctggtcatcattgagagcgacctggaacgtgcagaggagcgggctgagctctcagaaggcaaatgtgccgagcttgaagaagaattgaaaactgtgacgaacaacttgaagtcactggaggctcaggctgagaagtactcgcagaaggaagacagatatgaggaagagatcaaggtcctttccgacaagctgaaggaggctgagactcgggctgagtttgcggagaggtcagtaactaaattggagaaaagcattgatgacttagaagacgagctgtacgctcagaaactgaagtacaaagccatcagcgaggagctggaccacgctctcaacgatatgacttccatataagtttctttgcttcacttctcccaagactccctcgtcgagctggatgtcccacctctctgagctctgcatttgtctattctccagctgaccctggttctctctcttagcatcctgccttagagccaggcacacactgtgctttctattgtacagaagctcttcgtttcagtgtcaaataaacactgtggtagctnnaaanaaaaataaannaaannana

SEQ ID NO: 53993 - DNA, 698 bp, Homo Sapiens
  misc_feature (24)..(24): n is a, c, g, or t
  misc_feature (621)..(621): n is a, c, g, or t
ttttttttttttttttctcttggnaccattggtattataataaagagcaatttgtaactgagtggcactaatggaagaaagtgctgctcaaaggaagtatgaagttatatatttaattttttaattttaatttttaatttttttgctgtgaaggtcaagctgaaatttaccatacatatcatacttgctcatttgtttccctttttgactgtatgggggttcccacactcgtgcatacacacacatccatacactctgacaatctccacgctagtgtgaacgcctctgtcccgaggcgcagcaataataaggcagctgttgaatgtgaagggtccctttggaaaattaacctactgggagggttcttgccagacagaactacagttccattgtctcgtggtcttgtaatgcactggtaaaaacaaaataaatagatgaataaataaagagtgagagaagagagaatcaggtaccttttttaaattaaaggactttgttactttagccacaaagctaaaacagcattacctcagctctaaactagccttgaagtttacagacatgactttgtaaatgtattgtttttctttgttgtgatgtccttttatttttttctttganaactgctatcatgtaagataaaatgtaaattgctgcccactgtagtaatgatgcttttaatacaagtgacccatgat

SEQ ID NO: 53994 - DNA, 584 bp, Homo Sapiens
cagatcctggctaacgacaaatacgagaacgggtacattcacccggtcaacctgacgtggccctttatggtggccgggaaacccgagagtgacctgaaagaagtggtgaccgcgagccgcttatgtggaaccaccgcgtcctgaccttggaggtgcgagtctgggaaaggcgcgctcccggggggagcgggccccgggaaggcgacccctgccctcagtgctctctgtctctgcttccccctcgcaatgctcctctctctgtcccaccccgcgagaacactttacaacgacgaggagattcgtttccaaaccagaggagatcaattgtacttacaaagattcccatctatttaactttattaacttctaccgtgaatgactctgcaagccttgctggtccaagtgcaatatgtaattataaatatataaatagataagagcctatcaatgtatcttttgtacaatatgttgtaaaatgtagatcataggatagctgactttgacagtcacatttataaagtaattcacttaaagatatatatttttttcaaacaagttttgctacttttgaaaataaatctttc

SEQ ID NO: 53995 - DNA, 905 bp, Homo Sapiens
ggaaaagtctcttgtaatccgaatctctttttgctttcgaactgctagtcaagtgcgtccacgagctgtttactagggatccctcatctgtccctccgggacctggtgctgcctctacctgacactcccttgggctccctgtaacctcttcagaggccctcgctgccagctctgtatcaggacccagaggaaggggccagaggctcgttgactggctgtgtgttgggattgagtctgtgccacgtgtttgtgctgtggtgtgtccccctctgtccaggcactgagataccagcgaggaggctccagagggcgctctgcttgttattagagattacctcctgagaaaaaaggttccgcttggagcagaggggctgaatagcagaaggttgcacctcccccaaccttagatgttctaagtctttccattggatctcattggacccttccatggtgtgatcgtctgactggtgttatcaccgtgggctccctgactgggagttgatcgcctttcccaggtgctacacccttttccagctggatgagaatttgagtgctctgatccctctacagagcttccctgactcattctgaaggagccccattcctgggaaatattccctagaaacttccaaatcccctaagcagaccactgataaaaccatgtagaaacatttgttatttggcaacctcgctggactctcagtctctgagcagtgaatgattcagtgttaaatgtgatggaatactgtattctgtattggttccaattgcatctcccagatattgtgaaactggtccaggagaaggcaattcctatacgcagcgtgctttcaacaatacttaagaaacaaatctttgagaaacaacaatttctacttttgaagtcataccaatggcaccacatg

SEQ ID NO: 53996 - DNA, 774 bp, Homo Sapiens
atatggacttgacagttcggtccggattcccgggatgaccatttggcgctttcggccgttttggcttaatgggctgagtaggggtccaaggcgagccccagaaccactgtaccctcggcgcaaggtgcaggaccccccagtggtgcacgagctgcgggtgtccctggaggagatctaccatggctccaccaagcgcatgaagatcacaaggcgtcgcctcaaccctgatgggcgaactgtgcgcaccgaggacaagatcctgcacatagtcatcaagcgtggctggaaggaaggcaccaagatcaccttccccaaagaaggcgacgccacacctgacaacatccctgctgacatcgtctttgtgctcaaagacaagccccatgcacacttccgccgagatggcaccaacgtgctctacagtgccctgatcagcctcaaggaggcgctgtgtggctgcactgtgaacattcccactatcgacggccgagtgatccctttgccctgcaatgatgtcatcaagccaggcaccgtgaagagactccgtggggagggccttcccttccccaaagtgccaactcagcgaggagacctcattgttgagttcaaagttcgcttcccagacagattaacaccacagacaagacagatccttaagcagcacctaccctgttcctaggctctgccccagccagtccagagcctaccacagcaatacccccaacactcactccactcaatgtgcacccagcttgatgtccactggacactggcaac

SEQ ID NO: 53997 - DNA, 771 bp, Homo Sapiens
ccaagctctaatacgactcactatagggaaagctggtacgcctgcaggtaccggtccggaattcccgggtcgacccacgcgtccggaattcctctgccttgccacacaagctccggatcaaagccaaagccatgcagatcaaagtagaagcctttgataatgaatttgaggccacgcaaaaactttcctcacctattgacatgacatctaaaagacatttcgaactcgaaaagcatagtgccccaagtatggtacattcttctcttactcctttctcagtgcaagtgactaacattcaagattggtctctcaaatcggagcactggcatcaaaaagaactgagtggcaaaactcagaatagtttcaaaactggagttgttgaaatgaaagacagtggctacaaagtttctgacccagagaacttgtatttgaagcaggggatagcaaacttatctgcagaggttgtctcactcaagagacttatagccacacaaccaatctctgcttcagactctgggtaaattactactgagtaagagctgggcatttagaaagatgtcatttgcaatagagcagtccattttgtattatgctgaattttcactggacctgtgatgtcatttcactgtgatgtgcacatgttgtctgtttggtgtctttttgtgcacagattatgatgaagattagaatgtgttatcactctgcctgtgtatagtcagatagtccatgcgaaagctgtatatattgaacattatttttggtgtcctatta

SEQ ID NO: 53998 - DNA, 475 bp, Homo Sapiens
gagaattagatttctataggatttttctttaggagatttattttttggacttcaaagcaagctggtattttcatacaaattcttctaattgctgtgtgtcccaggcagggagacggtttccagggaggggccggcctgtgtgcaggttccgatgttattagatgttacaagtttatatatatctatatatataatttattgagtttttacaagatgtatttgttgtagacttaacacttcttacgcaatgcttctagagttttatagcctggactgctacctttcaaagcttggagggaagccgtgaattcagttggttcgttctgtactgttactgggccctgagtctgggcagctgtcacttgcttgcctgcagggccatggctcagggtggtctcttcttggggcacagtgcatggtggccagaggtgtcaccaaacaggcagttgcgattttgttaaccagcgacgaattt

SEQ ID NO: 53999 - DNA, 758 bp, Homo Sapiens
cttttgtgctgtgtggggatgcattgctgcctgtatttatgatcttttgccgtggttctgagcattcacctcaccatgtttacaaagaactgttttgtatatagacattttcaggcacgtgctttgcaccaaccctgcgtggctcttgtctgtgttagctgtcacggtgtgcacactaatctctgttaaagttgtctatggctgttctacttgtaagatagttttctatttccttcagtaatgtgtccacagtaccctgtatttcgagttccattatactgaagtactcatgttttaatagtgcctctccaaaggcctcaccttggacagaggtcaatccttgatgctccagcacaggtgacgtcactaattgtcactttccagtttgtttttctctattaaggaagacattttctaattgcatctccatgggctgtgagactgtgtgaagccgtttgtgtggtctccatgtaggtgctgtgttcccggcaccgccttgctctgaacactggtaattccaggtgctgcgcttggcagaggggtctcgccaaagcgcatgtgtgtgcatgtgtgaacgtgtgtgtcctttgcatggttgggcgtgggtgccttgctagggcatcagcaggacattgtgtgtatagttacaatgcttccaaactggaactctacattttgtatcttttaaagctcctataagtaaaaataactattggctttattaaaaatatacatttaataataaaaaaaaaaaaaaa

SEQ ID NO: 54000 - DNA, 522 bp, Homo Sapiens
gcacgaggttcctcctggcctttcctggttttcatcaggaaggaaatgacaccaaatatgtccgcagaatggacttgatagcaaacactgggggcaccttaagattttgcacctgtaaagtgccttacagggtaactgtgctgaatgctttagatgaggaaatgatccccaagtggtgaatgacacgcctaaggtcacagctagtttgagccagttagactagtccccggtctcccgattcccaactgagtgttatttgcacactgcactgttttcaaataacgattttatgaaatgacctctgtcctccctctgatttttcatattttctaaagtttcgtttctgttttttaataaaaagctttttcctcctggaacagaagacagctgctgggtcaggccacccctaggaactcagtcctgtactctggggtgctgcctgaatccattaaaaatgggagtactgatgaaataaaactacatggtcaacagtaaaaaaaaaaaaaaaaaaggctctctcag

SEQ ID NO: 54001 - DNA, 491 bp, Homo Sapiens
tcaaaaaaaaaaaaaaaattgtgttgcctcatacgaaatgtatttggttttgttggagagtgtcagactgatctggaagtgaaacacagtttatgtacagggaaaaggattttattatccttaggaatgtcatccaagacgtagagcttgaatgtgacgttatttaaaaacaacaacaaagaaggcattattcaggatataactagaaaaaggatgtctttttttttttttttactccccctctaaacactgctgctgccttaattttagaaagcagcttactagtttacccttgtggtataaagtattataaattgttgtgaatttgaagaatccgtctactgtattattgctaaatattttgtttatactaagggacaattattttaagaccatggatttaaaaaaaaaaaaaaaaactctgtttctgcaggggatgatattggtgagttgccaaagaagcaatacagcatatctgcttttgccttctg

SEQ ID NO: 54002 - DNA, 794 bp, Homo Sapiens
gggtatggctctaatcttacccttagccctcccaaccattatgctgtactatctacccataaatacctccaggaaacattcccctcttggtaatttgtccttctatagaagcttcaaagattaaatcaaattaattttcaaaaaaaatttttttttagaaatgttattttccctgtgatagaggatgacttcccagtttcaccaaagtctgtttatatcaacacacacaaaatggaataattctgagtcactaggcaatcaatctactgtggttttactatgtaaggtgaaaattaactggaacgatgtttgtttgctatacttacatagtcaaactttacaagccatgaaattaattgcactctttgtatttgttgttaaatgcctaagaagttttctaaaaattttgtaaaggcactgtcagagaatctggagttgaatgattattccagatactgtataacctgcataactttttgtctttaagtcgtgtttgtaaaagaagtaattgctagaaacatttgataatgtacaaagtagtctataatgactgttcagtacatttttaatatttttttggttatatccaactttttgtaaatatactggaagcttgataataaaatgtattttcctatcaccatacttttccatgtgaaaacctgagcctatttccagtataagtatccaaagaaaagtttttacctggttggggttattttacccgaactttgggaaaaaaaactattttggaaaacggtatttggtaaatggaaactaatgtgtaaatttaa

SEQ ID NO: 54003 - DNA, 832 bp, Homo Sapiens
ctttgtatagaaggtttgggggctgtggggaaggagagtcccctgaaggtctgacacgtctgcctacccattcgtggtgatcaattaaatgtaggtatgaataagttcgaagctccgtgagtgaaccatcattataaacgtgatgatcagctgtttgtcatagggcagttggaaacggcctcctagggaaaagttcatagggtctcttcaggttcttagtgtcacttacctagatttacagcctcacttgaatgtgtcactactcacagtctctttaatcttcagttttatctttaatctcctcttttatcttggactgacatttagcgtagctaagtgaaaaggtcatagctgagattcctggttcgggtgttacgcacacgtacttaaatgaaagcatgtggcatgttcatcgtataacacaatatgaatacagggcatgcattttgcagcagtgagtctcttcagaaaacccttttctacagttagggttgagttacttcctatcaagccagtacgtgctaacaggctcaatattcctgaatgaaatatcagactagtgacaagctcctggtcttgagatgtcttctcgttaaggagatgggccttttggaggtaaaggataaaatgaatgagttctgtcatgattcactattctagaacttgcatgacctttactgtgttagctcttttgatgttcttgaaattttagactttctttgtaaacaaataatatgtccttatcattgtataaaagctgttatgtgcaacagtgtgggagattccttgtctgatttaataaatacttaaacactggaaaaaaaaaaaaaag

SEQ ID NO: 54004 - DNA, 1045 bp, Homo Sapiens
  misc_feature (880)..(880): n is a, c, g, or t
  misc_feature (997)..(997): n is a, c, g, or t
tctgcttccgggtcggagccatggcggtggcaaattcaagtcctgttaaccccgtggtgttctttgatgtcagtagtggcggtcaggaagttggccgcatgaagatcgagctctttgcagacgttgtgcctaagacggccgagaactttaggcagttctgcaccggagaattcaggaaagatggggttccaataggatacaaaggaagcaccttccacagggtcataaaggatttcatgattcagggtggagattttgttaatggagatggtactggagtcgccagtatttaccgggggccatttgcagatgaaaattttaaacttagacactcagctccaggcctgctttccatggcgaacagtggtccaagtacaaatggctgtcagttctttatcacctgctctaagtgcgattggctggatgggaagcatgtggtgtttggaaaaatcatcgatggacttctagtgatgagaaagattgagaatgttcccacaggccccaacaataagcccaagctacctgtggtgatctcgcagtgtggggagatgtagtccagacaaagactgaatcaggccttcccttcttcttggtggtgttcttgagtaagataatctggactggcccccgtctttgcttccctgcctgctgctgccccatttgatcaagagaccatggaagtgtcagagattcagaatccaagattgtctttaagttttccactgtaaataaagtttttttgtatgcgtaaaaaaaaaaaaaaaaccaccctttcttgtacgaaagaaggcattctaaaaaaacctttccttccttaatcttgtgcgacccgatctctcactcacgtgtccaatggacaagcttaacctttcactccganagaatgtcacggaagctgttagtcaaaaccaatctaaagttagcgcttcacaaaatccgcaacatccaccgcttttgcaccgttcttttcattgttgttcttgtggtgaagatatanatgcctattacgatgtcatatacttcactctgatccagacctcgaaaa

SEQ ID NO: 54005 - DNA, 785 bp, Homo Sapiens
cacgaggccagtcctagctgcacagggcagctgggcccaaccctgtctgtagagggccctggtgtttctagcactggcctgcacggtgggccttgctggggacggggggccccagtcagcctctctcccagtctacccagagaagccccttccccatgggaagacgaggccctcgggcccagcccccacagtgctgtctgatctgtgctttccagctcaccccccacactcactcctgagacccctggcctccggcgtcagcctccagcctctgttcccctagtaagtgccttccatgtcggcctctaaccccaggccccgaggacccagacccagtggggaggcggacgttccagccggcatggctgggaactgcagacctgtcctcctggtgggtccaggggcccctccagcttgtggagccccacactggggtgccgcctgcccgtctctctcccatggagccccagccccctttgggcccagggacaccagccaggctctgtgctgaccctcctgttgcacccagccctggtctcagcagcgaccacccctgcctccaccctctgagctttgcatgttccactaaccccgggcgggtggcaggtggaggtgtcaggctgctggcgcctctgcaagggcagaacactaacctgaccgtgggcggggccttgcggtatccgcccccataaagcattctcaccttaaaaaaaaaaaaaaaaaaagctcctcgcgccgccctactagacgtatgtagtcttaggagtattattgaaagagatgat

SEQ ID NO: 54006 - DNA, 449 bp, Homo Sapiens
cgtccggatcatcgcgctgggcggcgtcatcgtagcctcggtactggtcttcatcttcgtgctgctaatgcgctacaaggtgcacggcggccagccccccggcaaggccaagattcccgcgcctgttagcagcgtttgctcccagaccaacggcgccctgggccccacgcccacgcccgccccgcccgccccggagcccgcggcgctcagggcccacaccgtggtccagctggactgcgagccctgggggcccggccacgaacctgtgggaccctagccaggcgccccccccctaagggtcctctggccccacggacagcaggacccggacaccctgtgggacctggcctcaaactcaccaaatcgctcatggtttttaaaactctgatggggagggtgtcggggacaccggggcaaaacaagaaagtcctatttttccaaaaaaaaaa

SEQ ID NO: 54007 - DNA, 554 bp, Homo Sapiens
ccgataggtgtggcagaccaaatggacatttctctaaaaaaccagtatatatagtctgttcatatgtaaaattcaatggaagagaggtggaacagtgctgttattttaaacagaaggttgtattattatgttgttttgtttttttactattgcttgattaaatttggcatttaaatagtggtggaaatattttatataattttcattttttggttgtgcagttccttggctactgtttttcttttacttcagttttttaaaaatctcaaatgaaaaagtcttcgatacaatattgttaagctgtattataagtattgttacacagggttatgcaattcccggcctggagcatttttgaaattcaaattgtctgtcctgtggagcaggcagtgattttgttccaaaactttgtatacacatttggagaaaagtactttatattttcagtgttttgtctgattttaatgtccgttcttagccaagctgctagcaggtgttaattggatccctttccttcactgaaatggaagagtttataagcttacgttagtatt

SEQ ID NO: 54008 - DNA, 609 bp, Homo Sapiens
atccaaaccaagccgatgaagaagcaatgacacagatcatccgagtgtcctaaccccacgccatgtgatggagctgatcaaggtcatgtttctcactgttccaggaaattgatcaactcttccaatgggacattgatgatcacattctgccctttactacaggacagaaaccacttagtttttaataagtggctcagtattacaattgcagcgatgcctggcaaattgaagttgcaagcctttgtcttactctttcagtcaggacctatttcagactgttgatgacattgacatttcatggattcggatgatgcaaggagacacatgccaccccagcagtacacaaagcacttaccttgactggtgaagtcagccagccatctcagcagggaagaacaaccttctcaaccaaaactgcaatcaggaaagcagcagcccactccttcccatggaatctagacagcatttatccctctggtgggggaatctcacactgactaactgaatggacgctttgtattcagagatggcttccaggcaaggaagttctatcttgtgatacggaaacaataaattcctgagatacattcttccaaaaaaaaaaaaaaa

SEQ ID NO: 54009 - DNA, 583 bp, Homo Sapiens
acattatattctttcagacatttattttagtccttcatttcagaggaaaaagaagcaactttgaagttacctcatctttgaatttagaataaaagtggcacattacatatcggatctaagagattaataccattagaagttacacagttttagttgtttggagatagttttggtttgtacagaacaaaataatatgtagcagcttcattgctattggaaaaatcagttattggaatttccacttaaatggctatacaacaatataactggtagttctataataaaaatgagcatatgttctgttgtgaagagctaaatgcaataaagtttctgtatggttgtttgattctatcaacaattgaaagtgttgtatatgacccacatttacctagtttgtgtcaaattatagttacagtgagttgtttgcttaaattatagattcctttaaggacatgccttgttcataaaatcactggattatattgcagcatattttacatttgaatacaaggataatgggttttatcaaaacaaaatgatgtacagatttttttttcaagtttttatagtttgctttatgcca

SEQ ID NO: 54010 - DNA, 637 bp, Homo Sapiens
cgcgtccgcagtacaagagggcctggggcacgatgtggtcagccaggaagcataggatgccatttcttttatagattccttggtatttctggtggggtaaggggcaggccagggctgttcacgcccatgagggaagaggaaagtgccactgggcaaggtgtcccaccctcccctcctgaccctcctacgaggcttatcctggcaatggggtagtcactgccacccttccacacacacacacacacacacacacacacacacaaaaatcccttccttgtgggattcttgggcatctcctgcctccctcactctcacggtaattaatgtcttaattggctgttgcctggggaacaggagagctgctgcaggcagatgacctcatggggggtggagggaggtgaggtgcccaggtggctatttgccctgcagagctgggagtttcacccccaccccccaccctgttctctccttacctttggcatcctttggcctggtggggaaacagaggcccagggtggagacctaagcgggtataagaccaggtggcctgctccttttctgggccctagcacaggtgggtaacccccacccaacccagctcctgctgctgtcccagtcttgggctggggcctggaaa

SEQ ID NO: 54011 - DNA, 674 bp, Homo Sapiens
ccgggatgaggccacagacaggttgtcatcagcttgtcccattcaagccaccgagctcaccacagacacagtggagccgcgctcttctccagtgacacgtggacaaatgcgggctcatcagcccccccagagagggtcaggccgaaccccatttctcctcctcttaggtcattttcagcaaacttgaatatctagacctctcttccaatgaaaccctccagtctattatagtcacatagataatggtgccacgtgttttctgatttggtgagctcagacttggtgcttccctctccacaacccccaccccttgtttttcaagatactattattatattttcacagacttttgaagcacaaatttattggcatttaatattggacatctgggcccttggaagtacaaatctaaggaaaaaccaacccactgtgtaagtgactcatcttcctgttgttccaattctgtgggtttttgattcaacggtgctataaccagggtcctgggtgacagggcgctcactgagcaccatgtgtcatcacagacacttacacatacttgaaacttggaataacaagaaagatctatgaacagaacacaaacaaacacagcaagctaacaaaaaacaaacagagaaaaaaagaaaacaaccaaaaacaacaaaccaagaaggggg

SEQ ID NO: 54012 - DNA, 554 bp, Homo Sapiens
acagtttctcctacatctttaaatgcatctagggaatggattcacaaacgatgtgaaaacattattgagtgttgtagccactagaattttaaaatcaagttggatttatagagtttgactagttttttcgattagatttgtatttgttataaacttgtttatggagtttgactaattttttctattcaatttgtatttgttaaactcaagccagggttgaaagacactgcatacgtttgtattattagttagaaggcatgaagacttttttccctgcatggagagtgtcataagttattgttttgcatatctactgcatgccaagcactttctgcatcatctaatttagccctcacagccactgggtcaagatgtccaattttccagagtaaggatagaggagtcaaattcaaatacaggttttctgacattaacttatgtgatgacttgatcgaggcaggcttttccagcatcactgtcctggttccatctctgctatatgggaatgaaaataaagaaacatatttcttggcttgtctaaaaaaaaaaaaaaa

SEQ ID NO: 54013 - DNA, 651 bp, Homo Sapiens
ggctttgtccctcgcccgcttcctccctctgcggggaggacccgggaccacagctgctggccagggtagacttggagctgtcctccagaggggtcacgtgtaggagtgagaagaaggaagatcttgagagctgctgagggaccttggagagctcaggatggctcagacgaggacactcgcttgccgggcctgggcctcctgggaaggagggagctgctcagaatgccgcatgacaactgaaggcaacctggaaggttcaggggccgctcttcccccatgtgcctgtcacgctctggtgcagtcaaaggaacgccttcccctcagttgtttctaagagcagagtctcccgctgcaatctgggtggtaactgccagccttggaggatcgtggccaacgtggacctgcctacggagggtgggctctgacccaagtggggcctccttgtccaggtctcactgctttgcaccgtggtcagagggactgtcagctgagcttgagctcccctggagccagcagggctgtgatgggcgagtcccggagccccacccagacctgaatgcttctgagagcaaagggaaggactgacgagagatgtatatttaattttttaactgctgcaaacatgtacatccaaattacaggaaacaaaat

SEQ ID NO: 54014 - DNA, 489 bp, Homo Sapiens
ctcagcctgaccagcgccaccgccgcccagcccacatgggacgtgggttgctgcttccagctcttgttccggatttcttttcttttctttttttttttttttaagacaaagtcttgctctgtcgccaggcggaggttgcagtgagcggagatctgggcactgtactttagcctgggcgacagagagacccatctcaaaaaaaaaattggaacctgagaagggggtcgtggggtccccggggcccaccgtctgcacttggcatctgaagtcggggtggtcttgtgggactgaccccttaccctgtgggttctgtactagctccgggcaattggtgacagaatcgagttaaattgtaggacatcgcgttggtgtctgagagggagttggagagctggttggtgtggagggaaaggcttacacacatgtgatttcagaagcgttctgtgggtagaggaatcgttttctctttgagactgttatgagtatgta

SEQ ID NO: 54015 - DNA, 540 bp, Homo Sapiens
ttctcagaattacacgcacgaccatccaaacattggctccatgccagggctgtgactgcagcctgtgtaggaccatggggagttcagagtcatcatacaaggcagccaagaactgccataaacactacacagatggagggcatgggataggacaggagaggaggtgatgtacacttagaggtaactaaggctagtttgaaaaccgtgaattaagatattcttatcagtataaaaacactgagattgcttacctcccaaattgctttattgtattaactctcatgcttcagctcttggatttgttgtttctaactaacatgtcatgtacaccaaacattttataaatcaatcagtaaatattttgtaagacccaaaatcctggcatattgccaggtctgtggatttgcctgttgggtgttgggatgggatatcagaggaagaagcatacaagtgggaaaaactgtgattagaaagggaaaaataggcatttccacagtactattaagagaggcatgataatgccattttttttcttctgta

SEQ ID NO: 54016 - DNA, 575 bp, Homo Sapiens
acagaaggaatctgtgcagatgagcagtcacactgttactccacagcggaggagaccagctcagaggcccaggaatcggagcgaagcagagaggtggagaactgggatttgaacccccgccatccttcaccagagcccatgctcaaccactgtggcgttctgctgcccctgcagttggcagaaaggatgttttgtcccatttccttggaggccaccgggacagacctggacactagggtcaggcggggtgctgtggtggggagaggcatggctggggtgggggtggggagacctggttggccgtggtccagctcttggcccctgtgtgagttgagtctcctctctgagactgctaagtaggggcagtgatggttgccaggacgaattgagataatatctgtgaggtgctgatgagtgattgacacacagcactctctaaatcttccttgtgaggattatgggtcctgcaattctacagtttcttactgttttgtatcaaaatcactatctttctgataacagaattgccaaggcagcgggatctcgtatctttaaaaagcagtcctcttattcct

SEQ ID NO: 54017 - DNA, 648 bp, Homo Sapiens
ataccaactcgcttaatcaagtaccaggagaacaagaaaggagaactaggtattctccaggatgcggaaattgaattttttccagatccatcttggaaaaatgtggattggatctacgtggtaccatggggagtatgtaaactactgaaatatattaaggatacatataataaccctgtaatttacatcactgagaatgggtttccccagagtgacccagcgcctcttgatgacactcaacgctgggagtatttcagacaaacatttcaggaactgttcaaagctatccaacttgataaagtcaatcttcaagtatattgtgcatggtctcttctggataactttgagtggaaccagggatacagcagccggtttggtctcttccacgttgattttgaagacccagctagaccccgagtcccttacacatcggccaaggaataagccaagatcatccgaaacaatggccttgaagcacatctgtaggcaagatggctgagaaatacaggagaggcgtctgcttttggaaaggaaatctgctttggtgatgatctttcaggcaatctcaacttacttctttaatcaacatttaatatcaatggatctgtgattaaatgtctgaatatgtaatgcctcgtgaagtattta

SEQ ID NO: 54018 - DNA, 625 bp, Homo Sapiens
  misc_feature (609)..(609): n is a, c, g, or t
tagttgaaattagtgcagaaagcactcagatgtactagattttcattgttcattgatatgctcagtatgctgccacataagatgaatttaattatattcaaccaaagcaatatactcttacatgatttctaggccccatgacccagtgtctagagatattaattctaaccagttgtttgcttttaaatgagtgatttcattttgggaaacaggtttcaaatgaatatatatacatgggtaaaattactctgtgctagtgtagtcttactagagaatgtttatggtcccacttgtatatgaaaatgtggttagaatgttaattggataatgtatatataagaagttaaagtatgtaaagtataacttcagccacatttttagaacactgtttaacatttttgcaaaaccttcttgtaggaaaagagagctctctacatgaagatgacttgttttatatttcagattttattttaaaagccatgtctgttaaacaagaaaaaacacataagaactccagattcctggttcatcattctgtattcttactcgctttttcaagttatctattttgttgcataaactaattgttaactattcatggaacagcanacgcctgtttaataaa

SEQ ID NO: 54019 - DNA, 690 bp, Homo Sapiens
ccacgcgtccggtgaggtctgtgtgcatgtgtgtgtgtatgtgtgtgtgcatgcgtgtgtgtgttgtggggatctggcctggcccttggggatggggctgctggggactgccccccttcccgccgtggccaggcgctctgtgtgctgtgtgtgccccaggctctgttgaccccgtccaggaactaacttacccagcttggtctctcctgagtcctccaccctggcctgggattggccagggagcagggcgggcattgggaccagtgtggagcctgagggtgcctgccctgctctggagggagggccaggagctgccacacccccaagtcctctcagggcccaccctcctttttcagcctctgcataaggcccctgggtacactgcagaagccccatccttcccgcctccgggcataaggcccctgaccacacttcagaagccccatcccccctgccaccgggcgatccctgctgtgagccgaagctctccctgccccgccctggccatgtgatcgtgttggtgacagaccctgatgtgctggtgctgtgtccccaaaaccggggccctccacagaggccccttcccagcgacactacctggggctcaggcctggacccccccagttcacggttgctcctgggagctgcccctcccgtcacatcaaaaccttggaagctgctgctgctgct

SEQ ID NO: 54020 - DNA, 717 bp, Homo Sapiens
ggcacacagattttgaaaagggattcattatggctgaagtaatgaaatacgaagattttaaagaggaaggttctgaaaatgcagtcaaggcttgctggaaagtacagacaacaaggcagaaattatattgttgaagatggagatattatcttcttcaaatttaacacacctcaacaaccgaagaagaaataaaatttagttattgctcagataaacatacaacttccaaaaggcatctgatttttaaaaaattaaaatttctgaaaaccaatgcgacaaataaagttggggagatgggaatctttgacaaacaaattatttttatttgttttaaaattaaaatactgtgtacccccccccccccatgaaatgcaggttcactaaatgtgaacagctttgcttttcacgtgattaagaccctactccaaattgtagaagcttttcaggaaccatattactctcatgatacttcattaatctccatcatgtatgccaagcctgacacatttgacagtgaggacaatgtggcttgctcctttttgaatctacagataatgcatgttttacagtactccagatgtctacactcaataaaacatttgacaaaaccagccttggtgtgtttggggatgtctgtattgactgactgtggtgcgctgaatgcgatacggcacctggtggttgctgattacagaattttaaggcgtgtgtatgaca

SEQ ID NO: 54021 - DNA, 597 bp, Homo Sapiens
gaaaaagcgcaaatggtttggcaaaagcgagaccatacagacagattacattgtttatatggatgaactctcctccttcattggggcaaagcccaacatcccatggctgtttctcacagatcccaaattggccatggaagtttattttggcccttgtagtccctaccagtttaggctggtgggcccagggcagtggccaggagccagaaatgccatactgacccagtgggaccggtcgttgaaacccatgcagacacgagtggtcgggagacttcagaagccttgcttctttttccattggctgaagctctttgcaattcctattctgttaatcgctgttttccttgtgttgacctaatcatcattttctctaggatttctgaaagttactgacaatacccagacaggggctttgctatttaaaaattttttcacaccacctgcttttctattcagcatcttttgcagtactctgtagacattagtcagtaatacagtgttatttctaggctctgtagccactttaagaatcatgtcatgatcttaagagagcactaatcatttctggttgagttccactcacttcgacatgttcct

SEQ ID NO: 54022 - DNA, 701 bp, Homo Sapiens
ggagatcctcggggtcccggcacgccaggaaccaacatgcctgcaaccttcggccatctggcaggtggctacgacgcccagtactacgggtacctgtggagcgaggtgtattccatggacatgttccacacgcgcttcaagcaggagggtgtcctgaacagcaaggttggcatggattacagaagctgcatcctgagacccggcggttccgaggatgccagcgccatgctgaggcgcttcctgggccgtgaccccaagcaggacgccttcctcctgagcaagggggcaggtcgggggctgcgagcccgagccgcaggtctgctgaggcctggcactgcgactgcccagtctggcctgcgctcccgccgccctggtgccttagcccccggcacaggatggggcaggctctggcacagtgcctgggactggcagggtggctgagcggctgtcttgcctcttgtcattgtctgtccccacccggtcgtggcccacccggctagagacggcgtcctcaaggcatctggagggctttcgtggctgccagggcctggtctttgttgcactaacacgtctcctctctgggaaacgtcccttgtcaggagacggctcttctttgaaatgaggtcattacaagggaaacagaaaaacgcaccaccacacctgatccacaccgcgaaacacacatggcctagcacaccaga

SEQ ID NO: 54023 - DNA, 1150 bp, Homo Sapiens
  misc_feature (621)..(621): n is a, c, g, or t
tgatgtgaagtgtccagattctcagatgtttgttgtgtggattttgtttagttgtgtgtttttttttttttcagtgaatgtctggcacattgcaatcctcaaacatgtggttatctttgttgtattggcataatcagtgacttgtacattcagcaatagcatttgagcaagttttatcagcaagcaatattttcagttaataaggtttcaaaaatcatgtaaggatttaaacttgctgaatgtaaagattgaacctcaagtcactgtagctttagtaattgcttattgtattagtttagatgctagcactgcatgtgctgtgcatattctgattttattaaaataaaaagttgaactgcacagtctcaaaaaaaaaaaaaaaaaaaaaaaaaaaaaaaaaaaaaaaaaaaaaaaaaaaaaaaaaaaaaaaaaaaaaaaaaaaaaaaaaaaaaaaaaaaaaaaaaaaaaaaaaaaaaaaaaaaaaaaaaaaaaaaaaaaaaaaaaacaaaaaaaaacaccccacaacacaccaccaaaaccaaaaaacccacaccccccaaactttctcaatcacaaccacctccttaaaaaaaatattttttttactcccctatcacaccnaaactttacatcttctaaataaatacaaccacctaacctacttactttaaataaactcccctacctcaaacatatttaattatatttaccaccttcactcaacctccttcccaataattcctaaaaaaaaaacttatcctactaacatttccaaaaacaaattcttagactccaattttccacaatctttccctctaaaaaaatactcccaaactttacaaccatttcttttccccccttcattactcccctatattaaaaaaaccccccaccaacatataaaaaacccccctccccctcacaataaaacaccccacaccaccacacaatcaatttcaacaatttattatccccttaaaaacacccacacccacacctcaaactttaaataaaaataacaacaatctcctacttcctcaccacacactcttattacttccccaaacacaccaatcttccctacaatcccccacaactttttctccccaatatcactcctcaaccaaaaacccacaacccaacccacacc

SEQ ID NO: 54024 - DNA, 825 bp, Homo Sapiens
aatctgtataagtgtgtccttatacaaattttaggccataaacaagtgtaagtttgtacaatttcataacatgtatagctgagtttttatactttatatgtaggaagctaatataaaatagttatgtaactgtgattttggttttcagttatgtgacttgttttttccacctgaaatgtgtcagttgttgttcctgtactcggtgccctttctttttactctcacgtggtcccaggttctggagttcttgtcctggttctagctgctcacatgtacaaatcacttctaggcctcagtttctgcgactatgaaaattactagattgcactagcttgtctctaaaattgctgtgactccagatactttgcactgaagagaatctagggtgtttgatatctgtttcagttagggctaatgggaaatgtctagtaagataaatgtcaacttttgctgacttattatgagatgaaaaacaaaggagagtgggcctaactcatgtgagcttgataactgatgaactcattgggagcattttaaacttttctacataaataataaatgaagcactaatgaaaagttaaaaagccaaccaaacataccaaccaaagatatcacaacacaacaacaaaaaaaggggggggggggaaaaaatttcccggagggggcccagttatcctctacccctttttttgttccgacgggccctaaaggagggtatataaaaagagagcggggcggcttaacacgcgcgggggaaacagcggccgggccttgggaggaccctccggggtggcatcttggccacccacaaaatacgcggggata

SEQ ID NO: 54025 - DNA, 476 bp, Homo Sapiens
ccggaccaacgtttgactacttacagagcgtcctggatgatttctacacagccacggaagggcaataccagcagcagccttagagcacagggagacccgtccatttggcaggggtggctgcctcatttagagaggaaaagtaaccatcactggttgcacttatgatttcatgtgcggggatcatctgccgtgcctggatcctgaaatagaggctaaattactcaggaagaacaccctctaaatgggaaagtattctgtactcttagatggattctccactcagttgcaacttggacttgtcctcagcagctggtaatcttgctctgcttgacaacatctgagtgcagccgtttgagaagaaaacatctattctctccaaaaatgcacccaactagctctatgtttacaaatggacataggactcaaagtttcagagaccattgcaatgaatccccaataattgcagaactaaactc

SEQ ID NO: 54026 - DNA, 883 bp, Homo Sapiens
  misc_feature (11)..(11): n is a, c, g, or t
acaaattttanatagtatatttccagggataggttgtcctgttcctcgaattccagctgaggccaatcctttagcagatcatgtctctgctactcgaatcttgtgtggagcccttgtctttcctactattgctacaatagttggtaaattgatgttcagtagtgttaactctaatttacaaaggacaatcttgggtggaattgcgtttgttgccataaaaggagcatttaaagtttacttcaaacagcagcaatatttacgacaggcacaccgcaaaattctgaattatccagaacaagaagaagcataaaactgacttctggttgttctgcagttctctcatccttatgaatctgttgtgttgttttgattccatcattaatgcacttgtggagacttgtgataagctgctgctcctatattttttaagaaatataataaagcacttagggcaggggaaatcatctcggtaatcatggaacctaaggatgtgatttgttttcattgtttgtatgtactacttttatggcagtcatatgaaccattatcttagcatggtaaacctgggttttgttcatattttctccagacagaaatgcaaagatcaaactgtgcaaatattaaaaaaatgcacatgctgttttattcaaatgccctcttttgtacatgttcatgttttagtgtttttctcagaatcagcaactcaaggtactatgaggattttttctcactgacataatttgattacatactaaataagaggatatgtttaatatgagggaaatgtaaattaaattaggtataaataaataaccaaaaatgtatgtaaaacattcaaatgattatctgaacaatggagattttttggggggtttttctttaa

SEQ ID NO: 54027 - DNA, 507 bp, Homo Sapiens
tttacagaataaaacttcaaataaaaccaattcattatttgtccagaaggaagcttggctgagctggccttttaacataggaatgtatttcgttggaaacattctgaaaaatctcagagaactgaacccttacaaactttgttttccctcataaccaaagcttcaggttagaagtttagaaaaatagaatggttgggtacatgatctaaatgtttaatgctaaaggtatatcgtaagggtagtgtttgtttttgaacgataatttagaagttctcatagaaagcgtataacataggtcttcagaaactataaaagaattttcatatagtattaaaatccatagactaaaatctgagaattttttaacatatgcaagtcagccaaacataagctaccaaaataaagagcaatgtgttctggctgttttatacttcaacaattttttccctaagtggtaagcaattactttaaaacatatgtttaaaaacatcggtatcgggagctgcg

SEQ ID NO: 54028 - DNA, 901 bp, Homo Sapiens
  misc_feature (764)..(769): n is a, c, g, or t
  misc_feature (774)..(779): n is a, c, g, or t
  misc_feature (781)..(786): n is a, c, g, or t
  misc_feature (790)..(790): n is a, c, g, or t
  misc_feature (792)..(793): n is a, c, g, or t
  misc_feature (798)..(799): n is a, c, g, or t
  misc_feature (802)..(802): n is a, c, g, or t
  misc_feature (830)..(830): n is a, c, g, or t
  misc_feature (870)..(870): n is a, c, g, or t
tattttttatttaaaaactttatattaaagtcatttgtaatgttattgtatagttattgtgtagcacatatggtttgcactgtatagtagcttttaaagaaaatagtcacaatacagaaaagcattttagaaatagcttcaaaagcacttgtgtatcttgattttttcttatatgctgttgcagatatatgtatatgctaaaatataacttgcaaagatgttctaaatacacatgctataagttcgccttaagatttcaattcttggataatcaggctctgtttgcactttatattttagcagatacagtctcttagtcactaggctttgcatttgtatgtagctgtatgtttccgtccattttcttaatcctgaacctgtatgttaaatgaagatggcaatttttttcttgtatagtacttgtattttctttcgctgatgcagctctgtctcaatttttaaacctttgctgttaaatgcaatactttataaagaatgaacaaaattactggaagcagtattgtaagtaatgaggtagtattaatcagttttatcttttgaaaggcacagtctaaatcgaaaccctaaactcaatgctgcaagtatgaatttaattcatatataagatctatttaaatataagagtagcaatactgcacctggtgatcacaaagataatgttctacttctgatagaaataatttctcaacaaatgttgttactatgcatgtatatggatggaataaaattcccagattgttaannnnnnaaccnnnnnnannnnnncccntnnaccannccncaaccccaaccccacacacaaaacacanaaaaccaacaaacaacacacccaaccaccacaacaaaacnccggggggggcgccgcctcttaaaatatccc

SEQ ID NO: 54029 - DNA, 572 bp, Homo Sapiens
gaaatgttctgctcgagtgtttttcaagaatcagaaacccagaccaaccatcaatgtaacttgtacacggctcatcgagaaaaagaaaagacaacaagaggattacctgctttacaagcaaatgaagcaactgaaaaaccccttggaaatagtcagcatacctgataatcatggacatattgatccctctctgagactcatctgggatttggctttccttggaagctcttacgtgatgtgggaaatgacaacacaggtgtcacactactacttggcacagctcactagtgtgaggcagtggaaaactaatgatgatacaattgattttgattatactgttctacttcatgaattatcaacacaggaaataattccctgtcgcattcacttggtctggtaccctggcaaacctcttaaagtgaagtaccactgtcaagagctacagacaccagaagaagcctccggaactgaagaaggatcagctgtagtaccaacagagcttagtaatttctaaaaagaaaaaatgatctttttccgacttctaaacaagtgactatactagcataaatcat

SEQ ID NO: 54030 - DNA, 654 bp, Homo Sapiens
ccgggaaccaccaaccacattactttgggtccagtactacttggcacaacattatgacaaaattggtcagccatctattgctttggagtacataaatactgctattgaaagtacacctacattaatagaactctttctcgtgaaagctaaaatctataagcatgctggaaatattaaagaagctgcaaggtggatggatgaggcccaggccttggacacagcagacagatttatcaactccaaatgtgcaaaatacatgctaaaagccaacctgattaaagaagctgaagaaatgtgctcaaagtttacaagggaaggaacatcagcggtagagaatttgaatgaaatgcagtgcatgtggttccaaacagaatgtgcccaggcttataaagcaatgaataaatttggtgaagcacttaagaaatgtcatgagattgagagacattttatagaaatcactgatgaccagtttgactttcatacatactgtatgaggaagattacccttagatcatatgtggacttattaaaactagaagatgtacttcgacagcatccattttacttcaaggcagcaagaattgctatagagatctatttgaagcttcatgacaacccccttacagatgagaataaagaacacgaagctgatac

SEQ ID NO: 54031 - DNA, 533 bp, Homo Sapiens
gcaccggcaaggccaacaagatcaccatcaccaacgacaagggccgcctgagcaaggaggagatcgagcgcatggtgcaggaggcggagaagtacaaagcggaggacgaggtgcagcgcgagagggtgtcagccaagaacgccctggagtcctacgccttcaacatgaagagcgccgtggaggatgaggggctcaagggcaagatcagcgaggccgacaagaagaaggtgctggacaagtgtcaagaggtcatctcgtggctggacgccaacaccttggccgagaaggacgagtttgagcacaagaggaaggagctggagcaggtgtgtaaccccatcatcagcggactgtaccagggtgccggtggtcccgggcctgggggcttcggggctcagggtcccaagggagggtctgggtcaggccccaccattgaggaggtagattaggggcctttccaagattgctgtttttgttttggagcttcaagactttgcatttcctagtatttctgtttgtcagttctcaatttcctg

SEQ ID NO: 54032 - DNA, 515 bp, Homo Sapiens
agtgagccaagatcacaggagccactgcactccagcctgggtgacagagtgagactctgtctcaaaaaaaaattaaataaattattataacctttcagaaatgctgtgtgcattttcatgttcttttttttagcattactgtcactctccctaatgaaatgtacttcagagaagcagtattttgttaaataaatacataacctcattctgaataatgtccctcattttgactataactgtgcttggtttcaaaagcaaaattaaacaaaaatctcagtcccctccgaagtgaactttgtgttaccctgcgtcagaaatgccaagttgtgtttacttttcattcagattttgtgaatatgaacatgctgttataggatctacagatgaatatttaactcaatagaaaaattattttagaacacattgtattggtattacaaccagattatattcttgacgttgacttcattaaaattatctacaatttcctaataaaaaaaaaaaaaaaaaatggc

SEQ ID NO: 54033 - DNA, 488 bp, Homo Sapiens
gcagaattaatccatcagatagaagctaacaaggaccaaagtggagctgaaagcaccatacctgatgctgatcaactaaaggaaaaaataaaagatctagagacacagctcaaaatgtcagatctagaaaagcagcatttgaaggaggaaataaagaagctgaaaaaagaactggaaaattttgatccttcattttttgaagaaattgaagatcttaagtataattacaaggaagaagtgaagaagaatattctcttagaagagaaggtaaaaaaactttcagaacaattgggagttgaattaactagccctgttgctgcttctgaagagtttgaagatgaagaagaaagtcctgttaatttccccatttactaaaggtcacctataaactttgtttcatttaactatttattaactttataagttaaatatacttggaaataagcagttctccgaactgtagtatttccttctcactaccttgtacc

SEQ ID NO: 54034 - DNA, 554 bp, Homo Sapiens
tttgtcacagagcaagctggccatgaacgaaggagagaagacgccacagatttccttccctctcctccaggagaccataagatagatcccccatcctctcagccctattcccatgcctccctctcattggaggagctgaccaaagcagccctaacgggccataacacttgaccaattcagctgctggcagagggaggaaacaagtgttttcccaagtggcattttcatctcgctttcaccctgactaaagattgtcttaagtagcagcccagcccgcccagccccaggtgggtagtggggaggagagctggcattcctccaggtggcaaatggcgactctatactctccgcccgccccagggctggatggattagaaaaatgcctatttttcttgtatcgatgtagagactctattttctcccaaagacactatttttgcagctgtttgaagtttgtatattttccgtactgcagagcttacacaaaattgaagaatgttaatgttcgagttttcttatcttgtgtttagaggttgttttttgcagatcttggt

SEQ ID NO: 54035 - DNA, 1180 bp, Homo Sapiens
  misc_feature (483)..(483): n is a, c, g, or t
  misc_feature (488)..(488): n is a, c, g, or t
  misc_feature (586)..(586): n is a, c, g, or t
  misc_feature (753)..(756): n is a, c, g, or t
  misc_feature (758)..(803): n is a, c, g, or t
  misc_feature (805)..(820): n is a, c, g, or t
  misc_feature (822)..(827): n is a, c, g, or t
  misc_feature (830)..(833): n is a, c, g, or t
  misc_feature (838)..(839): n is a, c, g, or t
  misc_feature (841)..(849): n is a, c, g, or t
gcgacgacgacaaatcaggctgcagttggccctagatgttgagtacttggggagagcagatacaaaagttgggactacaagcaagtgacataaaaagcttctcagctctcgcagagcttgttgctgctgccaaggaccaggcaacagcagagcagccttaagcatcttggaagatcccgaggttagattcttaagcaagagaagagttggacttccaggctgaaggggagaaagtgactctgttctcttagcaaccgtctgtagcaaagaagtgcttccagcatcactccagcaacacgcccatgcgtcttctctcagcgtatttgggtcttctttgcccaaaagaacacaaaagcctttttccattgtatggaagatagtttttaagacatttgaaactttctactatagtttacagaacaaattattttatttttattgtaaatcttagtgtggaagagctgatttctaaaatatgattanagtanatatatacctatgaatatcaagagtcgtctccctgagcctgtagttggaagtgacgactgtaatggaatgatgtcttgtatagaaatgcccttctctngaataaagagaactcctgggctttctaaagaggctgcgggaagccatcctccactcccactgtgtgtgagagcagtgcttctgatcctgctgtcaccccgaactctggcaggagccggcgccagtaggaaagacctccttcctaaataaaagaagtgtctcccctgnnnnannnnnnnnnnnnnnnnnnnnnnnnnnnnnnnnnnnnnnnnnnnnnngnnnnnnnnnnnnnnnngnnnnnnccnnnnggggnnannnnnnnnngaggggagcggggttttttgtggggcggcggcccccaaaaaaaccacccccggggaggcccctattttttgcccccccccttttttttggtaaggggggcgccccacattggggggggtggtatatactttttgggcggggccctctctttttttacaccgtgccccctctgtggagaaaaccctcccccctggggattttttttcgggaaaagaacaactacctggggggtgggggggatattattggtgacaacccccctcccgccgaaattctttccccccccgaggaaaatatccatttctctatatacggcaattggtgcgcgcaa

SEQ ID NO: 54036 - DNA, 867 bp, Homo Sapiens
  misc_feature (793)..(793): n is a, c, g, or t
  misc_feature (835)..(835): n is a, c, g, or t
  misc_feature (854)..(854): n is a, c, g, or t
gtaacagcagcagtgaactaaattcttcccagagtgaatctgctaaggcagctgatgatcctgaaaatggagaaagagaatctcatacacctgtctctattcaggaagagatagtaggtgatttcaaatcggagaagtccaacggggagctaagtgaatctcctggagctggaaaaggagcatctggctcaactcgaatcatcaccagattgcggaatccagatagcaaacttagtcagctgaagagccagcaggtggcagccgctgcacatgaagcaaataaattatttaaggagggcaaagaggtactggtagttaactctcaaggagaaatttcacggttgagcaccaaaaaggaagtgatcatgaaaggaaatatcaacaattattttaaattgggtcaagaagggaagtatcgcgtctaccacaatcaatactccaccaattcatttgctttgaataagcaccagcacagagaagaccatgataagagaaggcatcttgcacataagttctgtctgactccagcaggagagttcaaatggaacggttctgtccatgggtccaaagttcttaccatatctactctgagactgactatcacccaattagaaaacaacatcccttcatcctttcttcatcccaactgggcatcacatagggcaaattggatcaaggcagttcagatgtgtagcaaacccagagaatttgcattggctttagccattttggagtgtgcagttaaaccagttgtgatgctaccaatatggcgagaatcttttagacataccangttacaccggatgacatcaattggaaagagaagaaaaggagnaaagtcaaaaaaaaaaaanaaaaaaaggggcg

SEQ ID NO: 54037 - DNA, 718 bp, Homo Sapiens
  misc_feature (319)..(319): n is a, c, g, or t
  misc_feature (568)..(568): n is a, c, g, or t
  misc_feature (706)..(706): n is a, c, g, or t
gatttttgttttttatgttgtgtgtcacagagctaaaaactcagttcccaaatccccagtttatgcagcgccatcaggtattttaagctaaacttcttcacccctgagagcatgtcagctggagaaaagcagttcttccttgcccacttgagaagtgcacgcccactcacccaacatcctggtctctaggaaagcctcatgtgaggttcctctttctttcagctcagtgcccatgggcaaggatcatgatttccattccgtgttacaatgacaatatttaatgagcataaccttctcagtctcctgctctcaaatttangacagagccgctaaggacaaaacaatccctcccgtgctttatgatggcagcaggggctggggagcctctgagggactctttcattctgcagttgtctggaagcctgggtggcgtcatgagctgaaggatcatgctttcctgtcctggctccataggttataggctggctggtgaaaggttcacgtggcccaggctgaacttcattgcctagctttggatgtgctttctgccataaagactgatttttgntcgttctgagccttcaaggaatttggtttttacaactggaatatgctcctgtgtgtgttaacagatcatggatgttttatgttttcactgatcatttaaagagtttgacctcagagctccaggatcatcagtaaattnggcatggtatat

SEQ ID NO: 54038 - DNA, 643 bp, Homo Sapiens
gtgaagtttaaactctgctcaggataaggacgggaccatttttacatccatgaaaatgaaccattcacagtgcaagaaggataccaaataccatgtacataattcttgctatgaaaagtttccccattattttggtttatcttcttttgaacaaatgacatcaaacttgtgaggtgtttgcatgtggccattaccgtcattggcctgtgaagcattggacatttatagataattgatataaaagaatcgccatgcccatggactaagaacgatgctggctttcaagcaaaaaagaaaaataatcattgtttattgtatactgcctttttgtaatcctgtacaattgcatcacgggtggggataaaaagaggaatattctggtttatttcctagactgttatttaaaaaaaaaaaaaacattgtgttaggacagcatataaatgtaataagtatcacactgtatataaacatatcaatgtttgtcctgtataagaattactaaattacaaatgcaatttcatttaaacttctaggttaagtttgagcctgaaattttaatgaagtgcaatactgagtgtgcctcattatcttgcagctgtaaacatattggaatgtacatgtcaataaaaccactgtacatttt

SEQ ID NO: 54039 - DNA, 419 bp, Homo Sapiens
agaagcaattatgtaaagttgttcaatgtgacataatagtattataatggttaagtagcttaatgattaggcaaactagatgaaaagattaggggcttccacactgcatagattacacgcacatagccacgcatacacacacagacacacagatgtggggtacactgaacttcaaagcccaaatgaatagaaacacattttctggctagcagaaaaaaacaaaacaaaactgtgtttctctttcttgctttgagagtgtacagtaaaagggattttttcgaattatttttatattattttagctttaattgtgctgtcgttcatgaaacagagctgctctgcttttctgtcagagatggcaagggctttttcagcatctcgtttatgtgtggaatttaaaaagaataaagttttattcc

SEQ ID NO: 54040 - DNA, 821 bp, Homo Sapiens
agaaaatggaaagaattattactttgtatctcatgaccaaatgatgcaagacatctctaataacgagtacttggagtacggcagccacgaggatgcgatgtatgggacaaaactggagaccatccggaagatccacgagcaggggctgattgcaatactggacgtggagcctcaggcactgaaggtcctgagaactgcagagtttgctccttttgttgttttcattgctgcaccaactattactccaggtttaaatgaggatgaatctcttcagcgtctgcagaaggagtctgacatcttacagagaacatatgcacactacttcgatctcacaattatcaacaatgaaattgatgagacaatcagacatctggaggaagctgttgagctcgtgtgcacagccccacagtgggtccctgtctcctgggtctattaggcctctccccagatatctgagcataactgggagcacctcatttgtggaaaagcctctttgttatcggccttgtgtcagcaggtcatggtccctagagactacctagttgtagtgtgacctacatttataattattgtcatgtccgaatagataggaggagaaaaacaattacacactaatttaaagagacagtatcttttttaatcagttctcctaaactttaataaaatgtatctttaaatgtatgtattattcaatcctttggaatgttatatttttggaaatcatagctttttatttccaaggcccctaaaaactgcacaaaatagatgctgctttctataatctattttaataataataaacaatgattctgttaccttga

SEQ ID NO: 54041 - DNA, 919 bp, Homo Sapiens
  misc_feature (773)..(773): n is a, c, g, or t
  misc_feature (791)..(791): n is a, c, g, or t
  misc_feature (863)..(863): n is a, c, g, or t
actccttacttcggttcctctgatttcaaggccatattttaaaaaatcaaaaggcactgtgaactattttgaagaaaacacaacattttaatacagattgaaaggacctcttctgaagctagaaacaatctatagttatacatcttcattaatactgtgttaccttttaaaatagtaattttttacattttcctgtgtaaacctaattgtggtagaaatttttaccaactctatactcaatcaagcaaaatttctgtatattccctgtggaatgtacctatgtgagtttcagaaattctcaaaatacgtgttcaaaaatttctgcttttgcatctttgggacacctcagaaaacttattaacaactgtgaatatgagaaatacagaagaaaataataagccctctatacataaatgcccagcacaattcattgttaaaaaacaaccaaacctcacactactgtatttcattatctgtactgaaagcaaatgctttgtgactattaaatgttgcacatcattcattcactgtatagtaatcattgactaaagccatttgtctgtgttttcttcttgtggttgtatatatcaggtaaaatattttccaaagagccatgtgtcatgtaatactgaaccactttgatattgagacattaatttgtacccttgttattatctactagtaataatgtaatactgtagaaatattgctctaattcttttcaaaattgttgcatccccccttagaatgtttctatttccataaggatttangtatgctattatcccttnctataccctaagatgaagctggttttgggctctttgttcatcattggccctcattccagcactttacgctgncctgtaatgggatctattttttgcactggaatatctgagaaattgcaaaactagac

SEQ ID NO: 54042 - DNA, 575 bp, Homo Sapiens
tactaaccaaggggcttccttgtcagggcctggtggagttggtgggtcatcggggctcactgcctcctgcccttctctcctgtctgacccccacttagcccttctctccttgcagcctagcagtttatagttctgagatggaaagttgaagggggcaagcaagacctctcctcagcccatgcccagctgtcaggagagaggtgcagggaggaaggccttgtgctgggacaacctctctcttgccttacctcagagagggactatgccctgacccctcctttctgaaaatcagtgccctccctgttgctctaggaggctcctgctggcttggtagaagacagaattcgatctgcctgtccctttttcccctggggtttgacacacaggctcctctcagcatgaggtggagcagtgaccaggtggagcagtgaccaggacgcctctggcccagtgctgcccagcctccccgcccgctcccaggcgccccatgtcctcacaggccaggacgccatggcaggatggagaggacttggtggatttttgtttcttgcctgacctcagtttcatgaaagaaa

SEQ ID NO: 54043 - DNA, 580 bp, Homo Sapiens
agcttttcttcttctctgggcgccaggtgtgggtgtacacaggcgcgtcggtgctgggcccgaggcgtctggacaagctgggcctgggagccgacgtggcccaggtgaccggggccctccggagtggcagggggaagatgctgctgttcagcgggcggcgcctctggaggttcgacgtgaaggcgcagatggtggatccccggagcgccagcgaggtggaccggatgttccccggggtgcctttggacacgcacgacgtcttccagtaccgagagaaagcctatttctgccaggaccgcttctactggcgcgtgagttcccggagtgagttgaaccaggtggaccaagtgggctacgtgacctatgacatcctgcagtgccctgaggactagggctcccgtcctgctttggcagtgccatgtaaatccccactgggaccaaccctggggaaggagccagtttgccggatacaaactggtattctgttctggaggaaagggaggagtggaggtgggctgggccctctcttctcacctttgttttttgttggagtgtttctaataaacttggattctctaac

SEQ ID NO: 54044 - DNA, 489 bp, Homo Sapiens
tttttttttttttttgactaagaaagctcgttgtagtagaagggtggaatgtattgaaaattattagaagcagggaagtattgttagtctagcttatttcctttcagtcttttttcaatatttttataaacattgagtacttactgaatttagttctgtgctcttccttatttagtgttgtatcataaatactttgatgtttcaaacattctaaataaataattttcagtggcttcataatatttcatcatttggatatataataatttatttaaccagtctctttatttttatttatttattttgtttgttttctttgagatggagtctcgctctgtcacccaggctggagtacaatagcgtgatctcggctcactgcaacctccacctcctgggttcaagcagttctcctgcctcagcctcctgagtagctgggactacaggcacatgccatcacgcctggctaatttttgtatttttactagagac

SEQ ID NO: 54045 - DNA, 567 bp, Homo Sapiens
  misc_feature (522)..(528): n is a, c, g, or t
  misc_feature (531)..(543): n is a, c, g, or t
  misc_feature (545)..(557): n is a, c, g, or t
  misc_feature (559)..(565): n is a, c, g, or t
ccacgcgtccgccagcccctgtgtgtgctcagtgccatgaagatggagactgtggtgacctcacccatggagggtactgtccgcaaggttcatgtgaccaaggacatgacactggaaggtgacgacctcatcctggagatcgagtgatcttgccccagaccggcagcctggccatccccaagccttcaacagaagctgtgctgccacggcaggcccaggccagccagtgcccgaggccaggaaggccgggccgtggaggtcctgtccacagctggacaggagagacaccgcctgcggtggttcattcctttcagccatcgtcctttcctccggcggacagctgcttacatgttcatctcttgccaaataagggtcccctcctcactggagactacaagtggtgggtcaggtggtcctaggacccaggggaggtttaggggtcctatctcctgggggaaggggagatctaagatgtcccaggtcctgggaagtttactcaataaagctggctttcccctgcannnnnnnaannnnnnnnnnnnnannnnnnnnnnnnntnnnnnnnag

SEQ ID NO: 54046 - DNA, 642 bp, Homo Sapiens
ggagaggagaaaggcgctgcactttaaatccagtatttgtttactcatgttaaaaaaaaaaaaaacagacaaaacacactgaaatttcctaactacatctatttctataatttttaaggactcttcataaggactcttaaaataatcctgaacattagaaccctaatgttcaggaagattttaatctaagcatttttatggaaatatttttaatgcagcagctattgcacttcagccaaatgtttatttcacacaaaacggatgtaacatttcatgtgatcgtgcaccactggaacaaaaccaaaatgtgaccataactgtttaggcttctgtgtgtttgtaatatgctctaataatctgagtagaaatgcgtaatttcaattactgtataaagtttatgtttttttaagtgtgcagaatctgagagcaatggtttttacttctctgtgttaattgtaatattgactctattttgtaacttaagtttctgacgccctgacatacatttgtttgagtcgtttatgtactactgaactgtaccagttgcacatgcttgaactgtagtaatgttagcttgttctaaagctatccattgtgtcatatttactctaaaattaaagagactctcaacataaaaaaaaa

SEQ ID NO: 54047 - DNA, 822 bp, Homo Sapiens
gggctgcacattcccgttgttgcgttgcgtttccttcctctttcactccgcgctcacggcggcggccaaagcggcggcgacggcggcgcgagaacgacccggcggccagttctcttcctcctgcgcacctgccccgctcggtcagtcagtcggcggccggcgcccggcttgtgctcagacctcgcgcttgcggcgcccaggcccagcggccgtagctagcgtctggcctgagaacctcggcgctccggcggcgcgggcaccacgagccgagcctcgcagcggctccagaggaggcaggcgagtgagcgagtccgaggggtggccggggcaggtggtggcgccgcgaagatggtcgccaagcaaaggatccgtatggccaacgagaagcacagcaagaacatcacccagcgcggcaacgtcgccaagacctcgagaaatgcccccgaagagaaggcgtctgtaggaccctggttattggctctcttcatttttgttgtctgtggttctgcaattttccagattattcaaagtatcaggatgggcatgtgaagtgactgaccttaagatgtttccattctcctgtgaattttaacttgaactcattcctgatgtttgataccctggttgaaaacaattcagtaaagcatcctgcctcagaatgactttcctatcatgcttcatgtgtcattccaaggtttcttcatgagtcattccaagttttctagtccataccacagtgccttgcaaaaaacaccacatgaataaagcaataaaatttgattgttaagatacagtagtggaccctacttattcagtcaatta

SEQ ID NO: 54048 - DNA, 539 bp, Homo Sapiens
gcaatgtccactcaagttgcaatgcaaaactctggctcatattcaatttctcagtttcaatccagaatgatcaggtggaccaaactacgaattaacatgcttcctgctacaataatttgtgagccaatttcagaatgctttgttgccagtttaattattggatgggcagcccaccatgtgttcagatgggatattatggtatttttcatgtgtcattgcctggcatggtttatatttgactacattcaactcaggggtgtccagggtggcacactgtgtttttcaaaacttgattatgcagtcgcctggttcatccgcgaatccatgacaatatacatttttttgtctgcattatgggacccaactataagctggagaactggtcgctacagattacgctgtgggggtacagcagaggaaatcctagatgtataactacagctttgtgactgtatataaaggaaaaaagagaagtattataaattatgtttatataaatgcttttaaaaatctaccttctgtagttttatcacatgtat

SEQ ID NO: 54049 - DNA, 951 bp, Homo Sapiens
  misc_feature (569)..(569): n is a, c, g, or t
  misc_feature (739)..(739): n is a, c, g, or t
acagaccttcacagatgcctacttttggcctcatctctgcctgacaaggccagcacccaaagggttaatatttaacctctttttaaggacactggggtctgtttctggaaatgttctttagatggtggcacattcctttgggtatgttaacctaggcagtgggaggcaaatgggatggtatgtgagctaggagaagggctgaaccctcagccttgactatgtctagagcctcttggggaaggggcacctctcttgaaccccaaatgctctctcttcttattacccaaacccatggctctatttcttcttcacatccattgtctcttcatgtctattccattcccttcggccaaacagacaggtggaaaaactgagacaggcagtttcagagatggacagagaactttattttggattgtggatgtggacttttttgtacataaataagaaaaaccaaaatactccaaagatgacttcccctgcctcctactccagtatgacagaggaggatgtaaggccttagccatgatctgcaggggtctgggagtcaggcccggcctattgcttgngtctctctctatttatatatctaagttcacagtgtttcttattcccccctaagcttctagaggctcatggccctgtagttaggcctggctcattctgcacctttccagggaggtggaaggaccctgtgccctccttcccaatcttctttttcaggctcgccaaggcctangacctatgttgtaattttactttttatttcctaaaggtgtagtgaaagctctcacccattaataaaggttgtggattgttccaaaaaaaaaaaaaaaaaaactccgaggcatcttatggccggggggcgggaaaaaaaaggtaatggaaatgggccccctgggccaaaacctggttttcccgtgaccccagccttttctttgtgaccaaagc

SEQ ID NO: 54050 - DNA, 582 bp, Homo Sapiens
  misc_feature (539)..(539): n is a, c, g, or t
aagaaaggggaggaaagtgagggttttctgaacccagagttattagagacttctaggaaatcaagagaacctacaggtgttgaagaaaataaaacagactcattgtttgttctcccaagtagagatgatgccacacctgttagagatgaaccaatggatgcagaatcaatcacttttaaatcagtgtctgaaaaagacaagagagaaagggataaaccaaaagcaaagggtgataaaaccaaacggaagaatgatggatctgctgtgtccaaaaaagaaaatattgtaaaacctgctaaaggaccccaagaaaaagtagatggagaacgtgagagatctcctcgatctgaacctccaattaaaaaagccaaagaggagactccgaagactgacaatactaaatcatcatcttcctctcagaaggatgaaaaaatcactggaacccccagaaaagctcactctaaatcagcaaaagaacaccaagaaacaaaaccagtcaaagaggaaaaagtgaagaaggactattccaaagatgtcanatcagaaaagctaacaactaaggaagaaaaggccaagaagcct

SEQ ID NO: 54051 - DNA, 556 bp, Homo Sapiens
actcaggttctctcaagtagtgctgccagtagtaccatcacagcactgtcacctggaggggcacttatgcagggaggaacacagcaagccataaaccagatggtgccaaatgatattcaatctgaattgaaacacttatatgtagctgttggagaacttctacgacatttctggtcctgctttcctgttaatacgccattcctagaagaaaaggtagtgaaaatgaaaagtaatttggaacgattccaagttacgaagctctgtccattccaagaaaagattcggagacagtatttaagcacaaatttggtaagtcacatagaagagatgctccagacagcctacaacaagctccacacatggcagtcacggcgtctgatgaagaaaacgtgaggtggccatgatgcttacaggttttgtgagattgagagaactatgacctgcagcaactctggaaacctggcctgacagacaagcagatgacctcacaggagtgataagaaacatctgctccacgccaactcccagagctgatgctattgtacttgcacattgg

SEQ ID NO: 54052 - DNA, 854 bp, Homo Sapiens
  misc_feature (140)..(140): n is a, c, g, or t
gggctgggaagtctaccatgctgaagctgcttttgggggacctggcacctgttcggggcatcagacacgctcacaggaatctgaagattggctatttcagccagcaccatgtggagcagctggacctaaacgtcagtgcntgtggaactgctggcacgcaagtttcctgggcggcctgaggaggagtaccgtcaccagctgggtcggtatggcatctccggagaactggccatgcgtcctcttgccagcctgtctgggggccagaagagccgagtggcctttgctcagatgactatgccctgccccaacttctacattctggatgaacccacaaaccacctggacatggagaccattgaggctctgggccgtgccctcaacaatttcaggggtggtgtgattctggtgtcccacgatgagcgctttatcaggctggtgtgccgggagttgtgggtatgcgaaggaggcggcgtcacccgtgtggaaggaggatttgaccagtaccgcgccctcctccaggaacagttccgccgcgaaggcttcctctagggccaccaggctgaggactcgcccaggacatggactggtctctcagacccctgggccaccatgtaggccaccactccaggccgtggacttcccccaacttggggacagccttattcccaaatgtctctatccttttgactggagcatcttctgcacaaccttgggagcccatccaagggttggtgaggactggtctcccgggggtgggggtctggggggtacctctggggttatagattccccactgccccagctctgactggaccccaagtggctgctatgtaaattaaatctctccccgcgtc

SEQ ID NO: 54053 - DNA, 572 bp, Homo Sapiens
taacaaaaaggaaatgaatattcaacagctcaccaactacagaaagagcgtcatgtccttggcagaggcagggaagctctaccgcaaggacctggagattgtgctctgcagcgagccccccatgtaaagtggggacgggggctgcttctccacctcccccaaaccctgcttctgctgccctgatgcgtctacccagactcagagaccgtgagcgccccgcccccacccctacagcctgcacacacctgcctgcagagcaggaaacgagagatagaggatgggcagctggggggctgtcctgagccccctgcacccacccctgcccaggcagtctttgctcagtggatcacacacatggaaggtgatgggggcatgggtggagggtccctaattctcttcgctgtgatgcatgagctccctcgctgtatgatttaggcttctatgtccaacagagtggactcttccctctcgctcccctctgccggtcccccatgccaccacccaccccaaacttccaggttccatccaccaccttgccaatggtgtagctgtcctctcagaactcctgtgtg

SEQ ID NO: 54054 - DNA, 917 bp, Homo Sapiens
tggaccggtccggattcccgggatgcccttattatccccctgagccaccataatatgctgtttacatttattttcttcagcctgtgcaaaacaaagcaatggaaaaggaaactaaaaaatatacatactagtaccattatcttcttttgcctaaaattactaatgcaccacgtcagtctgcttccttcaggcatcattctcaattcatcaggacttgtattagcaggttctggctagagagactatctcctgtcatcacgatcaattaatgttttctggtgatcacatcaggccctatctaagaagctcatggtatacaagggtcacccaaatagctgagtgcagtccttgctcatatttccttcatcttaaccccgcaaacaagaattaagatgatcccaataaaagaaaaattgctcaggaaactgaacctttttctgaaccaagcactgtcagcaaatctcaggtattagagcaactatggttgattgaaaagtgtctcaaaatctgggccaagaatgattgctaggtccataagctaatttgtctggccttgccatttacgtaagccaaagaaagtcactcatgagtaaactatagaaaacgttcagacccatcctgttagtatgtcaaatcaactaagactggcagggtattaactccattccaggtgacatggataaagagccccattattttcacagtgccagcctctacctaaggaaaccctagaccttggaaccagtttcctggtagggaactgctgacagtttcaatgctgacagttggagccaatgcctcatagtgtaaactgaaagaaaatagttgctttttaaaatgtcagcaagaaggcctgcctcatcttaacaaagcaaaaaaaaatgctttaattcaaattaaaatcatgatcctagaga

SEQ ID NO: 54055 - DNA, 1005 bp, Homo Sapiens
gaacactgctcacacgcgagttttcacagttatttctatccacgcctatgaatctttggacggtgagatctcacagatgtcagaactgctggaactatgaaatggggtatataaccacgactctggtggggaaaaccgttttttaaaggacacacacacacagcagcgatgcatctctctctaaagctcagccacggctgcggcaaggtcccagcggtcgctgggagacagaaggttttgtgccctgctgtatcataaagcacacacttagcgctctggagccggacggtggctccaccacttccgcaggcctggaaacttccttctccggaggaccttttactaaaaggtagaagacttcatggcttacttgttccataactccaagtgagtctgtaatgtttgtgaagcttgactgtaaccatgttttttctgtttaattatgtaaaaaacaaaactacaacaacaaaaaaaagaaaaaagttacgaaaagaaaaaaacaccaaaaaacaaaaacaaacaaaaaaaaaaacccaaacccttatctggttctgaccagtgtgcgtgtaactttatgatctgaggggaaaaatggcttggggttaagtaatttttggataatgactggacatcagaagaggaaaaagaactcaaaaagcaaaagcgagaagagacttattggcattttgaactcaaaaagctatcatggggttcactctacatatcaggtatggggctccagacactggtgtggtccctataaaatggtttgtgaccaattgcaatcatgtgacggtgatagtgaatcaaaagcgggccccaggattatattgaaatttcacccaccgacgattgtatggcgggggtacacacagcatacaacacattgtgcggctacacccatgtgtgataggagcacatataacctctgagacaggagcacgtctcgatgtgtctaagagacaacgtacagctggctgcaacaaacacaactataccggtgag

SEQ ID NO: 54056 - DNA, 573 bp, Homo Sapiens
cataactgttaagaaaggacttaggcagaagcagaggctaattcagtgtcacatgaggaagtagctgtcagatgtcacataattactttcgtaatagctcagattagaatggctaccccattctctagacaaaatcaaattgtcctattgtggctcttctaaaaatgaagatgaagagctatttaatgacacaccttggattaaaacgggaatcacatcttaaagctaaaaatgaacctgcaagccttctaaatgagtcactgagcatcactagtgacaagtctcgggtgagcgtaaatgggtcatgacgagatgggacagcaacaaaatcatggcttaggatcgacaagaagttaaaaaacagctgcatctgttacttaagtttgtaagacagtgccctgagacctctagagaaaagatgtttgtttacataagagaaagaggccagacatggtgtctcacacgtttaatcccagcactttgggaggcaggggcgggtggatcacctgaggtcaggagttcaagactagcctggccaacatggtgaaaccccgtctctactaaaaatacaaa

SEQ ID NO: 54057 - DNA, 707 bp, Homo Sapiens
gttttacataagaaattattaaaaacaaggggggtgggtaataaatgtatatacattaaataatgtaacgtaggtgtagattcccaaatgcatttggatgtacagatcgactacagagtacttttttcttatgatgattggtgtagaaatgtgtgatttgggtgggcttttacatcttgcctaccattgcatgaaacattggggtttcttcaaaatgtgtgtgtcatacttcttttgggaggggggttgttttcttctgtttattttctgagactcctacaggagccaaatttgtaatttagagacacttaattttgttaatcctgtctgggacacttaagtaacatctaaagcattattgctttagaatgttcaaataaaatttcctgaccaaattgttttgtggaaatagatgtgtttgcaatttgaagatatctttctgtccagaaggcaaaattaccgaatgccatttttaaaagtatgctataaactatgctactctcatacaggggacccgtattttaaaatctccagacttgcttacatctagattatccagcacaatcataaagtgaattgacaaaccctttgaatgaaattgtggcacaaaatctgttcaggttggtgtaccgtgtaagtggggatggggtaaagtggttacgtactgttggatcaacaaataaggttacagtttgtaaacaaaaaaa

SEQ ID NO: 54058 - DNA, 996 bp, Homo Sapiens
  misc_feature (921)..(921): n is a, c, g, or t
attaaaccgtggtctcatgtaacacataaacaattcatgcctttcatagtttattattattaaagtctaaacaaaattgcaatttcttaggtaaccttatatttacaataaatgaagattaccctcaaatgctagaagctgtctaggtccgtccggtgtgtcagattttcctcagattagatgtgccaataaccaagtttattcagtaaacaacttgtacttgtttcatctggttttattactctcacccataaacagtaatgactctctgaccctctggaaatatgtaatgcttccaatcttgctttgtgtatctcatttaatttgttataaggtagtactgattttagcatattaatgcgatttcttccttgttgtttgctttggtctgtgttcaatccagagagcttaaattgtcattattttgggaagaaaacctgtatttttgttagtttacaatattatgaaatttcacttcaggagaaactgctgggcttcctgtggctttgttttcttagtttctttttccgtgccgtgtattttttaattgatttttcttcttttacttgaaaagaaagggttttattttcaaatctggtccatatttacattctagttcagagccaagccttaaactgtacagaatctccactgtactttaaaactatttagttgttaggtatcaataccccttcaaaaagagagattctccccttacaccgatcaccctgcctccacagacccctgggtgaaagccaggctttcttgcactaccgaaaataaaaaattggcaaatggccctggcacaaaataagccgtggggcgccctcgcatataaactcgacaatgaaccccacgcccctcggatataagcatactgcccgaacacccccgcgtatgagtgcccaatactcgttattnacctaccatccccgacatttacgcgctcctccccccgcctcttgcgccggccccccccacgcccgcgcgttcgac

SEQ ID NO: 54059 - DNA, 447 bp, Homo Sapiens
  misc_feature (420)..(420): n is a, c, g, or t
ccagaagcctcgccttttcctaagcaccagcggaaggagctgtgccccgggatggagtgagggtggagggcgcgtcagccacgggtgggccttgtgtcgccttgtatcggcccaggtaggttgttggcctcttacttgggctgacctgacccccgaaagagaaacagacaactctgttctcaggattggggatggacggcttcggccaagcgttttagcctcattcactcaggccccactcagcactctgccagccaagaccattgatttggaaaatccggtccccacccgctaatgagctgttgacactgttgttccttgctgaattggattgttgacttgtagttcagaggcgtacaactagttggcgattagacttgttatgtgatgttaccagcctgaaatgcgatcaccccgtangaaataaagcaggcatctctggacctc

SEQ ID NO: 54060 - DNA, 706 bp, Homo Sapiens
catttgccactgttgttccacataaaagtatctgcaaagaaaagcccatggagacgacctggacacatgtatttctagggaacagatgcttagttgagcatcaaggggcaggaagacacctttccctccttgttcctcgctgaccgatgaccctggaactccacggtgcctctctgaatctctgttatggatcccccactatatttgatgggaacccagtgagccaggggccagttttgacagggtagcatcacgcccacagactacaccctctccaagtgctacctcccacgtgaggatgtggttttgatcatctactgtggagtggtgggcttccttgtggtcctcacactcactcactttgggcttctagcctcaccttttctttctggtttgaacttgctcggaaagcgtaagacaagatgaagagcaggcgccattataaatatcaaagcccaagaaatggaactttgggcagagatcatgttagaatcaagtggatgatgagaccaattacaggccgtctctctgcacagcacagaaattctcaatcactgaaatgagtaactgcaaaataaatagttgattgtactgttctcatgctataaaaatggacaggtactctacaacaaatctggtttctcatttttatcaaatatatgtatcattaaaagttgcatctggccagtatggaaaatgcctttaa

SEQ ID NO: 54061 - DNA, 711 bp, Homo Sapiens
  misc_feature (646)..(646): n is a, c, g, or t
ccaagctctaatacgactcactatagggaaagctggtacgcctgcaggtaccggtccggaattcccgggtcgacccacgcgtccgaacttgtttctttttttgtataaatgagagattgcaaatgtagtgtatcactgagtcatttgcagtgttttctgccacagacctttgggctgccttatattgtgtgtgtgtgtgggtgtgtgtgtgttttgacacaaaaacaatgcaagcatgtgtcatccatatttctctacatcttctcttggagtgagggaggctacctggaggggatcagcccactgacagaccttaatcttaattactgctgtggctagagagtttgaggattgctttttaaaaaagacagcaaacttttttttttatttaaaaaaagatatattaacagttttagaagtcagtagaataaaatcttaaagcactcataatatggcatccttcaatttctgtataaaagcagatctttttaaaaagatacttctgtaacttaagaaacctggcatttaaatcatattttgtctttaggtaaaagctttggtttgtgttcgtgttttgtttgtttcacttgtttccctcccagccccaaaccttttgttctctccgtgaaacttacctttccctttntctttctctttttttttttgcatattattgtttacaataaatatacattgcattaaaaaaaaaaa

SEQ ID NO: 54062 - DNA, 661 bp, Homo Sapiens
  misc_feature (613)..(613): n is a, c, g, or t
tttttttttttttcgcctttaagaaggttttcagtgattatacctcaggtatttctgagtgtcctattgtctaataggagaaatatcttcccgagctcagaattaaaagttctcctaaattatgaagatcccaaatcttatgtaaataaccttaggcatgagtccttagggagaagttaatgaccattgttaaagtgcttttttagaaaatgttgtgctgtatgttcttgatttgacataaatgaatagactttggcaagggaggaaataagttaaaaggcagcttacaagagcctattccctataaagggtataattttacacagtactcaaagcttgttatcttttctgaccattttagtacagaattagtacttggtggttactaacatcaacttgtgacatctagaactagggctcttagtgtttagtgggccacttctctgatgtcagatgcatgcagacctgtactccacatgcaacccaacagcagtgcagtgtgataactgagcggtcgcatggcagaggacatccccctcagagtgggcacaagtgccctctagggcagccaggggaatactattgttcgatacctgggatttgactttgtcanacagctctttgtgcccctatctttgttttgtcaaatgtagatcagtta

SEQ ID NO: 54063 - DNA, 1006 bp, Homo Sapiens
gcctaagaaccgaccaccccaccttgacccccgcccagctgcaccatctgctcagccactatcagctgggccctggccgcgggccgccagccgcgtgggaccctccccctgcagagcgggaggctgtggacacaggggacatcttcgaaagcttctcctcgcacccgcccctcatcctccccctggggagctcgcgcctgcgcctcactggtccagtgacggacgatgccttgcaccgtgaactccgtaggctccgccgcctcctctgggatcttgagcagcaggagctgccagccaattatcgccatgggcctcccgtggccacgtctccttgagaaccaataccaaacgagcgcgcgaaccttgaaatgtcacgggcttctacggacaggagcccgcctgagcgcaaagctttctgggagttgtagttcttatcccgcgtggaatgttgggagattgagttttcgggaagtagcggatgggacggtgggagcatgggcttaggatgtgaatgccaggagcaataaaggtatccgtggtatcggcaaaaaaaaaaaaaaaaaaaaaaaaaaaaaaaaaaaaaaagacacaaaacagaaagggggggggaggcacaaaaagaactcccagcagggggggctcgcacattgaccagaccaaccagaatatgaggaaacagaggaggggccccaacagagagaagccatataaaaaaagagagggagatgacggagagataaaaaccccggagcagggaaacacgcggaccacacgagagaaacccttgggaaaagaaacaccccacaaaaagacgcggggggggacacacaagggggaaaaaacacccaaagaagagagtaaaacagcccacacagggagaaaaacaaccaatcaacgggtataacagcgtggcggcaacagacagcagaacatatacgacgccggagagaaaaagcagtcgacacggaggaaaatgacacaagacagacataattacaaccgcggc

SEQ ID NO: 54064 - DNA, 645 bp, Homo Sapiens
tccgaaaacgcgtccgcccccatcacaaaacagtgcccaggaggctggctcctttagccacccatgcccagcgccctaaagcagcaccagatgctttggaattggggtgaaacacccacatggcagcctgctagcagcagtgactttgacttctggtcttaaagagtccctcgcttcagccccaggagctattggtgggttttagcagttttgtctttaccgtttttagttctccttgattctttgttttcttcctttatcgtttttaggtttggtatgtgttgttttatttccatggttcctcaagtttcctttttaaacatttgcatttgctggacaattgcaattttttttaaaaaattcccctacccctgtttaaagctgaaaaatacatttggttcatgtgcattgtttacaaagcaaaaagaaaaaagaggaaaaaaaggcaaaaaatattgtgaaagaaaaaaaacaacttaatatattttggattaatatttggtatttcttttaaagtattttttgtgctgtgaacattttctgccaaagaccatgatgtgtgtctgtatgtttaagttatcgtaaatatttaaaatgtaaacatggctgttttgttatgccaccctgtaccaggattgctgccgc

SEQ ID NO: 54065 - DNA, 726 bp, Homo Sapiens
cggacgcgtgggtcgacccacgcgtcgcccacgcgtccgagaggcccaccttatccaaagagctgtatgccctgggggtctttgatgggcttcacacagtacatggcacttactacatccaagtgtgtgccctggtcaggtgtgggggtcttggcttcgacacctgtggacaggaaatcacagaggccacggggatatttgagtttcacctgtggggcaacttcagtacttcctatatctttcctttgtttctgacctcagggatgaccctagaagtccctgaccagcttggctgggagaatgaccactatttcctgaggaaaagtaggctgtcctctgggctggtgacggcggctctctatgggcgcttgtatgagagggactaggaaaagtgtgtggtctgtggggcggactctggccatcatgtgacagccttgcacttccacaggctacaagccctgggaccatctttctgccttaagggcaggagcccacttctgtggcaccagattccaccctgggaactgtggaaaaagtaggagaggcagattccctcagtgtcttcctcttaaacctcaatcatcgagacattagggggtattttctgttcacattatctttgttcaagccacatcttcctctaccaaatctctcagtatgcgattggtctcagagctaaaccagaaataaatgtcagttattattttacccatcccaaaaaaaaaa

SEQ ID NO: 54066 - DNA, 537 bp, Homo Sapiens
gctgtgacctcttcaaaccgtggtacccccccttttctccccacgatgatatctatatatgtatctacaatacatatatctacacatacagaaagaagcagttctcacaatgttgctagttttttgcttctctttcccccaccctactccctccaattcccccttaaacttccaaagcttcgtcttgtgtttgctgcagagtgattcgggggctgacctagaccagtttgcatgattcttctcttgtgatttggttgcactttagacatttttgtgccattatatttgcattatgtatttataatttaaatgatatttaggtttttggctgagtactggaataaacagtgagcatatctggtatatgtcattatttattgttaaattacatttttaagctccatgtgcatataaaggttatgaaacatatcatggtaatgacagatgcaagttattttatttgcttatttttataattaaagatgccatagcataatatgaagcctttggtgaattccttctaagataaaaataata

SEQ ID NO: 54067 - DNA, 792 bp, Homo Sapiens
ctgctagaagaacctgagttaagtgatgatgaccgagccaacctaatgtggaaacgttacctggagcgagaggacagcaagattgtggacctgtttgtgggccagttgaaaagttgtctcaagtgccaggcctaaaggatttgctgggggcaaggtgtctctgcgggattgtttcaaccttttcactaaggaagaagagctagagtcggagaatgccccagtgtgtgaccgatgtcggcagaaaactcgaagtaccaaaaagttgacagtacaaagattccctcgaatcctcgtgctccatctgaatcgattttctgcctcccgaggctccatcaaaaaaagttcagtaggtgtagactttccactgcagcgactgagcctaggggactttgccagtgacaaagccggaagtcctgtataccagctgtatgccctttgcaaccactcaggcagcgtccactatggccactacacagccctgtgccggtgccagactggttggcatgtctacaatgactctcgtgtctcccctgtcagtgaaaaccaggtggcatccagcgagggctacgtgctgttctaccaactgatgcaggagccaccccggtgcctgtgacacctctaagctctggcacctgtgaagccctttaaacacccttaagccccaggctccccgtttacctcagagacgtctattttgtgtctttttaatcggggaggggggaggggggtggtgtagctccattatatttttattaaaaaatacccttccacctggaggctccttggtctcca

SEQ ID NO: 54068 - DNA, 619 bp, Homo Sapiens
aggactgcagggcacagaccaaagacatgggtgcccaggccccgtgggtgccggaagcggggccttgagtgggccaggccactcccccgagctccagctgccttaggaggagtcacagcatacactggaacaggagctgggtcagcctctgcagctgcctcagtttccccagggaccccacccccctttgggggtcaggaacactacactgcacaggaagccttcacactggaagggggacctgcgcccccacatctgaaacctgtaggtccccccagctcacctgccctactggggcccaacactgtacccagctggttgggaggaccagagcctgtctcagggaattgcctgctggggtgatgcagggaggaggggaggtgcagggaagaggggccggcctcagctgtcaccagcacttttgaccaagtcctgctactgcggcccctgccctagggcttagagcatggacctcctgccctgggggtcatctggggccagggctctctggatgccttcctgctgccccagccagggttggagtcttagcctcgggatccagtgaagccagaagccaaataaactcaaaagctgtctccccacaaaaaaaaaaaaaaag

SEQ ID NO: 54069 - DNA, 641 bp, Homo Sapiens
aaaggccgccgtgacctattcaccctccacttcccgtctcagaatctaaacgtggtcaccttcgagtagagaggcccgcccgcccaccgtgggcagtgccacccgcagatgacacgcgctctccaccacccaacccaaaccatgagaatttgcaacaggggaggaaaaaagaaccaaaacttccaaggccctgctttttttcttaaaagtactttaaaaaggaaatttgtttgtattttttatttacattttatatttttgtacatattgttagggtcagccatttttaatgatctcggatgaccaaaccagccttcggagcgttctctgtcctacttctgactttacttgtggtgtgaccatgttcattataatctcaaaggagaaaaaaaaccttgtaaaaaaagcaaaaatgacaacagaaaaacaatcttattccgagcattccagtaacttttttgtgtatgtacttagctgtactataagtagttggtttgtatgagatggttaaaaaggccaaagataaaaggtttctttttttttccttttttgtctatgaagttgctgtttattttttttggcctgtttgatgtatgtgtgaaacaatgttgtccaacaataaacaggaattttattttgct

SEQ ID NO: 54070 - DNA, 609 bp, Homo Sapiens
cacaaaatagttttagtgatttttttcattgtccattacttgccaggggcagttttagcagcacttttgatagattacgtctaatcctcccaaccaaccagcagggtagctattactgtccacattttacaggcaaggaaacaggctccaagaggctgaggactttgcctaggatgacatagccaatggacaagcagtgtctgtcagctgtgaaggcttcactcttattgtccttctaccttgaatagaagttttcctgataagaataaacgaggaaaaggtccttgcctcctggaagaacaaatctaccaggtgatctattcattgtttcaactcagaatgcacttgattcaggaggtcatctgaccttcaccttggatggttagtttcactttttacatatagtttttgcagggttttattttataaaatccaagcgcgctgttgattgtgttttccttgttttcagccccccgactccagcccgcagcacatttccgctgtccgtcagtaattgtgtcctctctttatgcttgcttggggaatgttgttttctgactaggctgatcattatctaaagaatctaattctgttgatttttaaaacttt

SEQ ID NO: 54071 - DNA, 460 bp, Homo Sapiens
gcggccgcgtggtatctcccgagggctgcttggaccctggtgggctgagtgctccgaggaggggtggactccaccttggacagtgggatgtggtgttccacatgtgcctgtttccacgccagcaccttgacttggcagcatggagccaaggtctgtccccgcccaggagggtgccttcctcgggggtagggggacggcccactctgccccagggagtcccttttgatgggaagtgcagtcagcagcgtggaggtgtctgggccaccttcagaaggtggatgtggtggccgagaccccgtccacggagggtgatggcctttcccttctgcaggtgcgggcaggtgggcctgggaccggtgctggggcctctccttgctgtgtgtgagggcccaggtggaaggcgcggacctgacagcattccaataaagcatacgggaacatgcaaaaaaaacctcgtgcc

SEQ ID NO: 54072 - DNA, 714 bp, Homo Sapiens
  misc_feature (1)..(1): n is a, c, g, or t
  misc_feature (9)..(9): n is a, c, g, or t
nttccaggnccctgttgcatgtaaatggcaaattagcattaatcaagggaggaggtcgatttagtaacagggttagccatagaagaagcttgttatgctcagaccattccaacaaaagacagacttgaaggtcttcttgcttctaaagagaaaaggccccctcgctataaaggagaataaaaggaacagaaattcttaagatgccaatgtaataaatgtacttcctggaagtgtctttcggatccactatatgcctcagcacatggaaccttaatgaccaaagtgaagagcagattattcatacggtgtaataagcatctggaatggacccatccgtgtacttcattcaaatgtgtaaatgtcatattcattcagatttataaagctagtagtgtatagtcagaaacagaatcaaagttagatatacatttttaaatatttactgcatatgaggctttctgttaattttttaatgtgaataatttatatattgcacattctagggaataatattgattgtatgtctactgtgctgcattaagaaaataaaatttctatataccaaaaatgtgaagttataccaaataaagtttctaagtgattaatgcatacgaacagctacatatacatatatctaaacctgaaaaatgaattgatattctgagtgaaaactacctaatataaataaaattagtggaaagaaaaaaaaaaaaa

SEQ ID NO: 54073 - DNA, 812 bp, Homo Sapiens
gacctggaattatgcattgaagtagtggacaacgttcaggatgccattgaccacatccacaagtatggcagctcccacacggatgtcatcgtcacagaggacgaaaacacagcggagttcttcctgcagcacgtagacagtgcctgtgtgttctggaatgccagcactcgcttttctgatggttaccgctttggactgggagctgaagtgggaatcagtacatcgagaatccacgcccggggaccagtaggacttgagggactgcttactactaagtggctgctgcgagggaaggaccacgtggtctcagatttctcagagcatggaagtttaaaatatcttcatgagaacctccctattcctcagagaaacaccaactgaaaagagccaggaaaacccgggaattttccaaaaggtcttcacgttaaacttgtcttatctcaggagagagcccgctcttgtctcccagttcctggtagggtctgcctgttggaaagtgtacctggatgcttctgggctccgtttggcaatagcaatcttggctgatgtgcacagtctggctcccagctcaccctttttttttaaagtaagaaaatagttgctaccgatagggactttgccaagtccaattatcttctaggattgaaaggtgcattttccccataaaaaaggcgaggaaaacccatggctgctttgtgtcacctcagtgacttacagtcccccttggcatttagttggtactagagccagtcatccttaacaaatcttttcacattttatttctttcacatgtagtcatcttcaaaaaggaa

SEQ ID NO: 54074 - DNA, 832 bp, Homo Sapiens
tcatactgtgaaataaactaaaatgaaaccaaaacgttcctgccgtaaatacgtggcacagcactgcagaaaaagcagtcacctctattcgtgagtccccaagccatagcagggcgtctgtaaaagaagggaaactgcacccaggaagtggtgggcgtcagacgcatcctttcgcccgtagttcatgaaatagttccggctttggtcttccagaaaatctcaacttcaccgtgcacaagtgttaccgggtctttttagtgtagccatggaagatactttcaaaaggacatcttcagatcataagtcttaggaccaaaggtgtttttaatgagataatctttttgattttctaacaagaaaggaaatattcactttacattttaacatcaacttttaagtgatattcagaattaattgaccatggtgatacgttgtaaaatgttttcatattaagaatgtaattatttccttattgtattttttaaaagctaaagtcatatttaaaattctctttgaaagaaacaggcaaagaaacagcaaagatttttttaaattaaatatgttagtagtgcccacttcaaatgactgtaaatatattttcactgtttctcaatgtatttaattcataaagtaaaaattttatgaaaagaaacttgcaaggaaaatcctagttttcagtccactcgccccactttgtagtagcttccctgaatttcctgctttcctggttgaattttctactgtttcacgtggtgtaaaccctaaactggcgccccttggcgtgccccttttggtatgaataaactttctctcccccaaaaaaaaaaaaaag

SEQ ID NO: 54075 - DNA, 499 bp, Homo Sapiens
ggtgagcatcatgcataaggcctccattctgtccgctcagattctgggtggggccacaggcaaatctcctgacttatggggagttggcttgtggttcctcccttggatagcctccatggaaccactataggctttcccaacagctgcctctgaaatagctgctgcttcgagatcctccctttttaaagcactttctaaagccctcaggatggcgggagcaaacagcactggtatattctaggagtaagtgcaggaattcagcagtgagagcatgtctgggaccacctggactgccatccatttaacctcaaatctctttgggatactcgccctccctgggaaccagagttctggctctaacattgagcagctatgcactagttccagagaagccactaacaggctgccatgtgtagatgtaggttcttaagagatcacaggctgggtcatctgatcactggatggatagctcagcctggggcatttagtgttttccctg

SEQ ID NO: 54076 - DNA, 563 bp, Homo Sapiens
  misc_feature (563)..(563): n is a, c, g, or t
caggtacatgagaaatccattctcttggtgtcactaccagtctgcttagttttaagtgaaattccttttatgtctacttggtttttacttgtgtcaacatttagtatgctacctcttctattgaaggatgaactcctaatgccctctgttgtgacaacaatggcattttttatagcttgtgtaacttccttttcaatatttgaaaagacttctgaagaagaactgcagttgaaatccttttccatttctgtgaggaaatatcttccatgttttacatttctttccagaattatacaatatttgtttcttatctcagtcatcactatggtgcttctgacgttgatgactgtcacactggatcctcctcagaaactaccggacttgttttctgtattggtgtgttttgtatcttgcttgaacttcctgttcttcttggtatactttaacattattattatgtgggattccaaaagtggaagaaatcagaagaaaatcagctagctgtattcctaaacaaattgtttcctaaacaaatgtgaaaatgtgaacagtgctgaaaggtn

SEQ ID NO: 54077 - DNA, 575 bp, Homo Sapiens
catcgaggccacctcaccagtgcccctcctggccacaccccgccccacagatcccatacccacctctgaggtcaactaaggcaggtcactcagagatcaggaccagtgcttcccaccaggctttccttgaccccacttctggctgtcctgcgggccacaagctcttcaggccaagtcagagctgctgttgctgccacttggatggggacctgaaaaagagaatgttgatagccccagctaagacccccaatcagctgtgggacctttttcctcctctgcgctccattcctgggggttcagcctgagagtgaactcagctgtcatctgcagcctctgcctccagcccggcagctctggggaggcatccgtgtgccggccctgcagtgcctgcccacggtcaggcattgaaaactaagcccaaccactctgcactttgtttcccactcccattagccctgggccacctcctccagttcttcctcttttactaattagttggacagtttggagagttgactggcaccatggagggtaggcaggtgggggctgggtgggggactgcccacaggagcatg

SEQ ID NO: 54078 - DNA, 584 bp, Homo Sapiens
gcccagcttcctccccccgactccccccccagagacacggtcccaccatgttacccagcctggtctcaaactccccagctaaagcagtcctccagcctcggcctcccaaagtactgggattacaggcgtgagcccccacgctggcctgctttacgtattttcttttgtgcccctgctcacagtgttttagagatggctttcccagtgtgtgttcattgtaaacacttttgggaaagggctaaacatgtgaggcctggagatagttgctaagttgctaggaacatgtggtgggactttcatattctgaaaaatgttctatattctcatttttctaaaagaaagaaaaaaggaaacccgatttatttctcctgaatctttttaagtttgtgtcgttccttaagcagaactaagctcagtatgtgaccttacccgctaggtggttaatttatccatgctggcagaggcactcaggtacttggtaagcaaatttctaaaactccaagttgctgcagcttggcattcttcttattctagaggtctctctggaaaagatggagaaaatgaacaggacatggggctcctgg

SEQ ID NO: 54079 - DNA, 654 bp, Homo Sapiens
  misc_feature (620)..(628): n is a, c, g, or t
  misc_feature (630)..(635): n is a, c, g, or t
  misc_feature (641)..(641): n is a, c, g, or t
  misc_feature (643)..(649): n is a, c, g, or t
ggaaagatttctatatttgtgttaatggatcatcagagaacaagcctatcagatccagttatttcacttttcagcttcaaaatatagttaaacctttgccgccagtctatcttacttttactcgggagagttcatgtgaaattaagctgaaatggagcatacctttgggacctattccagcaaggtgttttgattatgaaattgagatcagagaagatgatactaccttggtgactgctacagttgaaaatgaaacatacaccttgaaaacaacaaatgaaacccgacaattatgctttgtagtaagaagcaaagtgaatatttattgctcagatgacggaatttggagtgagtggagtgataaacaatgctgggaaggtgaagacctatcgaagaaaactttgctacgtttctggctaccatttggtttcatcttaatattagttatatttgtaaccggtctgcttttgcgtaagccaaacacctacccaaaaatgattccaggatttttctgtgatacatgaagactttccatatcaagagacatggtattgactcaacagtttccagtcatggccaaatgttcaatatgagtctcaataaactgaatttttcttgcnnnnnnnnnannnnnnaaaaanannnnnnncatgt

SEQ ID NO: 54080 - DNA, 621 bp, Homo Sapiens
atatgcaaatactgcaccattttttatcaggggcttgagcatctgaggattttagtatcctcaggagtcctggaaccaaccccccacagatacggggacaactttatgacattgtttttcaaccaatgaatgtttataccttttgttttccttgccgcgactgtgaagataaagttcaaaagtatttttaccaaagtgtagctaatatttcaagctgaaaataatagttctactgcccgtgtctccagaatgtagagcccatcaatatttttattttaggaggtgtacttgacacccaataaactgcacgtatcaaaagtgtacaatgtgttggcgtatgtataccctgcgtaaaactatcaccacaactgaagtgaggaacggacccatcattcccaagtgcccttgtgccctgttattagtttgcatgtcctagaattctatgtaaattgaatcatacaatatgtatcccttttttggtcaggcatattttactcagtatagttattttgagattcatccatgtggtagcatgtgtcacgagtttttgtttttatgtttttcattgctgagtactgcttcattgaatagatttgttcattgacctatcgatggacacct

SEQ ID NO: 54081 - DNA, 469 bp, Homo Sapiens
ttttgtggtatttgaggttttggcaaaaattgggatttttttatcaggcagccagagcctgggaggtggtagggtgtctgaaatgctggccatgttcaaagaggcaggagaagggggttgctttcatttgaatattaaaagtgaatttttgtaaactctggtttttacctttttttcatccccacgttgagttggaggaatagtctcttctcttcacctcaatatagctttagaaaatctttatccttcctaataagtttggatggttgtgggtaacattgttcaaacaatctttcagggatcacgtcaatggcctacaaccaagctatttgtcccctactttgagtcttaactgtggtttttcttcaatccccatgggaaagggcttcaaggcaccaccagtggtatttaatattcatacttggggccaggcatggtggctcacgcctgtaatcccagcactttggga

SEQ ID NO: 54082 - DNA, 819 bp, Homo Sapiens
  misc_feature (742)..(742): n is a, c, g, or t
  misc_feature (766)..(766): n is a, c, g, or t
  misc_feature (800)..(800): n is a, c, g, or t
ttggtgatcagaatcagaagttcggatttgaagttggtcctgtttgttttcttggctaagattaagacaaagaacatatcaaatcaacagaaaatataccttggtgccaccaacccattttgtgccacatgcaagttttgaataaggatggtatagaaaacaacgctgcatatacaggtaccatttaggaaataccgatgcctttgtgggggcagaatcacatggcaaaagctttgaaaatcataaagatataagttggtgtggctaagatggaaacagggctgattcttgattcccaattctcaactctccttttcctatttgaatttctttggtgctgtagaaaacaaaaaaagaaaaatatatattcataaaaaatatggtgctcattctcatccatccaggatgtactaaaacagtgtgtttaataaattgtaattattttgtgtacagttctatactgttatctgtgtccatttccaaaacttgcacgtgtccctgaattccatctgactctaattttatgagaattgcagaactctgatggcaataaatatatgtattatgaaaaaataaagttgtaatttctgatgactctaagtccctttctttggttaataataaaatgcctttgtatatattgatgttgaagagttcaattatttgatgtcgccaacaaaattctcagagggcaaaaatctggaagacttttggaagcacactctgatcaactcttctctgncgacagtcattttgctgaattcancccaaaatattatgcattttgatgctttattcangctttcctcaacttttctt

SEQ ID NO: 54083 - DNA, 533 bp, Homo Sapiens
acctctttgcatgatctgtcaaagtgagatatttttacctgcctaaaatatgatgtttaaaagcatactctatgtgatttatttatttctacctttctgagtctcttggactaagaagatgttttgaaatgtaccatcaaatgttaacagagtttgatatgggctttctctttggtttctcatcacatttgtaaatgtcttttcaaaaggatttagtttttgtaaaaagcttcattctcactctgctttgcatcccccaaacttcttgttcaaaacgaggggagtttaggagactttaatcccggtttcagaagctgcagctggtctgtttccaggtcagaaaccattgttcagaagacctccctgtgagagagttgctcctcagggtccctcaggcccaaagaacactcgaaaagagcacttcacacagacaagtggctaagtgtccattatttaccttgaacaatcaaggcaactagtggagagaactgattgtgagctctgctctgggtcagagagacctggatttgagt

SEQ ID NO: 54084 - DNA, 732 bp, Homo Sapiens
cctggcccacctggggcattcactggcagcagctgtgcttcagtggagcaggtggttctcagctgcttgttagtatactgcatgtgacactgttcccacatacaaggctgacttctgaggattggagcaggctctggcggggaccagagctctgcgtgctgctgctgccaccaagaagtgttagcagaagcagtagcagccaactggccctcctgactttggcccagagcacatgcgtggcttgctgaacccaggctcaggtttatccccaaggccccagctttgagaagggggaaggcccctggtaagttattgatgcccccatatttcagctactgctctctttccaaggccttgcatggaaaggcctagccattgtctgaggcagcaatctttggcatctacaggtggcagcagcctttcaccagggctccatctgtgaagagtctcagccatgactttgagctgagcttgggagaagtaaagcaactgttaaggccagcccttgcccctcagacctgccatgaaaggaatgagccctagactgactcctgcagcacccccgggacaggctgggaccagctgtttgtctccaggtgtcagagtccctcctcctcctccaacctctccaagctactttgtttgggaaataccgagctacacttcaaaatgtattcaaggggatttccaataaatttttttctggacctttaaaaaaaaaaaaaaaaaatc

SEQ ID NO: 54085 - DNA, 611 bp, Homo Sapiens
ttaacactgtagttaaattgttgaaggaaaggcacttaaattggttactttcatgtccagctgtatataagtccagtgtgttcatctagatgacgcaaagaatctcctggtagagaagcgacatgtaaaaaactggtggaaaaaggttttggattttttttccagtggggtggggggagggcaagctggatttacaggtcacggctggactgaatgggcctttttatcttcccactgtatcatggaagtagctgcttgcttgtactgtccatccttcaggcatccctaaagctcactctgaagatgttagagacaaacacaaactcttcgagttaaagttgatcctgacactgacatgaaggcaagccttgatttcgtatgaacgttgctgaagtggtaattgaggaaaacagttccccagattgttgagttcactgaagatattgacacaattttaaaaaatcagtaaaggaatgtatataatattgctctcgtgttttacagtaagatttgttgctctcagactgtgtaaaacaaaatttattcatgttttctgcatattaaaaaatcttattgtaccaactggtaaactattaaatgcctataaaact

SEQ ID NO: 54086 - DNA, 523 bp, Homo Sapiens
cgggccccccctttaccacgcgtccgggtggatgctgtggcgggaacgttgcttcatcaggcgttgcctccggtgtggagtttggggctttaggaaagcctgggttgggtggagcagaaccatcttggagaagatgacagttccctgtcctcccggagatgcctgggtgtgttagcagaggtgacacgtgtctgacagagacgggagctctgagtgtccacgggtgaagaagtgagtgtccacgggtgaagaagtgagtatgtttcacctggacattaaggtgatgtttgagctgctgttaaggaatttcttgcttatagaggcaaaccacagtatcattttaactctagaattgggcttgtacagaaggataaaacccaggaaaatggatatttctattcagatttatttatgcctctttttaatcccctttaatgatgcagtggtttttatctgatcaggaacttgtcatgatttcctttcttagacttcataggagatagtgctttaaaaaaaaaaaaaa

SEQ ID NO: 54087 - DNA, 636 bp, Homo Sapiens
agagtcttccaaggccagaaggagggggacaaccccccaagaccatccctgaagacgagcatccccctcctctccctgttagaaatgttagtgccccgcactgtgccccaagttctaggccccccagaaagctgtcagagccggccgccttctcccctctcccagggatgctctttgtaaatatcggatgggtgtgggagtgaggggttacctccctcgccccaaggttccagaggccctaggcgggatgggctcgctgaacctcgaggaactccaggacgaggaggacatgggacttgcgtggacagtcagggttcacttgggctctctctagctccccaattctgcctgcctcctccctcccagctgcactttaaccctagaaggtggggacctggggggagggacagggcaggcgggcccatgaagaaagcccctcgttgcccagcactgtctgcgtctgctcttctgtgcccagggtggctgccagcccactgcctcctgcctggggtggcctggccctcctggctgttgcgacgcgggcttctggagcttgtcaccattggacagtctccctgatggaccctcagtcttctcatgaataaattccttcaacgccaaaaaaaaaaaaaaaaa

SEQ ID NO: 54088 - DNA, 739 bp, Homo Sapiens
cccgggatgtgcgtctgctgctccggggtggagctggggtgtgggatgcacggcctcgtgggggccgggccgtcctccagccccgctgctccctggccagcccccttgtcgctgtcggtcccgtctaaccatgatgccttaacatgtggagtgtaccgtggggcctcactagcctctaactccctgtgtctgcatgagcatgtggcctccccgtcccttccccggtggcgaacccagtgacccagggacacgtggggtgtgctgctgctgctccccagcccaccagtgcctggccagcctgcccccttccctggacagggctgtggagatggctccggcggcttggggaaagccaaattgccaaaactcaagtcacctcagtaccatccaggaggctgggtattgtcctgcctctgccttttctgtctcagcgggcagtgcccagagcccacacccccccaagagccctcgatggacagcctcacccaccccacctgggcccagccaggagccccgcctggccatcagtatttattgcctccgtccgtgccgtccctgggccactggcctggcgcctgttcccccaggctctcagtgccaccacccccggcaggccttccctgacccagccaggaacaaacaagggaccaagtgcacacattgctgagagccgtctcctgtgcctcccccgccccatccccggtcttcgtgttgtgtctgccaggctcaggcagaggcg

SEQ ID NO: 54089 - DNA, 534 bp, Homo Sapiens
ggttcctctgcagacattcacccagcatcaaggggctgtcaaggccgtagcatggtgtccctggcagtccaatgtcctggcaacaggagggggcaccagtgatcgacacattcgcatctggaatgtgtgctctggggcctgtctgagtgccgtggatgcccattcccaggtgtgctccatcctctggtctccccattacaaggagctcatctcaggccatggctttgcacagaaccagctagttatttggaagtacccaaccatggccaaggtggctgaactcaaaggtcacacatcccgggtcctgagtctgaccatgagcccagatggggccacagtggcatccgcagcagcagatgagaccctgaggctatggcgctgttttgagttggaccctgcgcggcggcgggagcgggagaaggccagtgcagccaaaagcagcctcatccaccaaggcatccgctgaagaccaacccatcacctcagttgttttttatttttctaataaagtcatgtctcccttcaaaaaaaaaa

SEQ ID NO: 54090 - DNA, 633 bp, Homo Sapiens
  misc_feature (503)..(504): n is a, c, g, or t
gggggtcaacagccctgaggaggtcaaagacctcagcaagaccctgcttcggaagccccgtctctaaaaggggttcccaggagacctgattccctgtggtgatacctataaagaggatcgtagtgtgtttaaataaacacagtccagactcaaacggaggaagcccacatattctattatagatatataaataatcacacacacacttgctgtcaatgttttgagtcagtgcatttcaaggaacagccacaaaatacacacccctaagaaaaggcaagacttgaacgttctgaccaggtgcccctcttcttctttgccttctcttgtcctctttctcctatttcttaccctgtcctccacctgccttccattttgaagtgggatgttaatgaaatcaagttccagtaacccaaatcttgtttacaaaatattcgtggtatctgtgaacatgttaagagtaatttggatgtgggggtgggggtggagaaaggggaagtggtccnnaaacaaaaagccccattgggcatgattaaccgaggaagcattcttctaagtagactttgtgtaaaagcaaagttactgtgagtttattaacagatatattatttaaccatgatatttaaacataaaaac

SEQ ID NO: 54091 - DNA, 1211 bp, Homo Sapiens
  misc_feature (998)..(998): n is a, c, g, or t
  misc_feature (1211)..(1211): n is a, c, g, or t
ttcgggatatcacctctaaaaacaaaaccctacccctctctctccctctctcatttctctgctctcttggaaacattttgctgattttgtgaattgccagcgttgtgtgttttctgggagcatcgaagctctgtttcggaagagctgtttcctccccccaccttttgtatttactttgagactaaagactgaagaataatctaaattcatactcagacaaaaaaaggaattctggaaagaaaaccattctggacactgtcataacacacatagatagattttcttctgagactcccggagtcttctcgagctacgagaccttcacagagacacgtggcagccacactcacccagcctctttatttcaccatcctggaaggaaactgtctgtctaatggtcacagagcactgtagcacttaacagattgccatggacaccagttgcgaagggaaatagtgccttactatatgtgggttgagctatgcagaagatacgtgcatgaaaaaacatctttattttctttatgtcgacctttcttttcttagattgattttgtgaggttttttttttttcctttagtcttttctttagtgggggagggtaagaaaagcagtttgcacttaaaaagaaaaaaaaaaaaacgggtggttgtgtctcaggacaaaaggaggctcttctcattcagctaaattcacatttgcccccccccccccgcccccgccccataatgtcccgctataattttggaaatgctctggatgcaaaattgcaactttatgaacattttggtatgaaaacaaaaaggcttggccaaaaaaacactttccaaaaaaaacccttcctttggcctgcccattatgccaggttttaattgacccaagaagaccctctcagaaaaacagtttgattcaccggcgggacaacatttccttggaaactttatctccagggaaaaaaagtgggcgccgggggtttaacttggcaactcctgggaagntaagggtcccccacccaccaacagtgggggataaacactcttgaacacttgcaccggaagtatttgggggatttgggacccctcctcttcacgcccccctgggtagaccaacctcttgttagaaataaaaggaaactctctttggtgaggggcatttttttaaaatcctaaacgccgacacagactatacccctctcggggaatatcccccgn

SEQ ID NO: 54092 - DNA, 727 bp, Homo Sapiens
  misc_feature (614)..(627): n is a, c, g, or t
  misc_feature (631)..(631): n is a, c, g, or t
catttgaagaaggaggaattttagaagaggtagagaaaatggaacattaaccctacactcggaattccctgaagcaacactgccagaagtgtgttttggtatgcactggttccttaagtggctgtgattaattattgaaagtggggtgttgaagaccccaactactattgtagagtggtctatttctcccttcaatcctgtcaatgtttgctttatgtattttggggaactgttgtttgatgtgtatgtgtttataattgttatacatttttaattgagccttttattaacatatattgttatttttgtctcgaaataattttttagttaaaatctattttgtctgatattggtgtgaatgctgtacctttctgacaataaataatattcgaccatgaataaaaaaaaaaaaaaagtgggttcccgggaactaagcagtgtagaagatgattttgactacaccctccttagagagccataagacacattagcacatattagcacattcaaggctctgagagaatgtggttaactttgtttaactcagcattcctcactttttttttttaatcatcagaaattctctctctctctctctttttctctcgctctcnnnnnnnnnnnnnntttnttacaggaaaatgcccttttaaaacatcgtttgggaaactacccaggagttcaccccttaaaggggaggatccaaattttcctcctaaaaacctgc

SEQ ID NO: 54093 - DNA, 504 bp, Homo Sapiens
attactttagaattattgtgaagtttaaaaatagcctttctcctgcaaattttcctagtctttagtaactgttagtgttctatatagcacaaacttgaatctctcagccaaaaaagggaacatatatactgtttaagtatggcaagttttctttggtaccaatttgtttagataattttaaaaatgttttttagttctagctactaaaacctgtatgaactcaaatggataggcatcttgtgagggtgtgtttttcccagtgtgaattggcttgaagagccatgggctaaatgggtactagaacaacaactgcccctcatgtacgccaaggatgagctctagatcatttgagaggcacagtgtttccggagtcagggactgcagctgagcgcaactgccccatctgaccactgactcaaatacgaactgcttgagacagacttcttttatgtagttctttgcagtgtccattgagacactataaccagccttgtaacaatatgt

SEQ ID NO: 54094 - DNA, 632 bp, Homo Sapiens
cgacgcgaagaagtgccggaaggtgtatggcatggagcgccgggacctctggtgcacagcctgccgctggaagaaagcctgccagcggttcctggactaagtccggctcgttcaagaacataagctaccaccttctccctccccaccccctccaggcccggggctgaaacagcccgaggacagccccaggggctggccttcaccagctgcagggtctgcttttacttggggtgggggggcggggctgaccctgaaccctcccccccgccaggtcggggaggggtcccaccactcaaagtgcctctaaagaaaccagctttttgcactaaagccaaaccacaccgctgtccccttagccccaagggccctgggggcagccaccctcccgcctgtcggcccgtagatttatcaagggtgttatgggcccagctttggggggccagtcccgatgcactttgaggggtgttggagaggggactcccccactcgcacttaactcaacggctctcgggccctggggctgtttttaccatgtttgtttttgaagctcaggtgtctcacgtctgggctgcaccaggcgaagagagaaattaaagatttgaggtttttccagaaaaaaaaaaaaaaaaaaa

SEQ ID NO: 54095 - DNA, 768 bp, Homo Sapiens
  misc_feature (764)..(764): n is a, c, g, or t
cgaagaattggtccagtgacctatagcattgatggctgcgtcaggaatctccacatggcagaggcccctgccgatctggaacaacccacctccagcttccatgttgggacatgttttgcaaatgctcagaggggaacatattttgacggaaccggttttgccaaagcagttggtggattcaaagtgggattggaccttcttgtagaatttgaattccgcacaactacaacgactggagttcttctggggatcagtagtcaaaaaatggatggaatgggtattgaaatgattgatgaaaagttgatgtttcatgtggacaatggtgcgggcagattcactgctgtctatgatgctggggttccagggcatttgtgtgatggacaatggcataaagtcactgccaacaagatcaaacaccgcattgagctcacagtcgatgggaaccaggtggaagcccaaagcccaaacccagcatctacatcagctgacacaaatgaccctgtgtttgttggaggcttcccagatgacctcaagcagtttggcctaacaaccagtattccgttccgaggttgcatcagatccctgaagctcaccaaaggcacaggcaagccactggaggttaattttgccaaggccctggaactgaggggcgttcaacctgtatcatgcccagccaactaataaaaataagtgtaaccccaggaagagtctgtcaaaacaagtatatcaagtaaaacaaacaaatatattttacctatatatgntaat

SEQ ID NO: 54096 - DNA, 503 bp, Homo Sapiens
cagccacgcctgcgaggcgttggataagcctggggatccccgcatggaccgcggcttccgccgggtagcgcggcgcgcaggctcctcggaacgtccggctctgcgccccgacgcggctcctggatccgctcctgcctgcgcccgcagctgaccttctcctgccactagcccggccctgcccttaacagacggaatgaagtttccttttctgtgcgctgcgctgtttccataggcagagcgggtgtcagactgaggatttcgcttcccctccaagacgctgggggtcttggctgctgccttacttcccagaggctcctgctgacttcggaggggcggatgcagagcccagggcccccaccggaagatgtgtacacctggtctttactccatcggcagggcccgagcccagggaccagtgacttggcctggacctcccggtctcactccagcatctccccaggcaaggcttgtgggcaccggagcttgagagagggcgggagtgg

SEQ ID NO: 54097 - DNA, 603 bp, Homo Sapiens
atctcttctggtctggcagaaacacggacaaaaatggggaggagcttcacggaggcaagagggtaatggagtgcctaaaaaaagctctaaaaatagcaaatcagtgcatggacccctctctacaagtgcagctttttatagaaattctgaacagatatatctatttttatgaaaaggaaaatgatgcggtaacaattcaggttttaaaccagcttatccaaaagattcgagaagacctcccgaatcttgaatccagtgaagaaacagagcagattaacaaacattttcataacacactggagcatttgcgcttgcggcgggaatcaccagaatccgaggggccaatttatgaaggtctcatcctttaaaaaggaaatagctcaccatactcctttccatgtacatccagtgagggttttattacgctaggtttcccttccatagattgtgcctttcagaaatgctgaggtaggtttcccatttcttacctgtgatgtgttttacccagcacctccggacactcaccttcaggaccttaataaaattattcacttggtaagtgttcaagtctttctgatcaccccaagtagcatgactgatctg

SEQ ID NO: 54098 - DNA, 817 bp, Homo Sapiens
agaggtctcattaaactttacaactccattggaaattacgagaaagtgtttgaatatcacaatgttctgtctaactggaaccggttgcgagatcggcaatattcagtgacagatgctcttgaagatgtcagcaccagcccccagtccactgaagaagtggtgcagtccttcctgatttctcagaatgtcgagggaccgagctgctgagggaggacctcagttaaccaattaccttttcccggattccagggaattcatactgtgaaatcaaaaccatgttgttttggggggctggaatttgcattgaaacactggtccagtccattgaagaccctattttgggtgatccctatcttgcagaatgtctgtaggaataagcatatattcagttatattcagcatgtaccgcatgtgtaagtagtctggcccacattttcaacctagtagaacaaacaacaggaaatcttttttttgttgtttttaaaaaattcatgttgcagaaagcctgaaagaaaaaaaatacccctaaataaaactatttaagagtttaaaagagttgcattcttattatgtaaggatgattttaacaactttttaatatgtaattcttccatgtggaggtattcaatactgtagtgtaaagaaattttatgcggaaaatctttatatgcagtatagaaaagttaacacaagtactaataaagagggacatcccgacttacgtttttctaccttgccagatagtggatacaccactctatatacaggaaggacgtcagatctctgactggacagtgtgatcgtatgtatgaaatcg

SEQ ID NO: 54099 - DNA, 679 bp, Homo Sapiens
  misc_feature (616)..(616): n is a, c, g, or t
atttggccctcgaggccaagaaattcggcacgagggagccacccagaaggagacaacaatgtccctgctacccgtgccatacacagaggctgcctctttgtctactggttctactgtgacaatcaaagggcgaccacttgtctgtttcttgaatgaaccatatctgcaggtggatttccacactgagatgaaggaggaatcagacattgtcttccatttccaagtgtgctttggtcgtcgtgtggtcatgaacagccgtgagtatggggcctggaagcagcaggtggaatccaagaacatgccctttcaggatggccaagaatttgaactgagcatctcagtgctgccagataagtaccaggtaatggtcaatggccaatcctcttacacctttgaccatagaatcaagcctgaggctgtgaagatggtgcaagtgtggagagatatctccctgaccaaatttaatgtcagctatttaaagagataaccagacttcatgttgccaaggaatccctgtctttacgtgaacttgggattccaaagccagctaacagcatgatcttttctcacttcaatccttactcctgctcattaaaacttaatcaaacttcaaaanaaaaaaaaaaaaacgaaggggccccaagcttattcccctttaatgaggggtatttaagctggc

SEQ ID NO: 54100 - DNA, 592 bp, Homo Sapiens
catgtttatgggggtcttagttttcaaactctggcaactctgtgaaaaataggagcaaactagagagccctggagattggtagtagggaagggaggatagcaggaagtttgaaaaattagcagccccggggcctaaaggaatcagctgtcatcattttcatcattattattttggttaggatggcttgaaaatcagaacgtatcttggtttacgtaattgaggtcttaaagaactaagaacagttaaatagtcacaactaccaccctctgacttacataatcattggtgtgggcttcgttttgcctttagagtcacatctttcagtaaattcacagagatcaagagggacgtgcaacatacagcttaaaggctgttatgcttcagggttgctgaagaagatgaaacatcagcctgccatcgtctagaagagacattggcagttaaaaattagcacctccagtgtagtcgcctggcactgcccatcatgctgagggagcagattcttcccaaggcagcttcagctaggagtttgtaagcaaggactttgtgacacatttgtcccctggaactgagcctttttaactgtccctg

SEQ ID NO: 54101 - DNA, 794 bp, Homo Sapiens
  misc_feature (775)..(775): n is a, c, g, or t
ggattataatggctcaaattggttcatttgatttctaaaaataccatgacctttaaaaattcttttaatagatcatgttattggcagtatttatataaaaaccatggatttagaaaggtatatttagctttattataatagatacgttactattttggaaatatatatattttcacacctgtagtactcttccccatttcctctgacactcatgcagaatgagatcaggcatatttgtggttgacatactctagatagcttttccaacaaatctttgaaaagcaatcttggaaaggaattcattaactaaatggggtaaaaggtttctttttctttgagagttaagtccttcctcaaaaaattttcttatgctccataaaattgaggtagaatattttcattattcttgcagctaagcaagacagccatatgatgcaggttatgcagtgccttcatatctaaaacttttatactgcactttttaaagcttttatgttgaggaaaggaaaagggcatttgtctaaacatggattctgagttgtatatatttcctatcattctaaaaaagtgaatttgtgaagcaaagttttgccagatgttaaactttgaatttaatataccagattattaaaatattgtccattaactagttcatagattttaaaagtaaaatacttctgactggtaaaactatataaagaaaatctcatttgtctaattgcaattaaaagaaaaatggtaaaaatattaaaatgaaaataaaagcattactttncaacaaaaaaaaaaaaaaa

SEQ ID NO: 54102 - DNA, 581 bp, Homo Sapiens
  misc_feature (538)..(538): n is a, c, g, or t
ctttctttcactgatttaaggatggaaacttggaagctggtagctagtgcctctctatcaaatcagggtttgcaccttgagacacaatctaccttaaatagtgcatttttttctcagggaattttagatgaacttgaataaactctcctagcaaatgaaatctcacaataagcattgaggtaccttttgtgagccttaaaaagtcttattttgtgaaggggcaaaaactctaggagtcacaactctcagtcattcatttcacagatttttttgtggagaaatttctgtttatatggatgaaatggaatcaagaggaaaattgtaattgattaattccatctgtctttaggagctctcattatctcggtccttgagtctggttcctaatcctattttaaagttgtctaattgtaaaccactataatatgtcttcattgtaataaatattcatttggaatctaggaaaactctgagctactgcatttaggcaggcactttaataccaaactgtaacatgtctcaactgtatacagctcanaatacaccagctcatttggctgctcagtctaactctagaatgc

SEQ ID NO: 54103 - DNA, 611 bp, Homo Sapiens
gaacgatttccaatgtgaagacgtcaataacttcatttgcgaaaaagacagggagacagtactgtcatctgcattataacggactgtgatgggatcacatgagcaaattttcagctctcaaaggcaaaggacactcctttctaattgcatcaccttctcatcagattgaaaaaaaaaaagcactgaaagccaattactgaaaaaattgacagctagtgttttttaccatccgtcattacccaaagacttgggaactaaaatgttccccagggtgatatgctgattttcattgtgcacatggactgaatcacatagattctcctccgtcagtaaccgtgcgattatacaaattatgtcttccaaagtatggaacactccaatcagaaaaaggttatcattggtcgttgagttatgggaagaacttaagcatatactgtgtaaacagtgccatacatttctaaaatcccaagtgtaggaaaaatatgcagacatacagatatataggccaactattagtaataatatgaaatatacttaaagagcttttaaaactttgtatttttgtacaaaatatttgtcttttacaatttttttccttttttttttttttt

SEQ ID NO: 54104 - DNA, 615 bp, Homo Sapiens
ccctctcctcacctgctttgagcgataatctttatcagatattctaaacttaaagggattccctttaaaccaactcaagctgatctttcctatctagcctgctgtttggctgtactcatgggctttggtaatatctcctaaaaatgaggttttggtaatttttcctatgcattgggcaactgtgatcgtgaccactgtgctgtcttgctccagccactgccctggcctcagcatatcagggcagcctgtgctggctgcaatactgtggtgcttgggccactgcctgagaggagccaggtttgtgtgtgtctgcatgtgtgtgtgtgtgtgtttgtacagattcaagcaatggatgcaaggaacatgctgtatgtaatagaagaaagaagtccacgttttcggcagaagtagtgagtcagtgtggaagagaggtgagggtgtgctttactttttgataaagagaaagatgtttactcataaacccttcaaaaggtattaacaaaatgtttaccaaacctattgctttattttaaaaacataatttgtgttttctatttgtaagatctgacatttcgaggcaataaaaacttctcagaaagtaaaaaaaaaaaaaaa

SEQ ID NO: 54105 - DNA, 572 bp, Homo Sapiens
actcgaagattttccaacatcttctgtagcgacctcacacagcctctgcagatggatccctgcacgcctctttctgatgaagtgattgtagtaggtgtctgtagctagtcttcaagaccacacctggaagagtttctgggctggctttaagtcctgtttgaaaaagcaacccagtcagctgacttcctcgtgcaatgtgttaaactgtgaactctgcccatgtgtcaggagtggctgtctctggtctcttcctttagctgacaaggacactcctgaggtctttgttctcactgtattttttttatcctggggccacagttcttgattattcctcttgtggttaaagactgaatttgtaaacccattcagataaatggcagtactttaggacacacacaaacacacagatacaccttttgatatgtaagcttgacctaaagtcaaaggacctgtgtagcatttcagattgagcacttcactatcaaaaatactaacatcacatggcttgaagagtaaccatcagagctgaatcatccaagtaagaacaagtaccattgttgattgataagtag

SEQ ID NO: 54106 - DNA, 667 bp, Homo Sapiens
  misc_feature (608)..(608): n is a, c, g, or t
  misc_feature (610)..(618): n is a, c, g, or t
  misc_feature (620)..(627): n is a, c, g, or t
  misc_feature (630)..(638): n is a, c, g, or t
  misc_feature (640)..(640): n is a, c, g, or t
  misc_feature (642)..(642): n is a, c, g, or t
  misc_feature (645)..(645): n is a, c, g, or t
caggagttattacggaaatggacaccaagaatatctcctgaggatcactccaagaaaagagatccacataccattctcaatcccactgaaattgctggcattctcaaaggcagggcagagggggatctggggtacaggagggttctgtctaatctttttttttttttttgtatctgcacttgcagcctcagctttcacacttcagcccttaagttcactaagaaggtctgagtttctgctgcagatagtggtgttaactgctccaactcttgtcttgcttagtttctacaaatatttttgcttcttgtcatttgaaggattaagaaacaaaaacaatccagaaattgatcggtttttttaggccaatcccatcccttctggataaccagatgttaaatcatgagatcagagatgctgttcatcagtcccaacaagatggcctagaaatcgcattctcacctcgccttgctgctgctttaattccaagttctatttcttcccttatagttttctatgggaatgaggcggatacaggaaacaccctatctcctctgtatttttgtagtggaatttctatttaaggggctcattaaagcatagtatttatncnnnnnnnnnannnnnnnnaannnnnnnnnananaanaaaaaaaaaaaaaaaaaaaagg

SEQ ID NO: 54107 - DNA, 691 bp, Homo Sapiens
  misc_feature (498)..(498): n is a, c, g, or t
  misc_feature (527)..(527): n is a, c, g, or t
  misc_feature (592)..(592): n is a, c, g, or t
  misc_feature (633)..(633): n is a, c, g, or t
ggcaagtgcctagggaaaattccaatggatgattttctgggagctatcttgtctaccttgaggttcctgaacaatgaattcccattaatgagcagtcttcagtattaaaaccactgtcttgtcacctcattttgcattactgtcttccgtggatgtttcagttacaactgtaatgttatttatagaacaacattaatccattaaagctaacctatttttcaatatttatgataatctatgtacatatattgtctgtccatatgtatttgtaaataggttgtatataatgtcaggtttgggtcttgggttcaagtgtatatattcctgtaagtttcttaactgcattttgatgaattcacattatgtaactataagaattgtcccaaaagtacctgtacagaaaattgaatattgaaaaattgacaaattgtgtacaaacactaaaaaaaacttgtttaaattgtatttgcaataaacaacatcaaattttttcatganatcttggtacaaattcagatctcttattntaaatttaaataaggaatacattttcaaaatgcagtaatcaaaatgtgatctagtgtaatgaaantaaatgtgatctagtgtaatggaagacccttgagaacctgngtgtattactttgtgtaatagtgtaatatcccactgtactgtagaggccaacatctag

SEQ ID NO: 54108 - DNA, 779 bp, Homo Sapiens
  misc_feature (419)..(420): n is a, c, g, or t
  misc_feature (522)..(522): n is a, c, g, or t
  misc_feature (588)..(588): n is a, c, g, or t
ggctgaatagttactgctgcactttcactaagatgtatttgaacacttggtgagtagggggtttatgttgtgttttttttcattatcgttttttttatttttgtggaagcacttgctatttagaactgccaaagtatatgttcagcagtgtgcccaggattgaaggtgtaaatgggacaaaataaattgtgaaaggaagtgtagttgactgaaaactacagttgtaataagtcttccactttttataggatttttgagcacacaattatgcaaatattttaatgtttattaatgtttacagtggaattgtgaataagttttcagtggactatcttatcccttgacaaaaatattttgtcttttttctatgtaatttcagagtttttattttgttacaaaaagacaaaaatgaaatatanntacacaatgaaagtatttaacaagatttctaaagctgaaattttttgtgtaaaaataagtatttatcttgcacttgttaaatatatttattcagacattggnagggtgaattttttaaggattttttaaaaaaattaaataaaatttaaaaaaaaagaaatttcttanggttaatttcaccccttttgggatgaaacataagcctcttcaacctggtcccttttttaacagggaaggttggcattcccgtgcaagccccttggccttgggggtttaaaggggaagattctgggttctccaaattcccctttccaaacacggttttagtgaaaaccttttttaaattgggggggccattc

SEQ ID NO: 54109 - DNA, 666 bp, Homo Sapiens
  misc_feature (1)..(1): n is a, c, g, or t
natctttggttggaaaaacaagtgtagctttctttcctccttacatcaattttgtacaaatccaaaaaaccctgttacagtaatacgtggccttgctggagctcttaaattagatcttggacttttctctaccaaaactttggtagaagctaacaatgaacatatggtagaagtgaggacacagttgctgcaaccagcagatgaaaactgggatcccactggaacaaagaaaatctggcgttgtgaaagcaatagatctcatactacaattgccaaatacgcacaataccaggcttcctccttccaggaatcattgagagctggaatgcaatggtgtgatctcagctcactgcagcctccgcctcctgggttcaagcgattctcccacctcagcctcccgaatagctggaattacaggcacctgccatcatgcccaactaatttttgtatttttgtagagacagggtttcaccatgttggccaggcttgtcttgaactcctgacctcaggtggtctgcttgcctcagcatcccaaagtgctgggattacaggtgtgagccaccatgcccggtaaacttttaaaaatgtaagcaaaattacagtatgtaaaacacacattgctaatggagaaataaagttcctactttacatccaaaaaaaaaaaaa

SEQ ID NO: 54110 - DNA, 500 bp, Homo Sapiens
ctgaattagtccttgcttggctgcttggccttgggcttcattcaagtctatgatgctgttgcccacgtttcccgggatatatattctctcccctccgttgggccccagccttctttgcttgcctctctgtttgtaaccttgtcgacaaagaggtagaaaagattgggtctaggatatggtgggtggacaggggccccgggacttggagggttggtcctcttgcctcctggaaaaaacaaaaacaaaaaactgcagtgaaagacaagctgcaaatcagccatgtgctgcgtgcctgtggaatctggagtgaggggtaaaagctgatctggtttgactccgctggaggtggggcctggagcaggccttgcgctgttgcgtaactggctgtgttctggtgaggccttgctcccaaccccacacgctcctccctctgaggctgtaggactcgcagtcaggggcagctgaccatggaagattgagagcccaaggtttaaacttct

SEQ ID NO: 54111 - DNA, 658 bp, Homo Sapiens
  misc_feature (542)..(542): n is a, c, g, or t
  misc_feature (607)..(607): n is a, c, g, or t
acaacaatgagtaaagccattacacagaagagggctgtggtgaaggaccagcatggaaaacgcattgacttggagcacctggaggatgtaccagaagcactagaccaggacgacctccagcgcgatctccagcagctccttcggcatttctgcaaggaggacttgaagcaagaggccaagtgaggggctgcccagttctcacaccagaaaccacacattcactcaatatgcagcttcctgtttcagtaggggagtgacctaactggcctaattaatgggataccccgacatttccactgttagcaaatatacggcattttgctttagttttcccccatcctctttaactataaagctaatttgtgaccaaagatggcatccttcatactggatgctgtatccaatactttgttgtgtctgtgctaacctgggaactggccacctccattgttctttgcttctgcacaagatccatgaaaatccattgatcagaagaacttcacctgcagacctcttcaagtgacactatgtaggaatccttncaaggaatatctatgtacaatgtatatagctgaaatgctcaaatgaacaacatattaaaattaanaccactgcctattgtaactacactgggcatcaaaaataaaaaggatgccgg

SEQ ID NO: 54112 - DNA, 1095 bp, Homo Sapiens
cggagcagaacggattgcaggatcagccatgtcatctgagcctcccccaccaccactagccccccacccatcgaagcttcagtcgggctgctggacacccctcggagccgtgagcgctcaccatcccctctgcgtgggcaacgtggtcccaagcccactgcccactcgccggacgaggaccttctcggcgacggtgcgggcttcacagggtccccgtctacaaaggagtctgcaaatgcttctgccggtccaagggccatggcttcattaccccagctgatggcggccccgacatcttcctgcacatctctgatgtggaaggggagtatgtcccagtggaaggcgacgaggtcacctataaaatgtgctccatcccacccaagaatgagaagctgcaggccgtggaggtcgtcatcactcacctggcaccaggcaccaagcatgagacctggtctggacatgtcatcagctcctaggagatggtggaagcaccccttgtcctgtgcttgtgggagactttgcggggaggaggcagcagacactggagatgacattcttccacacgagacggggcttcagccgggcatggtccctctcaagtatctcctggaggaaggggtatggggggcaggtgtggggatgtggcggtgttcccggccatcagcacagcctatgacccatgcgaacaacctctcacatctgaagagccttaaagcatttaacaggacacgtgcccccggtggctgagtggagatccaacccataccaggaatggcccaggtgggaatctccaagtgtcgaacaatgggtcaacacacgcaaagacccatcacacggagtggagcccaatccaggttgtggcctgggggcgtatgggcacagctgggacaatccaaggaaaatacacgaaacccaggtccacccgggcgcgcaagagcgcacaactgacgacgatataagcaagacagcatgctggtgaagcgaggactgtcacaaggacataactctgagagtcacatgtcgaaaagacatcatcacaggggagagtcaacactctaatccctgcctctgtgttcttcgatttctgtgcggacg

SEQ ID NO: 54113 - DNA, 642 bp, Homo Sapiens
  misc_feature (609)..(613): n is a, c, g, or t
  misc_feature (616)..(617): n is a, c, g, or t
  misc_feature (619)..(621): n is a, c, g, or t
  misc_feature (627)..(627): n is a, c, g, or t
ttgccctggagatgaaattaatggaggctcaaggatagatgagctctgagtttctcagtactccctcaagactggacatcttggtctttttctcaggcctgagggggaaccatttttggtgtgataaataccctaaactgcctttttttcttttttgaggtggggggagggaggaggtatattggaactcttctaacctccttgggctatattttctctcctcgagttgctcctcatggctgggctcatttcggtccctttctccttggtcccagaccttgggggaaaggaaggaagtgcatgtttgggaactggcattactggaactaatggttttaacctccttaaccaccagcatccctcctctccccaaggtgaagtggagggtgctgtggtgagctggccactccagagctgcagtgccactggaggagtcagactaccatgacatcgtagggaaggaggggagatttttttgtagtttttaattggggtgtgggaggggcggggaggttttctataaactgtatcattttctgctgagggtggagtgtcccatccttttaatcaaggtgattgtgattttgactaataaaaaagaatttgtannnnnaannannnaaaaanaaaaaaaaaaaaaaa

SEQ ID NO: 54114 - DNA, 869 bp, Homo Sapiens
  misc_feature (12)..(12): n is a, c, g, or t
  misc_feature (629)..(629): n is a, c, g, or t
  misc_feature (807)..(807): n is a, c, g, or t
  misc_feature (828)..(828): n is a, c, g, or t
ttcagcctaagnagcctctcccccgctgcctctgggacgctcagctgatgtccggcaaggggagtttgttgttgccatgggaagtccctttgcactgcagaacacgatcacatccggcattgttagctctgctcagcgtccagccagagacctgggactcccccaaaccaatgtggaatacattcaaactgatgcagctattgattttggaaactctggaggtcccctggttaacctggatggggaggtgattggagtgaacaccatgaaggtcacagctggaatctcctttgccatcccttctgatcgtcttcgagagtttctgcatcgtggggaaaagaagaattcctcctccggaatcagtgggtcccagcggcgctacattggggtgatgatgctgaccctgagtcccagcatccttgctgaactacagcttcgagaaccaagctttcccgatgttcagcatggtgtactcatccataaagtcatcctgggctcccctgcacaccgggctggtctgcggcctggtgatgtgattttggccattggggagcagatggtacaaaatgctgaagatgtttatgaagctgttcgaacccaatcccagttggcagtgcagatccggcggngacgagaaacactgaccttatatgtgacccctgaggtcacagaatgaatagatcaccaagagtatgaggctcctgctctgatttcctccttgcctttctggctgaggttctgagggcaccgagacagagggttaaatgaaccagtgggggcaggtcccttcaaccccagcactgactnctgggctctgaagatcacagnaacctttttatataaaataaatatacctagcacatatatag

SEQ ID NO: 54115 - DNA, 625 bp, Homo Sapiens
tatccatataaaaagcctacagttatcctgcaagggacaggaaggtctgattgcaggatttttagagcattaaaataactatcaggcagaagaatctttcttctcgcctaggatttcagccatgcgcgcgctctctctctttctctctcttttcctctctctccctctttctagcctggggcttgaatttgcatgcctaattcatttactcaccatatttgaattggcctgaacagatgtaaatcgggaaggatgggaaaaactgcagtcatcaacaatgattaatcagctgttgcaggcagtgtcttaaggagactggtaggaggaggcatggaaaccaaaaggccgtgtgtttagaagcctaatggtcacatcaagcatcattgtccccatgcaacaaccaccaccttatacatcacttcctgttttaagcagctctaaaacatagactgaagatttatttttaatatgttgactttatttctgagcaaagcatcggtcatgtgtgtattttttcatagtcccaccttggagcatttatgtagacatggtaaataaatttggtgcaaaaggactggaaaatgaatgtatattgcaatttttttgtaaagtagagttgtatgag

SEQ ID NO: 54116 - DNA, 720 bp, Homo Sapiens
tttccggatcatctggtgaatgctggagtcttcaccgtccgagatgctgggagctggtggctagctgtgcctggagctgggagattcatcaagtactttgttaaagggcgccaggctgtccttagcatggtccggaaggcaaagtaccgggaactgctcctatcagagctcctgggccggcgggcgcctgtcgtggtgcggcttggcctcacctaccatgtgcacgacctcattggggcccagctagtggactgcatctctaccacttcaggaaccctcctccgcctgccagagacatgaagattctgctcatcattgctcagctcctcagagtgggccgggaggggactagaagagctgcatgatggtggctgagacagggtcaccttgggaaggcttgggagccaggatgagtgtcgggctctcgtgtgtgcaaaaggtcagatgtgactgctgctgtttgcctggtttctgacccagtggtggggtttgagcaatgcttctctgcccttccatggaaagtggaaccagaaatggtgccaaggctgtggctgttccctttcgtgtaaaatggtgctgttattactctgtcttgaaataggaaggtgggatttctggggaggctggtgaaggagggcagggttcttttctctacgtgtcatgttaaaattgccaaataaagtacctctgcctgtgaaaaaaaaaaaaaaaaaaaaaaag

SEQ ID NO: 54117 - DNA, 674 bp, Homo Sapiens
  misc_feature (650)..(650): n is a, c, g, or t
agtaaacctgatacatcagaggtgaataccagcacctattaggtttcattttgctgttttcaggaatgtaagaacacccatattggctactggaaattctagcagtcagtcaggttttaatttattccaggaggggcatcctcgacatcttatgtagatgatccacaacttcaaaatttagtctgggcctagtgcagtggctcacacctataatcccaacactttgggaggccaggagttttgagaccagcctgggaaacatctgcctctacaaaaaaatacaaaaattagctgggcatagtggtgcatgcctgtgtttctagctacgcaggaggattgcttgagcccatgagattgaggctgcagtgagctgtgatcgtgccactgacctccagcctgggggacagagcaagaccgtgtctcaaaaacaatttagtctgaaacacaattgtgctgaatctgtctgactataactctgaccacacagaaccagggctgcccctgtaatccccacagtaagaaagttgtatggcatattccaacaagtattggttcgtctggtgtctttagagctttactctgttgaagtgactgattctcaactgaacattatgtcgttactttgataagcattccacttttgttatttnatagtgctatcttttttttttacg

SEQ ID NO: 54118 - DNA, 506 bp, Homo Sapiens
tggcttccctgctcacacccacactggctgctgattggctggggaggcccccgcccttttctccctttggtccttcccctctgccatccccttggggccggtccctctgctggggatgcaccaatgaaccccacaggaagggggaaggaaggagggaatttcacattcccttgttctagattcactttaacgcttaatgccttcaaagttttggtttttttaagaaaaaaaaatatatatatatttgggttttgggggaaaagggaaatttttttttctctttggttttgataaaatgggatgtgggagtttttaaatgctatagccctgggcttgccccatttggggcagctatttaagggggaggggatgtctcaccgggctgggggtgagatatccccccaccccagggactccccttccctctggctccttccccttttctatgaggaaataagatgctgtaactttttggaacctcagttttttgattttttatttgggta

SEQ ID NO: 54119 - DNA, 648 bp, Homo Sapiens
ctcgcgaacggctcagcactctggagccccggaatgtgcgggccgtcatgaagcgggtggtggaggataccaccgccatcgacgtgcaggtggggctcctgtacgaagagggtgttcgcaaggcccagagcagcgactccagcaagaggactttctccgtgtacagcagctctcggcagcagggccgctacgcccccagctatacccccagtgccccgatggacaccaacctcttgagcaatatccagaagctattctctgaacgtattgatgtgttcagccctgtggagttcaacaaggtgtcggtgctgaccggcatcatcaagatcagcctgaagacgctgctggagtgtgtgcggctgcgcacctttgggcgcttcgggctgcagcaggtgcaagtggactgccactttctgcagctctacctgtggcgttttgtggccgacgaagaactcgtgcacttgctgctggacgaagtggtggcctctgctgccctgcgctgcccagaccctgtgcccatggagcccagtgtggttgaggtcatctgcgagcgcggctaggcgcagccgctgccatgcaccggtctgtccctgcaccccatggcacccaagatctggtctcggtggtccttccccgcaggcaggtgtc

SEQ ID NO: 54120 - DNA, 365 bp, Homo Sapiens
ggatgcccttcatagtctgaggttgcagcaagctatgatcacaccactgcacttcagcctgggctacagagtgagactccatctcaaagaaaaaaaatatatatatattcaaaaattagctgggcatggtggcatgcttctgtaatcccagctactcaggaggccgagattagagattcacttgaatgtgggagtcggaggttgtagtgagctgagatcacaccattgcactgcagcctgggtgaccaaacgagactccatctcaaaaaaaaaaagttgggtgtggtggctcaggcctgtaatcccagcacttggggcggttgagggaggtggatcacctaaggtccggaattcaagactccacg

SEQ ID NO: 54121 - DNA, 682 bp, Homo Sapiens
  misc_feature (598)..(598): n is a, c, g, or t
  misc_feature (651)..(677): n is a, c, g, or t
  misc_feature (679)..(679): n is a, c, g, or t
ggggagatatagtcctagatatttccatgggccagtgtgatgacttttttttaaatgaggttcagtaccataatgtttatttactggaagataatgcatttataagcattttaaaattctgtaaagtgggttagaaatatttataattttacaggcaggacagcatttgacttttatttaaaaggcggcactacttatgtaaatctgagctgtgggatatttcttgctttaagagagagacagaatctctcactgaaactcatggtcatgattttgtataatatagttcatactgtgtctgtgagtttcttcaattacaaatgggcatttagtatagttatattgactataacatgtaagtaaatagctttctactgaccctaagttatcaaggtggaaaaaaaacatgcaattcagtaattgaaaatgtggtgaaaagctgcagctgtcatcatcaaaacaactcataacatactttaaaatgttcaggtagcagtgagcattgttcatatgagaatggcggctgggtgatctctttgctgaattaatgagttcttaacatgtggacccaactgcctgtgtgagatctgtgtcttanaacttactgggatgggaatctatgaattattgcaaatttgtatgctggaaacnnnnnnnnnnnnnnnnnnnnnnnnnnncntgt

SEQ ID NO: 54122 - DNA, 657 bp, Homo Sapiens
  misc_feature (617)..(617): n is a, c, g, or t
  misc_feature (642)..(643): n is a, c, g, or t
  misc_feature (647)..(647): n is a, c, g, or t
tataagaccgtcctgccacggagtactgggtgtatatggagggatgatttacactggaatcttttactggatattgagaggaatggagccgcggactctgaaacataaaggttctgactttgaacggctcaagccagccaaggattgcacacctattgagtatccaaaacccgatggacagatcagttttgacctcttgtcatctgtggctctgagtggtactaatcatgaacatgaccagccggcacacttaaccttaagggatgacagtatacctgtaaatagaaatctgtcgatatatgatgggcccgagcagcgattctgtcctgcaggagtttatgaatttgtacctgtggaacaaggtgatggatttcggttacagataaatgctcagaactgtgtacattgtaaaacatgtgatattaaagatccaagtcagaatattaactgggtggtacctgaaggtggaggaggacctgcttacaatggaatgtaaactgcagctagccagtttctttcaagtatggcaagctaacgttaaaatgtttagagattaacagatttcagaatgtctttctgcatattactgaacagaatagtcacaaaatgattatcanataaaaaattttatactatatgtgnnaaanaaaaaaaaaa

SEQ ID NO: 54123 - DNA, 696 bp, Homo Sapiens
aagccagtataaaacacctaaataaccaatctacaatctcccttcacaagtttttttactgtttttagatgaatgtacgatgagaaattcaacgttaataattctggattttcttatcacaaagaaagaaaatgaaggacctcaaagcacctgaacagtttatcgaccagtttgaatctatttatcttcatttgaatgtcttctagaatatgtaaaaagtcataaaatgtatcttccatgctacatgtacaataagaacttctataattgtatatatgcctttgatgtattttcccctcaagattatcaactgtgtgttcgacagtgaatattcaatctggtaccagttgaaattttgggttataaatgtaatacgaatggtttcacgaaacagaaaacatgtaaagcagtattaaaatttggacaaacaaggtgtttcatgtaattctacgtctcaactaaactggttaattccttttaaaacaccacaccccgaaaccaaacaagcacacacaccacaaaaaaaacacacccaccccccgccaccaccacacccaacgacagacaaaaaagtagaacaacagggaaaacaaggaagaagaaggaaaggacgagaacgaggaaaaaaggaacaaaacacaaagagggaaggagggaaaagagaaaaaagaaaacgagctcgaaggaaagagaagg

SEQ ID NO: 54124 - DNA, 557 bp, Homo Sapiens
attacattcacctttgattgttttttaaaagtttatttttacagaatatatttagtacctttcttaaggagtaactgaattgaatcaaccagtttgcatttaaataaaagaacaggctcagtggtcttcctgtagaatggtttacatgcctgcacgtgcagtagttgtgtctggaatcctagaattggcactttctgcctccttgctctaaatgtcacaaaaaattatacttccttaaagtaaatgtaatgatttcttcttttcctattgaccagtacagatagatatgttgtgtttgcttcatttttaatgatgacttcaagattgatgatgtgatccaataactgtggaggtagctttaacttggttctgtgtaaatagtatgtattttattataatatttctcattttaagatgcttggtttacattaaattatggtatttaactatttttatgtttatactaggtagggtctttcttatgttctgtgttttggtatgctaaataaagctatttttaaacccaaaaaaaaaaaaaaaaaaaaaaaaaaaaaaag

SEQ ID NO: 54125 - DNA, 933 bp, Homo Sapiens
ccttcggcgggttaccgctgggcctcgggcgcacagggttacgtgcggaatccgccagttggagcgtgcgatctgcagggcgagctggacagattcgggggcatctcggtgcgcctggcgcggctcgatgcgctggaccgcctggacgctgccgccttccagaagggcttgcaggctgcagtacagcaatggcgatcagaaggtagaacagctgtatggctgcacattcccatcctccaaagccgatttattgcccctgctgcttccctgggcttctgctttcaccacgcagaatcggattcatcaacgttgactctgtggctgagagaagggcccagcagattaccaggatatgcttcacatcaagtaggagttgcaggagctgtatttgatgaaagtactagaaaaatactggttgtacaagatcgaaataaattgaaaaatatgtggaagtttccaggaggcctgtcagagcctgaagaagatattggagacacagcggttcgagaagtttttgaagagactggtataaaatcagaattcaggtccgtcctgagtattcggcaacagcacacaaatcctggagcttttgggaagtcagatatgtatatcatctgccgcctaaagccatattcattcaccataaatttttgccaggaagaatgcttaagatgtgaaggggatggatctcaatgacctggcgaagactgaaaatacaactcccatcaccagcagagttgctaggctgctgctgtatgggaacacaaaaaagggtttgacaaaattggaccttgactgtgggagaaacttccagcagttttacacagggactggttttataaactcctatcataaggaactgcccagagaattattaaacctatggaaagggaaattgattaaattcacctttttatatgttttaaaaaccac

SEQ ID NO: 54126 - DNA, 629 bp, Homo Sapiens
gcctcccccgaatgcatttggaaccaaagtctaaactgagctcgcagcccccgcgccctccctccgcctcccatcccgcttagcgctctggacagatggacgcaggccctgtccagcccccagtgcgctcgttccggtccccacagactgccccagccaacgagattgctggaaaccaagtcaggccaggtgggcggacaaaagggccaggtgcggcctggggggaacggatgctccgaggactggactgtttttttcacacatcgttgccgcagcggtgggaaggaaaggcagatgtaaatgatgtgttggtttacagggtatatttttgataccttcaatgaattaattcagatgttttacgcaaggaaggacttacccagtattactgctgctgtgcttttgatctctgcttaccgttcaagaggcgtgtgcaggccgacagtcggtgaccccatcactcgcaggaccaagggggcggggactgctggctcacgccccgctgtgtcctccctccctcccttccttgggcagaatgaattcgatgcgtattctgtggccgccatctgcgcagggtggtggtattctgtcatttacacacgtcgttctaattaaaaagcgaattatac

SEQ ID NO: 54127 - DNA, 793 bp, Homo Sapiens
cccagcacaggtatttcaggtgtgaaagaatcagtaggaccaggccaccgctagtgcttgttgagatcacagccccacccttgttcctcagcaacatcccatctaagcattccacactgcagggaggagtggtacttaagctcccctgccttaacctgggaccaacctgacctaacctaggagggctctgagccaaccttgctcttggggaaggggacagattatgaaatttcatggatgaattttccagacctatatctggagtgagaggcccccacccttgggcagagtcctgccttcttccttgaggggcagtttgggaaggtgatgggtattagtgggggactgagttcaggttaccagaaccagtacctcagtattctttttcaacatgtagggcaagaggatgaaggaaggggctatcctgggacctccccagcccaggaaaaactggaagccttcccccagcaaggcagaagcttggaggagggttgtaaaagcatattgtaccccctcatttgtttatctgatttttttattgctccgcatactgagaatctaggccaccccaacctctgttccccacccagttcttcatttggaggaatcaccccatttcagagttatcaagagamactyccccctccattcccacccctcatacctacacccaaggttgttagctttggattgctggggccaggccccatggagggtatactgaggggtctataggtttgtgattaaaataataaaagctaggcgtgttttatgcgcttttaactttggcaaa

SEQ ID NO: 54128 - DNA, 502 bp, Homo Sapiens
attcctttttctactgtgtcttaaacatcaattcctgatagtccaaggaaccacctttctcccttgatatatttaactccgtctttggcctgacaacagtcttctgcccatgtctgggaacacacgccaggaggaatgtctgataccctctgcatcaagcgtaagaaggtcccaaatcataaccattttaagaacagatgactcagaaacctccagaggaatctgtttgcttcctgattagatccagtcaatgttttaaaggtattgtcagagaaaaacagagggtctgtactagccatgcaaggagtcgctctagctggtacccgtaaaagttgtgggaattgtgacccccatcccaaggggatgccaaaatttctctcattcttttggtataaacttaacattagccagggaggttctggctaacgttaaatgctgctatacaactgctttgcaacagttgctggtatatttaaatcattaaatttcagcatttactaat

SEQ ID NO: 54129 - DNA, 543 bp, Homo Sapiens
ttttattggccttttgctaacacagtaagcatgtattctctataaggcattcaataaatgcacaacgcccaaaggaaataaaatcctatctaatcctactctccactacacagaggtaatcactattagtattttggcatattattctccaggtgtttcttatgcacttataaaatgatttgaacaaataaaactaggaacctgctatacatgtgtttcataacctgcctcctttgcttggccctttattgagataagttttcctgtcaagaaagcagaaaccatctcatttctaacagctgtgttatattccatagtatgcattactcaacaaactgttgtgctattggatacttaggtggtttcttcactgacaatactgaataaacatctcaatagtcaaaaaaaaaaaaaaaaaaactcgagggggggcccggtacccaattcgccctatagtgagtcgtattacaattcactggccgtcgttttacaacgtcgtgactgggaaaaccctggcgttacccaacttaatcgccttgcagc

SEQ ID NO: 54130 - DNA, 671 bp, Homo Sapiens
ggscacgctggtggtcctggscttggccatggtgcccatcctgctgcttggsacacccctgcacctgctgcaccgccaccgcsgccgsctgcggaggaggcccgctgaccgacaggaggaaaacaaggccgggttgctggacctgcctgacgcatctgtgaatggctggagctccgatgaggaaaaggcagggggcctggatgatgaagaggaggccgagctcgtcccctccgaggtgctcatgcaccaggccatccacaccatcgagttctgcctgggctgcgtctccaacaccgcctcctacctgcgcctgtgggccctgagcctggcccacgcccagctgtccgaggttctgtgggccatggtgatgcgcataggcctgggcctgggccgggaggtgggcgtggcggctgtggtgctggtccccatctttgccgcctttgccgtgatgaccgtggctatcctgctggtgatggagggactctcagccttcctgcacgccctgcggctgcactgggtggaattccagaacaagttctactcaggcacgggctacaagctgagtcccttcaccttcgctgccacagatgactagggcccactgcaggtcctgccagamctccttcctgacctctgaggcaggagaggaataaagacggtccgccctggca

SEQ ID NO: 54131 - DNA, 906 bp, Homo Sapiens
  misc_feature (759)..(759): n is a, c, g, or t
tttaattttcatgttttgttgttgttgttttcttggtaatgcttcttttttgcagatgtggtcccaatttatagcaatcttctcaacagaagtaggcatggaaaagacttcttttcatactctcactataaagaaagctgcattgagaagaaaatggctgtcatttaaaggatggtttaactagtgagattcctattgtggttatacaaggtctcattgtttgtttgtttcttttaaattatttcagctttaaaaatacagaaatggaatctgtcaagagcaggtatttcatacggttaaaaaaatgaacatgcagactccttttcaatatgggtttatatatataagtattttttgtgtattatgactacgttaggagtttattattgtcaaggacagtacaactgcaaagggatgctgtatagcagcacatcagaagtcggaaggaactgacacattctctcagagctcaaggtcttaaagagcttgagttaaatctaggtacagttacaggcatgtatagacttaaatggatgcaatggaagctaactaaaataaggcttagttgtcctttctatttaaataccccaagttgtcttcttactcctctcccctctcccattttgcactgtgtgtcgatgcaatcttcgctagcacaaaatattgtcgctaatagtcatttctgttttcccattgtaaatgctgttgagctttattctattttatgttactttgttaatgaaatttaggaaaagcagntgtttccttaaatttattgtgatattctatatctagcggcctttatatgcaaataaaattgcaagattttttaaaaaaaaaaaaaagggcggcccgctctaaaatatcccctcaaggggcccagccttacgcgtaaccccgcttttc

SEQ ID NO: 54132 - DNA, 602 bp, Homo Sapiens
aagtcatgttgtttctgcactttataataaagcatggaagaaattatcttagtaggcaattgtaacactttttgaaagtaacccatttcagatttgaaatactgcaataatggttgtctttaaaaaaaaaaaagaaatgtactgttaaggtattactttttttcatgctgatgattcatatctaaattacattattatgttagctgacagtggtactgattttttaggttggttgttttgtggatttctttagtagtgatagtagcctgaaccacattttagataactcaattatgtatgtatgtgcatacacatatacaaacacactaatggtagaatgcttttttatgtgctagactattatatttagtagtatgtcattgtaactagccaatatcacagcttttgaaaaattaaaaaatcacactatattaatatttcatatttgccaacagaaacatggcagataggtatcaatatgttttcaatgcctgatgacctataagaagaaagtattgaaaagaagagagattagaactgttagaaggagttgaaattttctaaaagacatagtatttagtttataattaaatgcattcttg

SEQ ID NO: 54133 - DNA, 732 bp, Homo Sapiens
ctgggtggcgagaaacctacacctgtaaggaatgtgggaaggcttttaactattccacccaccttaaaattcacatgcgaatccacactggagaaaaaccctatgagtgtaaacaatgtggaaaggccttcagtcattccagttcatttcaaatacatgaaaggactcacactggagagaaaccctatgaatgcaaggagtgtgggaaagccttcacgtgttccagttcctttagaattcatgaaaaaactcacacagaagagaaaccctataaatgtcagcaatgcgggaaagcttacagtcatccccgttcacttcgaagacatgaacaaattcactagtgagaaactgtccatgtaataaatgtgggaaagctctcatttgttccagttcactttaaagacatgaatgaactcactctggagagaagaagctgcatgaaaattacttaattcctgtaatcccagcattttgagaggctgaggtgggtggatcacttgaggtcaggagtttgagaccaccctggccaacatggtgaaaccttgtctctactgaaaatacaaaaaatttagccaggtgtggtgggcacctgtaatcccagctacttgggaggctgaggcaagtgaatcacttgaacccgggaggcggaggttgcagtgagcagagatcatgccactgcactccagcctggggcgatggagtgagactccatctcaaaaaaaaaaaaaaaaa

SEQ ID NO: 54134 - DNA, 701 bp, Homo Sapiens
ttgcttttgatggcattctctttccaccttgtcttctcctttgctcctctgtgttagtgtggcaggtatgacaactcatccagtggaaacacagcctcacactgcccttccgccccccacactttgcctgcaggtgcaccgaaaggacctgggagataaaattcaaaaaagtgtgatgtgctgctcagaaggtcagactccatgtctgccttgacctcaaggtcagaaggttcccaaacccctggggctggaacatgggatctcctcttccacctcttcctggttcctttgcggggaaaattgcactaaaacagaaccttttcttaatccatgttggaaggaagcaacagtgaactctacctgttctggagttctcctgggtctgcagaaggttgggaatttagaaaataaggctgttctttcatattttaatttaatctctgtcaatggccatccctcccacaaaaaaacgtgggttaagagaacttgcagactggatatgcaagcaaacgggcaactctggagaaaaataaggaaaggaatgctgactttctctttctttctcttgtccccacacccattcccaacccaatactggggccttctcaaaaggagcaaattaaacaataaaccagacagcaaggccctgggggaaaggacaacatcctgaaataaatgatggagcccaggaaggtctcttg

SEQ ID NO: 54135 - DNA, 431 bp, Homo Sapiens
ctcaggactctcaggtgcagctttgccaaaaaggaacttttcatgtcatgcagttgaggggacttagtctcaatcccaggctcctcttgactctgggcagctttaatcaggttgggcagcctctgctacagcgtggagtgggatggctctcttccctcagccacgccgcttgtgaggacagaggtgggggagtgggaagtgggaagtcaccagagaacaggagagggatttgagggcgcgaccccagcgctctccacggaccagccagagggactggagccaggtgtgcatgggttcaaggccctggccctgcccagcctctgtcttgggagctcagccccagggttcggtcgtcagcagtttcccaagaacaagatgtgatggcatctgctgctgaaaccctgatgaggaccaggccccctgcaccgctg

SEQ ID NO: 54136 - DNA, 711 bp, Homo Sapiens
  misc_feature (553)..(553): n is a, c, g, or t
  misc_feature (569)..(569): n is a, c, g, or t
  misc_feature (571)..(571): n is a, c, g, or t
  misc_feature (618)..(618): n is a, c, g, or t
  misc_feature (641)..(641): n is a, c, g, or t
aggcaacgtgctgcaggcgcactctgtcagagtgaacagcaccgcgagacaggccaggctcgtggctcggaagacaaaccccacacacactcaaggggtcgaaaacaaaccccacacgagggctctcacctccttctcctaggtagtatttattttcagcacctgtttgatgcagtttttaatcctctacctattgcactgttgtgactcgttggccattatttgatttttgtacgaaaaaaagctttgttatagaaatcagcatactatttttttaaatctggagagaagatattctggtgactgaaagtatggtcgggtgtcagatataaatgtgcaaatgccttcttgctgtcctgtcggtctcagtacgttcactttatagctgctggcaatatcgaaggttccttttttgtttgtgtaaactctaatttctatcaaggtgtcatggatttttaaaattagtatttcattacaaatgtctcagcattggttaactaatttttgccaggaccattatggatcaagcaaaataattcaacagccatttggngaaaaaggcttctagntnttttgtacacattctttctgtgaggagaatgagactctgcagttgcnaaggagtggtgaggcactcttcngggccaaggggaacacatggtttggttcaggtacttggcaccctaactttggccggaggtgtgggggcgg

SEQ ID NO: 54137 - DNA, 645 bp, Homo Sapiens
ccttgtgggcacgagagtgcggcccttgctgctggagatctgaggtcactgctgtgagctgggagaactgctgtgtacctcttgctgccagcacccaacagccttgccgtggggaccttggaaacctggctttgctctggacaaagggttccagagagaagctagaagtcccccttgaatgacccccagagcccctctgagaagggctggagtttgggggaaggggatggctggatgtgctccaggccatgctggaggtacccccgaggcacaggcactgcccgttccccttgcctgggcttcaggccttctggcaccttctcaggacacaagtggctgccaacctgactcagagaatgagggtggcttggacccctgggaatcaggccgccgagggctgagctccagagccgcaccatcttgcacaaacagaattcgagacatacttaattttgaatttctccttgccacgttaataaagccaaaagcagcgggtgctattcgtggcaacacacttcactgaaccacttgttccaaaagatgccagccgagcactgtacgcagagttgcacatggatgttggtcaggcgctccctccaggattctgccctgctgtcacagatcttttgtgtggaacaggtcctc

SEQ ID NO: 54138 - DNA, 646 bp, Homo Sapiens
  misc_feature (576)..(576): n is a, c, g, or t
ggaatttctgtctatgataggatttccaaaagtatttgtggacagttaaatgctaattaatatacatctgtagttattctacattgtcttgaaatttgggaggttaataccaagtattcatttcatgatgtaaagaaactgaacagtgaagtggctggattgcttaaactattgacttggtaagtctactgtatataacatctaatatatatattacaggccaaatgaactaaacattgccttgctatattcaccaaaaggacttaattcttgtttttttcccagttttatatagaggaaacactatgataggatttcctaaagtatttgtggacagttaaatgctaattatatacatctgtagttattctacattttcttgaaatttgagaggttaataccaagtattcatttcatgatgtaaagaaactgaacagtgaagtggcttgattgcttaaactattgacttggtaagtctactggatataacatctaatatatatatattataggccagctacaaggggtttaaatatttaggattgtgtcttgaaaactaagtatgggagtggattntcttctgctttcattgatccttgtcagaaaataatattagaccaaaatgtaaaatataagtaaataaaaa

SEQ ID NO: 54139 - DNA, 519 bp, Homo Sapiens
tgtgcggattctgaatgccaatgatgaggccacagtgtctgttcttggggagcttgcagcagaaatgaatggggtttttgacactacattccaaagtcacctgaacaaagccttatggaaggtagggaagttaactagtcctggggcttgctctttcagtgagctaggcaatcaagtctcacagattgctgcctcagagcaatggttgtattgtggaacactgaaactgtatgtgctgtaatttaatttaggacacatttagatgcactaccattgctgttctacttttggtacaggtatattttgacgtcactgatattttttatacagtgatatacttactcatggccttgtctaacttttgtgaagaactattttattctaaacagactcattacaaatggttaccttgttatttaacccatttgtctctacttttccctgtacttttcccatttgtaatttgtaaaatgttctcttatgatcaccatgtattttgtaaatataaaatagtatctg

SEQ ID NO: 54140 - DNA, 1005 bp, Homo Sapiens
  misc_feature (861)..(861): n is a, c, g, or t
  misc_feature (971)..(971): n is a, c, g, or t
ctgggaactgctcatagatttaagcaaaggaacacaacacttgaagtccatcctttccaaggatggggttttatatgttaaactccgggcgggtcagctctcctacaaagaagatccaatgggatggcaaagtttgttggctcagactgttgctaacaggaactctgaagcccgggctttcaagccagaaacaatctcagcattcacttctgatccagcacttctgtcatttgctgaatatttctgcaagccaactgtgaacatgggtcagaaacaggaaattctggatctcttttcttcagtactctatgaatgtgttacccaggagaccccagagatgttgcctgcatacatagcaatggatcaggctataagaagacttgggagaagagaaatgtctgagacttctgaactttggcagataaagttggtgttagagtttttcagctcccgaagccatcaggagcggctgcagaaccaccctaagcgggggctctttatgaactcggaattcctccctgttgtgaagtgcaccattgataataccctggaccagtggctacaagtcgggggtgatatgtgtgtgcacgcctacctcagcgggcagcccttggaggaatcacagctgagcatgctggcctgcttcctcgtctaccactctgtgccagctccacagcacctgccacctataggactagaagggagcacaagctttgctgaactgctcttcaaatttaagcagctaaaaatgccagtgcgagctttgctgagattggctcctttgcttcttggaaatcacagccaatggtgatgtgaccgtgtctggcgggtgacctaccctgaaacgtgacttctgcacancaaacgtgaccaaacatcaaagcttaagcaatgtttataaagttttatggtataacatagggggaaatgagctgcacaaaacctcaatggattttaaatctggtgctgtncatcattaacggtatatgaccttataaaagcagt

SEQ ID NO: 54141 - DNA, 860 bp, Homo Sapiens
cttgccatgaagcagtccaaagaaatggatcagttgaaaaaagtccagcttgaacatctagaattcctagagaaacagaatgagcagcttttgaaatcctgtcatgcagtgtcccaaacgcaaggcgaaggagatgcagcagatggtgaaattggaagccgagatggaccgcagaccagcaacagtagtatgaaactccaaaatgcaaactgaagcagcaaacccacaaagcatcaaaagactcactcacaaacttctgaacacaaactccatggatgaaagctgtttattttgtttcctttatgtgtaaacaagatgatatctgaaaccagagagacttggaatgtctgactgacttctatttaacagcttgagtattgcatttccttggccaaacaaaaatagctacaaatccacaaaaatttactattccagtaaggcagagtccaaccattgataatacaacttaaacatgtttgctataaaataccatcacaagtaaatgagcttggtgtgaacaactctcctttgtgatgccttaggacatgtttgaactgcagcaaaaaacaaaaacaaaaaacagtgcattagcaatttcatagcaagtgcatgcactaagaaaagaaaactctgtctacaagtttattagcagaagtggtggtctgctagacaaataattttgcaaaatttttctacatctaagttacctcatcagtaagtgccatgtctctaccatgccatcagaggctaatttcctgtaaaagttgtggaaattgttagaacaatagaaaaatagagcagtgtatgtgtgccaaaactcatcattactcaaaggagaactgtgttaggcacatttaaga

SEQ ID NO: 54142 - DNA, 638 bp, Homo Sapiens
agaactagatctgttgcttaatttagatgcacctataaaagagggagataacatcttaccagatcagacgtctcaggacctgaaatccaaggaagatggggaggtggtccaagaggaagaagtttgtgcaaaaccatctgtgactgaagaaaaaaacatggaacctgagcaaccaagtacctccaaaaatgttaccgaggaagagctggaagactggttggacagcatgatttcctaaaaaggggaaaaaaagtgcctgaagcaaatcttggttgccttctaacggcaggtgggcataaggctgtccttcaggaccagccagtttacaagcatgtctcaagctagtgtgttccattatgctcacagcagtaaatgcctacctctgtgtttgacatctgaaagaatacattgaagcagcttgttgcatttgtttttctggcttagtaatctaatagatttccttaagggcaggagatagactctggcccttgtttctagcctccttccttgcagtgtttacaacatagccagtgtttacagcatagcagatgctgctgctgattaagagaatagatgcaaacaaggcatgcatttggccaaaataaacaaatgctggtctgtccaaaaaaaaaaaaaaa

SEQ ID NO: 54143 - DNA, 599 bp, Homo Sapiens
ccaattgttaataacgctatgttagcgcgctcgaggaagaaggtaggaatcccggctccttttctcgtcttggtggttcggtgttttgttcgctcctccaggcgcggcccctctcgacctcgcgcgcccattttcgccgctgcgaattctcggacaaaactgtcaacagcccgggcgcgccttttggctctgcgggtccctctatttatgcaaagccgacctatgctacagccccccaacccccgacctggggtagggaggaagagggtgccggggaagggagtccgccctgtccaggcactagaggctcccttgacgtttggcagatgaaaaacaactaagcctttttgaggtgtagagattctcaggtccaggcgttaaaaaataatggtcaaaagaataatacaaaaatagtaaaggtcttgaagaatgccagcgaagcaattcttttttatttgaggacacttgtctggtgtactttttcatgaaaaggaaaaatggttaacatgtttacacaagaaaaaaagtcaaaattatcatttatttcaacctgtgttttgtatcataacagacgtgtggatttttttgtacttactgcg

SEQ ID NO: 54144 - DNA, 788 bp, Homo Sapiens
ggcacgagaacatggcggctccactagggggtatgttttctgggcagccacccggtccccctcaggccccgccgggccttccgggccaagcttcgcttcttcaggcagctccaggcgctcctagaccttccagcagtactttggtggacgagttggagtcatctttcgaggcttgctttgcatctctggtgagtcaggactatgtcaatggcaccgatcaggaagaaattcgaaccggtgttgatcagtgtatccagaagtttctggatattgcaagacagacagaatgttttttcttacaaaaaagattgcagttatctgtccagaaaccagagcaagttatcaaagaggatgtgtcagaactaaggaatgaattacagcggaaagatgcactagtccagaagcacttgacaaagctgaggcattggcagcaggtgctggaggacatcaacgtgcagcacaaaaagcccgccgacatccctcagggctccttggcctacctggagcaggcatctgccaacatccctgcacctctgaagccaacgtgagcaaagggcagaggcagttggcctatgagtgggctgatgcgtgagggtggccacacattcctttctgtggacttgacatttttggaagaactctttgccagataatgagttcattttagttttatgctcccattgaaaaattttccactatttttataagctgttaatttcttgagtactttataacatgtctgtagcttggataaaccaagtaagtatttaaaaaaaaaaaaaaaaaaa

SEQ ID NO: 54145 - DNA, 511 bp, Homo Sapiens
ccgccttgtccccccgacatgctgcgtgatggtgtggcttcctcgcccctctctggggtgggtgtgggggtggagtggccttgcccacgcctctcacctctgccttcatttgtgctgccaccctgcccctccctcgtcctcctctcccgcttcctcctctctgtgtgcctcagtctcctgccggaagaaatgggttgagcccgaaaggaggctgtctgaggaagggagagggagggcctggggtgggtcccccactccccaccccaagccacaggggctcccaccagggtctgggagaggacggagctggctctgtggcgtcgtggccccattactgctgccttgcttcagccacctctcctgcccctccctagtccccactgctgtccaccatgagtaggagggaggtgcagtccccagcccccacccctcaggtctgtgttacttggtttttaagcgactggttgggatagaaccctaaagaaataaacttccagtggataccggaaaa

SEQ ID NO: 54146 - DNA, 596 bp, Homo Sapiens
ctgagcactaccatagagccctggggcctcataccgccaaccaccgctggctgggaggagtcggagactgagacctacacagaggtggtgacagagtttgggaccgaggtggagcccgagtttgggaccaaggtggagcccgagtttgagacccagttggagcctgagtttgagacccagctggaacccgagtttgaggaagaggaggaggaggagaaagaggaggagatagccactggccaggcattccccttcacaacagtagagacctacacagtgaactttggggacttctgagatcagcgtcctaccaagaccccagcccaactcaagctacagcagcagcacttcccaagcctgctgaccacagtcacatcacccatcagcacatggaaggcccctggtatggacactgaaaggaagggctggtcctgcccctttgagggggtgcaaacatgactgggacctaagagccagaggctgtgtagaggctcctgctccacctgccagtctcgtaagagatggggttgctgcagtyttggagtaggggcagagggagggagccaaggtcactccaataaaacaagctcatggca

SEQ ID NO: 54147 - DNA, 516 bp, Homo Sapiens
ggcagaggctcagcctggctcccttccctggagcggcagggcgtgacggccacagggtctgcccgctgcacgttctgccaaggtggtggtggcgggcgggtaggggtgtgggggccgtcttcctcctgtctctttcctttcaccctagcctgactggaagcagaaaatgaccaaatcagtattttttttaatgaaatattattgctggaggcgtcccaggcaagcctggctgtagtagcgagtgatctggcggggggcgtctcagcaccctccccagggggtgcatctcagccccctctttccgtccttcccgtccagccccagccctgggcctgggctgccgacacctgggccagagcccctgctgtgattggtgctccctgggcctcccgggtggatgaagctaggcgtcgccccctccgggagccctggggtgagccgccggggcccccctgctgccagcctcccccgtccccaacatgcatctcactctgggtgtcttggtcttttattttt

SEQ ID NO: 54148 - DNA, 495 bp, Homo Sapiens
  misc_feature (493)..(493): n is a, c, g, or t
  misc_feature (495)..(495): n is a, c, g, or t
ggacccattgttgaaactcctgtagctattatgcttttaatattgttttaatgatcttccttagaaataggcccataaaaatggtctggaagccaaaccaaagtatggtataatgtagatattgtaaagcagtaaactgaaaacatgtcctggcatgtattcagccatgtttaagtgacttttctgtaattgtaaaataaaaacttcaaatgggacctaaaacagtgatgtaaaagaactggttttggaaatttagcctaatttatctataagatggctgctaaattgatttttcagttctttttatcatctagaatataatagatatagaaatgaataatatgaagaacagtagtttgctttgaaatactaataaacttttatttaaaatgcttcatttttacttcttaaaatgtgctttggattcttaaattttgtttcactgaatgttcaatgttttaaatggcgattaaaatactctgctgtaaaaaanan

SEQ ID NO: 54149 - DNA, 588 bp, Homo Sapiens
tgaagtgtacccggaaaaggaggaactgaaagagcttccacctgtcacttcggaacagtgactctggagaggaagccagtggagctggtctgccaggggcttcccactttggcttatttttctgacttctagctgtctgtgaatatccagaaataaaacaactctgatgtggaatgcagtcctcatctccagcctccccaccccagtgggaactgtgcaaagggctgccttgctgttcttgaagctgggctgtctctctccatgttggcctgtcaccagacccgagtcaattaaacagctggtcctccactttgctggttcagccttcgtgtggctcctggtaacgtggctccaccttgatgggtcaacctttgtgtggctcctggtaacataacaacaacagttactatagtggtgagatggaaggaatcaaattttgccagagaaactaacttggtggccccgacaggtcttccggggccatgggcatttgtttagagccaaattcatcctcttaccagatccttttccagaaatacctgtctaggaaggtgtgatgtcagaaacaatgacatccagaaagctgag

SEQ ID NO: 54150 - DNA, 956 bp, Homo Sapiens
gaataagagcgtgtgctgttgataatatctctcacccggatccctcctcacttgccctgccactttgcatggtttgattttgacctggtcccccacgtgtgaagtgtagtggcatccatttctaatgtatgcattcatccaacagagttatttattggctggagatggaaaatcacaccacctgacaggccttctgggcctccaaagcccatccttggggttccccctccctgtgtgaaatgtattatcaccagcagacactgccgggcctccctcccgggggcactgcctgaaggcgagtgtgggcatagcattagctgcttcctcccctcctggcacccactgtggcctggcatcgcatcgtggtgtgtcaatgccacaaaatcgtgtgtccgtggaaccagtcctagccgcgtgtgacagtcttgcattctgtttgtctcgtggggggaggtggacagtcctgcggaaatgtgtcttgtctccatttggataaaaggaaccaaccaacaaacaatgccatcactggaatttcccaccgctttgtgagccgtgtcgtatgacctagtaaactttgtaccaattcaaaaaaaaaaaaaagaaacacaaagaaacaaaaactagacaacagaaaagagggggggggcgtaataaaagatatcccctcaggggggcccccaaaaatagaggctcaccccagtctcgtcggcaacaggggggcccccaaagaggagggcatatatagacgccacgcgagcggcggctataaaccacacgctgcagggggaaacacgccgcacctagcgccctggggaagacgcccatacatgagggcggggccacacgtgggacacacactcaccgaaaattagcgccgggggaacaacaatgcggggtagcgggcaacacagcggagggcgcgggaagaaatgccacgggcatatgagccataaccg

SEQ ID NO: 54151 - DNA, 785 bp, Homo Sapiens
gtgtctataagaatgatcaagctgcaaaggataatccaactaaaagtcttcaggaagaagaaccatgtccaaggtttgcccatcagcttgtatacgatgagctacacaaggttcattacttatttggtgggaatccaggaaaatcttgctctccaaagatgagattagatgacttctggtcactgaagttgtgtagaccttcaaaagattatttactgaggcattgcaagtacctcataagaaaacacaggtttgaagaaaaggcccaagtggatccccttagtgctctgaaatatttacaaaatgatctttatataactgtggatcattcagacccagaagagacaaaagagtttcagctcctggcatcagctctattcaaatctggttcagattttacagctctgggcttttctgatgtggatcacacctatgctcaaagaactcagctctttgacaccttagtaaatttctttcctgacagcatgactcctcctaaaggcaacctggtagacctcatcacactgtaactgaagagtcactggacacagaaatggaaaacaggagtcgattttccgtcttttggattgcagctccactgactgacagtaaagctgcagtgattgaggactgcaccagagttctgaagggatcttaaccatcacaagtttttaccctcttccttcatgcctgacctcaaccccgctctcctcatcctattcctaaattaggctaataaagtgaaattggtatacttttcagtttaaataaaaaaaaaaaaaaaa

SEQ ID NO: 54152 - DNA, 877 bp, Homo Sapiens
ggaacctagaagctgtcttgaatgccttggataaaattgtggaagaaggcaaagtccgcaaagagccagcctggcgccccagcgggatcccagagaaggatctgcacagtgttatggcaccctacttcctgcagcaacgggacaccctgcggcgccatgtgcagaaacaggaggccgagaaccagcagctggcagatgccgtcctggcagggcggaggcaggtggaggagctgcagctacaggtccaggcccagcagcaggcctggcaggtgcgaagcccagcggtgcagagtccagcaaaggtgcagcctttgtgtccaagcaggagggcagcgaggtagtgaagagacccaggcgctacctgtatcaatggctgggagccccagtcccctacccggatcccctggagcccaggagggaggtgtgtgagctcaatccggactgtgacgagttggctgaccacatcggctttcaggaggcctatcggcgcttctacggcccggtctagggtgtcgctctgctggctggccggcaaccccagttctgctcctctccaggcacccttctttcctcttccccttgcccttgccctgacctcccagcctatggatgtggggtccccatcatcccagctgctcccaaaataaaactccagaacgagcgacaaaccacacacacacacacacaataatcacaaaatgtcagaaaaaaaaaacaccctcgggggaccaattttcgggggggccgcaaaaaagaggtttaaataaagggcccgtggtgtcatgagtgttccgggcacccgttttttttgcaacaggggggaaaaacggggggcccccccaaaagggggcctataattggaaacgcggtcccgtag

SEQ ID NO: 54153 - DNA, 663 bp, Homo Sapiens
gctatataagaaagggaatcaattctctggtattctggaaacctaaaaatatttggtgcactgctcaattaacaaacctacatggagaccttaattttgacttaacaaatagtttatgtactgctcttaggttgttttgataaagtgacattatagtgattaaattcttccccctttaaaaaaacagttagtggttttcactatttataaaaaattaattttgaactttttgttaaatttttaagttatagctttaaaggttttaataggaccttcttgaacgacttttctgtaatctgtttatctcccacttaatggaaaggcaaaggggtaccccaaatccagaggtgcctacatttcaggcagccttggagtattttaaaaggaaaacattctttacttttatatgacattcttatactgctgtctcaaatccaaaaacatttcagagctcttgtctcagagatgtgtgttctttttgtcagagatatggttgatgagaatcttaaatgcttgttttgcactatcacttagtacctgtttgaccaaggtgttaaggggatagtacctcccaattcaagcagagaaactgacctgactaaagttaatcgcagatgaactagaagtcacaggttaattaaatgtaagtagattgtagatact

SEQ ID NO: 54154 - DNA, 734 bp, Homo Sapiens
ctctctctcctggagcctcatctccatgtcaagcaggagggtaaagaagggaactaagagcaggtctttcaagccacacccccacctgcggatggatgggtttctctgtaggccatgcaggcctttgtcgcagcaaaccttcccagcagcccttgagccaagtaaaaccagcacaaccagccaccagtggttggtgaggcagtgcccacaaggctcatgttgtatgcctttgataaggccatcttggctttgagtagcagtgttcctcgtcacccatttccccctcaggattacaacacctgctatcaaatcatctaagctgaaaacatgagatgcgcttggaaaggcctagtcagaagccatttcctcttatcatttccctctcctatgcaccagtaaggcccgtccagagccccagcagggagtgggccctgagtccacactgtccctgagtgatccaggaggctgcccacatccccacatgtgcactgtggttccagtgtagctgctgtgagcccactgccactgcctcagaagggagccactgtgaacctctcgagtggctccaaagagcagtggctttttgagaatggcccatacttctggcccggctggatgaagggaatgccgaccctttggcctctccccctccttccatctctttctctctcttgccctatctctctttctacttcagaaaaaaaaaaaaaaaaaaaaaaaagcctgtcattcac

SEQ ID NO: 54155 - DNA, 846 bp, Homo Sapiens
ccagaggatgacactaaagagaagattggccccagcaagcccaatgaaatccctcaacagccaccgccaccatcttcagccaccaacatccccagctcggctccacccatcacttcagtgccccgaccacccacaatgccacctccagttcgtactacagttgtctccgcagtacccgtcatgccccggcccccaatggcatctgtggtccggctgcccccaggctcagtgatcgcccccatgccgcccatcatccacgcgcccagaatcaacgtggtgcccatgcctccctcggcccctcctattatggccccccgcccaccccccatgattgtgccaacagcctttgtgcctgctccacctgtggcacctgtcccagctccagccccaatgccccctgtgcatcccccacctcccatggaagatgagcccacctccaaaaaactgaagacagaggacagcctcatgccagaggaggagttcctgcgcagaaacaagggtccagtgtccatcaaagtccaggtgcccaacatgcaggataagacggaatggaaactgaatgggcaggtgctggtcttcaccctcccactcacggaccaggtctctgtcattaaggtgaagattcatgaagccacaggcatgcctgcagggaaacagaagctacagtatgagggtatcttcatcaaagattccaactcactggcttactacaacatggccaatggcgcagtcatccacctggccctcaaggagagaggcgggaggaagaagtagacaagaggaacctgctgtcaagtccctgccattttgcctctcctgtctcccaccccctgccccagacccagg

SEQ ID NO: 54156 - DNA, 577 bp, Homo Sapiens
  misc_feature (407)..(407): n is a, c, g, or t
tgtgccagatttggcccctgaaagaagagatgccctcattcccaccaccaccccccctacccccagggactgggtactaccttactggcccttacaagagtggagggcagacacagatgttgtcagcatccttattcctgctccagatgcatctctgttcatgactgtgtgagctcctgtccttttcctggagaccctgtgtcgggctgttaaagagaatgagttaccaagaaggaatgacgtgcccctgcgaatcagggaccaacaggagagagctcttgagtgggctagtgactccccctgcagcctggtggagatggtgtgaggagcgaagagccctctgctctaggatttgggttgaaaaacagagagagaagtggggagttgccacaggagctaacacgctnggaggcagttgggggcgggtgaactttgtgtagccgaggccgcaccctccctcattccaggctcattcattttcatgctccattgccagactcttgctgggagcccgtccagaatgtcctcgcaataaaactccatcctatgaaaaaaaaaaaaaaaaaaaaaaataggt

SEQ ID NO: 54157 - DNA, 719 bp, Homo Sapiens
ccggggccccacaagttactactacatgctgcccatgaaggtgcgggcgctgggtctcaaagtggcactgaccgtcaagctggcccaggacgacctgcacatcatggactccctagagctgcccaccggagacccacagtacctgacagagctggcgcactaccgccgctggggggactccgtactcctcgtggacttaacacacgaggagatgccacagagcatcgtggaggccacctctaggcttaaraccttcaacttgatcccggctgttggcctaaatgtgcacagcatgctcaagcaccagacgctggtcctgacgctgcccaccgtcgccttcctggaggacaagctgctctggcaggactcacgttacagacccctctaccccttcagcctgccctacagcgacttcccccgacccctaccccacgctacccagggcccagcggccaccccgtaccactgttgatgtgaagcacctcttctgagccaggccgagcccctggccgacttgggagcctcaggcccacgcccacccttcgaggaaggtgtcacctggaccccttcattccacggaggaagctgaggccacagggagcggccatcgccattgggaaggggcgactccacggaaagcccagacgggcttctgcatccattccctctttttgtttttaaaataaattgtatttttgaatcaaggaggataaagaaaa

SEQ ID NO: 54158 - DNA, 1208 bp, Homo Sapiens
  misc_feature (1065)..(1065): n is a, c, g, or t
gttatcatctacgacccacgcgtccgatctgtggctacttggtggactctgttgctaaaacaattgatgcaggttgcaaaccatacatggcccctgaaagaataaacccagagctcaaccagaagggatacagtgtgaagtctgacatttggagtctgggcatcacgatgattgagttggccatccttcgatttccctatgattcatggggaactccatttcagcagctcaaacaggtggtagaggagccatcgccacaactcccagcagacaagttctctgcagagtttgttgactttacctcacagtgcttaaagaagaattccaaagaacggcctacatacccagagctaatgcaacatccatttttcaccctacatgaatccaaaggaacagatgtggcatcttttgtaaaactgattcttggagactaaaaagcagtggacttaatcggttgaccctactggggattggtgggtttcggggtgaagcaagttcactacagcatcaatagaaagtcatctttgagataatttaaccctgcctctcagaggggttctctcccaattttcgttttactccccctcttagggggccttggaatctatagaatagaatgaactgtctagatggatgaattatgataaaaggcttaggacttcagaaggtgattaaatattttattgatgtggtcatatgaagtcctcaaggcttctccagactcttcttattcttttacaaaatggaatgcatttggccccctgaaccaaaaaggttgcttaccggtaagcggatggaaaacttataaggtcaaaatttttgaaacgttttggtcccccattttatctaattttcaaataacttttatggtcttaaaggcggctttggggttgaaaacaccaattccccctttttaactacaaagaaagggccagaattccgaccaaataaaatatataacggttgggggcaaagccaattaatcttctagggggcttttttaatcttttcttaaagtctcaaattggtggcgcctggggggccccaggaaaaaaaaaattattntataaaaatgccacttcctttgggaagaacatatttgtttagaaatcacttcccacaagagggaggcctctctttcctctggggagacaacagggtctctggtttcccacctcgttgtgtgtgcggaccgtgtgttttgcccc

SEQ ID NO: 54159 - DNA, 750 bp, Homo Sapiens
gcctttttaaaaagcttatgcttacataatatactcttttttatggacacgttatatgtttccaaatctgtgtattgtgatttttacatactaatgaatataaacaggtgattttaaaatattactgtgcttctttggttgaatgagctggtattgatgtaaaatactctgtcattgatggaccactacctgcagctaagcagtgagcagaatctccgggaaatgacttagtctggccacatgcatagcccatcttcataatgtcgcagcagaaggttctttgtggttaaaagttttaaagcctatttctttataggtaaccctctcaggtatatttacctggtagaaaaacatgtagattgtttctattacttaaatgttttaattggactgtagtttagaaattacaggaccagcttgttacagattatacactattctgttacttttatttctgaaacttaaaaacaataaattctttttctgtgtttctaggttagaacttttttattttattgcacactgaacagatactgttgcttattgaatattgtgtaaacccttctttggctttccttgcccattgcaatttgatttaagcctactagagccattgtatgtgacagctatattgtattacaaagtaaaaatatatgagtgtattgaaaacaaagttgttttaattttgtttcatcacccagtctttaattttgatttataatttacaaaagtactttgatcactgaatgt

SEQ ID NO: 54160 - DNA, 525 bp, Homo Sapiens
  misc_feature (25)..(25): n is a, c, g, or t
  misc_feature (501)..(501): n is a, c, g, or t
aattcgcggccgcgtcgacgcgctngcgacgcggctgcgagaagacgacagaagggccaggtgtcgggcgctgtttctcgttttcatcatatagacaaaacagccctgctgcaaagatggtcaacgtacctaaaacccgaagaaccttctgtaagaagtgtggcaagcatcagcctcacaaagtgacacagtataagaagggcaaggattctttgtatgcccagggaaggaggcgctatgatcggaagcagagtggctatggtgggcagacaaagccaattttccggaagaaggctaagaccacaaagaagattgtgctaaggctggaatgtgttgagcctaactgcagatccaagaggatgctggccattaagagatgcaagcattttgaactgggaggagataagaagagaaagggccaagtgatccagttctaaactttgggatatttttcttcaattttgaagagaaaatggtgaagccatagaaaagttacccgangggaattacagtgatattcttacc

SEQ ID NO: 54161 - DNA, 561 bp, Homo Sapiens
ctgatctgggggctgcaatttggcctaagaagggtacagctgtgttctggtacaacctcttgcggagcggggaaggtgactaccgaacaagacatgctgcctgccctgtgcttgtgggctgcaagtgggtctccaataagtggttccatgaacgaggacaggagttcttgagaccttgtggatcaacagaagttgactgacatccttttctgtccttccccttcctggtccttcagcccatgtcaacgtgacagacacctttgtatgttcctttgtatgttcctatcaggctgatttttggagaaatgaatgtttgtctggagcagagggagaccatactagggcgactcctgtgtgactgaagtcccagcccttccattcagcctgtgccatccctggccccaaggctaggatcaaagtggctgcagcagagttagctgtctagcgcctagcaaggtgcctttgtacctcaggtgttttaggtgtgagatgtttcagtgaaccaaagttctgataccttgtttacatgtttgtttttatggcatttctatctattgtggc

SEQ ID NO: 54162 - DNA, 532 bp, Homo Sapiens
ggcgtgagtgtggtggcgcttctgagcctcggcctaggtcacgttggccctcaaagcgagccgttgaattggaaactgcttctagaaactctggctcagcctgtctcgggctgacccttttctgatcgtctcggcccctctgattgttcccgatggtctctctccctctgtcttttctcctccgcctgtgtccatctgaccgttttcacttgtctcctttctgactgtccctgccaatgctccagctgtcgtctgactctgggttcgttggggacatgagattttattttttgtgagtgagactgagggatcgtagatttttacaatctgtatctttgacaattctgggtgcgagtgtgagagtgtgagcagggcttgctcctgccaaccacaattcaatgaatccccgacccccctaccccatgctgtacttgtggttctctttttgtattttgcatctgaccccggggggctgggacagattggcaatgggccgtcccctctccccttggttctgcacgacagcccaaaa

SEQ ID NO: 54163 - DNA, 755 bp, Homo Sapiens
atgtagacacttgagaaatgtttctgtttgaagaaaatagagggagaaacagaagtcttaagtctgtggcacactgtgtcttcagacagtttgaaggaatgaaaacctagagattttaaatcatgaattgaacatgtaaaattccagtaaaatgtaaaaacggaatatgcatcgctcttaaccttgagcatagtgacttagagacactgtgtatcagttttgccaataagactgtggacttcatgattgttgttgaacttctgggtcaaaactcaaatgaggtgaattttgcctttaaagggtttatttgctgagaaccaactttcaatagtcatgagagaatcaaataatagatgtccgtacaagtagcgcatatatttaaccatttagtttggggctctatattacttgcttgagccttaatcaatgtggttttattcaatggtttgttctttgaatggttgcaaaaactgtagataatcttactgaggactgtacaaacatgaaggtgtggtatcaaacttcaggttgaaactgtttgaagcattataaacattcatttcacaactagattgtataaggatattagctgtgatgagactcactgcattattttttttagtgaattttatgaaatccccgttccattcaacaggcacatgtttaaaagagctttgtcgttggtgttaatgggggaatgtgttccttcattgtatttgggccttttgtattgcactcttgatattaaattaaat

SEQ ID NO: 54164 - DNA, 856 bp, Homo Sapiens
tagatgcagccttggatctttctcatacccaaaacattggacagatgctgcgtactcatttcacacattctcagttcattgtggtgtcactaaaagaaggtatgttcaacaatgcaaacgttcttttcaaaaccaagtttgtggatggtgtttctacagtagccagatttactcaatgtcaaaatggaaagatttcaaaggaagcaaaatccaaggcaaaaccacccaaaggagcacatgtggaagtttaaactacaaagttatttcttcatcttgacctgtttttttaaatgtaaacttttaaggacttgagataactaatttgtttatatacaaaaattaatgttactgtgttacttaacccatgttttctctttatataatcacttatcgcttacaaatgagcatatattcctcatctcttaactagtctaattatggtccaattattgtggttgtgattttatgcatatcatcaaatgtttttttcttatgcgggtcttttatatattagggatcctgagatacccgattctatatgtaaaagctaatatacaaaaaagcagattaaattacatgataaatgtagctgatcatcagtgtttaattgatttaattcctaaggcaatattaatgtgttttctaaagtcattcaggtaaggaagaattataaatcaggtaactggaccaacaaagggaacacatataaagctattatgcatgcatggagccgtttgaggctagtttttttaaggccacaactccagacccctgatttagactgagataggaaaacagatcttgaaagagtcccttatttttaatgatacatgaatatcatgttcctatacgctta

SEQ ID NO: 54165 - DNA, 617 bp, Homo Sapiens
  misc_feature (617)..(617): n is a, c, g, or t
gatccttcattgggtactcctgaaatcagacatgttcctgtagaaagaattttaagttaggctttctatgcacctatcaagaatcaagagaatagattgtatcaaacaacggcagggaaatccttcagcaattctaatccactttgggttttcagctgtttttacatctaaagcaatagactagaactgaattatcttctacatagtaaaatcacaattgtggaattacaggaattctggtgatattaaggtgaaataacaaaacacaaaaggccctattttaacagttgatgtgacagtaagttttaatagaacctgtaacttcattttggaaatgcttctccaccaaataagggctttttcccctatttaaggagccagatggattgaaagatgtggaaataggcagctgtagatcttgatcttccaggtaccccatgtacctttattgagcttaattataatactgtcaaattgccacgatctcactaaaggatttctatttgctgcagttaaaaataaagccctaaatacatttttattctttctactgaaggcattgtctgttttttttgtaaatgccgtacaataaaacaaaatatttaataaccctaaan

SEQ ID NO: 54166 - DNA, 779 bp, Homo Sapiens
cgcgtccggcggaggattgctgccagagaagtctggtcagagccacagggtctgcctccagccaaacgggagcttttggtgagaaggtgttggacaggggattggcgcccccctttggtttggcctccatcctcatctctcttgggccaagccagctgcctaggtcccccaagcatgggggaccccttcccacatataagttgagaaggtgcctgccatagccaggagcgcatctcaatggaaacatcactggggtcacttgggaagaggacttcggggtagaggctgggaggagcccctggacatgcctgtcctgaaagcggctgcctccattatccattcccaagatgcctgatcagaaaccaaccatgaatgaacccctggctccttcaccacccccacgattggtatgatgctgccggcacagctgggatacacacggctcccccaggcctgagctgcttcactagggaatcctgcggcaggactgcagagcagatggcagatgcacatgttggaggagagagccttgggagccactgccactccagtcctgccaccaccctgtcttcctctgcaagtgctcagggaaatggccttcccgccggaggccagctatctgcctgacaggctgtgactcttctctcaaccttggccttctcccctcttctgagctagttggttgaatttttttttaatgcttaagatttgtttttctcttttcacagcaacatttttcttgaatttttttctgcacagcttttccaaaataaaaacct

SEQ ID NO: 54167 - DNA, 692 bp, Homo Sapiens
  misc_feature (661)..(687): n is a, c, g, or t
  misc_feature (689)..(689): n is a, c, g, or t
ggaggtacttctaccattaaggtgaaatcatggatcagatattccttacatttttcaaaactactgcatgtttaaaacttcaacaaaaaaagagagaaagaactatactaagaacatatattattcagatcagtttctgccaatttcagtggtttattgttcacaaaaaaatcttcaaaacaagtattgactttcacaaaatttaaatcataaacaggcaaaccaaacagcacactgtagctatagttgttatgtgattgttttttaattgctgtaggatcctgttctttcagcaggtgaaaaataaaacgcagttcaaatttcatggttttaattttcaactcagaagcactcaaaaatgcaaaatgtgataatgggcacttgtttaaaagaattagtgtatccagccttcactccagctggttaaaaatgttgcacttatcagcaaccctaccactttcatctgctgaaaggacaaatgtgcttggttttactattatgtaatcacaacttactttctgcttgtagttgcttaaaattatgtattttgtcttgggctgcaatttgttttatgcttattttattattactgcagtagttgactttgctgtatggaaaaataaagtgaaattgccctaataaaacttctctttcttaagcnnnnnnnnnnnnnnnnnnnnnnnnnnncntgt

SEQ ID NO: 54168 - DNA, 399 bp, Homo Sapiens
ctttttgcgttgggatgggttcgtgtccagtcccgggggtctgatatggccatcacaggctgggtgttcccagcagccctggcttgggggcttgacgcccttccccttgccccaggccatcatctccccacctctcctcccctctcctcagttttgccgactgcttttcatctgagtcaccatttactccaagcatgtattccagacttgtcactgactttccttctggagcaggtggctagaaaaagaggctgtgggcaggaaagaaaggctcctgtttctcatttgtgaggccagcctctggcttttctgccgtggattctccccctgtcttctcccctcagcaattcctgcaaagggttaaaaatttaactggtttttactactgatgacttgatt

SEQ ID NO: 54169 - DNA, 683 bp, Homo Sapiens
tggcgtggagaagcactccgggagaaactgcgtcaccgggaagaccgactcaaggcccaactccgacactgtatgtccaagcaagcagaagtattaattaaaggaaagcggcagacagagggcactttacacagtttgaggagacaagtagatgctttaggggaattggtcaccagcacctctgcagattcagcgtcatcacccagtctgtctcagctggagtcttccctcacagaggactctcaacttggacaaaatcaggaaaagaatgcctcagccagatgaggaatactgtcttgtgtaaatatattcaaggaaaacacctccactacctcactgacttcataattggaatgtcacatggtttttttaatcaagatgcagtgaactgagattctgaaactccactgtagtttactttgcctgtaccattaatgccaatgtttttataaatcacttgtacatagtacatatgggaatagttgcatatgggaatttaaaccaacatgtggctgagcctttttttttaatcttcgtaacatgtttaaaaaaaaacagtgattttaactgcatatttgaacctacaaactggtaaatcttattaacaaaaagaatgtacttaaggccctctttatttatagtgtcgagttatttttgaattttgcttaaaatctatttttcat

SEQ ID NO: 54170 - DNA, 848 bp, Homo Sapiens
gggacctttccgtgttggttctcgtcttggctcagtggttggtgttccctcgtctgcactggaaactacataaaacttggctttttactttgggtacatgggcgtataattcagccctgtttaaatatacttgcctttcaaattcttcaagtaacatgggaagtattcttgaaatgtcacattttctgccttccctctaagtatgctttctgaagaagtcagggaaagttagagtctgtggcctgaggtgtctgctctgggtggcgatagtgggcacctcaggcaggtcggtgacgtttagcacaggtgccagggctcctgcctgctcctcctgtgttagctctgtgaagttcatttaggaattttttttcctatgcagtttaagaaataaccctaattgttttttcttattacctaagcaatatatttttattatagcaacctcagaaaagaaaaataaaaggataatttaaaaaactcattcatagtctcagttacccagataacctcggttgtcacctggagtatcttgtgtagtccctttactatgtgtatgtctatagatgtgcctttaatatattatagtagctaatggcatcataactgcttttttaaggtacctttttcctgtgtaatattaacgtaactctgggccgggaaaacattcgacttattttttgggggctagaagtccagggcacaaatggtgggttaaaagagcccccggtggcatgggttggccaaccttataagggggggggaatattcacagaactcggtgttttggtgaaccccttgggtttttgggcccaagaaattcgagcaaacatgtggctcgaagagggata

SEQ ID NO: 54171 - DNA, 555 bp, Homo Sapiens
atgatgcaaaagaaattatgagacacagtttcttctctggagtaaactggcaagatgtatatgataaaaagcttgtacctccttttaaacctcaagtaacatctgagacagatactagatattttgatgaagaatttacagctcagactattacaataacaccacctgaaaaatatgatgaggatggtatggactgcatggacaatgagaggcggccgcatttccctcaattttcctactctgcaagtggacgagaataagtctctttcattctgctacttcactgtcatcttcaatttattactgaaaatgattcctggacatcaccagtcctagctcttacacatagcaggggcaccttccgacatcccagaccagccaagggtcctcacccctcgccacctttcaccctcatgaaaacacacatacacgcaaatacactccagtttttgtttttgcatgaaattgtatctcagtctaaggtctcatgctgttgctgctactgtcttactattatagcaactttaagaagtaattttccaacctttggaagtc

SEQ ID NO: 54172 - DNA, 641 bp, Homo Sapiens
gaccggtccggaattctccggattaactgccaaggctaaaaagaaggaaaaagaaaaggaaaaaaaggaggaggagaaaatggaagtggatgaggcagagaaaaaggaggaaaaagagaagaaaaaagaacctgagccaaacttccagttattggataacccagcccgagttatgcctgcccagcttaaggtcctaaccatgccggagacctgtagataccagcctttcaaaccactctctattggaggcatcatcattctgaaggataccagtgaagacattgaggagctggtggaacctgtggcagcacatggcccaaaaatcgaggaggaggaacaagagccagaacccccagaaccatttgagtatattgatgattaaggaccagaggatctcacttgcttatctgaagaagattgtccaggctcatattgggaatgcttatgaggaaattcatgccgagacctgctattcaatgcatgtatcgttgcctctgcactgacctgaagaaccctgtctccaagtctttggttgaagagaagatatatgactgttgagtgtgctctttcacagaacttggttttccaataaatataagatctccaaaaaaacaaccccacccgaggacacaaaaagggcg

SEQ ID NO: 54173 - DNA, 768 bp, Homo Sapiens
  misc_feature (3)..(4): n is a, c, g, or t
  misc_feature (33)..(33): n is a, c, g, or t
ctnnctatagggaatttggccctcgaggccagnaattcggcacgaggcggcacgaggaaaagatacccaaaggtcaagaacacagtgattttattagaagtttcatccgcaaattttcttccatttcattgctcagaaatgtcatgtggttacctgtaacttgaaggtggctacaaagatgactgtggacgtgggttgcactggccacccaaggatgtctgccacacctctccaaagccctccctacctaccaagatatacctgatatattccaccaggatatcctccctccagatatacttggttctctccaccaggttctttctttaaagcaggatttctcaactttgatacttactcacatttggggctagacagttctttgtttggaggctctcttgtgcattgtaggatgttgagcagcatctctggcctgtacccagtagatgccacccagttgtgacaattaaaagtgtcttgagactttatcatgtgtcttctgccctaggtgagaacccttgcactagaggaaccctacaccccaaccctggggggaatgtagggaagaggtggccaagccaaccgtggggttagctctaattattaagatatgcattataaataaataccaaaaaattgtctctggcaatagttaccttcccagatacaggtccccccttttttcccctaactcttttaagcaatgattgtaactattaggagacattgctctcccacgtatgtttttctttttagacaatgcagaca

SEQ ID NO: 54174 - DNA, 916 bp, Homo Sapiens
  misc_feature (26)..(26): n is a, c, g, or t
  misc_feature (652)..(652): n is a, c, g, or t
  misc_feature (771)..(771): n is a, c, g, or t
attcttgcagttatactcttatttgngaggccctaaagaggcttatgaaattcagaagaacaaaccaagaaatgatgatatttttaagataattatggcaattgtgcttttctttttcttttcctggattccccaccaaatattcacttttctggatgtattgattcaactaggcatcatacgtgactgtagaattgcagatattgtggacacggccatgcctatcaccatttgtatagcttattttaacaattgcctgaatcctcttttttatggctttctggggaaaaaatttaaaagatattttctccagcttctaaaatatattcccccaaaagccaaatcccactcaaacctttcaacaaaaatgagcacgctttcctaccgcccctcagataatgtaagctcatccaccaagaagcctgcaccatgttttgaggttgagtgacatgttcgaaacctgtccataaagtaattttgtgaaagaaggagcaagagaacattcctctgcagcacttcactaccaaatgagcattagctacttttcagaattgaaggagaaaatgcattatgtggactgaaccgacttttctaaagctctgaacaaaagcttttctttccttttgcaacaagacaaagcaaagccacattntgcattagacagatgacggctgctcgaagaacaatgtcagaaactcgatgaatgtgttgatttgagaaattttactgacagaaatgcaatctccctagcctgcttttgtcctgttattntttattttcacataaaggtatttagaatatattaaatcgttagaggagccacaggagatgagagttccagattgttctgtccagtttccaagggcagtaaagttttcgtgccggttttcagctattagcaactgtgctacactga

SEQ ID NO: 54175 - DNA, 698 bp, Homo Sapiens
  misc_feature (512)..(512): n is a, c, g, or t
cactgtggtaaatgatttaaaacactagtatagtgttgtgtagcttaatccttctgaagtctttttgtcatgtagctattaatctgtggctatgaaatgatcagaaatgctaagtgagatcaatatttgtttggaaaaaaatcttgggaaacaacccaagggttttcgctgttgttgtttttctttttctatttttgtttacttagtcctttagctagtggatttaattttgttgtgcctgcttcattttgcaataacaatgcagtagaatttaaaacttggatgcttaagaggcctgcatatagataagaatttcaggcaaaactacatttattgttaataacagcttgttcataggctcttgtattttatgtaactgtgataaataatgaaacttagttatattgaggttattgtttgtcggtgaagtgttagtcacagtattttcaaaagtttgcacatattgttctgtgtaattgtgtaagccataattacagtgtttaattctcttntcctattacatcattcattgaaagtgatcactttaccattttgaaaagatattttcgtgttctttcactgcaaaataaaaagaattaaaaattcaaataattgataaaaaaacttgagggggggcccggtacccaattcgccctatggtgagtcttattacatttcaactggccgtcgttttacaa

SEQ ID NO: 54176 - DNA, 576 bp, Homo Sapiens
cttacacccaggaactttctattacaatcgcttaggaagtaaagcctgtctccctccctgttctctgcctcttgtacccctctgacccacccgctctgccccactcccagccctcctcagccccagccctgcctgccctgcccctccagggggccatgagtgcctaggtttctcataccccacaaggtcacagcaggggagggagggacaattttataatgaaccaaaaattccatgtgttggggggtggggggcggaggagggtgaggggtgccgcccatgggccacaaatctctacaagtgcctgctatccctctcccactccccaccccagcaccggtccaaccccttcatccccagctgctcctaggactggcccatgggcaggcgggtggggggatgggaagggggtgccctgaaaccaaactggaagccccctctgcctcccagctggggcctctggggtggggtggggggctgtggtcaagccttattctgtattggggactgagggtggggggagtagaggggccgctggagaatgtattcaaaacaataaaactttggacctttgaa

SEQ ID NO: 54177 - DNA, 717 bp, Homo Sapiens
ccccgcgtccgcccacgcgtccgtgcaggccttgatagattcctgtgcaggccctggctccctggccacagagcctcacgtgcgcatggtcacactctatgacaacgaagaggtggggtctgagagtgcacagggagcacagtcactgctgacagagctggtgctgcggcggatctcagcctcgtgccagcacccgacagccttcgaggaagccatacccaagtccttcatgatcagcgcagacatggcccatgctgtgcatcccaactacctggacaagcatgaggagaaccaccggcctttattccacaagggccccgtgatcaaggtgaacagcaagcaacgctatgcttcaaacgcggtgtcagaggccctgatccgagaggtggccaacaaagtcaaggtccccctgcaggatctcatggtccggaatgacaccccctgtggaaccaccattggacctatcttggcttctcggctggggctgcgggtgctggatttaggcagcccccaactggccatgcactctatccgggagatggcctgcaccacaggagtcctccagaccctcaccctcttcaagggcttctttgagctgttcccttctctaagccataatctcttagtggattgagccctcttggaaagacttctctgccatccctttgcacctgagagggggaagttctcagctgagctgaagctggattattaaag

SEQ ID NO: 54178 - DNA, 793 bp, Homo Sapiens
  misc_feature (704)..(704): n is a, c, g, or t
gggggggaaaggtaggaagaaagaggtaatttttactgaaaattagggcaatggttggtcgccttttattaaaagctttttttaagctttcataaagattgctttttgctatttttgaaaatatggtattatagtttgtatggtaactggtcatatatgacagtctactgcatatatatgaatgactaggattaatctggtgtgtttacataggatatacatagttgaaatctagcatgaaaggttaaaaaggagatactgcacaatatttcttaaaagtaaaatgctgttattgtgatgagtctttggtttaacatcacagtattctgtgatgtctttttaactttttggaaagaggtatcatttgtagaaaaaatttgatttgggttaaatataggtttttaaaactataaatgttgtcttttttatatttttatgaaaaagcagtagaaaattacttttgaagaaaacaggctatttaaatattgaaatatatgtatgttgtgagtttaaggagcctgtaattgtcagttttacaaaaccatctgtgttcaatggttgtaaataaattctcaaaacatcatttcaaaggctgcctacagaatattatcacttgacagatagagttaataaattaccaatcaggcacattttataatgtttgtctctgtaaaggtaatattagcagttaaagaacacggatngagaaaagaatgtgttacataggttgcatcacttgcagttaaataaaaactcacatttgtgctcacaaacaaaaaaaaaaaaaaaaaaa

SEQ ID NO: 54179 - DNA, 695 bp, Homo Sapiens
ctagttctagatcgcgagcggcagcatgccccgcactgccttgtaagacagttgaggagcggacatcagaaccacctctgaagccctttgttcttttttttctaggtacaggcaccaacctctttgcacagtgagcagcaggactcgctacttctctccacctactcacaacagccagggaccctgggctacccccaaccacccccagcacagccccagcccctacgtcctccccgaagggtcagcagtctgtctgagtcgtcaggcctccagcagccgccccgataatgccccagcactgaagtcgggacacaatcagctttaaccaatggatgaggggggtggccacaggagatggggagaggagtctgaactaaacccctggcttttgtgcacactgcatacgtttcagaactcctggatggtaaccatctctggagtgcagcgcttgctgcagtggaaatgatcaggaatactgaccgtgtttctcttgcctccgaggttcttgggcacactctatagccatactggacaggaaccaggtgccccgtgtaggcatcgtcggtcggtttgccgtcagagatggcgcatctcgctgcatcccccgagagtacaccggttgctctagccacctgcggcccgcccatctgcgctagctggccttcacgctcttgatcgtctttcctttgtattgg

SEQ ID NO: 54180 - DNA, 531 bp, Homo Sapiens
gtccccgttcagcagcgccacagctgcgctcccgccaagtctgaatctgaccacacctgcttccacctcccaggatgccagccagtgccagcccagcccagacttcagccatgatcggcagctcaggctgttgctgagccagcccatccagcccatgatgcccgggtcctgtgacgcaaggcagccctcggaagtcagcaggacgggacggcaagtcaagtacgcccagagccagaccgtgtttcaaaatccagacgcacaccccgccaacagcagcagcgccccgatgcccgtcctgctgatggggcaggcggtgctccaccccagcttccctgcctcccaaccatcgcccctgcagcctgcacaggcccggcagcagccaccgcagcactacctgcaggtacaggcaccaacctctttgcacagtgagcagcaggactcgctacttctctccacctactcacaacagccagggaccctgggctacccccaaccacccccagcacagccccagcccctacgtcctccccg

SEQ ID NO: 54181 - DNA, 628 bp, Homo Sapiens
ccggtataccccatttccttccagtcagcccaacattttccaccagtctgtccccatctctgaaatccttccttctctttccccctaagtcttttgagtgtcatcatgtactggtggtttctcggttccatctcatccatttccttttcaatggagactacagcgtcagccagctcagccttggcttttaactcaatattccagtccataggggtggttaaaagttgctgcaaggctgcaggcactggcagtgggaagaggcagacgactagatgacttctgcacttttagctggttgaaaagtaccactcccactctgaacatctggccgtccctgcaaagagtgtactgtgcttgaagcagagcactcacacataaatggctgtgtgtggaattgcttgccaaagaagtttctagcctttccctttcccctaactgcatcagggaagaattcttatctctagcttggtttccacatgaggtttttctgagaagggcttgggacaagaagtctgtcatgttagttaagcaggcaagaaatcctactaatccagttttgtttgaaagttgtttgtccgtatgattttttaaaagtcaagtttaatttcaaaaaaccttttttttctga

SEQ ID NO: 54182 - DNA, 735 bp, Homo Sapiens
gttcctcgggatgtcggtggccttcgtaccggactggctgaggggcaaggcggaagtcaatcaagagactatccagcggctccttgaggagaatgaccagctgatccgctgtattgtggagtatcagaacaagggccgcgggaacgagtgcgtgcagtaccagcatgtgttacatagaaatctcatttatttggctaccattgcagatgccagtccaaccagcacttcaaaagcaatggaataatctttcaaaagcaatagaataatcttccatttggctgtcgtgaggagtaattgaatgtaatccatctcttacaaaatggagacagggtctttaccaactcaactggttaaaacatgaatgaaacctctgtggctctttcaaaacgtgaaaatgtgaagaaagctactaacttagctgtattctcatgtaaatattttttaaataattaagcaaatccctcaataagttgagcccaggtgtcctctttcctgaacttggagcatgtttggataacaaagacatcactgggatgttcaagtctactttttagtttcaacctgaagaggaaactcagtaggtgttgggcaggaattggtgagattcctgacttgataccttgctaaatggacatgtaactgtgtgctccttcctatcagtttgtaaatgtggtccccctgactgctgttttcagattgctttgaaataaagcttatttttctataaaaaaaaaa

SEQ ID NO: 54183 - DNA, 805 bp, Homo Sapiens
ccgcgtccgcctatccacatcagaatgatacagagttagcaggtttttctaaggaaatgccattcaaatgcctcctaacttttatagttattttgttttatatttctaaattcttgtatcagatccaaagctctattgtacagcaaattattcttcaaaatgattataaccagttgcaccctgtatttctttttgcagccagcacaatgtgacccaacttaaaatttgggggaaaaagaatgcaggagtgaaataaccaagtcaaaaccatgtactatctccttgggggttagggatgctaagaagagcccacaaatagaggattactcttcccctgaatctctaaactcagaaacaattaccaaaaaatacataactcttccttgtagggccctttccttattcatttaggtagtgtgaacattaagtataaaataaattatgttcttaatgcctcttaaaccacttacattcaaaggggaacagaaatcattctaagcaggaaaatacttccactttttttttttcaagtatctctctaataactaaatgccacttatttgcattctccttgtggattttttgtcacctaaggaaatgcatttgatgagtgctggaaacttcttaagtgctttacagtttgttttcattgtttgcagcggatcactggacatcaaagattcattgcacttatgaacaaggaaccttcttttcaatttctgtgtaatttgcaaggctgtacaatgtgtgctgatgcaagcctttttcagttcaagagaataaatgtttacaaatataaaaaaaa

SEQ ID NO: 54184 - DNA, 628 bp, Homo Sapiens
ccggacggaactggaaaaccagctggagtacaataagaggcgagaaagagaactgcacagaaagcatgtcatggaacttcggcaacagccaaaaaacttaaaggccatggaaatgcaaattaaaaaacagtttcaggacacttgcaaagtacagaccaaacagtataaagcactcaagaatcaccagttggaagttactccaaagaatgagcacaaaacaatcttaaagacactgaaagatgagcagacaagaaaacttgccattttggcagagcagtatgaacagagtataaatgaaatgatggcctctcaagcgttacggctagatgaggctcaagaagcagaatgccaggccttgaggctacagctccagcaggaaatggagctgctcaacgcctaccagagcaaaatcaagatgcaaacagaggcacaacatgaacgtgagctccagaagctagagcagagagtgtctctgcgcagagcacaccttgagcagaagattgaagaggagctggctgcccttcagaaggaacgcagcgagagaataaagaacctattggaaaggcaagagcgagagattgaaacttttgacatggagagcctcagaatgggatttgggaatttggtt

SEQ ID NO: 54185 - DNA, 658 bp, Homo Sapiens
tgaaatttgaattactgaaaaccatgttaatttttagaactcattttcctcagtagagactagtgatgcattagcttctgggaacaaacttgtatcggttcttaattaaattatccaaaacggaggcatttaaacacttggatttacaccagtcttttgtgtttgctttttaaaataaagtgctcgtatttgtattctccatattttggagtaattatctacatgatgtttatagttcctgtggtttttcacccaagaagcagaatctcattcagtacatttagttttataagagtcatgaagctaaatccttgggctatgtcagaggcacaaagtctagaatgtgtgtattcacaatggtgtatgtacattttgtgccttgattcacttagaagtgtctcagaaaacctggacagttcgcttctacacaagaattttatatgtatttatgaagatgattctgtaccctagtatatctttttgggcatggactaatttgtatctgtttaactcatattctgcacgatctgtatatagtacatcaaacttagaggtgtgaccttaaatttaactttttttacaaactgggaggtcaatacaatttaaactgcttaactatgaaaaaaaaaaaaaaaaaaaaaaggacgcggccgcaagc

SEQ ID NO: 54186 - DNA, 507 bp, Homo Sapiens
cccctgggctgaccaaaatgtgctttctactgtgagtccctatcccaagatcctggggaaaggagagaccatggtgtgaatgtagagatgccacctccctctctctgaggcaggcctgtggatgaaggaggagggtcagggctggccttcctctgtgcatcactctgctaggttgggggcccccgacccaccatacctacgcctagggagcccgtcctccagtattccgtctgtagcaggagctagggctgctgcctcagctccaagacaagaatgaacctggctgtgtcagtcattttgtcttttccttttttttttttttttgccacattggcagagatgggacctaagggtcccacccctcaccccacccccacctcttctggatgtttgaattctttcagtagctgttgatgctggttggacaggtttgagtcaaattgtactttgctccattgttaattgagaaactgtttcaataaaatattcttttctacaaaaaaaaaa

SEQ ID NO: 54187 - DNA, 567 bp, Homo Sapiens
gcagagctgaatttatgctgcacacaaatatgccacctcaaacaagcacaagttgaccccggaatatctggagctcaaaaagtaccaggccattgcttctaacagtaagatctattttggcagcaacatccctaacatgttcgtggactcctcatgtgctttgaaatattcagatattaggactggaagagaaagctcactcccctctaaggaggctcttgaaccctctggagagaacgtcatccaaaacaaagagagcacaggttgatgcaagaggtggaaatgttctccatatcaagatgtggcccaaggggttaagtgggaacaatcattatacggactcttcagatttacagagaacttacacttcatctgttccacctctcctgcgatagtcctgggtgctccactgattggaggatagagccagctgtctgacacacaaatggtcttttcagccacagtcttatcaagtatcctatatgtattcctttctaaactgctactcatgaatgaggaaagtctgatgctaagatactgcctgcactggaatgttaaacactaaat

SEQ ID NO: 54188 - DNA, 579 bp, Homo Sapiens
caaaaaagcaaagctgatgctggggtgggagcccgtggtcccgctggaggaaggtttaaacaaagcaattcactacttccgtaaagaactcgagtaccaggcaaataatcagtacatccccaaaccaaagcctgccagaataaagaaaggacggactcgccacagctgaactcctcacttttaggacacaagactaccattgtacacttgatgggatgtatttttggcttttttttgttgtcgtttaaagaaagactttaacaggtgtcatgaagaacaaactggaatttcattctgaagcttgctttaatgaaatggatgtgcctaaaagctcccctcaaaaaactgcagattttgccttgcactttttgaatctctctttttatgtaaaatagcgtagatgcatctctgcgtattttcaagtttttttatcttgctgtgagagcatatgttgtgactgtcgttgacagttttatttactggtttctttgtgaagctgaaaaggaacattaagcgggacaaaaaatgccgattttatttataaaagtgggtacttaataaatgagtcgttatactatg

SEQ ID NO: 54189 - DNA, 680 bp, Homo Sapiens
taagcacgcatttttgttgccttggttttacctgtagactgtggaactattttaccttaagacctgaaaaagttttgtggattataaatttctttcatacggttgtattttctgatcattggtttcttaatatggttgtactacagtatacttggttgatttaggttgcacattcactgaattcactgagattattcctataattttaaagtatcatttatttgaaaaacatacattatcaacatgtttttgatatttgataatgaaaaaaatctttgcttgtttatttctgaaaaagaactgtatttagtgattattttagatagtgatattatagcattcatctgtgtgtaaattatttcatatagggaagagttctgatctgtacctatggttcttattgaaaacaacattggatgtgcatttctgtgatgttatgaatacatttctactttattttgaaacatttgccaaactaaatactgtaacactgtataacatttaaaaatgttaaagaactgcttagtattagaagcagatcatttcccaaaattctaagagcagcagcatatgttgttgcttgtataaagcctagcgataatttttagactaacttccatggtgccctgttggcattagcactaccattgtaccctgctgtataataaacaatcttagac

SEQ ID NO: 54190 - DNA, 905 bp, Homo Sapiens
  misc_feature (663)..(663): n is a, c, g, or t
ggggagaaatgtcataaattactgttttgccaagaatatagttattattgctgtttggtttgtttataatgttatcggctctattctctaaactggcatctgctctagattcataaatacaaaaatgaatactgaattttgagtctatcctagtcttcacaactttgacgtaattaaatccaactttcacagtgaagtgcctttttcctagaagtggtttgtagacttcctttataatatttcagtggaatagatgtctcaaaaatccttatgcatgaaatgaatgtctgagatacgtctgtgacttatctaccattgaaggaaagctatatctatttgagagcagatgccattttgtacatgtatgaaattggttttccagaggcctgttttggggctttcccaggagaaagatgaaactgaaagcacatgaataatttcacttaataatttttacctaatctccacttttttcataggttactacctatacaatgtatgtaattggtttcccctagcttactgataaacctaatattcaatgaacttccatttgtattcaaatttgtgtcataccagaaagctctacattttgcagatgttcaaattattgttaaactttggtgccttgttatttaatagctgtgatcagcgattttcaangctcaaatattagatattaacgaatttccgagaaaaaacaaaaaaaacataaagaaaaacctgtttgcaccccggcccaatgactttagtctaagagagcttatttatctggcacaactaggaactttcgaaatgccaaagtagagatataactcagcgcggttaaaactggaggagcgcgtgttacaaatactatggagcccactgctagagattaatacggcaccgccaatatgacgcag

SEQ ID NO: 54191 - DNA, 902 bp, Homo Sapiens
  misc_feature (865)..(878): n is a, c, g, or t
  misc_feature (880)..(885): n is a, c, g, or t
  misc_feature (887)..(889): n is a, c, g, or t
  misc_feature (891)..(893): n is a, c, g, or t
  misc_feature (895)..(899): n is a, c, g, or t
ccgcgcttggccgccgcagccccgcgccggcagctcggggactgggagcgctcgcgcctcgggtatgccgcacccccggccgggcgcagcagcgcgtggaggtgctcaccgggcgtcgccgctgccgccggcgcccttccccagtaccacggcccggcgcctgcactcgtttcctgcaggagagagctaagcttgtctgctggatccctgcagctggagcgcaaaaggagagatttcacctcttctgggagcaggaaactctacttcgacactcatgccttagtgtgcttactggaagacaatgggtttgctactcaacaagcagaaatcattgtgtctgcattggtcaagatcctggaggccaacatggacatcgtctacaaagatatggtcaccaagatgcagcaggaaatcacttttcagcaagtaatgtctcagattgcgaatgtgaaaaaggatatgattattttggagaagagtgaattttcagccctcagagcagaaaatgagaaaataaaactcgaactacatcagttaaaacaacaagtaatggatgaagtgatcaaagtccgaacagataccaaattagacttcaacctagaaaagagcagagtaaaagaattgtattcattgaacgaaaagaagctgctggaattgagaacagaaatagtggcattgcatgcccagcaagatcgggcccttacccagacagacaggaagatcgaaactgaggttgctggcctcaaaaccatgcttgagtcacacaagcttgataatattaaatatttagcagggtctatatttacgtgcctaacagtagctctgggattttatcgcctgtggatctaataaagtgtctatttannnnnnnnnnnnnncnnnnnntnnntnnncnnnnnagg

SEQ ID NO: 54192 - DNA, 787 bp, Homo Sapiens
  misc_feature (749)..(749): n is a, c, g, or t
  misc_feature (754)..(754): n is a, c, g, or t
  misc_feature (785)..(785): n is a, c, g, or t
  misc_feature (787)..(787): n is a, c, g, or t
tcgaagctgaccctacatgtgggtgacggttttgagttcatgaaacagaatcaggatgccttcgacgtgatcatcactgactcctcagaccccatgggccccgccgaaagtctcttcaaggagtcctattaccagctcatgaagacagccctcaaggaagatggtgtcctctgctgccagggcgagtgccagtggctgcacctggacctcatcaaggagatgcggcagttctgccagtccctgttccccgtggtggcctatgcctactgcaccatccccacctaccccagcggccagatcggcttcatgctgtgcagcaagaacccgagcacgaacttccaggagccggtgcagccgctgacacagcagcaggtggcgcagatgcagctgaagtactacaactccgacgtgcaccgcgccgcctttgtgctgcccgagtttgcccgcaaggccctgaatgatgtgagctgagcccaggcgccaccactgatgccacccaggacctcggaccttggagcctgcggggtgcctcggcccctccagccccgggccggacctcctgctggctctcgcccaccaaccaagtgttacaagccccagaatgctgcccggcctgccctgctgggcggactgtctgtgtgtctgtctctctggcgttccacctccaagcctataccagctgggtacagcgccatctctctgccttctgttgcccctcactcaccaaacacgtgtattttatagcaaanaaaanaaaaaaaaaaaaaaaaaaaaaaataataaanan

SEQ ID NO: 54193 - DNA, 582 bp, Homo Sapiens
  misc_feature (572)..(572): n is a, c, g, or t
  misc_feature (574)..(574): n is a, c, g, or t
  misc_feature (576)..(578): n is a, c, g, or t
aaatgcacagggtcactctgcaggaggttctcactctccttcccaatagcatggctctgctgctgcagaaagagccatggaaggaacagacccagaagttcattgactggctattcagcatcatggaaagccctaaagaagccctctcagcacagtccagggatcttttgaaagccaccctgctgtccttgagagttctcccagagtttaagaagaaagctgtatggaccagagcatatggttggtgaacagttttgcagtaaccagcagcattctcagctggatgaggaaaaccatataagtggaagaagtctttcagaattcatgcctggtattgctgagacatgatgcagagagttaagggtcatgaaaagatggccacatcactgacagcttgacacatgcctcctaagagaggagtgcattgctttagtacccgggccagttgagactgaaacaggaacttggattttctttatttggcttgagttcaatgtggagattttctttgtgaaagcttgaagatattatcttctccctgctaaattccagtaaaataatgttgtcaaaancngnnnatca

SEQ ID NO: 54194 - DNA, 829 bp, Homo Sapiens
attttctccgggggagaaaggtgtaccagatacgatgactaagccagggcccctggatctcctcccttaccctcctctgctgggaacctagcacacctgaatcagctggdcatactgctggagttcagtgctttctttccgtcaccctggggatagtccttcctggcatcgtggtgggggaggagcctctggcttccctaaactgcagcctctctggctggtcttcactttcctcagttgatataaaactctgggtcttggccatgatgtccttggactccatcgctaaagggaccatctgctgcagttaccacagcaactgacctgagcggcaccctggtctgtggagatggacttaggatccagttacatgattctgaacttttgtggagtttgacaccttagagaagctacccctcaaactgcacatctacacacaaacaaacaatgcataggattccaaggctttaaagctgagagaccctggcctcaagttatttcatgcgcacagagggaagccatgtggggttgctgaagatgccttgaggtgaaatgggggcaggaaagccacaacttgctctgcatttataaagaccgtacaaactgagatccttggtacccctaaaaagattgccaattttcttcatctttgccatatggaggactgtkacagactttggacagtggcctcttgagttcctctgcagttttgacattkaggattttgtgttttttaaactggaaaatcttctagcatgttgggttgttacagagtatatttttgtctgcagctgtttgttgcsccattcctaagaggagtttatccatc

SEQ ID NO: 54195 - DNA, 869 bp, Homo Sapiens
gctggtaaaccggtccggaattcctcgggatctacaaagtaaaatcccgtaacagcactgtggaatacacccttaacaagttggagcctggcgggaaataccacatcattgtccaactggggaacatgagcaaagattccagcataaaaattaccacagtttcattatcagcacctgatgccttaaaaatcataacagaaaatgatcatgttcttctgttttggaaaagcctggctttaaaggaaaagcattttaatgaaagcaggggctatgagatacacatgtttgatagtgccatgaatatcacagcttaccttgggaatactactgacaatttctttaaaatttccaacctgaagatgggtcataattacacgttcaccgtccaagcaagatgcctttttggcaaccagatctgtggggagcctgccatcctgctgtacgatgagctggggtctggtgcagatgcatctgcaacgcaggctgccagatctacggatgttgctgctgtggtggtgcccatcttattcctgatactgctgagcctgggggtggggtttgccatcctgtacacgaagcaccggaggctgcagagcagcttcaccgccttcgccaacagccactacagctccaggctggggtccgcaatcttctcctctggggatgacctgggggaagatgatgaagatgcccctatgataactggattttcagatgacgtccccatggtgatagcctgaaagagctttcctcactagaaaccaaatggtgtaaatattttatttgataaagatagttgatggtttattttaaaagatgcacttttgagttgcaataggttaatttttatatgggccaaaaaacaaaaa

SEQ ID NO: 54196 - DNA, 703 bp, Homo Sapiens
  misc_feature (15)..(15): n is a, c, g, or t
aaagaatgcgamaanccagagcgtgaagaaaagcgggttttgggtctggtgttgctgcgtggggagaacttggtatccatgactgtggaggggccaccccccaaagatactggcattgctcgggtaccacttgctggagctgctggaggccctggggttggtagggcagctggtagaggagtaccagctggtgtgccaattccccaggcccctgctggattggcaggccctgtccgaggagttgggggaccatcccagcaggtaatgactccacagggaagaggcactgtagcagctgctgctgttgctgcgactgccagtattgctggagccccaacacagtacccaccaggacggggcactccgcccccacccgtcggcagagcaaccccacctccaggcattatggctcctccacctggtatgagaccacccatgggcccaccaattgggcttccccctgctcgagggacgccaataggcatgccgcctccgggaatgagaccccctccaccaggcattagaggtccacctcccccaggaatgcgtccaccaagaccttagcatactgttgatccatctcagtcactttttcccctgcaatgcgtcttgtgaaattgtgtagagtgtttgtgagctttttgttccctcattctgcattaataatagctaataataaatgcatagagcaattaaactgtga

SEQ ID NO: 54197 - DNA, 434 bp, Homo Sapiens
tcgatcctgtccagcaaagaagcaatcagccaaaatgatacctggaggcttatctgaggccaaacccgccactccagaaatccaggagattgttgataaggttaaaccacagcttgaagaaaaaacaaatgagacttatggaaaattggaagctgtgcagtataaaactcaagttgttgctggaacaaattactacattaaggtacgagcaggtgataataaatatatgcacttgaaagtattcaaaagtcttcccggacaaaatgaggacttggtacttactggataccaggttgacaaaaacaaggatgacgagctgacgggcttttagcagcatgtacccaaagtgttctgattccttcaactggctactgagtcatgatccttgctgataaatataaccatcaataaagaagcattcttttccaaagaat

SEQ ID NO: 54198 - DNA, 644 bp, Homo Sapiens
gagatttccaaaaaatataaacaacatcagcctactgacatggtcatggaaaacctgaagaaattactcacatattgtgaagatgtttacctgtattacaagttggcatacgaacacaagttttatgaaattgtaaatgtgcttctgaaggaccctcagacaggttgctgtctaaaggacatgctagcaggttagatgatttcataggtgtctgttttcttgtactgttagcagattctgacagatgtgatgagaagaagaatgcattggagatctttgctaaagttgaacaatcccggtactgtaccatatcagtcctttgtgggtagtaggtagcaagtaagaaacttttcaggaggaaattcctatttaaaatagattgattttagatgattgttcatccacaccattttatatagatactagtattaagatcaaaagcttcctcttcctcaggacagcttctactttagatgatccaataatgattaaagaatacctgtacctgcagattccagtttcaaagaaatttaattattatttacacagttaaggaacaggtgatacattttcatttgttagaaactgatctttctgtaataaaatagattttcaattcaaaaaaaaaaaaaaaaaaaaaaaat

SEQ ID NO: 54199 - DNA, 884 bp, Homo Sapiens
acagatataaacagatcccctgctgaaagatacacagagttctcagaccccacccccaccctcaggtgggctggctggctgacagaccttctggccagacagactcctaaccaaccagatggactgccagacaggcagacatcagccacatggaatcctgacatcccagccagccggccagactctcatcttgatgtcttgatggatggaccccagctagtcagacatgatcctccagattgacagacaagtcccccaaatgagtacacatctccagctattcagacagatggacccccagcaaatcaggacctatctaggcagaccccagccagacccccgccagacagactcccaaccagactgaccccttactattcacacagcctgccgagtagctgggactacaggtctaattttttttttttttaagaaatgagtttttgccatgttgcccagactggtcttgaactcccaacctcaagcaatcctcctgcctcagcctcccaaagtgctgagattacaggtgtgagccaccaggctcagccccctaagatttgaaacactttaaatggcccatggtagggttcctgctaggataaaacattaagcggctgttaaaagaaataaaaggaggacacgtctctgtgcactggtgtggacaaatctccaagtcactgcaaaatggaaaaaagtataagatgctctttccctgaacctcaagggtcccgccccctctcactttcaggtctctggacctctgactgacactgggcctgcccaggtccctgtatgcactgccacagggccctggggcccatggcccacccctgggctgcccttctctggggataggggtggccttcctctgcctctggctggcg

SEQ ID NO: 54200 - DNA, 623 bp, Homo Sapiens
tgcagctgacgatccgttggtgaatgaaagtcttctaaccattccaaaatctcttttagagaaacgagagaacgtcatgtttgtgctgcctctgcatgggggccacttgggcttctttgagggctctgtgctgttccccgagcccctgacatggatggataagctggtggtggagtacgccaacgccatttgccaatgggagcgtaacaagttgcagtgctctgacacggagcaggtggaggccgacctggagtgaggcctccggactctggcacgctccagcagccctcctctggaagctgcgtcccctcaccccctgtttcaggtctcccatctccctcagtgacctggatctgacctcacaccatcagcagggggcacccaccatgcacacctgtctcggagtaggcagctcttcctgggagctccaggctatttttgtgcttagttactggttttctccattgcattgttaggcatggtgacaagtgacagagttcttgccctctgtccagtttcagcatctggttgcttttaagccaagtacatctagtttccctattaaaaatgtgtctgaatagcgaaaaaaaaaaaaaaaaaaaaaaaaaaaaaaatgcggcatt

SEQ ID NO: 54201 - DNA, 625 bp, Homo Sapiens
  misc_feature (572)..(572): n is a, c, g, or t
  misc_feature (602)..(602): n is a, c, g, or t
atggctgctgccatggtgccggggcgcagcgagagctgggagcgcggggagcctggccgcccggccctgtacttctgcgggagcattcgcggcggacgcgaggacaggacgctgtacgagcggatcgtgtctcggctgcggcgattcgggacagtgctcaccgagcacgtggcggccgccgagctgggcgcgcgcggggaagaggctgctgggggtgacaggctcatccatgagcaggacctggagtggctgcagcaggcggacgtggtcgtggcagaagtgacacagccatccttgggtgtaggctatgagctgggccgggccgtggcctttaacaagcggatcctgtgcctgttccgcccgcagtctggccgcgtgctttcggccatgatccggggagcagcagatggctctcggttccaggtgtgggactatgaggagggagaggtggaggccctgctggatcgatacttcgaggctgatcctccagggcaggtggctgcctcccctgacccaaccacttgcccaactttcttgtacaaagttggcattataagaaagcattgcttatncatttgttgcaacgaacaggtcactatcangtcaaataaaatcattatttgcc

SEQ ID NO: 54202 - DNA, 708 bp, Homo Sapiens
ctgataatccaagacttctgagcatgaatcttgaaaacccctcatgtaattcagtgttagacccaagagacttgagacagctccatcagatgtcctcttccagtatgtcagcaggcgccaattccaatactactgtttttgtttcacaatcagatgcatttgagggatctgacttcagttgtgcagataacagcatgataaatgagtcgggaccatcaaacagtactaatccaaacagtcatggttttgttcaagatagtcagtattcaggtattggcagtatgcaaaatgagcaattgagtgactcctttccatatgaattttttcaagtataacttgcaagatttaaatccttttaaatcttgataccacctatatagatgcagcattttgtatttgtctaactggggatataatactatatttatactgtatatataatactgactgagaatataatactgtatttgagaatataaaaaacttttttcagggaagaagcatacaactttggacatagcgaatacaaaattggaagctgtcataaaaagacaactcagaggccaggcgcaggggctcacacctgtaatcctagcactttgggaggccaaggcgggtggatcacttgagaccaggaattcgagaccagcctggccaacatggtgaaaccccgtctctactaaaaatacaaaaattagctgagcatgg

SEQ ID NO: 54203 - DNA, 908 bp, Homo Sapiens
gaagagatggagcgtgccccggagcggcgcgacgtgtgctggagccagcgcggagaggacggcatgtgcgctggccccctggccgggcctgccctcaccttcgacgactgctgctgccgccagggccgcggctggggcgcccaatgccgaccgtgcccgccgcgcggcgcggggtcccattgcccgacatcgcagagcgagagcaattccttctgggacacaagccccctgctgttggggaagcccccaagagatgaggacagttcagaggaggattcagacgagtgtcgctgcgtgagtggccgctgcgtgccgcggccgggcggcgccgtgtgcgagtgtcccggcggcttccagctcgacgcctcccgcgcccgctgcgtggatatcgacgagtgccgagagctgaaccagcgcgggctgctgtgcaagagcgagcgctgcgtgaacaccagcggctccttccgctgcgtctgcaaagccggcttcgcgcgcagccgcccgcacggggcctgcgttccccagcgccgccgctgacgccgccgacgccgccctcggcccagacctcggtgatcactgagggatttccgcgagctcggctcacttctgccccgacttgtggctcggacccagggaccttcagggcccgcagacctcccgggcgccttgagacccgaggcgcccctaccggcccccctccccggttagcggggggttgtaaggtctccggcggggcgctgcctgccttcctcccagaggtgtttcctagaactggttaatcagatcgtgcctccttacccttggcttcgaagcaaattgatgttcacgtctgacgtgggcgcggctgcgcaggcggggcagacccagccgctccagggtagattgagccggccaggggtgtgaattga

SEQ ID NO: 54204 - DNA, 589 bp, Homo Sapiens
ctagtgaccgagactcacccgtgcccttgcggcctcctggcccggtgcagctgccctcagggacagggtgggtgctctcagatgccatgggttgagctctactgagagccaaggcccctagaatagttgcggggcactctgatcgttcactttggtccctttggctatggaacaggctgggtcacagggaactgccagtgaggctggaggctggaggtggagatggggtcaggaacatctggcagagggaggtcccagtctgtgtctccatcaggcttaagccagagctatctggtgctggtgtgccagcccctcccccagcctgcctagaaaggggtggctgcctgagggagtcacttgtatggtccccagggtgggagccccatcctgttctatggaataaagcgtcgcctctctgcctcgaaccagtcaaatggagtattgcggctgcacgtcacactagggtggccacccccgccattgcgagccacatgtctgcactgagaaactgcatttcagtagcatttgtcatccagccggaagttaaagcacacttactttattcacctatttttataataaacgttct

SEQ ID NO: 54205 - DNA, 604 bp, Homo Sapiens
atcgcagtgtttcagttctttattttcccttgtggatatgctgtgtgaaccgtcgtgtgagtgtggtatgcctgatcacagatggattttgttataagcatcaatgtgacacttgcaggacactacaacgtgggacattgtttgtttcttccatatttggaagataaatttatgtgtagacttttttgtaagatacggttaataactaaaatttattgaaatggtcttgcaatgactcgtattcagatgcttaaagaaagcattgctgctacaaatatttctatttttagaaagggtttttatggaccaatgccccagttgtcagtcagagccgttggtgtttttcattgtttaaaatgtcacctgtaaaatgggcattatttatgtttttttttttgcattcctgataattgtatgtattgtataaagaacgtctgtacattgggttataacactagtatatttaaacttacaggcttatttgtaatgtaaaccaccattttaatgtactgtaattaacatggttataatacgtacaatccttccctcatcccatcacacaactttttttgtgtgtgataaactgattttggtttgcaataaa

SEQ ID NO: 54206 - DNA, 870 bp, Homo Sapiens
  misc_feature (739)..(739): n is a, c, g, or t
  misc_feature (809)..(809): n is a, c, g, or t
aaaacagggatgtcactttgaggggcagatgaaagtctagagaactgttccttaatagcattgtaaaagttccattccaactgccagtgtagattttaaaagtgttaaatagtgactcccttgattaaactgtttgtaattatttgagtagattaataatgaaaatactttggaaataatatacattttgacattctaccaagaggacaactttggttctggaactggtttctatttgtcaaatcagtttccttttaacataattaatccctttaacaaaaagccgtctatgggattaaaagacacgtgaaatgatacttttattattcccttgctcatataactttaaaaataatacttttagctctaatagctcaagaacacaatattcgttaatgttcagtaaagtagcctgagacattttcaatgtttccttaaggtttttgaatgactgtatatttggcagttaagcagtgccacactacagggtagatatggtaaattttatatttgtatatttacagttacaaaacaaatgtacttttaccttttatttctgaccctgtgtgttagagcagttgcatgctctcctgctgttaaaaacacattgttaagctgtggatttgtactcaataatgacttaggataaacatttattttcattcattgctttacatactagacatttttcttctctttgtaagtagattcaaattagatagtcaataaaacatcttgnaaatcccacaagccaattatggctctctagtctgaatggcttcattggttctttctcagtattaggaaantatggtaccatgaatgcatatgaagaagcagcctttattttaatagccagtagtctgcaaa

SEQ ID NO: 54207 - DNA, 531 bp, Homo Sapiens
ctcgacccagatggagcctgctctccgcgcctacccttcccgcctccctctcagaggcctgctgccagtgcagccactggcttggaacaccttggggtccctccaccccacagaaccttcaacccagtgggtctgggatatggctgcccaggagacagaccacttgccacgctgttgtaaaaacccaagtccctgtcatttgaacctggatccagcactggtgaactgagctgggcaggaagggagaacttgaaacagattcaggccagcccagccaggccaacagcacctccccgctgggaagagaagagggcccagcccagagccacctggatctatccctgcggcctccacacctgaacttgcctaactaactggcaggggagacaggagcctagcggagcccagcctgggagcccagagggtggcaagaacagtgggcgttgggagcctagctcctgccacatggagccccctctgccggtcgggcagccagcagagggggagtagccaagctgcttgtcctgggcc

SEQ ID NO: 54208 - DNA, 679 bp, Homo Sapiens
  misc_feature (624)..(624): n is a, c, g, or t
caggccctgaagctgtttcaggaacaccccattttctctgaagttatctcggaccaggaggctgtggccgccattgagaagttcgtggatgatgagaagatcctggtggagcccgcctgcggggcagccctggccgctgtctatagccacgtgatccagaagctccaactggaggggaatctccgaaccccgctgccatccctcgtggtcatcgtctgcgggggcagcaacatcagcctggcccagctgcgggcgctcaaggaacagctgggcatgacaaataggttgcccaagtgaggacggaccccttaccgatctgtgctctcctagcccaagagacccctggaggggctggagttttatccagcgcctcgtcgtatgtttggctgagcacctgtggcctgggtgcaggttaacttcttgttatcaggagcccactatgcagaggccaaaggtcggcagccagcgaggctatgaattggacctttttggtatctgtgtgactgctctgtgcccatccttagccaacttgctggcgtgacaagtgcccacaagtaacacaccaggtacccagagcagggtggacaggagagacctgaatcacagcagtgaggaattcctcanagctgtgacctcgcccctgaacttgttcccagtgaaggtcaacagggccaccaac

SEQ ID NO: 54209 - DNA, 477 bp, Homo Sapiens
tttgccgccgcgtccccaccaccagtcactgcctcgcagagccctacactcccgcagccgctcctcagaggcctgtgcccatcgcaggcctgggaggaaagtgggcgcagagccctcctgctcacacagctgctgagacttcagggacccatcagaacttggtgcagcacagccccgcccgtggagggtcccttttacgcaccccaaggcccacacctaagcttccatgtagccctcatccagggaagttttgcgatcctttaggaagacactgtcctcttattacagattgtgtatttccgtaggcttcttagtagcagctttgtacactgaggacactgtagccaggaacctgtgcatgccacccaccgcctggacaggcagtcatcctgcctctgatgtgaatcaggcccattaaagacgtctgggtttgaagccgcctgtgcatggaaaaaaaaaaaaaaaaaaaaggacgcg

SEQ ID NO: 54210 - DNA, 882 bp, Homo Sapiens
cagatgggttcttctcaaatgagacgtcatctaaagcaccctgtagaaaacacacaaattgcagtgtctttggtctcctgctaactcagaaaggaaatgcaacacacgacaacatatgttccggaaacagtgaatcaactcaaaaatgtggaatagatgttaccctgtgtgaggaggcattcttcaggtttgctgttcctacaaagtttacgcctaactggcttagtgtcttggtagacaatttgcctggcaccaaagtaaacgcagagagtgtagagaggataaaacggcaacacagctcacaagaacagactttccagctgctgaagttatggaaacatcaaaacaaagaccaagatatagtcaagaagatcatccaagatattgacctctgtgaaaacagcgtgcagcggcacattggacatgctaacctcaccttcgagcagcttcgtagcttgatggaaagcttaccgggaaagaaagtgggagcagaagacattgaaaaaacaataaaggcatgcaaacccagtgaccagatcctgaagctgctcagtttgtggcgaataaaaaatggcgaccaagacaccttgaagggcctaatgcacgcactaaagcactcaaagacgtaccactttcccaaaactgtcactcagagtctaaagaagaccatcaggttccttcacagcttcacaatgtacaaattgtatcagaagttatttttagaaatgataggtaaccaggtccaatcagtaaaaataagctgcttataactggaaatggccattgagctgtttcctcaccattggcgagatcccatggatgagtaaactgtttctcaggcacttgaggctttcagtgatatctttctcattaccagtgact

SEQ ID NO: 54211 - DNA, 586 bp, Homo Sapiens
gcacgaggagaaggcagcagaagccctccatggagaagcagatagctctggtgtccttgcagctgtcgatgccactgtcaacaaggccctggcagaaagattccacatctcagagtttcctacgttgaagtattttaagaatggagagaaatacgcagtgcctgtgctcaggacaaagaagaagtttctcgagtggatgcaaaaccctgaggcccccccgcccccagagcccacgtgggaagagcagcagacaagcgtgttgcacctggtgggggacaacttccgggagaccctgaagaagaagaaacacaccttggtcatgttctacgccccttggtgcccacactgtaagaaggtcattccgcactttactgctactgctgatgccttcaaagatgaccgaaagattgcctgtgccgctgttgactgtgtcaaagacaagaaccaagacctgtgccagcaggaggcggtcaagggctaccccactttccactactaccactatgggaagttcgcagaaaagtatgacagcgaccgcacagaattgggatttaccaattatattcgagccctccgggagggagac

SEQ ID NO: 54212 - DNA, 389 bp, Homo Sapiens
agttgggctgtgttggaatgggcctgcagcccaacaaacaagggaactaggaccgacagtgacttcaccagcttgctaggtcagaatgagagactggtgggtctgtctacctgtttcttctacaagatccctatttgactgtaaaagtagctaatactcacatgttctccaatcccaggtagccatggtagagttgggtagagttgagcagctgccccaggatccaaatgtggtgtctgaaatggaaagaactaaggcaaccaggaaggcactgatctgccttataagcacagtcatctgaaagtcaggcctgctgcaggacaggatcccccagagaccccatttgcctctcaacactcagaccttcaactgttttttaataaatctac

SEQ ID NO: 54213 - DNA, 892 bp, Homo Sapiens
gccccaggatatcacatggccaaaatgatcataaagctgatcacttcagtggcagatgtggtgaacaatgaccctatggttggaagcaagttgaaagtcatcttcttggagaactacagagtatctcttgctgaaaaagtcattccagccacagatctgtcagagcagatttccactgcaggcaccgaagcctcggggacaggcaatatgaagttcatgctaaatggggccctaactatcgggaccatggatggggccaatgtggaaatggcagaagaagctggggaagagaacctgttcatctttggcatgaggatagatgatgtggctgctttggacaagaaagggtacgaggcaaaagaatactatgaggcacttccagagctgaagctggtcattgatcaaattgacaatggctttttttctcccaagcagcctgacctcttcaaagatatcatcaacatgctattttatcatgacaggtttaaagtctttgcagactacgaagcctatgtcaagtgtcaagataaagtgagtcagctgtacatgaatccaaaggcctggaacacaatggtactcaaaaacatagctgcctcggggaaattctccagtgaccgaacaattaaagaatatgcccaaaacatctggaacgtggaaccttcagatctaaagatttctctatccaatgaatctaacaaagtccatggaaaatgaactctagaattgtctctagaaaacatagcttcttacttgaacttgaacattttttacaacattcactggtttttggttttgtaagctaacaaatctataataatttgagtatccccggggaatgggggaggtaaaattatattgtaattagaagcttaaaaaaaaaaagggggcaata

SEQ ID NO: 54214 - DNA, 612 bp, Homo Sapiens
atcgcctaccacagggctctgcagcaccgcagcaaggtgcaaggcgagcagagcagtgagaccagcgatagtgattgatactgctcaacacagcccaacctatagtgccctgtgacttctctcctcccctttgctcactgtcctggagtggcaccggcctctgcactgactcatttctggtcttggggccagtctcaggggaagctgggtgggggaggtccctcctgccctaagtgcagctggactgtacagaacactccaagggccaatggcagttcagcgcaaggagagggagggcccacaggtcagaaaaagctccagagacctcacagcattgtagggcggggtggtgggccaaagttaggacactgcgtaaaacaggccatcccaccacctctacctgctcatgccaggagaatccataactgcctagaggcctggggcccctaccggtcgtgaggtgagtgggcatctgtccagcctggaagaggggcactaggtgactccctcccctgctgttgtaaatactgtaattatcggagaatttaaattattctcatttgtaactgcgtttccgggtcgcgccagagtcatttggtactaaaaaaaaaa

SEQ ID NO: 54215 - DNA, 962 bp, Homo Sapiens
gaaatagcttgtaatgttctttacaggagtttaaaacgtatagcctacaaagtaccagcagcaaattagcaaagaagcagtgaaaacaggcttctactcaagtgaactaagaagaagtcagcaagcaaactgagagaggtgaaatccatgttaatgatgcttaagaaactcttgaaggctatttgtgttgtttttccacaatgtgcgaaactcagccatccttagagaactgtggtgcctgtttcttttctttttattttgaaggctcaggagcatccataggcatttgctttttagaagtgtccactgcaatggcaaaaatatttccagttgcactgtatctctggaagtgatgcatgaattcgattggattgtgtcattttaaagtattaaaaccaaggaaaccccaattttgatgtatggattacttttttttgtaaacatggttaaaataaaacttttgtggttcttctgaatcttaatatttcaaagccaggtgaaaatctgaactagatattctttgttggaatatgcaaaggtcattctttactaacttttagttactaaattatagctaagttttgtcagcagcatactccggaaagtctcatacttcttgggagtctgccctcctagtatctgtctatatcattcattacgtgtagtatttacaaaaagcatcttgaccatgaatgaagaagcttggagcctagcatggccctggatatggtatgagatctaaagtggagcccaatggatttcccgtcagaaagaataacacatctaattataaaataaacaggagttattggcgcacaaaaaaatatttgaaaggcaagcagcacagatagagcgaaaatgagaagggataaaagaccctagagctccacaatagagaactcaccgagtaaaaacgcagacacaaagtaaaaaaaaagcgcaatacagctagtatatacata

SEQ ID NO: 54216 - DNA, 522 bp, Homo Sapiens
aatacatttcttaaggaactgtttatgattattactggatttgtcatttttgataatttaaatattgctgctgctttgtagatgatgagaagaaatgttaaagtgctttctaaaaggaaattttttcacctttggaggagaatatattagagttgtgggtaattttttacagccacctatgtacatactaattacccattggatacttatatctaaaagtctcatgctgaagtatagtttttgggaaagaatgattttaaataaagagattgtaaaagtaaaaaactgtaaatgtatatgtatgatagaattgtttcctctaagtgtagtttttctttcaactaaaattcagtttatgtgtaaaataattcagtcattaatagaaatggagtgatttcacagtgtgtactgttttgccacatacttctaaagaacacaattttatataattttgaaatcatgtatgtttaaattagaaaaccaaaaatcatgaacattctaagacaaaataaatatagaatt

SEQ ID NO: 54217 - DNA, 648 bp, Homo Sapiens
  misc_feature (618)..(619): n is a, c, g, or t
  misc_feature (621)..(621): n is a, c, g, or t
  misc_feature (631)..(631): n is a, c, g, or t
tcaaaccccatgcaatcatcatcctccccaatacagatggaatggagcttctggtgtgctatgaagatgagggggtttatgtaaacacatatggaaggatcaccaaggatgtagttctacagtggggagagatgcctacatcaatagcatatattcgatccaatcagacaatgggctggggagagaaggccatagagatccgatctgtggaaactggtcacttggatggtgtgttcatgcacaaaagggctcaaagactaaaattcttgtgtgaacgcaatgacaaggtgttctttgcctctgttcggtctggtggcagcagtcaggtttatttcatgaccttaggcaggacttctcttctgagctggtagaagcagtgtgatccagggattactggcctccagagtcttcaagatcctgagaacttggaattccttgtaactggagctcggagctgcaccgagggcaaccaggacagctgtgtgtgcagacctcatgtgttgggttctctcccctccttcctgttcctcttatataccagtttatccccattctttttttttttcttactccaaaataaatcaaggctgcaatgcagctggtgctgttcagattctnncnaaaaacaaanaaacaccaaaaaaaaaa

SEQ ID NO: 54218 - DNA, 661 bp, Homo Sapiens
cggacttagaaaaccgctcagcactgcctgctcccatcctgtgtgttaagctctgctattaggccagcaagcggggatgtccctgggagggacatgcttagcagtccccttccctccaagaaggatttggtccgtcataacccaaggtaccatcctaggctgacacctaactcttctttcatttcttctacaactcatacactcgtatgatacttcgacactgttcttagctcaatgagcatgtttagactttaacataagctatttttctaactacaaaggtttaaatgaacaagagaagcattctcattggaaatttagcattgtagtgctttgagagagaaaggactcctgaaaaaaaacctgagatttattaaagaaaaaaatgtattttatgttatatataaatatattattacttgtaaatataaagacgttttataagcatcattatttatgtattgtgcaatgtgtataaacaagaaaaataaagaaaagatgcactttgctttaatataaatgcaaataacaaatgccaaattaaaaaagataaacacaagattggtgtttttttctatgggtgttatcacctagctgaatgtttttctaaaggagtttatgttccattaaacgatttttaaaatgtaaaaaaaaaaaaaaa

SEQ ID NO: 54219 - DNA, 601 bp, Homo Sapiens
gcgatttcgtaacgcccccgttccgaaagtgttcttctgggcagtgcaaccccgacggcgcggagctatgtagcccctgcggcggcggagccgtgacccctactcccgccgcgggcgggggcagaaccccgtggcgctgcagagaggcgccctggagacaggggacacatggaaggaggcctcactacttccactcctgagcagggaactgtccagtctggcgtcacaacccctgtctcgcctcctggatgagctggaggtgctggaagagctgattgtactgctggaccctgagcctgggccaggtgggggtatggcccatggcactactcgacacctggccgcaagatatgggctgcctgctgcctggtccacctttgcctattcgctgaggccgagtcgctcgccgctgcgggctctgattgagatggtggtggcaagggagccctctgcctccctgggccagcttggcacacacctcgcccagctagggcgggcagatgcattgcgggtgctgtccaagcttggctcatctggggtttgctgggcttaacacccaataaagaactttgctgactactaaaaaaaaaaaaaaaaaaaa

SEQ ID NO: 54220 - DNA, 939 bp, Homo Sapiens
  misc_feature (779)..(779): n is a, c, g, or t
ttgggatgagactgatcatgaaagaattacaatgctcaacaggaagtttaaaaaggaagagcttttggacatggattttcaagcctacttagcttcctctagtgaagatgaagaggagacagaagaggagctacaaggtgatgatggagtcaatgtagaagaagatgggaaaacaaagaaaagtcaggatgatgaagaacaaattgctaaatacaggcagctcttgcaggttattcaagaaaaagaaaagaaaggcaaagaaaatgatatggaaatggaaattaaatgggttccaggtcttaaagaaagtgcagaagagatggtcaaaaacaaattggaaggaaaggataaactgaccccttgggaacaatttttagagaagaagaaagagaaaaaaagactgaaaaggaaacagaaggctcttgctgaagaggccagtgaagaggaacttccctctgatgttgatttgaatgacccatactttgctgaagaagttaaacaaataggtataaataaaaaatcggtaaaatctgcaaaagatggcacatctccagaagaagaaattgaaatagaaagacaaaaggctgaaatggctttgcttatgatggatgaggacgaggacagtaagaaacacttcaattacaacaagattgtggagcaccagaatctgagcaaaaagaagaaaaagcagctcatgaaaaagaaagaattaatagaggatgactttgaggtaaatgttaacgatgcacgggtttcaggcaatgtacacttcccactgntcaatttggacccctcagatcccattttcagaaaacaaaagctatggaaaaaaatctttgaggaggaggcccgggccaagaagacgaaaaggaccaagaacttactccggcaaataaagaaaaaagaagatggagatttgaaaagggaatccccaagggc

SEQ ID NO: 54221 - DNA, 555 bp, Homo Sapiens
aaagaagttcctttacaaataagtaataagaaaaatgagtactaaaatacagctttgtgccttttaaccctatgccaactcctaaacatataagtagattacagtatacttatctgatcagagcatgatctgtttggccacatgcaagtgtgagcagaaatagagcagcacgtagaatagtaacttaaagcaagtcatcctttaaaaattctgagctaaaatctatttaccattgagtaattgaattaatcccataggaataagctccttgtaagtaaatccatgatatgaattagaaaaaaaaaacagctggaaattgaagtttttgatgcctgtatactggatatgaaactatttgatttctagtcttctgtgtttagcagttgtaatattttaatgattttgcttcatactcggttaatggaacataaacatatctttgatacttctttgtgagtgagagaatgctagatagggtggctttgttctttggtttaagttttttttcctgaatgtagttaatttatggcatctgttgaataaaactgctaaaat

SEQ ID NO: 54222 - DNA, 927 bp, Homo Sapiens
agaggaggctgaggatcctgcctgcatccccatcttctgggtcagcaagtgggtggactattcggacaagtacggccttgggtatcagctctgtgataacagcgtgggggtgctcttcaatgactcaacacgcctcatcctctacaatgatggtgacagcctgcagtacatagagcgtgacggcactgagtcctacctcaccgtgagttcccatcccaactccttgatgaagaagatcaccctccttaaatatttccgcaattacatgagcgagcacttgctgaaggcaggtgccaacatcacgccgcgcgaaggtgatgagctcgcccggctgccctacctacggacctggttccgcacccgcagcgccatcatcctgcacctcagcaacggcagcgtgcagatcaacttcttccaggatcacaccaagctcatcttgtgcccactgatggcagccgtgacctacatcgacgagaagcgggacttccgcacataccgcctgagtctcctggaggagtacggctgctgcaaggagctggccagccggctccgctacgcccgcactatggtggacaagctgctgagctcacgctcggccagcaaccgtctcaaggcctcctaatagctgccctcccctccggactggtgccctcctcactcccacctgcatctggggcccatactggttggctcccgcggtgccatgtctgcagtgtgccccccagccccggtggctgggcagagctgcatcatccttgcaggtgggggttgctgtgtaagttatttttgtacatgttcgggtgtgggttctacagccttgtccccctccccctcaaccccacccatatgaattgtacagaatatttctattgaattcggaactgtcctttccttggctttatgcacattaaacagatgtgaatattc

SEQ ID NO: 54223 - DNA, 592 bp, Homo Sapiens
agcaaaggcaggcaaggtgccaaaggacaggcggagaccggccgtcatacgcgagcctcatgaaagaaagatccttgcactgctggatgctctgagtacggtgcatagtcagaagatgaagaaggccaaggagcagcggcacctgcacaataaagagcacttcagagccaagcagaaggaggaggaggagaagctgaagcggcagaaggacctcaggaagaagctcttcagaattcaggggcagaaggaaagaagaaaccagaagtccagtttgaagggggctgagggccaattgcagtgagcctttggactggagggactgtccctggatctgcggaggtagacagtttcaaacatcacagtttgaatgcctgtgaatgacacgtcagtgggaaagagctcaagagatgtctctactcaaactgtgcctgcaggaggaggaacagagaagcctgggctgctgggactgggttcattctcatgacttggggctgtcgagatttaaagtgatgtaagctgtggttatgtggattctcttactttcctctgcctgcctcagtttaattattttgtcctacagaaatatcattaa

SEQ ID NO: 54224 - DNA, 801 bp, Homo Sapiens
agttgtttactctggcctctacccaccctatgcagggggaggggggttcctctactccggccacctggccctgaggctgtaccatatcactgaccaggtccatctctaccccattgatgacgtttatactggaatgtgccttcagaaactcggcctcgttccagagaaacacaaaggcttcaggacatttgatatcgaggagaaaaacaaaaataacatctgctcctatgtagatctgatgttagtacatagtagaaaacctcaagagatgattgatatttggtctcagttgcagagtgctcatttaaaatgctaaaatagatacaaactcaattttgcatagaaaggtgtatttgaatagttcccatgttgtgttctcacattagagtaatttctatattaaaccatgaaaattgcctttatgagtgatacccatttgagggcctctaaacccttcaatttggtactcacgtgaagagggaaagcggaagatggtaatttttttttatggatgatatggaggatgattggttctgatcttaccggctagtggtcatttttaaaaaacttgtaccctcttatctgaaatccctgtttctggaattgggccattttaagtgatttggttgcctcttctataatattcctacttcccataataatgactgatttattggtaatccaggtatttatcagacctatttggttacacacgatttgtttaacctttatccagggtttccggaaatggacttatgtctacttaatggggacttgcggacaacttttcattggctacaa

SEQ ID NO: 54225 - DNA, 610 bp, Homo Sapiens
ggctcaatgtcctggctggtccagctgtgcccagatctgtcaatgatgtgcctcgaaagatccggtgtttgtggctcctgcaccctgctcagcagctctgtcccgggacagtcagggtggactcaatctttctggttctccacagaagacgtctctgcaagaagcctggagtctgtttcaggccaggaggaggggatttgctgagggccaagggggttctgggacagagtctggaaagctggtcttcaggctctcagtcccaggctgggcaggcacggtcacttcacttcagcctttcagtccctctctctctgcctgtgggaatctggacacattttgggaggcctcccaaggctgtgggacgtgcttgctctggcagctgcagggttcctgtctggcctccctggtgagcagaggggcggccacggcgggcggtggcctagagacccaggacctgggcgcctgggaaaatggaatgcaacccacattgtaaaggccactggcatctgattatctccatttgaacacacagcacagaacaatcatttaaatgttattttggaaaggggttttggggacacagaagaataagtaaacacatctcggaggc

SEQ ID NO: 54226 - DNA, 798 bp, Homo Sapiens
ctgatttttatttttgaggttttgtcaactggagtacgtagaggaactttatttacagtactttgatttggcaggttttcttctacttgtgctctgcctggagctgtttccatatgatataaaaagcaagtgtagtattccattactatgtggcttagggatttatttgttttttaaaatcaaccatgttagctgggattagactccctacagtccttcaatggaaaagtaacatttaaaaatcctttgggtaattcgaattacagatttaaaagagcttaagatctggtgttttgttaatgcttctgtttattccagaagcattaaggtaacccattgccaagtatcattcttgcaaattattcttttatataactgaccagtgcttaataaaacaagcaggtacttacaaataattactggcagtaggttataattggtggtttaaaaataacattggaatacaggacttgttgccaattgggtaattttcattagttgttttgtttgttttgatttgaaacctggaaatacagtaaaatttgactgtttaaaatgttggccaaaaaaatcaagatttaatttttttatttgtactgaaaaactaatcataactgttaattctcagccatctttgaagcttgaaagaagagtctttggtattttgtaaacgttagcagactttcctgccagtgtcagaaaatcctatttatgaatcctgtcggtattccttggtatctgaaaaaaataccaaatagtaccatacatgagttatttctaagtttgaaaaataaaaag

SEQ ID NO: 54227 - DNA, 697 bp, Homo Sapiens
gtccggagcccgagaggagctggttccagaccaaagaagagaggaagaaggagaaaattgccaaagctctgcaggaatttgacttggccttaagaggaaagaagaaaaggaagaagtttatgaaggatgccaaaaaaaagggggagatgacagcagaggaaaggtctcagtttgaaatcctcaaggcgcagatgtttgctgaacggctagcgaagaggaatcgcagagccaagcgggcccgagcaatgcccgaggaggagccagtgagaggtcctgccaagaagcaaaagcaggggaagaaatctgtatttgatgaagaactcaccaacacaagcaagaaggccctgaaacagtatcgagctagcccttcctttgaagaaaggaaacagttgggcttgccccaccagagacgaggaggaaactttaaatctaaatccagatacaagaggaggaagtagctgtcgtggcctgaagaaattcatgggggcagcccttaaatcccttccctgtgggaagtcatcctggctggtctgtcttttctccatttgtttaaaaaaaaaacaaaaacaaaaaacaacactttggtgtggtggtatggtacgtagctattttcctaagcatgtctgtcaatctcccttcttgctgattagctttcatatgactatattaaatggaagtatttttgggaaaaaaaaaa

SEQ ID NO: 54228 - DNA, 620 bp, Homo Sapiens
ggagccttccgtgagttggtctcctgttctaattgcacggattaccaggctcgccggcttcgaatccgatatgggcaaaccaagaagatgatggacaaggtggagtttgtccatatgctcaatgctaccatgtgcgccactacccgtaccatctgcgccatcctggagaactaccagacagagaagggcatcactgtgcctgagaaattgaaggagttcatgccgccaggactgcaagaactgatcccctttgtgaagcctgcgcccattgagcaggagccatcaaagaagcagaagaagcaacatgagggcagcaaaaagaaagcagcagcaagagacgtcaccctagaaaacaggctgcagaacatggaggtcaccgatgcttgaacattcctgcctccctatttgccaggctttcatttctgtctgctgagatctcagagcctgcccaacagcagggaagccaagcacccattcatccccctgcccccatctgactgcgtagctgagaggggaacagtgccatgtaccacacagatgttcctgtctcctcgcatgggcatagggacccatcattgatgactgatgaaaccatgtaataaagcatctctgggggaaaa

SEQ ID NO: 54229 - DNA, 652 bp, Homo Sapiens
  misc_feature (628)..(628): n is a, c, g, or t
gcggcccagtgctttttcttactttgtagctacactttgaagtaagattcaaactgttatccactcaattgccttattcctgaggatgtagtgaaggaagaaaaagttttctggaattccgtaaactatattttaagcttatttcttcaaaattattttcatatatcacagatatatcattggaagatataatttgcatatatgttcattatcagtgttcctaatttggtattacatgtattctatttttttctgaatgatagcatgaaaagtgtcaaagtggtttgtccgctagcgtctgtctgcagaactttcaggatgactattaattcctctcagatgtcatttttgagtggtccaagcctgctgttttgaacccacagcagtggagatttgtattcttatttacagttgtgtactataaagtgtgtgttacataggttttgtgtaataattatttgtaaatattatttagatttgtatttagacatgatttatatctaatatagatacaaagtctgtgtctaaatattatttaaagaagtgatttttcattctcttggattctttccagtgtggtgccttttatatgcctcacatagtctccttgttctcctactaatattcncaagctccatatgcccctcgtgcc

SEQ ID NO: 54230 - DNA, 909 bp, Homo Sapiens
gtgcaggaaggacaatagtcctctttccaagtgtgttagcatagacttctctatatgtttctactagacctaggggatgatgtcttttaataatactggccctaaacatgtaaataatcttgtaggtgagactttttcttttgtgtttcggaaatttcctatgtggctttcagttgtctgtttgtatagcctggatttttttgaggtaaatgaaactttctcatttgtatatttggcttgatatggtcttaatattatctttccacgaaatggatatatttctagaaaatatatatttactaccataatttctaccaccacccccattttgctctgcattatacacagtagagaagaactgaagacactgctgtgacagtattgcagtccaaggcatcatgtgctcttggtgggatactctgattatcagcatcaacagtactttactgagcaagactttgaaggcctgagaagagagcaaagttacggaaagtatttaactcttattttatattgaacaaacaaggttaatcatgtcatacatttttggttttctaagcagagactaatacaaatgcagccacataaaggcagtgtactgggggtgggagggaaggaacaatcacataaaatcagctgactcaaaattgaggatagttaataggttgcaaggggaaaaagtatgttgaaaatttagaccataatgaaccaagaatattcccttatcctggtgatgattaaagttagggaaacctacattttttatttttttaattagtaggctgctatccgagacattatagcccagtggtttatgagcacagattccaaagccagattaacctaggtttcgggagacccgctttccctaccatactactaataagttggggccatgtttggggccgg

SEQ ID NO: 54231 - DNA, 582 bp, Homo Sapiens
aagccaattaccttaaaaatgtctggaaggaaacactgaaataagaatacaacatttcggtgaagagctggaaacttaaaaaattatcaaaaggaattttggtatcatcttcagagaaaaaataaagcaagaaatactaacatcaaaaggacaggtatgatgatgcgataataataaacatctgcgtttgtctcttcactaagagtaaactgggaaattgtaggccaaagtccagttgaactttctaagtctgtgatccccgtgctgactgtggaagtgtatttataccaagatggagatcttgacttcttgaatatatctggactggtaaaatcttgatgaggctcataaaatgagtttgggaattgtgtatagctgattttttgtgggaaactgtttacttcattcaaaggttcttgagactcttgatatttctgtcttctccttgtgctttcctatggaaaaaatacatatatagtttagtttgttagacgtgagttatccaagtatttattttgtggagtgtgtaagaatgctaaataaaatgttatccaaggaaaaaaaaattaattaaattcatcc

SEQ ID NO: 54232 - DNA, 882 bp, Homo Sapiens
  misc_feature (416)..(416): n is a, c, g, or t
  misc_feature (423)..(423): n is a, c, g, or t
  misc_feature (614)..(614): n is a, c, g, or t
ggggtcaaccggatcggtgactgcggagggcgagctgagccctggccgccgccacaatgggccgcgagtttgggaatctgacgcggatgcggcatgtgatcagctacagcttgtcaccgttcgagcagcgcgcctatccgcacgtcttcactaaaggaatccccaatgttctgcgccgcattcgggagtctttctttcgcgtggtgccgcagtttgtagtgttttatcttatctacacatgggggactgaagagttcgagagatccaagaggaagaatccagctgcctatgaaaatgacaaatgagcaacgcatccggatgacggttccctgtctctgaaagacctttctctggaagaggagtctgcattgtagtgtctcaaagacacaataaacttcctatggtctgcaaaaacncaccaantatcacaaaaaacaaactcccttcccccccccccccctttttttttcaattcccaaaccacaacccccccttatattccaaagccaccccccccccctccaaaaacccccccctaacacccccttttttttcttccacccccccctcacccttctaactttccccctgccccaaacacaatgttacccttnttcccccctttgcgcccacctcctcttctccccaaaaaaaaatttttttacaaaaacttacttctcgcgcgcggggtggtcccccgcgtgtaacagacataatcggccccacatccgttcccccttcaaaaaacacctcctggtttatattcctattcggcgccgtgttttactcccctaaaaaaaaacaaccccgccgggggcagtccctaccccgcgtccgataccatgcgtcaacaatattgctcgattcctcggccccctcccc

SEQ ID NO: 54233 - DNA, 596 bp, Homo Sapiens
ttttttccccccccgccggctggtaccggtccggaattcccgggattcaagatctcatattaggattttctgtccttaattttttgagcaaaatctggaaaatgtgaaagcatatttagattttatatactatctgaaatgtgatttgttaagattcttaaatttgggcctcttagaataattttgaatgagatctaccgactcacttgtgagaatatttttcacagattatctttgggccttttcattagaaagctgtttgtttgtccccctgttggtacatttggttacctcattttgccgtttcagattgtgaaagctcacaggggtgttttttggaatcatttgctgagtcattttctcaaatcatattccattgtatcagttaacatatagttttaaatgtatgtattataaatatctgtaaccaaatcatttgaaggcttgataaatttttaacaaagtttgtacattttttatgaaagttactagtaatgctttactaagtagtgcaatgaatttttatttttmatccctgtgcccaattttggagttgagagggttgttggtaataaatgtatgatgtacacttaaaa

SEQ ID NO: 54234 - DNA, 877 bp, Homo Sapiens
tacctattagtcatacctaaatttttcagcacttcattcaattaaaatacatgaattttaaatattttacatgatgtgaataggcatgataatacttttagtataaaatctaaactttttccatttatcagaaatgataaaatccagttaccacatatcacgtttataaaatccttaattaaatgagtaacttctaaaatataacaatactaaatatcacactgcgatggaggtcccaaatatgtggtctatcaccactgaattcatgtaatagataagaaaaaaattagaggtggatgtcttgttttgtgtcatgaattactaaaatctcttagtagttgtggtatatttttgagtaaaattaccatttccagatttgagtttgaagggcttttatagttgtattttcctcctcactgttaataatcataatcctttttcagtattttagtggccttgaacaactggtttatctacaatctcaaatcctaagtgtataattatgtgcaatgttcaatacctcatataatacttgctcaacagtatagtggtaccaatggcattaagatggtgtttttgttctacatatttttcaataatttattctttctaatgttgaaattatatcaggctttaccggtttttttagttgtttaaataagtaatattttccaaagaataaaataacccatgatatctcttggaataatctgtaaaacgtagctataaaattctattttctacttagagattttaaccttttcttttttggcggctttaccaattatatgtaatgcatgaaataactaaactgtttgaaagtggtccaaccttccagcccataagaaattttgcctgtggcccaataatgtggtaa

SEQ ID NO: 54235 - DNA, 555 bp, Homo Sapiens
gggaccttgtgatccacccacctcagcctcccaaagtgctgggattacaggcatgagccaccacacccagcgagacggggtttcattatgttggccaggctggtctccaactcctgacctaaagtgatctgcccgccttggcctcccaaagtgctgggattacagacatgagccaccacgcttggccgggatagtatatttttatagcacttcccctactgattgctgccttctctgtggctacaagggacccacagaattacagggaagttacagggaagcaggtttcatctcaatattgggagagatttcaaacaatcacacctgcctgagaaggagtgggctgtcactaggaatttttattcccagtccgtcaggaattttgtagaagggcttcatgtgctggtaccaataggacaggaagattttaatcagctttactatctatgtttttttatggaaactgtgtgtatgtatacatacattttccaaaaagaaaaattaaatgattatagagattatgtttttcagactactcacgtatctgcttttctt

SEQ ID NO: 54236 - DNA, 540 bp, Homo Sapiens
taagatgctgatctctttattctttcaagtaagagtgctagtgaacaaattgtgttacttgccttgggattttttgaacgtttgtaaaatgctgtcttcctagtccaaacagctgcagctttgggcatttttctttttaattattcttcctctgactttgtatcccttaatacctacactctccaattgtaagagaaagggggcagggaagcaatatagcttccattctaaggctgtattcccgttatgaattactagctgattacagttcagagcattgatcctggaatgtgtgctggagaaatttaaaatactggggttttttgtttaatggtgcctatttagagttggaagttgaacagctgttgcattacatacttttgcttttttattgaaattttgaaatcaaacgtcttgatttttctgttctgttgaattgctatgttcaggatgttctagggggtgggggcagggactcttttcgtataagcacttgttttattttgtgtgtgtggagtataaaggctacacccttattgt

SEQ ID NO: 54237 - DNA, 500 bp, Homo Sapiens
gtagctatagccattaaccaaaggacagatgatatatatatatatgatatatatatatatataagttcttttttagctgtacctacgtacttatatcagcaccatgtatgtaggtgtgatagtactttcaaacagcgcctccacctggcctactctgttatttccacctgtttgggtagggccatttaacttccattatgccaaacttgggatgggattttcgaagcagacaacactatttcatcgtgtttcaaattggaaccttgaggctagttagtatcacactcaggccacactcagcacttgcccactcttgtttactgccttgtattctagttatttgtgtatttgtctccctcactagattatacgctccttgtgggcagggactgtgtcttttttcatctttgtatctttcatgcacctagcatagtgctttgcacatagtagtcactcagtgtttgttaaataaagctattagtgtcattaaaattcaaaag

SEQ ID NO: 54238 - DNA, 681 bp, Homo Sapiens
agaccgccagcctgatagccaacagttgtaaagcagtctctgttctaggatgtcccgacccagtggtgcatgagatcgcctatcagtacggaaaaaatgtaggaatagcttttcagctaatagatgatgtattggacttcacctcgtgttctgaccagatgggcaaaccaacatcagctgatctgaagctcgggttagccactggtcctgtcctgtttgcctgtcagcagttcccagaaatgaatgctatgatcatgcgacggttcagtttgcctggagatgtagacagagctcgacagtatgtactacagagtgatggtgtgcaacaaacaacctacctcgcccagcagtactgccatgaagcaataagagagatcagtaaacttcgaccatccccagaaagagatgccctcattcagctttcagaaattgtactcacaagagataaatgacaactctttctgttctttctggcagctatcttaccagactgtgcctaaagaattttgtggaatacactttgtttgcttcatgtgcagataaccaaaaatcattttaaaagatatcaaacttattgatgggcaatttatttttttttattgcaaaaggtttttcagaaaactttttaaatgtaattaataaaccacctgaatctgtcattctagtcctataaattataat

SEQ ID NO: 54239 - DNA, 588 bp, Homo Sapiens
  misc_feature (566)..(566): n is a, c, g, or t
  misc_feature (587)..(587): n is a, c, g, or t
agttattctttgaatatttcgttgactatatgtacattgagttatctatatttgtaaacaaattagtcatggaaaattattctattccaaagtctccttttagtctagataatcattatttcattttaaaattagtgtttttcatagtttgcactgatgcgtgtatggatgtgtgtgagtcagtggtagcttatttaaaaagcaccttatcctttctcccataacctttgtacactaaaaaatgaaagaatttagaatgtatttgatgatagcattctcactaagacacatgagaatttaactttataaccgcgtgagttaagatttaattcataggttttgatgtcattgttgaagttatttgtaattcagaaaccttgcttgtgtgatacatagtaagtctcttcatttattactgcttgtctgttgttatatctggattatcaaaagcaatagtgcaccaattaagatgtgctcaaatcaggacttaaatcataggcaccacatttttcatgtcagactagttactttgttgattctcagttactgtaggcatcaaaaggcanaaatcaaaaaaaaaaaaacana

SEQ ID NO: 54240 - DNA, 886 bp, Homo Sapiens
gggttttaactggggatgccttattagaattaaattatgggcaggaagtctggttacgacttgcaaaaggaacaattccagccaagtttccccctgttactacatttagtggctatttattatatcgtacataagttagtatgaaaaacagactatcacctttattgagaaacagccagtgttttcatttatctttgcttgcacatctgctctgttttggtttttctacaggaaatgaaaatcaacttgtttttttaatatgagtaaacttgtatgtctattttataaaattatttgaatattgtttaatgtctgaatatgaaagagttcttgatcctaaagaaatttagtggcacagaaaacaaagtgaatttgttagcataattattcctattcttatttcttcattttaagtcattgcaatggaaagtaatattataaaatggtaattacaacatattatcagtcacagttttctttccaattaaacacttaacttttcgttattccctgtatatacatatataacacacattttcttagatttcacaaattttaacattaaattactcaaaaaatgacaacaagaaaaaccgcagttatacaacgacagaccgtggtgcatagcaaaacaacctctgttttgcgggccgcgcggcccctggaaaaaattctttgaagacccaattctcgttggggcgccggggcgccgccatagggataaggcgacactgcgcacaagcgtcgtctccaaaggcacatccgtggcacaaacacggcgtcggggattcccccccaattaaaaaagcgcgccgggggcgaacacccagggtctgtgggaacacactcccggaagcgacgtcccagcggccacacaagcgacgcc

SEQ ID NO: 54241 - DNA, 750 bp, Homo Sapiens
  misc_feature (666)..(666): n is a, c, g, or t
  misc_feature (733)..(733): n is a, c, g, or t
tgaaccccttcagtgtctatgtgttttattgtattgtctttaactcgttcttgaagcacagatttcagcgagcctttcagctattcagtgccagcggttttccccactcaggaaagatggtgtgagccatacacacagcaggattagacggggagagtttcagctgcagcttctagtttaagaccaaagcccttcctcccgctgctgcatctgtctgagaggggaagctcttgttttccaagctggaaccgtttatgaggaaaactgagcagggtggcaaaatggaaaaggaacaattttctagtttttcctacgcgtgatattgacgcgtgctttttctttgatttgaggtacagcatgtaaataacaaatttccatattcaaaatgatcatattagagtgactgagtgaccttttgattttgaagcagactaaaatctgaccagaccacaatgaaaagtataaaattagaaacttaaattccaagctaaatttcagctttgacccacctaactccagtgaataggtggcagctcagaaacaaggacagcactgctgctgccagagcaagctcacatccagctggcacttcgtgagagctccttcctgccgggcacgtgtgagttcagcgtgggcaagagacttttatgcaattctgtcattcanaagggaaatgatgccaaccccagatgcagcatgtcctgaatgaatgatctgtaaaatacaataatanaagcttatagtttgagt

SEQ ID NO: 54242 - DNA, 875 bp, Homo Sapiens
  misc_feature (582)..(582): n is a, c, g, or t
  misc_feature (779)..(779): n is a, c, g, or t
  misc_feature (834)..(834): n is a, c, g, or t
  misc_feature (849)..(849): n is a, c, g, or t
acaggaagtgaatgaattaaggaagctgctggaagaagaacgagaccaaagagtggctgctgagaatgctctctctgtggccgaggagcagatcagacggttagagcacagtgaatgggactcttcccggactcctatcattggctcctgtggcactcaggagcaggcactgttaatagatcttacaagcaacagttgtcgaaggacccggagtggcgttggatggaagcgagtcctgcgttcactctgtcattcacggacccgagtgccacttctagcagccatctactttctaatgattcatgtcctgctcattctgtgttttacgggccatctatagacttagttgttactctttggaccactcccctcaaaacttggaattctctcacctctaacatcagaacatcaattccagtggaacagtcttcccatttacaggtcttctctccaactcttcacggaaagtgcctgcaaaaacagaggtggatacgaggacaggttggagctgcagggactggcgagtctgctttcttctactgccctgagcctgaacgcttctgcttaatctgagaatcacantttggtttgttgagcctaatatttgttgagattttgcaggaccctgatcttttgtggtcctgtaaaagatactgaggaatgtctttcagccaagccaagaggatggtttcaataaacctaataatctgaagttcagtatcattttgattgataactttctttgccttgtttgcctgtattttctcctgtttcaaggnggaaggtggctctgccataaacagagttcagggaaatgaacatgtcacctcatangacaatctgatttangtctctttgcagaaataagggtggtg

SEQ ID NO: 54243 - DNA, 810 bp, Homo Sapiens
  misc_feature (746)..(746): n is a, c, g, or t
  misc_feature (783)..(783): n is a, c, g, or t
  misc_feature (803)..(803): n is a, c, g, or t
attttttcagtaagcacccagaggcctccattcaggctgttttttcagatgcccaaatgcatatttgggcattagaaggtctgtcgcacttagtagcagcatcatttacagaggatagatttggagttgtccagacgacactaccagctatccttaatactttgttgacactgcaagaggcagtcgacaagtactttaagcttcctcatgcttccagtaaaccaccccggatttcaggaagccttgtggacacttcatataaaacattaagatttgcattcagagcatcactgaaaactgccatctatcgaataactactacatttggtgaacatctgaatgctgtgcaagcatctgcagaacatcagaaaagacttcaacagttcttggagttcaaagaatagttaagtaatataaactgtgttcattacactgctgatacaactacagatgggacagtaaatgttcagcattcttggatcagaagaaaacggactaattagatgcttcctttgtcgtggtggttgctttgaaaactatactttaatgggagaaatcatggaaagaaattctcaacagaataactgaaaactgccttttctgtaccgattgctttttgtgtgtgtggtataataaaatctttattcaattttacagaagcattgatggcagtcgaaatgtctctagctcatataacttaatagtaataactaaaaaacttttagaattacttttgaaaggagggnaagccagtctgaaatgagtataggtggatttcatagncttcttaattaagagtttanctctttg

SEQ ID NO: 54244 - DNA, 485 bp, Homo Sapiens
  misc_feature (443)..(443): n is a, c, g, or t
  misc_feature (445)..(445): n is a, c, g, or t
ggcacgagggcccagacgagctggagaagctggtgcaggtggtgcggcagctggaagcagagcctggtttgcctccagtgcagcctgtcttcatcactgtggaccccgagcgggacgacgttgaagccatggcccgctacgtccaggacttccacccaagactgttgggtctgaccggctccaccaaacaggttgcccaggctagtcacagttaccgcgtgtactacaatgccggccccaaggatgaggaccaggactacatcgtggaccactccattgccatctacctgctcaaccctgacggcctcttcacggattactacggccggagcagatcggctgagcagatctcagacagtgtgcggcggcacatggcggctttccgcagtgtcctgtcttgagccactgcagtctgggccccatcattaaacgggctgcgtttnanaaaaaaaaaaaaaaaaaaaaaaaaaaaaaaaaaaccgatt

SEQ ID NO: 54245 - DNA, 791 bp, Homo Sapiens
cacgcgtccccctaattattgcaaacatgatcaacaaaactgatccacacacctcttggaaaaagccttaatggccatgaataacctgagtgagaattatgaaaatcagggccggcttcaggtgtacatgaataaagtgatggatgatatcatggcctctaacctgaactcagcagttcaagtagttggactaaaatttctaacaaacatgactattactaatgactaccaacacctgcttgtcaattccattgcaaactttttccgtttgctatctcagggaggtggaaaaatcaaggttgagattttgaaaatcctttcgaattttgctgaaaatccagatatgttgaagaaacttctcagtacccaagtgccagcatcatttagttccctctataattcttacgtggaatcagaaatccttattaatgcccttactctatttgagattatctatgacaatctcagagcagaagtgtttaactatagagaattcaataaaggttcccttttttacttatgcactacatctggagtgtgtgttaagaaaattagagccttagcaaatcaccatgacctcttagtgaaagtgaaagttataaaactagtgaacaaattctgattggttatgtaccgtcaaaagacttgaagaaatttcatgattttgcagtgtggaagcgttgaaaattgaaagttactgcttttccacttgctcatatagtaaagggatcctttcagctgccagtgttgaataatgtatcatccagagtgatgttatctgtgacagtcac

SEQ ID NO: 54246 - DNA, 779 bp, Homo Sapiens
  misc_feature (737)..(737): n is a, c, g, or t
  misc_feature (756)..(756): n is a, c, g, or t
cctgggcccatccctgtccccgcgccaccccagattgccacctccaccagcctcctggctgcccagtcacttgtgccaccccctgggctgcctggctccagcaccccaggagttttgccttacttcccacctggcctgccgcccccagacgccgggggagcccctcagtcttccatgtcagagtcacctgatgtcaaccttgtgacccagcagctatctaagtcacaggtggaggaccccctgccccctgtgttctcaggcacaccaaagggcagtggggctggctacggtgttggctttgacctggaggaattcttaaaccagtctttcgacatgggcgtggctgatgggccacaggatggccaggcagattcagcctctctctcagcctccctgcttgctgactggctcgaaggccatggcatgaaccctgccgatattgagtccctgcagcgtgagatccagatggactccccaatgctgctggctgacctgcctgacctccaggacccctgaggcccccagcctgtgccttgctgccacagtagacctagttccaggatccatgggagcattctcaaaggctttagccctggacccagcaggtgaggctcggcttggattattctgcaggttcatctcagacccacctttcagccttaagcagccacctgagccaccaccgagccatggcaggatcgggagaccccaactccccctgaacaatccttttcagnattatatttttattattantatggtattattacactggcttt

SEQ ID NO: 54247 - DNA, 335 bp, Homo Sapiens
aagattggaaagctctacaacagcttgtgcccgggcactctctgcctcatcctgctgccaggaaccaagagcactcatggttcactctctggtctaggactgatgggaataaaagaggaagaagaaagcgctggcccaggcctgtgttcgtgagtcggcctgccatgtttccatgtgccatttcttaccccttgtaggcaatggcaaagaatgtggtcaggctgtagctccccaaccagcagacagttttatggaaacttggtatagcagctaaaagagtttagtttgtttatatggcatgtataagttttcaataaatgcctaaagttcaagca

SEQ ID NO: 54248 - DNA, 524 bp, Homo Sapiens
gaggactcctcactggttgctgtgatgatatccagtgtccctctgcccccttccatccccaaccacatttgactgtagcattgcatctgtgtcctgttgtcatttatgttaaccttcaggtattaaacttgctgcatatcttgacatatcttgagattctgcatgtcttgtaaagagaggggatgtgcatttgtgtgtgatgttggatagtcatccacgctcagtttggaccattggaggaacttagtgtcacgcacaaatggggctattcctacgcttagaatagggcttgtctgcccactttagaagagtccaggttggtgagcatttagagggaagcagggcagaactctgaacgacaatacgtctctctgagcagagacccctttgttcttgttatccacccatatggacttggaatcaatcttgccaaatatttggagagattgtgtggatttaagagacctggatttttatattttaccagtaaataaaagttttcattgaaaaaaaaaaaaaaaaaa

SEQ ID NO: 54249 - DNA, 701 bp, Homo Sapiens
  misc_feature (493)..(493): n is a, c, g, or t
  misc_feature (658)..(658): n is a, c, g, or t
aacagaacagaaagctctccctcttgtgtgaggcagttgctgtggaaaccccacgggcaggaggccccggcagcacatcctgtctgcttgtgtctgctgcagagttctgggaccggggccatgtctccacacctcactgctctcctgggcctagtgctctgcctggcccagaccatccacacgcaggagggggcccttcccagaccctccatctcggctgagccaggcactgtgatctccccggggagccatgtgactttcatgtgccggggcccagttggggttcaaacattccgcctggagagggaggatagagccaagtacaaagatagttataatgtgtttcgacttggtccatctgagtcagaggccagattccacattgactcagtaagtgaaggaaatgccgggctttatcgctgcctctattataagccccctggatggtctgagcacagtgacttcctggagctgctggtgaaagaaagctctngaggcccggactccccggacacagagcccggctcctcagctgggactgtgccaggcactgaagcctccggatttgatgcaccatgaatgaggagaaatggcctcccgtcttgtgaacttcaatggggagaaataattagaatgagcaatagaaatgcacagatgnctatacatacatatacaaataaaaagatacgattcgcaattgg

SEQ ID NO: 54250 - DNA, 697 bp, Homo Sapiens
atgcagacatggaggctcggctgaaccaggactcctcactgtctacctgagagaatgagcacccctcatccatctcagcatcaacacaatttccaggggacctcaggtctacctcaggactgaacgccacacctcaggattcctcctccttgaatctgagactggctgcccattctgagatggggatgaaggtaagatgccgcatcaccaggcacgccgcccctgacagctgccttgataccagctctctgtggaaacccccgaggagttggatctggagaacagctgggcctcctcactcaggacttctctcctgaagaacacgcagtgctaaaactgaggatgatttccctaatgcttctgcttggccttatggaggagctgctccttccttacagccttggggatggacttgcccacacctccacctcccctgagccctgtgagaggcacgactgtctatgccaatgaggctcggtggggggctctcaagtgcctgatcctgccctgggctcagagccagcccagagggaagcaactgcacagccccacaggccctccttgggcactgtccccccagacccatctcagagctcagagggtacaagctccagaacagtaagcaagtgggaaaataaagacttcttggatgactgaagacaaaaaaacaacaaaaaaaaaaaaacaaaaagagggg

SEQ ID NO: 54251 - DNA, 566 bp, Homo Sapiens
cgactcaacccggccgttgcttctgtatatagagaaataagttattggccgcgcgcctcccttcagtccacggtactacccgggcctcccctcgtccctcttctagtggtaccgcccaggccttaatcacccccattccgtgcggtggtatctcccaggctctacattctcgggagcggcgcctcccaagggggtcctgggaccttctcgcgctcctcctggcctctgagggatgcgtcctacccgcgccatcgccccgtggcccaggacggggacctccccttagtccgtcctcccaccgccgggccctgccccgcatcccggccttatgcactgcccctcccacccggccccgcccaggcacggccgaccccgccccgggcaccgctcaccgagccatcctgcctcgcctccccccacgcctgcagcttctcgcgaggggcggcgacggtcccctggtggcaggaggggctccccctgttgcgggtgaggcggctgctctctattttcagatgttgctgtagaaataaagacggtttaaatctgaaaaaaaaaaaaaaaaggac

SEQ ID NO: 54252 - DNA, 757 bp, Homo Sapiens
gacaacagcctttctgtgaggaagggcttctgcgaggcccccggcaacaggacccagagtggcaaccaccctgaggactggcctgtgtaccaggagctcctggggatggtcctgtccatctgcttgtgccggcacgtccattccgaagactacagcaaggtccccaagtactgaggcagctgctatccccatctccctgcctggcccccaacctcagggctcccaggggtctccctggctccctcctccaggcctgcctcccacttcactgcgaagaccctcttgcccaccctgactgaaagtagggggctttctggggcctagcgatctctcctggcctatccgctgccagccttgagccctggctgttctgtggttcctctgctcaccgcccatcagggttctcttagcaactcagagaaaaatgctccccacagcgtccctggcgcaggtgggctggacttctacctgccctcaagggtgtgtatattgtataggggcaactgtatgaaaaattggggaggagggggccgggcgcggtggctcacgcctgtaatcccagcactttgggaggccgaggcgggtggatcacgaggtcaggagatcgagaccatcctggctaacatggtgaaaccccgtctctactaaaaatacaaaaaaaatttagccgggcgcggtggcgggcacctgtagtcccagctacttgggaggctgaggcaggagaatggtgtgaacccgggagcggaggttgcagtga

SEQ ID NO: 54253 - DNA, 684 bp, Homo Sapiens
cccacgcgtccgactcccgtgtgtcaccagtgccacaaggtcatccggggccgctacctggtggcgctgggccacgcgtaccacccggaggagtttgtgtgtagccagtgtgggaaggtcctggaagagggtggcttctttgaggagaagggcgccatcttctgcccaccatgctatgacgtgcgctatgcacccagctgtgccaagtgcaagaagaagattacaggcgagatcatgcacgccctgaagatgacctggcacgtgcactgctttacctgtgctgcctgcaagacgcccatccggaacagggccttctacatggaggagggcgtgccctattgcgagcgagactatgagaagatgtttggcacgaaatgccatggctgtgacttcaagatcgacgctggggaccgcttcctggaggccctgggcttcagctggcatgacacctgcttcgtctgtgcgatatgtcagatcaacctggaaggaaagaccttctactccaagaaggacaggcctctctgcaagagccatgccttctctcatgtgtgagccccttctgcccacagctgccgcggtggcccctagcctgaggggcctggagtcgtggccctgcatttctgggtagggctggcaatggttgccttaaccctggctcctggcccgagcctggggctccctggg

SEQ ID NO: 54254 - DNA, 724 bp, Homo Sapiens
  misc_feature (703)..(703): n is a, c, g, or t
  misc_feature (709)..(711): n is a, c, g, or t
  misc_feature (713)..(719): n is a, c, g, or t
ggtagaagacctcgtggattccctcaagctggccctcctcttctacatcttgaccttcgtgggtgccatcttcaatggtttgactcttctcattctgggagtgattggtctattcaccatccccctgctgtaccggcagcaccaggctcagatcgaccaatatgtggggttggtgaccaatcagttgagccacatcaaagctaagatccgagctaaaatcccagggaccggagccctggcctctgcagcagccgcagtctccggatccaaagccaaagccgaatgagaacggtgtctctgcccgcaggacgcctgcccccagcccccgcagccctctggccccctccatctcttgtccgttcccacccacccccctcctcggcccgagccttttcccggtgggtgtcaggatcactcccactagggactctgcgctaattacctgagcgaccaggactacatttcccaagaggctctgctccaggagtccaggaaagacgaggcaccttggccgcggggcctgctgggacttgtagttgcctagacagggcaccaccctgcacttccggacccgccgctggaggcgccgtgaggcgttggtgtctcctggatgctactagccccaacgccggggctttgcatggggcccaggggaggcctgagcttggatttcactgtaataaagactcctgtggaaaaaaanaaaaannnannnnnnnaaaaa

SEQ ID NO: 54255 - DNA, 917 bp, Homo Sapiens
  misc_feature (676)..(676): n is a, c, g, or t
ggtctgattgaagctccccgcagggttcagcatggtttgtgcgtccacaccacaagcagcgcttctcacagacgtgcacagacctgaccggccggccctacccgggcatggagccaccgggaccccaggaggagaggcttgccgtgcctcctgtgcttacccacagggctccccaaccaggcccctcacggtccgagaagaccgggaagacccagagcaagatctcgtccttccttagacagaggccagcagggactgtgggggcgggcggtgaggatgcaggtcccagccagtcctcaggacctccccacgggcctgcagcatctgagtggggcctctaggatgtgcccagcctgccacaccgcctccaggaagcagagcgtcatgcaggtcttctggccagagccccagtgagtgcccacggaggcccccagcacacccaacgtggcttgatcacctgcctgtccagctctggtgggccaagaacccacccaacagaataggccagcccatgccagccggcttggcccgctgcaggcctcaggcaggcggggcccatggtttggtccctgcggggggaccggatctgggcctgcctctgagaagccctgagctaccttggggtctggggtggggtttcctgggaaagggggttccccagaacttccctgggtcntggcctgtgagtggtgccacaggggcaccccccgctgagccccctcacggggaaaggaggaaacccccgtggggacggggcccctttttattcgggggacaggggttctttaaaaaaactggcgggaaaggcccccaaaaaaaacccatacctacgggtgtcgctcgaggcatccatgttggggggcgaaaaaaaagggtatgaaatggcccctgggctaataaaggtttaccgccccccc

SEQ ID NO: 54256 - DNA, 871 bp, Homo Sapiens
ccacgcgtccgggcttctattgataaatccagagcctcaaggggcccagccacgtcaaacttctctccctcagggactctccagcaccaaaaggcagaaggtggaagccgtttttcccccagagccctgtgtttttgtgaaaggcctcactgtggctcctctgttttacatactcattagtaagtgggaggtccactggggcaacagacactgccacaatttcagtgttgtgttcagccaaggggacggtctggacaggcagcttaagtgtgagtttagtcacaactcctgagtgtcccgctctcctgcttacctaggaggtgagtgccaggaaaatacaccaaatgcttctagtattgtttccccacttaaaatagtcctgcttaaattcacatggtgtggtctgatgttctgagagcatcaggaaatacaacccttttgcccatttacccttctccccggatcccaaggtggtctgttgctctggcttcctttcattgtcttaggccttcatggagtggatgctgcctcctcctggctgtttttgtgcctgtttgaagctactgctgcctccatttctgggaaagacctttgagagcctagcccaggcctaagggctatgtttggtaccagtattttggctttagcttttctatgtgattgtgccgtcattctgttttaagctcatggatccatggatttggtttaccatgggatatttttccattaaatccaggtaattttcaaaaaaaaaaaaaaaaagggcggggccgctcctaaagtaatcccctccaaggggggccccaaagccttaaccccggtaaccccacgcttttttcttgggaaacaaaagtggggccccccttaatac

SEQ ID NO: 54257 - DNA, 935 bp, Homo Sapiens
  misc_feature (159)..(159): n is a, c, g, or t
tggccgtaatacatcagtctttggggctgtcctgcatccctacacctgggccgcctgaccttggactgacctcccgttgcctcctggagccctgcataccttctgtgccacaatgcctgccgtctctcgctaatgtctccagctgcctggaaggcvgantggggctgcggtcactctggggcagtcttctggcctcactgactcctccaccattgcctcccccaramccccctgcccctcccactcttcttcataactgccacctttgccagaagctccagagagactccccaacctgccatgcctgcctccaccccaaccgtacagtccccactgcgctgtccagcccctggtaccatacctatggcctggctcccccctggccttggagcccggtgcccctttcacttcctcagcctcagcaatgttcccttttcagtgtcatggagctggctcgcctcaagtctttcgttttcccaggctaggtagggctgtgaggaatgcattaagagggtttgggagtttctgagaacctggaggagcaaagcttgattcagatcctgtctgcctcgctgggtccttggcaggtcccctgtcctcctgggtgggagcttatggggtggtggggcagaaggactgaaggtaattcactcctagatcgcagtggctggctgcttggccaggacagtgatgccgccagggagagcttccgcttggtgaccagggacatgtcccagatggacatagaagcccctctctgcctccctgggattttttagacttttacttttgatttccctaggatggaagagtataggtgggagataagggaagtggggtgagaggagaaaggaaatgttggcatgggcctgtgtgatgtccctgaggcagaaagagccggggactgatgggttcaggtgggagctgctgggtga

SEQ ID NO: 54258 - DNA, 581 bp, Homo Sapiens
  misc_feature (520)..(520): n is a, c, g, or t
  misc_feature (537)..(537): n is a, c, g, or t
  misc_feature (550)..(550): n is a, c, g, or t
atcataaggctgagtttgcacgcttggacttcagttctgctagcatgtaaagagtggtggactttaaaaccgtaagaggtatcattacaagtcacctggaacagactcaaagaacaggttctttgggcaacagacaaagaagaatcaagttctgtgctgtcccgtgagtgtgtctgagtaccattcactggagttgctgcttaggtctgggacgtgtgtgtgactcttaacaattgctgtctgaaaatgagagagaagacttcggaagcacattgtgttcataatgtactccacaatggccagtccaattgctatctatttttttatccagaggcttaattaaatgatgtggtaaaatgatgtttgagcattaagacaatgtaattctttatttctgggtggaaagatataccggattaaattatttctgtttaaaaaaatgacaaaagttatcaccaaaaccccctttcccatcttgcactgtttgttttggattgggtttgggggaaagaaagatgtnttcttagttgtctactntgtttgaacactnttgttgtggttcaagtgctgttttgtgtgtt

SEQ ID NO: 54259 - DNA, 756 bp, Homo Sapiens
  misc_feature (741)..(741): n is a, c, g, or t
  misc_feature (744)..(744): n is a, c, g, or t
  misc_feature (746)..(755): n is a, c, g, or t
gcctgggtggcgtgtttctaagagagaatccctttttccggtcaccaattgggacgaccttctggcctggcgtgtggacccccctttcaggccctgtctgcagtcagaggaggacgtgagccagtttgatacccgcttcacacggcagacgccggtggacagtcctgatgacacagccctcagcgagagtgccaaccaggccttcctgggcttcacatacgtggcgccgtctgtcctggacagcatcaaggagggcttctccttccagcccaagctgcgctcacccaggcgcctcaacagtagcccccgggcccccgtcagccccctcaagttctccccttttgaggggtttcggcccagccccagcctgccggagcccacggagctacctctacctccactcctgccaccgccgccgccctcgaccaccgcccctctccccatccgtcccccctcagggaccaagaagtccaagaggggccgtgggcgtccagggcgctaggaagccgggtgggggtgagggtagcccttgagccctgtccctgcggctgtgagagcagcaggaccctgggccagttccagagacctgggggtgtgtctgggggtggggtgtgagtgcgtatgaaagtgtgtgtctgctggggcagctgtgcccctgaatcatgggcacggagggccgcccgccacgccccgcgctcaactgctcccgtggaagattaaagggctgaatcatgaaaaaanaanannnnnnnnnng

SEQ ID NO: 54260 - DNA, 434 bp, Homo Sapiens
aggtgaagatctttagcagagttaaagagtgaacatggtggaaaaaatataattattttcatcagacttaaactggaaattgatgatttctgaactgaagccttcacacatgtgagatccatgctgaggagaagcaaaatggcacagggctagttgccaccaaccaatttactgatgaatgaagcccaggggactgccattttataaatgtcagcagttggaaaaatcgtcacgaattgacttagagcaagggtcagcaagcttgtctgtaaagggccaaacagtaaatattttagggctgggggccataaaatatgttgcaaccacccaattctgccattgtagtgcaaaagcagccatagacaacacatacatgaacgaacgtggctgtattccaataaaactttatttatggacactgaaaaaaaaaaaaa

SEQ ID NO: 54261 - DNA, 605 bp, Homo Sapiens
  misc_feature (533)..(533): n is a, c, g, or t
ctttcacccccaagactctaacaaagccacatgagccacagttgagaagcggaggggccagctgtgcatggagccatttggatggcggcgggcgggggggattctctgtatcaggagtgactttgttgccccacacagcctcctgctgcaggtgctttggaaagagatgctgccttggagctggtgaatctgtggaccacattcaagggtgtggcacaggcatcttcccatccttttcactccgaatcgctggcgacacattctcctttccagctaggaaagggttcctcgcggctggtttagattgtggttgtttgttttgcttctactaagactgttttgtttcaaaaaggaaacaagttttgtgtttgctgtctacgctggagtcctgaactgtgggtagaaaacacgacctggctttgtagaaaggacacagggctgttttatgaactaagcggtgaggctcaggtggcggctctcgcagagcccctgatgctgttgttctttgagggcttaaggcctgatgaacgtangcacgtgatgcgtaatagtcttcaatggtacacttaactagtctcttctgtgtaacagcaaaaaaaaaaaaa

SEQ ID NO: 54262 - DNA, 500 bp, Homo Sapiens
acatgtggtggtacgaaaacaattcccctgtggcctgctggactgggtggaaccagaacaggctaaggcatacagttcttgactttggacaatccaagagtgaaccagaatgcagttttccttgagatacctgttttaaaaggtttttcagacaattttgcagaaaggtgcattgattcttaaattctctctgttgagagcatttcagccagaggactttggaactgtgaatatacttcctgaaggggagggagaagggaggaagctcccatgttgtttaaaggctgtaattggagcagcttttggctgcgtaactgtgaactatggccatatataattttttttcattaatttttgaagatacttgtggctggaaaagtgcattccttgttaataaactttttatttattacagcccaaagagcagtatttattatcaaaatgtctttttttttatgttgaccattttaaaccgttggcaataaagagtatgaaaacgc

SEQ ID NO: 54263 - DNA, 582 bp, Homo Sapiens
actttacaatgctacccaagagacaagcccttcaatacagatgttggagtagagacggcagagtggaggatacctgggatgaactcctaattggtagtgtagaagtgaaaaaggtaatggcatgccccaggtgtattttgacaacggtggacccagacactggagtcatagacaggaaacagccactggacaccctgaagagctaccgcctgtgtgatccttctgagagggaattgtacaagttgtctccactttttgggatctattattcagtggaaaaaattggaagcctgagagttggtgaccctgtgtatcggatggtgtagtgatgagtgatggatccactagggtgatatggcttcagcaaccaggagggattgactgagatcttaacaacagcagcaacgatacatcagcaaatccttattatccagccttcaactatctttaccctggaaaacaatctcgatttttgacttttcaaagttgtgtatgctccaggttaatgcaaggaaagtattagaggggggaatatgaaagtatatatataaattttaggtactgtaggctttaaaaatattt

SEQ ID NO: 54264 - DNA, 689 bp, Homo Sapiens
agaggcagctggaggtcaggacatggctgattcgatgctgatgcagggatctaggggcctcactgatcaggccatattttatgctgtgacaccactgccctggtgtccccatttggtggcagtatgccccatacctgcagcaggcctagacgtgacccaaccttgtggggactgtggaacaatccaagagaattgggtgtgtctctcttgctatcaggtctactgtggtcgttacatcaatggccacatgctccaacaccatggaaattctggacacccgctggtcctcagctacatcgacctgtcagcctggtgttactactgtcaggcctatgtccaccaccaggctctcctagatgtgaagaacatcgcccaccagaacaagtttggggaggatatgccccacccacactaagccccagaatacggtccctcttcaccttctgaggcccacgatagaccagctgtagctcattccagcctgtaccttggatgaggggtagcctcccactgcatcccatcctgaatatcctttgcaactccccaagagtgcttatttaagtgttaatacttttaagagaactgcgacgattaattgtggatctccccctgcccattgcctgcttgaggggcaccactactccagcccagaaggaaaggggggcagctcagtggccccaagagggagc

SEQ ID NO: 54265 - DNA, 1119 bp, Homo Sapiens
gaaacctgtttggaggttatggatgataaacccaatcctgaagccctaagtgacagttcagagcgtcttttctcctttggcgtcatcgcagatgttcaatttgcagacttagaagatggctttaatttccaaggaaccaggcggcgatactacagacatagtcttcttcacttacagggtgccattgaagactggaataatgaaagcagcatgccctgttgtgtccttcagcttggagatatcatcgatggatataatgcacagtataatgcatccaaaaagtccctagaacttgttatggacatgttcaagaggcttaaagttccagttcatcatacatggggaaaccatgaattctataacttcagtagagagtatttaacacactctaaacttaacactaagtttctagaagatcagattgtacatcatcctgagaccatgccttcagaagattattatgcttatcattttgtaccattccctaaattccggttcattttacttgatgcatatgacttgagtgtcttgggcgtggatcagtcttctccaaaatacgagcagtgtatgaagatattgagggagcacaatccaaatacggaactgaatagtcctcaaggtgaattattcctttgagctgagaatctaatagattgtctttaaattcttcagctaccttttattcagcaggaagatggacaattaaggactttctgagccccagtttgtccagtttaatggaggattcagccaagaacagctaaactggttgaatgaagtgctaacattctctgacacaaaccaagaaaaggtggtgattgtgagccatcttcccatttacccggacgcctctbacaatgtgtgcctggsctggaactacagagatgccctggcagttatttggtctcatgagtktktkgtgtgtttctttgctggtcamaccatgatggtggctactctgaggatccttttggtgtataccacgtcaactagaaggaktattgaamarcycmraaagcmagcytttgsacarttymwgttwttctgamaaatgatgtgaarggrgrgcgrattccratagaatattattamagaaraaraccttcmttgtagttawtt

SEQ ID NO: 54266 - DNA, 719 bp, Homo Sapiens
ccattgtgcccagccacccccaaaagccctcaggcgagagctgcctgaggaggcagccgctgaggaggaaaggagaaagattgaagttccaagtgagattgaggtcccgagggaggccctggagcccagtgttccccttatggtgtctttagagatctccctagaggcagctgaagaggagaagtcccgcatcagcctcatcccaccagaagaacggtgggcctggcctgaggtggaggcgccagaagctcctgcattgcccgtggtgcctgaactccctgaggtgcccatggagatgcctttggtgctgcccccagagctcgagctgctctcactggaagcagtgcacagggcagtggcactggagctgcaggctaacagggagcccgacttcagcagcctggtgtcacctctcagcccccgcaggatggctgcccgggtcttctacctgctcctggtgctctcagcgcaacagattcttcacgtgaaacaagaaaagccatatggtcgcctcctgatccagccggggcccagattccactgaggttagagtccatttacaaagctgccaggaaaccggccacttctagtaaaccacgtcgtgcctcactgggtcctgcttacctcatttctgaatgtgcatttccagccttcttgctctcagagctattgttcaagcagaaaacaagctgcttttattacaaaaaaaaaaaaaaaag

SEQ ID NO: 54267 - DNA, 876 bp, Homo Sapiens
  misc_feature (662)..(667): n is a, c, g, or t
  misc_feature (670)..(671): n is a, c, g, or t
  misc_feature (673)..(675): n is a, c, g, or t
  misc_feature (677)..(677): n is a, c, g, or t
  misc_feature (683)..(683): n is a, c, g, or t
  misc_feature (691)..(691): n is a, c, g, or t
  misc_feature (697)..(698): n is a, c, g, or t
  misc_feature (734)..(736): n is a, c, g, or t
  misc_feature (740)..(742): n is a, c, g, or t
  misc_feature (758)..(758): n is a, c, g, or t
  misc_feature (761)..(761): n is a, c, g, or t
  misc_feature (764)..(764): n is a, c, g, or t
  misc_feature (769)..(772): n is a, c, g, or t
  misc_feature (774)..(777): n is a, c, g, or t
  misc_feature (786)..(786): n is a, c, g, or t
  misc_feature (808)..(810): n is a, c, g, or t
tcctgcctaatgaaaggaggtcttgtggtgtgtgtctcctctcttctctatagttcccgagttggcccccattgcagcccccaccctgtgggtagtcttccagaagtgatgcagtggtgtgagatgccctacaccttgttatttgggagactttgagagtcattcacttccatggtgactagtgtttgttttgcctgattttatattctgtgttgcatttctccccactccctgccctgctttaataaacagcaaaccaatatctaggaagaatgactgagggatagtattgggtattggccccatggcaggaacagccacttgcatctggtcccggtgccacactgcggtgcttggtgtggttgtggagcctgtccctgcgcgccttgctcccgttgagccacgctgtctggtgggtgattctctgccctgagccaccaccctggactggcccagtctccagagctggcacaccctgcctgttttctctttttagacacaacagccgcagtttggccagccactaagtcccaccagctgaggtccgaggaaagcggggtgactcatttcccttgtccagggcccgaggagagtgaggtgtccagcctgcaaagctattccagctccttggtgttggtttgcaataaattggtatttaagcnnnnnnaannannnanaaaaanaaaaaaanaaaaannaaaaaaaaaaaaaaaaaaaaaaaaaacaaaaaaaannnaaannnaaaaaaaaaaaaacanaanaanaccannnnannnnaaaaaaaanaaaaaaaaaaaaaaaaaaaaannnggggggggggggcgcgccacaaaaaaaaacacccccgcgggggggcgccgccattttttattgccc

SEQ ID NO: 54268 - DNA, 705 bp, Homo Sapiens
  misc_feature (625)..(625): n is a, c, g, or t
  misc_feature (630)..(630): n is a, c, g, or t
gcacgaggggagcagggctggacgggcctgaaggagaccaggggccccaaggaccccaaggcgtgcccggcaccagcaaggacggccaggacggtgctcccggcgagcctgggcctcccggagatcctgggcttccaggtgccattggggcccaggggacaccggggatctgcgacacctcagcctgccaaggagccgtgttaggaggggtcggggagaaatcaggctctcgaagctcataaaattcaacgtgaggaagcaagtgacaaggacgcccgaagcacagtggacggtcatgaaggagcgggggtgtggcaggcgggtgacgtccaggagagggagcgcccctggctgcccctcggccgccgactggacgcgcgggccttgccagcgagcaccctcatcgggctgtcgcctgacagcatacctcaaaaggccctagctaataaacctgtaagcccagcatttgagagaaggtagggtgtgtatatataaaaggttgtgtacaactccacgaggtgaaaaatattcagtaacttgtttacatagcatttgtgtaaagactatgatctcatcccaataaaatgatatattaaaccttcagattaatgactggctacagagntacanaaaataaagaatttaatgtacagtaaattctctccccataaaaaaaaaaaaaaacacttaatgggcggcgcagct

SEQ ID NO: 54269 - DNA, 702 bp, Homo Sapiens
cttagaggtccgtgctacatcttcacagttcctctgaataaccttaggtggtagtgttacttgcctttgacacctctgcatatgttttaatgactagatccaaactgtgttgttcttaaatcaaaaattggataatttgtaatatttatgtgttaatcacacagtatgctctctgaagttctcttaagccttcagtttatactcttaatttaattttctttctgagctggagaactggctttgcactttggttacacagaacattggtttccaattcagtttaactgaaatttgctgctgatatgttgagtttgttctttaaaaaatagctcatatatctcatctttcctcctgtcttagaagaacagacctaactagtgaatgtattaatgaaaatgcatctatttcagagctgacatgaagagtttagtttttttactttataaactgtgaatatgagtatgccagctgcatacgatgtaactaatcatatttaaatatatttcactttctctttgactttagaccttttgaagtctgtataaacttgttttgaaatatagtctctgcttacgaatgtcataacaaaataattttttgcatgataaaaaattactttgattacaaaaggcatattctttcatggtttctgcaatgagaggaagtgtaatgattattttaatatttctattaaatatgttt

SEQ ID NO: 54270 - DNA, 745 bp, Homo Sapiens
  misc_feature (650)..(650): n is a, c, g, or t
cttggttctgacagaaattggccccaaacgtgaccctgcgaccctgaagctgttcctgagtaacatggagcggctgctgcatgccaaggcgcatggggtccgagtgattggaagctccacattggcactctgccacctggcctcaggggccgcggatgcctattaccagtttggcctgcactgctgggatctggcggctgccacagtcatcatcagagaagcaggcggcatcgtgatagacacttcgggtggacccctcgacctcatggcttgcagagtggttgcggccagcacccgggagatggcgatgctcatagctcaggccttacagacgattaactatgggcgggatgatgagaagtgactgcggctgaggcaaagctgctcccaaggcctccctgggctgctgtgggctcctggggaggtggccctcgtggcccacgctccatgccagtggctcacgctctgctcctggctaccccagagggagttgtcacgctacagtgagtggctggccttttaaatcgacgtctctctcaccaggatttggtgtttagctgtttctctctttaatctcacgtagcctttttcaggttagtacgtgttcttctgtcagggccaaaactcaaatctcctgtgaaatacgtatngataatccaatcttgatttttccccccagaatatacatctcaggtaataaggtttagaactgctgataaagcggatcgttctcaggcctcccccg

SEQ ID NO: 54271 - DNA, 684 bp, Homo Sapiens
  misc_feature (676)..(676): n is a, c, g, or t
gtgacaaaatttatttttattttttgtggttatattcccaacaacattaaaaaatactcgaggcataaatgtagttgtctcctactctgcttctcttactatactcatacatttttaatatggtttatcaatgattcatgtttccctcaaatagtgatggtttacacctgtcatggaaacaatcctagagagctcagagcaattaaaccactattccatgcttttaagtagttttctccacctttttcttatgagtctcactagattgactgaggaatgtatgtctaaattcctggagaagatgatatggattggaaactgaaattcagagaaatggagtgttcaatagataccacgaattgtgaacaaagggaaaattctatacaactcaatctaagtcagtccactttgacttcgtactgtctttcacctttccattgttgcatcttgaattttttaaaatgtctagaattcaggatgctaggggctacttctttaaaaaaaaaaaaaaaaaaagaattcgtctgaaaatgctcaggtttgtaagaatctaatctcacttacataactaagcactccataataagttttattaagtacaaagggagccagaaaaaatgacatttatttcttctagatcagaaaaatttaaattaagccctgccttgctggttanaaatatgt

SEQ ID NO: 54272 - DNA, 646 bp, Homo Sapiens
gctacaccaagtccattggatatttggtctgtaggctgcattctggcagaaatgctttctaacaggcccatctttccagggaagcattatcttgaccagctgaaccacattttgggtattcttggatccccatcacaagaagacctgaattgtataataaatttaaaagctaggaactatttgctttctcttccacacaaaaataaggtgccatggaacaggctgttcccaaatgctgactccaaagctctggacttattggacaaaatgttgacattcaacccacacaagaggattgaagtagaacaggctctggcccacccatatctggagcagtattacgacccgagtgacgagcccatcgccgaagcaccattcaagttcgacatggaattggatgacttgcctaaggaaaagctcaaagaactaatttttgaagagactgctagattccagccaggatacagatcttaaatttgtcaggacaagggctcagaggactggacgtgctcagacatcggtgttcttcttcccagttcttgacccctggtcctgtctccagcccgtcttggcttatccactttgactcctttgaacccgtttggaagggcggtttctgggtaattgtggcttttatgctttcaaa

SEQ ID NO: 54273 - DNA, 728 bp, Homo Sapiens
caatgagtttctgctgacttgctagtcttagcaggaggttgtattttgaagacaggaaaatgcccccttctgctttccttttttttttttggagacagagtcttgctctgttgcccaggctggagtgcagtagcacgatctcggctctcaccgcaacctccgtctcctgggttcaagcgattctcctgcctcagcctcctaagtatctgggattacaggcatgtgccaccacacctgggtgatttttgtatttttagtagagacggggtttcaccatgttggtcaggctggtctcaaactcctgacctagtgatccaccctcctcggcctcccaaagtgctgggattacaggcatgagccaccacagctggcccccttctgttttatgtttggtttttgagaaggaatgaagtgggaaccaaattaggtaattttgggtaatctgtctctaaaatattagctaaaaacaaagctctatgtaaagtaataaagtataattgccatataaatttcaaaattcaactggcttttatgcaaagaaacaggttaggacatctaggttccaattcattcacattcttggttccagataaaatcaactgtttatatcaatttctaatggatttgcttttctttttatatggattcctttaaaacttattccagatgtagttccttccaattaaatatttgaataaatcttttgttactcaaaaaaaaaaaaaaaa

SEQ ID NO: 54274 - DNA, 781 bp, Homo Sapiens
tgggagcagccgccagcagggaaatctggcctgagcacaaggatgctttagggagagatcacttcagtgtgtgtgtatatttatttgcagtacagtgcgcgcgtgtgtgtgtgtgtacgcgcacgtgtgggtgagtgcgtcttctgagtgggttctgttcagttgctaatgaggctcctccgctctggacacaacccttttatagattaatttctctgccaattaacttgtcattttcagtacatattttactattccacaccaaccataattacaacaagggatttttcttatgcactcctatgcatgtgaataacatgtggtgtaattctgcttcttacagaagtattactgaaggtattatttccaatattatttggtttattatgcggatcttttttatatatgcagtcccatcccttctgtgccactcaatgccatccagacatggtttttccctccaggggcctttctccagagggcacttcggctgcctctgcttcctctcattcgaggcccggctcttgctgacagaataggttccgttctgggcggtggttctcgagcctgccattcaaaaccaaagcaaattggagcatttctcacaacatggtattgaagttcctttttgttctcaaaagttgtgaccgtgtttaattgtactcccttagtcctgtaggtatgttaagtgaatcgcaagtacgctgtacttttataatatttacataataaagatggaccatagagtgaaaaaaaaaaaaaaataaaaaaaaatatggcg

SEQ ID NO: 54275 - DNA, 713 bp, Homo Sapiens
cccacgcgtccggaagatgccaaatggagggtccgcctggccatcattgagtatatgccgctgctggcaggccagctgggtgtggaattctttgatgaaaagctgaattctttatgtatggcttggctcgtggaccatgtatacgccatccgagaagctgccaccaacaacctcatgaaactagttcagaagtttggtacagagtgggcccaaaatactattgttcccaaagtgttagtaatggcaaatgatcctaattacttgcatagaatgaccactttattctgcattaatgcactgtctgaggcctgtggtcaggaaataactactaagcaaatgctgcccatcgtattaaaaatggcaggagaccaagtagcaaatgttcgcttcaatgtggccaaatctctacaaaagattggaccaattctagataccaatgctttacagggagaagtgaagccagtactacagaagttaggtcaagatgaagacatggatgtcaaatactttgcacaggaagctataagtgttcttgcattggcataatgaggagcaggagggaaaaggcctttactagattcttgtcacaaatttctagtcaatgtgttcttaactgggtggagaaagaatggaaaaccttcaagatctcatccaagcaaatggcaacaacttagaagaaatcatttagtgacttaattctttctaaagatgaa

SEQ ID NO: 54276 - DNA, 906 bp, Homo Sapiens
gagaaccttggtgcagctgcagccaggaggggagcgggcccaggagccaggctcaggtccagctggttcctctctggcgccttctgaacccgtctcagcaggtccacagcacctgggcagaggtcagagaccaggggaggccgggccttgccctcccttctgcccagggcccagtgttcttgatagaagacccttctggggagccagggagctcaggggacagataagggaaggacgccccctgactccaggcccctgagcctggcgggaagtggctgcggcccaggcagccagtcctggtggtgttctccctgcatgccctccgtggctgggctgccaccccacccggcccgaatctgtcttgacctgcaggaatacacgggcggcgccaggcattacctcacagcgggactacacagttgctggctttgctcctgggcaaggaggagcaggccagagcctcttttgcttccttttcttgcccatgccgcttctagaagccaggcacaggttgccaagaggtgacacgaaacaggaggaaactcagtgacctctgcctctcccacattcctccccgcgggggaggacctcgccgctctgaagagcaccgtgcacatgtgggtgcacaaacgtgggtgttggtgtggacggggcgcagatctccgtggatgaactgcgtctggactcttagattcataaaatattcgaggggtttgggagtcacaagaccctcccctctcttcagtgcactttggcattttgcacgggggtcttcccccgggacagccacagcaattaaattgggggtggatttgcgctgggaaaaaaaaaaaccaacaacaaaaaacaaacgcttcagtgaccctacggagcaatctagatgtatgccgcgcttcaaaagggggc

SEQ ID NO: 54277 - DNA, 787 bp, Homo Sapiens
tcctacatggctacattttatgaattcttcaatgagcagaaatatgctgatgcggtgaagaacttcttggatctgatttcgtcctcggggagaagagaccccaagagtgttgagcagcccatcgtgcttaaagaagggttcatgatcaagagggcccaaggacggaagcgctttgggatgaagaattttaagaagagatggtttcgcttgaccaaccatgaatttacctaccacaaaagcaaaggggaccagcctctctacagcattcccatcgagaacatcctggcagtggagaagctggaggaggagtctttcaaaatgaaaaacatgttccaggtcatccagccagagcgtgcgctgtacatccaggccaacaactgcgtggaggccaaggactggatcgacattctcaccaaagtgagccagtgcaaccagaagcgcctcaccgtctaccacccgtccgcctacctgagcggccactggctgtgctgtagggcgccatccgactcggctccgggctgctcgccctgcactggcggcctcccagccaacatccagctggacattgatggggaccgtgagacggagcgtatctactccctcttcaacttgtacatgagcaagctggagaagatgcaggaggcctgtgggagcaaatctgtgtatgacggcccggagcaggaggagtattcgacgttcgtcattgacgacccccaggagacctacaagacgctaaagcaagtcatcgctggggttggggctttggagcaggagcacgcccagtata

SEQ ID NO: 54278 - DNA, 550 bp, Homo Sapiens
tggcaaagtgagccagtgcaaccagaagcgcctcaccgtctaccacccgtccgcctacctgagcggccactggctgtgctgtagggcgccatccgactcggctccgggctgctcgccctgcactggcggcctcccagccaacatccagctggacattgatggggaccgtgagacggagcgtatctactccctcttcaacttgtacatgagcaagctggagaagatgcaggaggcctgtgggagcaaatctgtgtatgacggcccggagcaggaggagtattcgacgttcgtcattgacgacccccaggagacctacaagacgctaaagcaagtcatcgctggggttggggctttggagcaggagcacgcccagtataagagggacaagttcaagaagacgaaatatggaagccaggagcaccccatcggagacaagagcttccagaactacatccggcagcagtccgagacctccactcattccatttaaagtctgcgggacgcgcccagtggcgccagcaagctgcccatgcaaagccgcagcctttgg

SEQ ID NO: 54279 - DNA, 780 bp, Homo Sapiens
  misc_feature (743)..(747): n is a, c, g, or t
  misc_feature (750)..(751): n is a, c, g, or t
ggggtcgtccgcggctccggtcacgtcaccgtatttggactgagcaacaaatttgaatctgaattcccttcttcattaactggaaaagtagctcctgaagaatttaaagccagcatcaacagagttaacagttgtcttaagaagaaccttcctgttaatgtacgttggctactttgtggctgcctttgttgctgctgcacattaggttgcagtatgtggccagttatttgcctcagtaaaagaacacgaagatcgattgagaagttattagaatgggaaaacaataggttataccacaagctgtgcttgcattggagactgagcaaaaggaaatgtgaaacgaataacatgatggaatatgtcatcctcatagaatttttaccaaagacaccgatttttcgaccagattagcatttactttatttatagagactttccaagtatgttgtctttccaatggtgccttgcttggtgctctcctggtggtgacataacattggttctacagaatcgtggggggttttttttgtttttgtttttttttttttttttaataaccgcatgttctaagtgtgcatttttgtcaatctttgcaacagttatttcatacagatggtttaatacttaaagttattgcggctctttttcctgttatggaattcctggatttttcaaagggattaactttttttgtggattatccccaaaaaaaattaacatttttggaacctttaaggccgggnnnnnggnncgcgcccgcaagtgagccgaagcctcccg

SEQ ID NO: 54280 - DNA, 588 bp, Homo Sapiens
aaggaatggaaaaaaaattcttttctctacagcaaattaatgtgaggaagctcctccaatcctctggctatttaaggttcaaaatcaagtgcctagggaaaattccaatggatgattttctgggagctatcttgtctaccttgaggttcctgaacaatgaattcccattaatgagcagtcttcagtattaaaaccactgtcttgtcacctcattttgcattactgtcttccgtggatgtttcagttacaactgtaatgttatttatagaacaacattaatccattaaagctaacctatttttcaatatttatgataatctatgtacatatattgtctgtccatatgtatttgtaaataggttgtatataatgtcaggtttgggtcttgggttcaagtgtatatattcctgtaagtttcttaactgcattttgatgaattcacattatgtaactataagaattgtcccaaaagtacctgtacagaaaattgaatattgaaaaattgacaaattgtgtacaaacactaaaaaaaacttgtttaaattgtatttgcaataaacaacatcaaattttttcatgaaatcttgg

SEQ ID NO: 54281 - DNA, 700 bp, Homo Sapiens
  misc_feature (598)..(598): n is a, c, g, or t
ggggagggtaccttgagtctattatatatgcttcatcaaaacatcttgttcatgttttatgtttttaaaaaaggcatttgaatgaatgtttgactcaggtttgttaaattaaccttcagtaactgcagtaccaaaaattacactcaactgatgaaaaaaacgaattgtatgatttaggaatcaaaaactaaaataagtggaattatgtatcttttctaaagttaaaaaagtaaaatattttattatgagttattataaaaattggttaattgtataggaagatgacagtatttttttcaagttatcataaaaagtaattcagatgacatttgagaagtaggggaaagggaatcatgttgacagttttagttctgtgaacactaatttgtgtgaagctattaaaatgattgtaaagttgactactgtaaatttcccataattatgtgtgtatatgtgtcatatgtatgtacatgtatatgtctaaaaattactttacacatgtgcctacatagacacaccaagaagtggatgtatataatatagaaagtatatagcaaagtaattttactctgataataaaaattgtttgacatgtatnttgttatgaatagtttatcttccaaaagatatttgctctattttaaagtgtagaagaatacactgttaataaatataaaagtttattcaaaaaaaaaaaaaa

SEQ ID NO: 54282 - DNA, 709 bp, Homo Sapiens
gggagactaatgaggcttaactcaaaacctgggcgtggttttggttgccattccataggtttggagagctctagatctcttttgtgctgggttcagtggctcttcaggggacaggaaatgcctgtgtctggccagtgtggttctggagctttggggtaacagcaggatccatcagttagtagggtgcatgtcagatgatcatatccaattcatatggaagtcccgggtctgtcttccttatcatcggggtggcagctggttctcaatgtgccagcagggactcagtacctgagcctcaatcaagccttatccaccaaatacacagggaagggtgatgcagggaagggtgacatcaggagtcagggcatggactggtaagatgaatactttgctgggctgaagcaggctgcagggcattccagccaagggcacagcaggggacagtgcagggaggtgtggggtaagggagggaagtcacatcagaaaagggaaagccacggaatgtgtgtgaagcccagaaatggcatttgcagttaattagcacatgtgagggttagacaggtaggtgaatgcaagctcaaggtttggaacaaatgacttttcagttatgtctttggtatcagacatacgaaaggtctctttgtagttcgtgttaatgtaacattaataaatttattgattccattgctttaaaacaaacacacaaaag

SEQ ID NO: 54283 - DNA, 844 bp, Homo Sapiens
caggacgcctatcgggcagaattcgggtcccttgggcccctcctctgctcccaggtggtcaaggctcgggcccaggctgctctgcaggctcagcaggtcaacaggaccactctgaccatcacgcagccccggcccacgctgaccctctcgcaggccccacagcctggccctcgcacccctggcttgctgaaggttcctggctccatcgcacttcctgtccagacactggtgtctgcacgagcggctgccccaccacagccttcccctcctccaaccaagtttattgtaatgtcatcgtcctccagcgccccatccacccagcaggtcctgtccctcagcacctcggcccccggctcaggttccaccaccacttcgcccgtcaccaccaccgtccccagcgtgcagcccatcgtcaagttggtctccaccgccaccaccgcaccccccagcactgctccctctggtcctgggagtgtccagaagtacatcgtggtctcacttcccccaacaggggagggcaaaggaggccccacctcccatccttctccagttcctcccccggcatcgtccccgtccccactcagcggcagtgccctttgtggggggaagcaggaggctggggacagtccccctccagctccagggactccaaaagccaatggctcccagcccaactccggctcccctcagcctgctccgtgatgctccacctgccagcccccggattcccacacatgcagacacgtacacacgtgcacgtacacacatgcatgcacgctaagcggaaggaagttgtagattgcttccttcaggtcactttctttttagatattggtacagcccg

SEQ ID NO: 54284 - DNA, 731 bp, Homo Sapiens
  misc_feature (657)..(727): n is a, c, g, or t
cttctgcctctggcaccatcttctggtggctgttccactttacagtgatactatcaactccctcatcggcattgccattgccctctcaggcctgcccttttacttcctcatcatcagagtgccagaacataagcgaccgctttacctccgaaggatcgtggggtctgccacaaggtacctccaggtcctgtgtatgtcagttgctgcagaaatggatttggaagatggaggagagatgcccaagcaacgggatcccaagtctaactaaacaccatctggaatcctgatgtggaaagcaggggtttctggtctactggctagagctaaggaagttgaaaaggaaagctcacttctttggaggcacctgtccagaagcctggcctaggcagcttcaacctttgaacttactttttgaaatgaaaagtaatttatttgttttgctacatactgttccagacttttaaaggggacaatgaaggtgactgtggggaggagcatgtcaggtttgggcttggttgttttagaagcacctgggtgtgcctacctactcctcttttcttttaaaagggcccacaatgctccaatttcctgtctcctttagagagacatgaaactatcacaggtgctggatgacaataaaagtttatgttccttttnnnnnnnnnnnnnnnnnnnnnnnnnnnnnnnnnnnnnnnnnnnnnnnnnnnnnnnnnnnnnnnnnnnnnnnaaaa

SEQ ID NO: 54285 - DNA, 932 bp, Homo Sapiens
acaaatcatgatgcttaaaaactttctaaagatgtattgtgtggcagtgattggtctgtttgtggagaatgtatgaaagctattaatattctagaatagattaataaattggctatgttgttccaatgaatgtacagcacttccattaacttttgaaagcaacacagccttaaactcaatgcttttgctttatgacatgggaatgttctgtcatcaatggagtgtattcttgtaatagaattctttatatcgttctcaattctatagactttcaagcctatgtatgaatatgaaggggtttttttttttttgctttgttttctttttagattttgtacattccatctttataggtctgtttcatatgttttatgtatagaacactaagtcttgcactctctgacattgatactgatatattctcgtcatttgttcttttatgaatcaaaatgttgactgcctatttaaagaaaagaatgaacgctgtgcatcaaagtgtttgtatgttcgtagctacatacgtaccacagtattttggatgctttagtctacaatgaaactttcaattaattctgtcttgaaacataggagaaacaggattcatgtgtatctctttaccatgcacaaaatctcaaatcattataataaagcttgttttctcccaatcattataaatagaccaaatataacccaaggccatctatgccgggcccggaacaaaaaggaactgacctggtccttggccctcccccgcatttacgccctcccttctttcgggtcaactcttcccccctcggaccccttctctccaccaccaacccgccaattacccccgatcgccccatcacctacccacccacttccacctcccgtctatcgcccctacgtacttccgctgctccccttcctcttcaactcttatcttattcctc

SEQ ID NO: 54286 - DNA, 453 bp, Homo Sapiens
ttgagaccagcctgggcaacagggtaaggtcctgtctctacaagatcaaaaacttagccgggtatggtggtgcatgtgtgcctgtagtccaagctacttgaaggctgagacaggaggatcggttgagcccaggaggttgtggctgcagtgagctgtgatgtgcccttatgctatagcctgggcaagagcgtgagaccctgtctcaaagaagaaaaaaagagaaaaataactcttttgaacaaacagacaaattagctagtagtatggagatgtataccctctattacacacataaaaccgtaacaaaattcattgtggtgtattataattagttttgtgaatagaaaaataaagcacttatgtttaaatttgttacagtgacttttaaaggattaatgttgaatcacattgtcagaattttttcctcctcgctgttcaattttgtagttttta

SEQ ID NO: 54287 - DNA, 661 bp, Homo Sapiens
gctgccaggtgtgaacaagcatgtctctacgaatgaacgaaacattggggatctctgccgaaaccaccaaagggcatgtctgatgggcacagggtctcccaaacccagtggcttctgtctgtcctcagcccttgtccctgtttatctgcagccaggagacttgcaagggattggtgattgacagagaggactcgtgcgctgttttgtgttagcagaggatttgtgtttcacaggtaggcttagcgtcctctcagagtgtagtgccaggtcctggtgccacgctagctgagcactcaggagagttcatcagctcagatcccacagggcctcctctttagcaggaattcacaacagtttggatgccctaaacttctgtagctcaggaacatcactggtgtatttgtttttttgtttgtttgcttgggttcttgcaagagcgcgtggggacagttcttccagcaggcactggttttgttgccccagggctgctttgctgtgatgatgattgcatttcaacacatgccagatgcagattttttcccccttactgtttcaatgacctttattttaaaaacacatagcttgaaaatttatttttatactgatattagtttggatgtgccacttttggcaccaaacgtgtatgtcatttttatttcca

SEQ ID NO: 54288 - DNA, 500 bp, Homo Sapiens
ataaatctcttggtagattttcagaataatagagatttatatcaagaaaaggaatctagattttgttgcattgtaggagcaaacaaggcttcatattctttttaaaatgacttgaaattttattataaatttccatagtttctatcaaggtcaactggcagttttattacctttgctatggacttgaacttactgtataaaattagttggaagccatgtaagaaaataacatctgaaaattcttgaacttaaaatcatgcttaaatggttgattctccaatttctttttttaaaaataagttaattgcttttgcaggttgacactctcacctgacagatgatgtaattcttcaatttttataatcttaaaatttttaaattttatatttgtaaatacagtacacattttatttcttggattttgagagacattgttaattttgggggaattggcattgcgaaagacttgaaaactaatgagtaaagtctgctgaatgaat

SEQ ID NO: 54289 - DNA, 695 bp, Homo Sapiens
gacccacgcgtccgcaacaagaaggttcgggaagaataccggaagtgggcctgcctagttgctggggggagcaagtactcagaattcacctccaccacgtctggcactggccacaatcagacccgggccctcagggcatcagagtccggcatatgaaggcgcatggttctggacggcccagcagctcctgtggccacagcagctttgtacacgaagaccatccatcctcccttcgtccaccactctactccctccaccctccctccctgatcccgtgtgccaccaggagggagtggcagctatagtctggcaccaaagtccaggacacccagtggggtggagtcggagccactggtcctgctgctggctgcctctctgctccaccttgtgacccagggtggggacaggggctggcccagggctgcaatgcagcatgttgccctggcacctgtggccagtactcgggacagactaagggcgcttgtcccatcctggacttttcctctcatgtctttgctgcagaactgaagagactaggcgctggggctcagcttccctcttaagctaagactgatgtcagaggccccatggcgaggccccttggggccactgcctgaggctcacggtacagaggcctgcctgcctggccgggcaggaggttctcactgttgtgaaggttgtgacgttgtgtatgg

SEQ ID NO: 54290 - DNA, 625 bp, Homo Sapiens
cattgactgactctgtgccacgtcatccatagtttattgttagtatgaacacaactgtaacatttacctggtatctacatccttacctgcattggaaaatgtttgctacctcacaacaaccatttgcctcctttaagaacactgatgggctgcactttttggatagaaatagaatttgatttcagaatgtatgcttggtgagtctcagtgcccaggaacacttttggaataatttatcagacattgaacttctgtgattaatcgcttttatagatttactcagtctttaaaattcgtctctgatttgccagagaaaaacggtggtagccatggaaatcgggagtgaaggagcactgcttcattgtggctcagcccttcctaggggcctctgccctttgatgtccttgagctactcttcagctctggaagttgtggacaaaccgtaggaatgtatgtgtgcgtgtggtggagtgattgtctgtgaatgacaggccctggctattgattgatgttgcatcaatttagcaaattcatttcctcattcttgatggcctgaatatatgtctgcacttttaatgctcctcttaaccagttgtaacatcttaccatttccctaacaaattga

SEQ ID NO: 54291 - DNA, 596 bp, Homo Sapiens
cctgtacctccctaccaatgacttggtgtccttattttctaccccaagagcagggatattagctgtgtccaaatgggttctgaattctacagactcatcaacatgaggcaaggaatcattgaaaaccacctgtgtctcctttgggagaatgacatatctttagtatttacgtagcttattcttctatatctacatatgcaaagctttccttaacagtaaagggtacatatgcatagtgggaggagatcagacctttacaagtgaaggaaagcaacttcagaaatgaattattttctttgctttattatttttaccaagacagagaagtattgtattgagagataatctattttcataatcaatatgtgcctaaattatatttaaatcatttcactctgtactatattttcaggaattacagaatgtggtattcattcacttaaaggtacctctgtagaaataacctaaaactgcagaaggatctgaaagatctaaacatggtgtgcttagaaactgcagattttagatctaatgtatactgcattaataaatgatataaagtgtttgttgaaaaaaaaaaaaaaaaaaaagggcgg

SEQ ID NO: 54292 - DNA, 664 bp, Homo Sapiens
ctccttttgtacctacagtatccagaacccacgtgggcagccttctgcttatgacaataattggcccattgcatgcagagagaatgtcttcatagagagaatgtcattaaatacttgaatctgcatgacagtttgacttgaatgcaacagcaggaaaattttgcaagttacataattgtatatacagtaggttttcttaagtctcttcggttcatcctttgtaatttgtgtgtgtatctgtagtattgcaggcttttggagactattcttacaggcagtatgtcagtcatcaaagaaaatgctgtcacctgccattgttgtatttgtgggtatttatagttgtatgtatgtaaatgcatcagtgtgtagattgcatatcagtgtatggtacatgtacatcaaaattatttttgtccttaatcagtgtgatatgaaaagcaagtacaacctcataggactgattatataatgaagttgttgagagtatatatagtggtattgttttattaaacttaaactcaaataatattttgattaaaatttttaataagactttatgctagaaaattctttgagctttgaatcaccagggcaaaaatgactttcaactaaccttgtgaatcttttgcagtgtactgtgtgcaataccaagggcatagcctcc

SEQ ID NO: 54293 - DNA, 850 bp, Homo Sapiens
ggaatttcaaggaagtgtttgctattcaggaaacaaatgggaacaattgactggattagtggatgctgaaagcattcagcaaatggcaccctaaaatatgccgctggtttgccactgacttcaaaatgaggtcacttgggcacagcacatgcagggaggggcttttctctgagcctccttcatctgcccaaagacaaatcctcaaaaggaaattcaatcatcatgaatcacaaccccaagtatctcatcagccagggaagagtaagtgggatcacagggaaggatgttggcagcgacaccatcccatacaggctcttacctcttctcctgagggctgctccagacaacatttattacccagaagaccttttgtctgaaaaccagccaagctttattcaggacacacttcttgccttcactttcccacttccgtggccacctccatgcagaagccctaagcccacattctttcgatagctcacggtggtgcatgagtgtccatcatctgactcttctcggagtctcatatttcgtgggactcctgtgcaaacatatgttattaaaatttctttcctcctgttaaaaaaaaaaaaaaaaaacaactccgaaaggaacccaagcgccgggtgcgcggacaacgaggtacaggacagggcccagagccaaagctggtaccctgacccaagattcccggcccacaacggggataaaccggcacggaccccataaaagaggaaccagataacatcaccagaaaagccagggtaaaccgtgactacagaaacgccgaagaacaaacagcacgcacaagcgcggcaacacccagcacaccagcacacaagcacgcaca

SEQ ID NO: 54294 - DNA, 663 bp, Homo Sapiens
ccaggccagggacacccctccccagctcccagagaggccccctgaggggtgagccctctttccaccttcccctatccatgcaccccctcgcaataaaaccaactctaaaatcacagctgtcgtcctagccagtgggggcgaccggacttggggggtggagccctctgggacttccgtaggaacaagggctgcggcccaccgcgacacttacacagacctcggggattgcactaaaccctcgttcctagctccgcactcagcttcgcctgtcctgcccgcccactttgccttaactacccgcccgtcctgggggccacagcctctgcatgggcccagagccgggacccccccagcccagccccgccctccccagactccgcgcaatcacatactgtatatagacgtgaatcgattttatttttattctttaaattaaggtcgtgataaagtgttgccaaagatacctgctgaattctcgcgtttcaggaaacaaacaaacaaaaaaaaatgatatttgaggagggtcgtgttgactccatatgaaaggacacagctcaaagcttttttgtttggttgtttggggttttttgtgttttctttttttggggtgttttttttttaactgcctggtacaaaaaaaaaaagagaaaaaaaaaaaaaaag

SEQ ID NO: 54295 - DNA, 586 bp, Homo Sapiens
ggccaccaccggaatgggcatgtggcggagtaccaagaccagcggccccccttggaccagcccttggaactggcccctctgaccactattactttcccttaaagcaaaacaagataataatcttttgctgcttaatttgcacatccccaccccttgacaactttaaatgctagttaggcacttagatggccctgttccttggtaaactgctcttagctaagatgcaaattctcagtgctttcaagtggattctgttgaagaaaatctcttgtaaatagcctttttgatgctgctgtgtacagtcttcattatgcattgggcagtatttctggctagagttttaaaaggaacagaaagaaaaccagcttattttccttcttacggactcatctttagcgtttatttcaaccttttgctaattctctgagaaatctgcagcactcagccatacaccaacagtgttggaaagttaacaccctggttagggcagaatgttaaagaccatcttggcagagttccagccacgctctttattctgttctcaaataaagcagtgtcactagtttttcctaaaaaaaaaaaaaaa

SEQ ID NO: 54296 - DNA, 954 bp, Homo Sapiens
  misc_feature (748)..(748): n is a, c, g, or t
  misc_feature (761)..(761): n is a, c, g, or t
actcggacgagggcacgcggccctgctctaccgaggaggatacttctctggtgagcaggcgggagaagtgttggagagcgccgtcctggctttgtgttcccagctgaaagacgatgcagttgccctggtagacgtgatcgctcctcctgactttgttctggactcaccgattggcagagccgacggcgagctctacaaaaacctctggggcgctgtcctgcaggaaagcaaggtgttggagcgggcatcctggtggccagagttttctgtgaacaaacctgtcataggaagtctgaaatcgaagctctagtgggactggcacacattcagccaagtctaatgaaacgaagggaactaatcagacgtggacctcaacttctgattccagaacacaccggagattgctgctgctttctgagcccgcacctgtgcgcctaaactgctgattggcctcaactgcccaggcggacgggagggaggcacccggccggctggactaatctgggatcgcggtgatttgcagcgtggaaaagaaatgcagatgatcatgtctacctgatgcgctgtgggttttttgataattagaatttcgcacattcagttttcagggttcagctcctttctctaaaagtaaacagcccattgtcagggatcttctggtcagacaaaaaaaaaaggaaagggggtgtccctgacgcccgcggcggcctccggcggctccggccttttgtgcggggcggttgggtcngggtggggggccntcccccccccaaaggcccggcccggggccctggcggggaagcccccgcgcagccccacccccgggacagcccaggccctggcccttgcccttgccctgtccctgcccctcgaaccagggggggtgctccccccgcgaccgcctctcttggcttgacaacccaccccccacttcgggcccggagacacccacaa

SEQ ID NO: 54297 - DNA, 460 bp, Homo Sapiens
  misc_feature (448)..(449): n is a, c, g, or t
atccactcctgctctccctcctgcaggtgaccccagccatgaggaccatcgccatccttgctgccattctcctggtggccctgcaggcccaggctgagtcactccaggaaagagctgatgaggctacaacccagaagcagtctggggaagacaaccaggaccttgctatctcctttgcaggaaatggactctctgctcttagaacctcaggttctcaggcaagagccacctgctattgccgaaccggccgttgtgctacccgtgagtccctctccggggtgtgtgaaatcagtggccgcctctacagactctgctgtcgctgagcttcctagatagaaaccaaagcagtgcaagattcagttcaaggtcctgaaaaaagaaaaacattttactctgtgtaccttgtgtctttctaaatttctctctccaaaataaagttcaagcattnnaaaaaaaaaaa

SEQ ID NO: 54298 - DNA, 543 bp, Homo Sapiens
ttacttttctttctaacatatcaatgcttagcagaactattcagattgtcagtagtaaatttaaagacaaatgcccgttttcctccagtccatgaaacataccatacttatatacctgcaactaagtgtttaaaattatgctctgtaactctgtactgctagtattggaactaaaaatcttaaaatacagccagtgcttaatgcttatatcaatgtggatttgtcggcttttatgtaatctgtaatatgtatagcaggaaatacgaagagttacacagtgtatgccttaaaaggctgtttcttaaaggtgttacaaggggataatggtatttcaactagttatcagcaagtgacaatacattccaccacaaatacactcttgttcttctagcttttagactatatgaaaaaaccgggtgcttcaaagtacatgataagggaacactatacctgtcatggatgaactgaagactttgcctgttcattttttaaatattattttcaggtcctttgcttaccaaaggaggcccaatttcactcaaa

SEQ ID NO: 54299 - DNA, 750 bp, Homo Sapiens
tagcagctttgtctctgtccatcagcaatttcagaaccaaaagggaggctctctgtaggcacagagctgcactatcacgagcctttgtttttctccacaaagtatctaacaaaaccaatgtgcagactgattggcctggtcattggtctccgagagaggaggtttgcctgtgatttcctaattatcgctagggccaaggtgggatttgtaaagctttacaataatcattctggatagagtcctgggaggtccttggcagaactcagttaaatctttgaagaatatttgtagttatcttagaagatagcatgggaggtgaggattccaaaaacattttatttttaaaatatcctgtgtaacacttggctcttggtacctgtgggttagcatcaagttctccccagggtagaattcaatcagagctccagtttgcatttggatgtgtaaattacagtaatcccatttcccaaacctaaaatctgtttttctcatcagactctgagtaactggttgctgtgtcataacttcatagatgcaggaggctcaggtgatctgtttgaggagagcaccctaggcagcctgcagggaataacatactggccgttctgacctgttgccagcagatacacaggacatggatgaaattcccgtttcctctagtttcttcctgtagtactcctcttttagatcctaagtctcttacaaaagctttgaatactgggaaaatgttttacattccatttcatttgg

SEQ ID NO: 54300 - DNA, 588 bp, Homo Sapiens
cgtccgctgtttcccagtctcagattgagtgggtgctctcattggcctctctagctaggccgtctccctggtcagcttccttgagcctgggccactcctccctggccttcttacctctgccaagagcctccagatgtgcctgcagcctagtccctgcccaagcttctcccccagccaccctctgcccctgtggtagagcccactataggcccaggcgccttacgtgcttctcccctggacctatgtgcatccctcacctgccagttatgtggctgccaagccccacaggctgtcatggtggctcttgccacacttcccttcctgagctgacctgacctcactgccacctcttgcattgggatcctgagggctggcccctgctcactgatgggccctcccaggcccgtcaagccctggtgaaggagcttagcttgtcttcttggcaattcacaatgcctcactccacaccctaaaactggagcgtcccctatggtctcctgctgtggcttgggtgccgggcgtctcccgcctccaggatctcctctcacctgcccccattaaagctctgccactcatgcaaaaaaaaaa

SEQ ID NO: 54301 - DNA, 581 bp, Homo Sapiens
cggttccggcctggcgagagtttgtgcggcgacatgaaactgcttacccacaatctgctgagctcgcatgtgcggggggtggggtcccgtggcttccccctgcgcctccaggccaccgaggtccgtatctgccctgtggaattcaaccccaacttcgtggcgcgtatgatacctaaagtggagtggtcggcgttcctggaggcggccgataacttgcgtctgatccaggtgccgaaagggccggttgagggatatgaggagaatgaggagtttctgaggaccatgcaccacctgctgctggaggtggaagtgatagagggcaccctgcagtgcccggaatctggacgtatgttccccatcagccgcgggatccccaacatgctgctgagtgaagaggaaactgagagttgattgtgccaggcgccagtttttcttgttatgactgtgtatttttgttgatctataccctgtttccgaattctgccgtgtgtatccccaacccttgacccaatgacaccaaacacagtgtttttgagctcggtattatatatttttttctcattaaaggtttacaacccctc

SEQ ID NO: 54302 - DNA, 936 bp, Homo Sapiens
  misc_feature (662)..(662): n is a, c, g, or t
ccacgcgtccggagaagttaaagaagatggaataatccatttccctggtggcctgtgcgggactggtgcagaaactactcgtctcccttttcacagcactcctttgccccagagcagagaatggaaaagccagggaggtggaagatcgatgcttccagctgtgcctctgctgccagccaagtcttcatttggggccaaaggggaaacttttttttggagaaggcgtcttgctttgtcacccacgctggaatgcagtggcgggatctcagctcaccgcaacctccacctcctgggttcaagtgattttcctgcctcagcctcccaagtagctgggaatacaggcacgccaccatgcccagctaatttttgtattttcagtagaaacgggatttcaccacgttggccaggctggtctcgaactcctgaccgcaagtgatccacccgcctccgcctcccaaagtgctgggattacaggcgtgagccaccgtgcccggcccaaaggggaaactcttgtgggaggagcagaggggctcacatctcccctctgattcccccatgcacattgccttatctctccccatctagccaggaatctattgtgtttttcttctgccaatttactatgattgtgtatgtgccgctaccaccaccccccccatggnggggttggagaggggtccaaggccctgcccgcctcccttttttccacccttggaactgtccttacaataaaatccgtttctggtcggtgccggatcttgcgcccggccgcgacccctcccttcgccggccccgctcccctccgcgacgccgctcgcccgccccccccccgccggggctccgcgcgcgccggcccccccgcgcgcgcggcgaccccccgccgtttacccgccccgtcacatctaccggcgcccaccctcgaatcaggcaatacct

SEQ ID NO: 54303 - DNA, 756 bp, Homo Sapiens
caacaacaagtggttcacagacacgtccatcatcctcttcctcaacaagaaggacctgtttgaggagaagatcacacacagtcccctgaccatctgcttccctgagtacacaggggccaacaaatatgatgaggcagccagctacatccagagtaagtttgaggacctgaataagcgcaaagacaccaaggagatctacacgcacttcacgtgcgccaccgacaccaagaacgtgcagttcgtgtttgacgccgtcaccgatgtcatcatcaagaacaacctgaaggactgcggcctcttctgaggggcagcggggcctggcgggatgggccaccgccgactttgtaccccccaacccctgaggaagatgggggcaagaagatcacgctccccgcctgttcccccgccgcttttctcctctttcctctctttgttctcagctccccctgtcccctcagctccagacgtaggggaggggttgccacaggcctccctgtttgaagcctgcccttgtctgagatgctggtaatggccatggtacccccttctgggcatctgttctggtttttaaccattgtcttgttctgtgatgaggggaggggggcacatgctgagtctcccaaggctgcgtctggaggggcccctgcttctccagcctggacccccagctttgcccaacaccagcccctgccccagcccaagtccaaatgtttacagggagcctcctgcccagtcccccaaccccagccgctcgga

SEQ ID NO: 54304 - DNA, 775 bp, Homo Sapiens
  misc_feature (569)..(569): n is a, c, g, or t
ggggtatctcaggaaatccatcaaagcctcaagaatatgggccttgttgctctaagcagtgataatacagcatctctaatgggacagctccagaacattgccaagaaggagaactgtgtctgcagtgttattgatcagcggatccatttgtttctcaaatgctgtttggttcttggtgtgcagcgggctctattacaccttcctggaggccttactctcattggaagagaactgggaggaactggggcaaaagtttgtcaacttgacacatcacaatcagcaggtgtttggtccctactacactgagatcctaaaaaccctcatttccccagcccaggcactggaaacaaaagtggagtctgtttgatagcgtcggctcagagccctggtaccttggacccaagaggaggcccatcatcttcctggagtaacctcaccagtgaccagcagacagtgagcttctatcccaggccctgcagccagtacaccaaggctgtagggatcaagcatgtgaacaccaactggtccctacccattctttaataaacttccttccgactcgatggcancgcgaagatacgaggcatgttcggcgggctgcgggggtcggaaaaggtttctagagccattccgggtcggggggggggccccggagggtaaggggaccgtgggccggggggtggcgtgcgagggggggcccggggcatgaaccaggggctcggggattcccacccaataaaaaaacgccccgggggggaaacctggacgccctatg

SEQ ID NO: 54305 - DNA, 995 bp, Homo Sapiens
tgcagactcccgagagacataacacagaattgcaccatgccaaactacaaactcacttattttaatatgagggggagagcagaaattattcgttacatatttgcttatttggacatacagtatgaagaccacagaatagaacaagctgactggcctgaaatcaaatcaactctcccatttggaaaaatccccattttggaagttgatggacttactcttcaccagagcctagcaatagcaagatatttgaccaaaaacacagatttggctggaaacacagaaatggaacaatgtcatgttgatgcyattgtggacactctggatgatttcatgtcatgttttccttgggcagagaaaaagcaagatgtgaaagagcagatgttcaatgagctgctcacgtataatgcgcctcatcttatgcaagacttggacacatatttaggggggagagaatggcttattggtaactctgtaacttgggcagacttctactgggagatttgcagtaccacacttttggtctttaagcctgacctgttagacaaccatccaaggctggtgactttacggaagaaagtccaagccattcctgccgtcgctaactggataaaacgaaggccccaaaccaaactctagctgatccatgttgccttcaagtttgtttttctcgggggcatctctctcatcagataagacagctacatcagcctgccagataatccacatgctccctccccagctccactaagattttcactttagccatattctgatttttaaaaaggaaaataaaaacaaatctttcttcagtatctttttctttcagaatagcttctcatcatttacaawtacagaaaaatagtatgttatacaggcagaccttgctttgcacaggttctcacatgcmcgaattgcagtaawaatggtttagcacaccattcttcccyccccmaaawgttttggryttagctaccmaattmctgtattgswwaaaa

SEQ ID NO: 54306 - DNA, 1414 bp, Homo Sapiens
agatatttcgccttatgatgccacacgggtcattttaaaaggtaatgaagactacatcaatgcgaactatataaatatggaaattccttcttccagcattataaatcagtacattgcttgtcaagggccattaccacacacttgtacagatttttggcagatgacttgggaacaaggctcctctatggttgtaatgttgaccacacaagttgaacgtggcagagttaaatgtcaccaatattggccagaacccacaggcagttcatcttatggatgctaccaagttacctgccactctgaagaaggaaacactgcctatatcttcaggaagatgaccctatttaaccaagagaaaaatgaaagtcgtccactcactcagatccagtacatagcctggcctgaccatggagtccctgatgattcgagtgactttctagattttgtttgtcatgtacgaaacaagagggctggcaaggaagaacccgttgttgtccattgcagtgctggaatcggaagaactggggttcttattactatggaaacagccatgtgtctcattgaatgccatcagccagtttatccactagatattgtaagaacaatgagagatcagcgagccatgatgatcccaacacctagtcaatacagatttgttgtgaagccaatttgacaagttttgaagaaggttgttaacccttaaacttcccaaaaaaaagggggggcaaaaatcccaggggggcccagctacgctccccacttctgtcacaaagggccccaccagaacgcataacaaagacgccgcgcccaacaacagccggggaaacaacccgactgtggaacaacctggagcaagaaacaacacaaacggccaacactctcaaaccggcgcgtaccaacaacccaccgccacagaggaacacagcgcactacagcacaggacagcgagggccagagagggagacagcagcagaacgagagagaggaaaggaggggacgcgcaggaaaaactacgaaaaagagaaaagcagcaaacagaccgaggacggaaaggagaaacacacgcaaggggaccgacagcccggacagccgagaacataaaagcaccaaacaaaaacacacaaacacacacagacaaggcgaaacccagcgggggatggaggagcctaggcgggggaaacagagagacagcggcgaccaagcgagaagtgagggagtgcgagcggggaggaacgcgcacggcgccaaacgcgaaaacgatagacgagtgaggagagaggcagaggatgtacgcgagggggcgtgagaggtggctgtggaagcggagctggagacgtcaggcgacagcggccgcaccagcggtgagaggaaggaccgcgaggcgagaggataagcacagagactaggagccacaagg

SEQ ID NO: 54307 - DNA, 742 bp, Homo Sapiens
gtctgagaaatattagaggacagaccaaggacaactctgcatgagatgtagacttaagctttatccctactaggcttgctccactttcatcctccactatagatacaacggactttgactaaaagcagtgaaggggatttgcttccttgttatgtaaagtttctcggtgtgttctgttaatgtaagacgatgaacagttgtgtatagtgttttaccctcttctttttcttggaactcctcaacacgtatggagggatttttcaggtttcagcatgaacatgggcttcttgctgtctgtctctctctcagtacagttcaaggtgtagcaagtgtacccacacagatagcattcaacaaaagctgcctcaactttttcgagaaaaatactttattcataaatatcagttttattctcatgtacctaagttgtggagaaaataattgcatcctataaactgcctgcagacgttagcaggctcttcaaaataactccatggtgcacaggagcacctgcatccaagagcatgcttacattttactgttctgcatattacaaaaaataacttgcaacttcataacttctttgacaaagtaaattacttttttgattgcagtttatatgaaaatgtactgatttttttttaataaactgcatcgagatccaaccgactgaattgttaaaaaaaaaaaaaataaagattcttaaaagaattacagtgtgtgcaagtttgctttgaaaaaa

SEQ ID NO: 54308 - DNA, 716 bp, Homo Sapiens
  misc_feature (696)..(696): n is a, c, g, or t
  misc_feature (703)..(706): n is a, c, g, or t
  misc_feature (708)..(708): n is a, c, g, or t
tgggtggtgcgcttcctacagctgacccctgagcgctgcctcatcgagggaactattgacggcctggagcctgggctgcatggactccacgtccatcagtacggggaccttacaaacaactgcaacagctgtgggaatcactttaaccctgatggagcatctcatgggggcccccaggactctgaccggcaccgcggagacctgggcaatgtccgtgctgatgctgacggccgcgccatcttcagaatggaggatgagcagctgaaggtgtgggatgtgattggccgcagcctgattattgatgagggagaagatgacctgggccggggaggccatcccttatccaagatcacagggaactccggggagaggttggcctgtggcatcattgcacgctccgctggccttttccagaaccccaagcagatctgctcttgcgatggcctcaccatctgggaggagcgaggccggcccatcgctggcaagggccgaaaggagtcagcgcagccccctgcccacctttgagcaggacctcaccttggctctgttgctgtcctccagggcgagcactttccacttccagagggggccagagggactttgcctgcccagtctttggagagctcagtacagggcaggagctgctgtggtgttcccttggcaaatgaaagttttattttcgtttgggaaaaaaanaaaaaannnnanaaaaaaaa

SEQ ID NO: 54309 - DNA, 847 bp, Homo Sapiens
gctggaccggtccggaattctcgggatgaaatttcatgaatgcagaaaatctggggatcgtgtttgggcccactctgatgaggccccctgaggacagcaccctgaccaccctgcatgatatgcggtaccaaaagctgattgtgcagattttaatagaaaacgaagacgttttattctaatccatcagggaaatgagctgaatggccccagcaccatccaagttgacacagctaaaggaataaaaacatttcttaccacttgatttgttttccaagcaagtgctagaatttgctggactgcagaggatcgctgagtggggtactgtgtctcatagacatgcgccacctccacgtgagaacaagggtgaaggtgagggaagcccctcaccttgggtcttttgctgtgcctcctatgtatgtctggtttgctggaagagtgattaatacatctttaatttattaaaaaacaatgtagacctttaaacttcagtcttattggtaataaaagggaacttaattcatacaggtacttgatacagttatacattttccacttacaaaaagaagacaattctgttaaatgaaacctgtatcgtaaaatgtatctttattttacccacgagaatgttgttatttttagcaaatagaactcaatgcagtgcattggttattaccctgtgtactttgtccctcattttgctgtgacaccctgaaaaagctgaccacaaatgcagtattatcttgacatacctctgtcctcctcagtgctttttaatgaaatttcacctgccccttgtgttccctgctttgggatagttttttgctcttaagcattgggcattcttcct

SEQ ID NO: 54310 - DNA, 877 bp, Homo Sapiens
  misc_feature (680)..(680): n is a, c, g, or t
ccgcctcaaacaagatcctccagttattcatgaacttagagtatcacttgaagagatatatagtggttgtaccaaacggatgaagatttctcgaaaaaggctaaacgctgatggaaggagttacagatctgaggacaaaattcttaccattgagattaaaaaagggtggaaagaaggcaccaaaattacttttccaagagaaggagatgaaacaccaaatagtattccagcagacattgtttttatcattaaagacaaagatcatccaaaatttaaaagggatggatcaaatataatttatactgctaaaattagtttacgagaggcattgtgtggctgctcaattaatgtaccaacactggatggaagaaacatacctatgtcagtaaatgatattgtgaaacccggaatgaggagaagaattattggatatgggctgccatttccaaaaaatcctgaccaacgtggtgaccttctaatagaatttgaggtgtccttcccagatactatatcttcttcatccaaagaagtacttaggaaacatcttcctgcctcatagaatgaagaactttgttacacatattttgataaggcactgaaaatataaaaggactggtagtttactgatgtagatgtgaattctgtataaagatgtgtaaattcttttgagggttcattanattgcatgaatagagacgggtcaaataaataggcaaaagggatttttacagttagagataaaagagaaaacccttcactggattttatttcatttctcctgatccagatatttttagtaatttgcttatatgtaaaagttggtttttgtggagtcagtggatatatttccctaatgaaggctagactatccaattac

SEQ ID NO: 54311 - DNA, 759 bp, Homo Sapiens
  misc_feature (709)..(709): n is a, c, g, or t
tgtaatgtggatccaagagggtgttttcgtttatttttccagaaagccaaagcagaggaagaaggttattttgaagcattcaaaaatgaacttgaagctttcaagtcaagagtaagactttattctcaatcacaaagttttcaacctatgacagttcagaatcatgttccccattctggtgttggatctataggtttattagaatccttaccacagaatccagattatcttcagtattctatcagtacagctctctgcagcttaaactcggtggtacataaagaagatgatgaacccaaaatgatggacactgtataatttggttaagactgctgaggccaagtgctattttgttacaagaaaggaagaacttggctattttcttgacacttttatgggtgctgcactttatttttgtttggtttttgatgggagggaaagagtactgaaatgttttgtaaattttttttaatgtgctgctaggttttttgttttgttttgttctgaagagaagagtggtaccatatgttgcaggaagtcaaactggactttttgtggctactaaatttgcctttaatcttattgttctcaattttggaatcaagtatgaaaatctgcacaaatgcaatgtttacaagaactggttgattctgggaggcatctgctacagtctctttttatatggatatgtacatgtcctattctacanaaatgattaaaggataaaacatactttgtatccactgctactttagctgt

SEQ ID NO: 54312 - DNA, 595 bp, Homo Sapiens
aaatccctttgttttaaagtaaagtaaacattatcgctaagtgtacttgtgcagtattaacagctacattatacagtaaatgtgggataaaatccatttagaaaatgttaaactgcttttccagacatggttgtagcatattttcaattagtgtgtgtatgttaatgtgtaattgatagtagaacaaagttacatttttaaaactgctacttgtataaaccttgcctcttttcccaaatactgtgggttttgtgcatagtttttacaaaccttggatttaccagactgtcttttcactgtttgtgggttttgtagaagttacacatttttatggtagataaaatgttacttctatacaagtactcactccctttttatcaaaagttaattttaatctcacagtctacattgtgctacattatccagcttctttggaacaatgtgtgctctgtatggttttttttggtatgacaactaattaagcaactgacattgaactgagaattctacaaactataaaacattaatttttgaaggtaatttagttttgtggctgggcattcagtgaagtcttaggacttctttgcagacaact

SEQ ID NO: 54313 - DNA, 1153 bp, Homo Sapiens
  misc_feature (894)..(895): n is a, c, g, or t
  misc_feature (898)..(898): n is a, c, g, or t
  misc_feature (900)..(901): n is a, c, g, or t
  misc_feature (903)..(917): n is a, c, g, or t
  misc_feature (920)..(920): n is a, c, g, or t
  misc_feature (922)..(922): n is a, c, g, or t
  misc_feature (927)..(928): n is a, c, g, or t
  misc_feature (939)..(939): n is a, c, g, or t
  misc_feature (950)..(950): n is a, c, g, or t
  misc_feature (961)..(962): n is a, c, g, or t
  misc_feature (965)..(966): n is a, c, g, or t
  misc_feature (970)..(973): n is a, c, g, or t
ggaattcccgggatcctgaagggattgacagagccaaaaccatgtccctgattctccacgcagcagacatcagccacccagccaaatcctggaagctgcattatcggtggaccatggccctaatggaggagtttttcctgcagggagataaagaagctgaattagggcttccattttccccactttgtgatcggaagtcaaccatggtggcccagtcacaaataggtttcatcgatttcatagtagagccaacattttctcttctgacagactcaacagagaaaattgttattcctcttatagaggaagcctcaaaagccgaaacttcttcctatgtggcaagcagctcaaccaccattgtggggttacacattgctgatgcactaagacgatcaaatacaaaaggctccatgagtgatgggtcctattccccagactactcccttgcagcagtggacctgaagagtttcaagaacaacctggtggacatcattcagcagaacaaagagaggtggaaagagttagctgcacaagaagcaagaaccagttcacagaagtgtgagtttattcatcagtaaacacctttaagtaaaacctcgtgcatggtggcagctctaatttgaccaaaagacttggagattttgattatgcttgctggaaatctaccctgtcctgtgtgagacaggaaatctatttttgcagattgctcaataagcatcatgagccacataaataacagctgtaaactccttaattcaccgggctcaactgctaccgaacagattcatctagtggctacatcagcaccttgtgcttttcgatatctgtttcaatggcattttgtggcatttgtctttaccgagtgcccataaaattttctttgagcagctaagnnaangnngnnnnnnnnnnnnnnnggngnggggnnggggaaggggnggccggaaganaggagaagagnnagnnaccnnnnggggggccccgcctttaaagaatcccctgggggggcgccacagtttaccggcacccactctttttttgtggaaagaggggcgccccattaggggggggcttaataatagacgtagagcccctgggcccccctttttttaaacacccccggggggggggaaaaaaatgtgtctctcttggg

SEQ ID NO: 54314 - DNA, 839 bp, Homo Sapiens
ggcggcggcgcgggtcggcagcgggagggcgcgcggccgagcggaggcggagtcggcgccgagaacatggctggaggcaaagctggaaaggacagtgggaaggccaaggctaaggcagtatctcgctcacagagagctgggctacagtttcctgtgggccgcatccacagacacttgaagactcgcaccacaagccatggaagggtgggtgccactgctgccgtgtacagtgctgcgattctggagtacctcactgcagaggtgctggagctggcaggtaatgcttctaaggatctcaaagtaaagcgtatcactccgcgtcacttgcagcttgcaatccgtggtgatgaagagttggattctcttatcaaggctaccatagctgggggtggtgtgatccctcacatccacaaatctctgattggaaagaagggacagcagaaaactgcttagagggatgctttaaccaaccctcttcctccccgtcattgtactgtaactgggacagaagaaatactggggatatgtggaatttttaacaacagttaaatggaaaagcatagacaattactgtagacatgataaaagaaacacttgtatgttcttagactcaaagcttgatcaaagtaccttttcatgtggtgacgattgtgagttgattggctatgtttccccacgtgtttatacaaaactgaattgatcaacttctttgcgtcatgtcgaaaatccccttacgaagcaccctttcacactatgcaatttatgcggcgctctttttcccccaaggcggtctaatagccgatttatggaaacagctctcttaaaattgttgaaaatga

SEQ ID NO: 54315 - DNA, 767 bp, Homo Sapiens
aaggtgggattcacctcttccagaccatgacaacagagagcatctagccatgatggaaaggatcttgggtcctatcccttcccggatgatccgaaagacaagaaagcagaaatatttttaccggggtcgcctggattgggatgagaacacatcagctgggcgctatgttcgtgagaactgcaaaccgctgcggcggtatctgacctcagaggcagaggaacaccaccagctcttcgatctgattgaaagcatgctagagtatgaaccagctaagcggctgaccttgggtgaagcccttcagcatcctttcttcgcccgccttcgggctgagccgcccaacaagttgtgggactccagtcgggatatcagtcggtgacgatcaggccctgggcccccctgcatcttttatagcagtgggtgtccagtccaggacactggtgcttttttatacaagagaacgagccagagttcactccttcctcctggctctctatatacctgtgaatatgtgaaatagtgtaaatatgaaagaacttgtacctatcacttcaacccctgccttgtacataatactattccatccacacagtttccaccctcacctgcccctcatacggagttggatgggggccgagtgaggtaaccaggtggcatctaccccatgtttataaggaatcttgtacagtcttgtgcaataaaatacgtgcttcaaaaacaacaaccaaaaacaaaccggggataaataccgggtcggaaaaaaggctaaa

SEQ ID NO: 54316 - DNA, 888 bp, Homo Sapiens
tgggagaagagactggccagcccctcggaggagacctggatcacatgtgacaacaagataagacttcaggaaggacccacttcctgttctggacgtgtggagatctggcatggaggttcctgggggacagtgtgtgatgactcttgggacttggacgatgctcaggtggtgtgtcaacaacttggctgtggtccagctttgaaagcattcaaagaagcagagtttggtcaggggactggaccgatatggctcaatgaagtgaagtgcaaagggaatgagtcttccttgtgggattgtcctgccagacgctggggccatagtgagtgtgggcacaaggaagacgctgcagtgaattgcacagatatttcagtgcagaaaaccccacaaaaagccacaacaggtcgctcatcccgtcagtcatcctttattgcagtcgggatccttggggttgttctgttggccattttcgtcgcattattcttcttgactaaaaagcgaagacagagacagcggcttgcagtttcctcaagaggagagaacttagtccaccaaattcaataccgggagatgaattcttgcctgaatgcagatgatctggacctaatgaattcctcaggaggccattctgagccacactgaaaaggaaaatgggaatttataacccagtgagttcagcctttaagataccttgatgaagacctggactattgaatggagcagaaattcacctctctcactgactattacagttgcatttttatggagttcttcttctcctaggattcctaagactgctgctgaatttataaaaattaagtttgtgaatgtgactacttagtggtgtatatgagactttcaagggaattaaataaataaataagaatgtta

SEQ ID NO: 54317 - DNA, 583 bp, Homo Sapiens
tacggatcctttgcaagacacgttgtctagtaccaaggaatctgaagaaggtcagttgaagtctgctttggaagctggccaggtctcatctgcactgacttgccactcctttggggatggatccggggctgcaggcttggagttgaactgcccatcaatgggagaaaacacgatgaaaacagaaccgacttctccccttgtggaattacaagagatttcgactgtggaagtaacaaatacttttaagaaaacagatgattttgggtcatctaatgcaccagctgtcgacctagaccataagtttagatgcaaagttgtggactgtttaaaatttttccgcaaagccaaactgttgcactatcacatgaagtatttccatggaatggagaaatcactggagccagaagagagcccgggaaagaggcatgtccaaaccaggggcccttcagcttcagacaagcccagccaggagaccctgaccaggaagcgggtctctgccagttccccaactacaaaagacaaggaaaagaataaagagaagaaattcaaggagtttgtgagagtgaagccaaagaagaaaaag

SEQ ID NO: 54318 - DNA, 532 bp, Homo Sapiens
acatacgatgtggaaaacaggcccggattcgcagcagtggaactgctggctgcgcaattactactatgacgtggtgaactaaccgctcccgcacctgtcggtggctgcctttgatcacaggagcaatcacaggaaaatgtatccagaggaattgattgtcagccacctccctctgccagtcgggagagccaggcttggatggaacatgcccacaacttgtcacccaaagcctgtcccaggactcaccctccacaaagcaaaggcagtcccgggagaaaagacggatggcaggatccaaggggctagctggattagtggttttcttgtctgtgtgattttcatacaggttatttttacgatctgtttccaaatccctttcatgtctttccacttctctgggtcccggggtgcatttgttactcatcgggcccagggacattgcagagtggcctagagcactctcaacccaagcgggcttttccaaatgcccaaggatgccttagcatgtgaatcctggaagggaaggcgaagg

SEQ ID NO: 54319 - DNA, 708 bp, Homo Sapiens
ccttcatccctaagactgaactaagtaactagcagcctctggcttgttttctactccctgtccctcaggataaaatgttgatattgctcattttcctcatttccaacattgttttaaacaagtacttcttttacaggcttgaaaaatctcaaataaacgctaagaaaagggagtaggaagaacaaggagttgagcccttgaaagatgacagtggtcttcttgccttcatgcttggccctctctcctcaaaagggcaatgttggtacaaaattccatctcagccactttcgaggagttatcttcattagctatatccatcctttaatccaacacacacctgcaatgattactgtgcaactattttgcttaattttttatttgaaaaaatgtatttaaaagtccaacaactttttaatataaattacgactctcaaacccattcccatcactttattagtgatggtagcatacatattagagaaggtagctaaaggcaagagagcaccaaaggaaaaagactgtccaaagaacaggtattagaatgaggccgaagatcacggtgaccagagatttctaggagtctctaacctttccaccctatcctgttaaccctttagatctctagtatacactcaggctactgaggtattttagagcaacaagctgggttactttcagagcaaacagcttgactggaactgaggagta

SEQ ID NO: 54320 - DNA, 633 bp, Homo Sapiens
  misc_feature (9)..(9): n is a, c, g, or t
  misc_feature (50)..(50): n is a, c, g, or t
  misc_feature (614)..(614): n is a, c, g, or t
  misc_feature (625)..(625): n is a, c, g, or t
agctgagtnaggggagaggggtaaagagaaagaaacttaagttttcttgnacagaactccaccattgtgggctttgagagagccctaaagcattgtacctagtggtacctagtgacttccaaccaaagcctttgagtatgcactaaataggtgagaagaaaggagagaaggtttttaggttagaaacctttaaccgatagaaggatatggtatgttgtaaagctggaaccaagtttgcatttttgagggcttgagatgaagggaagactcttaccagatagtaagacagctgagttttcctcagttttctcgtcttaacactagtggacaattctagcattttgtttggaggatttcagagttaacctcatggaattcaggattttttagcaagtttgcttttggttttatcttggcttttagtaatcatgttggctggtctggtcacaggtgactgtgaaacagatgccctggtcttgctttcatcactctaggatcatgaagtgctatgctatttcctggttatgaatattaaggttggaattacatttttattgattgtttggatcagagctcagttcctgtagaaaacgactgtaaaagaccatccagangcaaataaacntgaagtga

SEQ ID NO: 54321 - DNA, 619 bp, Homo Sapiens
gaactctccaaaataaaaacttctcaagaagactttaataaaaccgaactggaaaaatataagcaactctatctagaagaattaaaagttagaaaatctttgtcaagtaaactaaccaaaactaatgagaggctagcagaggtcaacaccaaacttcttgtggaaaaacagcagagcagatctttgttcaccactctcactaccaggccagtcatggagccaccttgtgtgggaaatcttaataatagtttagatctcaacagaaaacttattccaagagaaaacttagtgatctctacctcaaatccacgggcttcaaataatagcatggagaactacttgagcaagatgcagcaggagttggaaaaaaatataactagagaactcaaagaagctgctgctgaattggaatctggatcaatagcttcccctctagggtctactgatgagtcaaatctaaatcaagatctagtttggaaagcatcaagagaatatgtacaggttttaaagaaaaattatatgatctgaaagataagattttattactgggctgtttatgtgacattttgtttctcattaaatattaatatatgacatgtaaaaatattaaaggaacgta

SEQ ID NO: 54322 - DNA, 570 bp, Homo Sapiens
atggtgaagctggcagccaaatgcatcctggcaggagacccagcagtgggcaagaccgccctggcacagatcttccgcagtgatggagcccatttccagaaaagctacaccctgacaacaggaatggatttggtggtgaagacagtgccagttcctgacacgggagacagtgtggaactcttcatttttgactctgctggcaaggagctgttttcggaaatgctggataaattgtgggagagtcccaatgtcttatgtctcgtctatgatgtgaccaatgaagaatccttcaacaactgcagcaagtggctggagaaggctcggtcacaggctccaggcatctctctcccaggtgttttagttgggaacaagacagacctggccggcagacgagcagtggactcagctgaggcccgggcatgggcgctgggccagggcctggaatgttttgaaacatccgtgaaagagatggaaaacttcgaagcccctttccactgccttgccaagcagttccaccagctgtaccgggagaaggtggaggttttccgggccctggcatgcccaactttc

SEQ ID NO: 54323 - DNA, 823 bp, Homo Sapiens
  misc_feature (573)..(573): n is a, c, g, or t
  misc_feature (578)..(578): n is a, c, g, or t
cccgggatcgcctctctgtcgtggcgcggcttcccgcggtcttctctgcaaatkggctccgtggcctagcgcccccgtccccgccacccgtgatcgtgcgccgaggcccgcgaggggtcgccgcccagatcccaccagccagcaagctaaagcatggcggccatcccctccagcggctcgctcgtggccacccacgactactaccggcgccgcctgggttccacttccagcaacagctcctgcagcagtaccgagtgccccggggaagccattccccaccccccaggtctccccaaggctgacccgggtcattggtgggccagcttctttttcgggaagtccaccctcccgttcatggccacggtgttggagtccgcagagcactcggaacctccccaggcctccagcagcatgaccgcctgtggcctggctcgggacgccccgaggaagcagcccggcggtcagtccagcacagccagcgctgggcccccgtcctgacctgagcggttaccaccagccccaggcctgcggaggcgctagtccaccagagcbcctccccgcccctcttcccantccgnatccctcgcccccctccccacctcccaccccccaccctgtaaactaggcggctgcagcaagcagaccttcgcatcaacmcmscasacaccamaaaccagtgagasccccgctctctaccgcccgggcccagcactcgctagctttcctgacacctggaactgtgcacctggcaccaagcggaaaataaactccaagcagccagtagccccgatggtgtgtgcctgacctgtgtggccggaggttc

SEQ ID NO: 54324 - DNA, 551 bp, Homo Sapiens
ggcgtcgtgtgcgtggattccacaaccgcctgttactgcagcaggtctcattgccagagctgcctggggaatacagcatgaaagtgacaggagaaggatgtgtctacctccagacatccttgaaatacaatattctcccagaaaaggaagagttcccctttgctttaggagtgcagactctgcctcaaacttgtgatgaacccaaagcccacaccagcttccaaatctccctaagtgtcagttacacagggagccgctctgcctccaacatggcgatcgttgatgtgaagatggtctctggcttcattcccctgaagccaacagtgaaaatgcttgaaagatctaaccatgtgagccggacagaagtcagcagcaaccatgtcttgatttaccttgataaggtgtcaaatcagacactgagcttgttcttcacggttctgcaagatgtcccagtaagagatctgaaaccagccatagtgaaagtctatgattactacgagacggatgagtttgcaattgctgagtacaatgctccttgcagcaaagatctt

SEQ ID NO: 54325 - DNA, 583 bp, Homo Sapiens
  misc_feature (195)..(195): n is a, c, g, or t
gagtataaggtgtctcatttgagtctttttcttacctagccccctcttatcagtaaaacaaaggacttgccatggttcacagcaatgtgctacgatccaagatatcagccaaggagcccacttaggggagaactaggtgtccagatttttgtatgtgttgtttttcttgggggatggggtggggtgtggaagtangtagagctgagaatactacatcttagtggtgacctttagccacgtgggtgaagtggcaaaggccatggccatatctgttgtcccaggccagagactaacaactgccttgggaatcccttccttgtgtccttaccaaatgatagctcataaaactctgataatgtaacaaatcactttcaaaggagttcccagaagtcttcagaaagactaaaattctgtctcttcctgctttagacagccattaagatcccaactaattttaccgaacctaaaacccacaaagaggttgtttgtgttattgttcaatcttcagttgtaagagtaattctctatttttatattgaaacataattacttgatagctcagggtctacatttcattcaactt

SEQ ID NO: 54326 - DNA, 575 bp, Homo Sapiens
gcaggtctcccccaacaggctggtggccatggctgcggtgggtgagcctgagaaggctggtggcagcttcctggccctggtgctggccagggcgtctggctccatcgacatccagcacctgaagaggcggtgggcggccccggaggtggacgagtgcaacaggctgcgtctgcttttgcaggaagccctgtggccagagggaaaactgcacaagtagcgggtgtggctgagaggaccgcgtttctgtaatgacccagatttaaaagacataaggtggataattctacatttgtgtgcaagtatatttatgtatatagactatgtatattctgtatataatttattttacatgaatatttctttggtattcccagtaaatacatgactacttttgagtggaaacaaagaacattctagcatttacaaaacttccaggggaatgtagagccacgtccagggtgctcttttctgagagtatttcgagttatttttagaacagtttaaatattgtcacattactgctagattttaaacagcctaccatgaaaatgtatcttaatgaactattttcttat

SEQ ID NO: 54327 - DNA, 551 bp, Homo Sapiens
ggcgccgtgtgctgggattctcatctttgccctgagcaaccccaccagcaaggccgagtgcacggctgagaagtgctaccgggtcaccgagggccgagggatttttgccagtggaagtccttttaagagtgtgactctggaagatggcaagaccttcattcctgggcagggaaacaatgcttacgtgttccccggggtggcactgggagtcatcgccggcgggatccggcacatcccagatgagatcttcctcctgacagcagagcaaattgcccaggaagtctctgagcagcatctgtcccaggggagactctacccaccactcagcaccatccgagacgtgtctttgagaattgccatcaaagttctcgactacgcgtacaaacacaacctggcttcctactacccagagcctaaggacaaggaggcttttgtaagatccctggtctacactccagactatgactcctttacactggacagctacacttggcccaaggaagccatgaatgttcagacggtctgagtcagtctcagaggctagtatgggg

SEQ ID NO: 54328 - DNA, 863 bp, Homo Sapiens
  misc_feature (768)..(768): n is a, c, g, or t
  misc_feature (817)..(817): n is a, c, g, or t
  misc_feature (843)..(843): n is a, c, g, or t
ttcatttgtgttctcttaaaatagagtttgaacaaatattttaaaggtgcaaaataccattagaaaatactatttgaaatggacattatcgcattatcttggcataatggccagaaaatattgtattgcttggcagaaaagaaaataaggtctaaaggaaagtagcacattagcattgatggctgttcatttcacccagtataagcaagtgcagtgtacaaagaagtatattctgaatacattatttccattcatttagcacaaataaatcatttggtttcactttgcagtggaacactgagtcactcttttcttaacacgtgcaacatcttaatttttgtttttcagcagttgctgttttgtactttggtagtgaagtgatttttaccacctgtgtttgcatatttatatatgctgtggatgaaaataacttactagagaatgtatattttatgacaagaatgtgtatctgttggatataatcagagaactgaaaagtaatttatcagtaatttttaagagtccatgttttgtgacaaccatctctaatagccaactctttattaaacacactcctaaaaataaggaaccatgacattgtagatatttaatattgtcagtatagaaacctccatttttgccttcgaatgcatatttaagagttaacagaatgaaaaaaaaaagtcttgttggataatagtgtttgactagcgttttaagaacttgagagtaaaagcacaataagattttttcacctcttcctgcttncacccccaaactgagaacatcactcaattgtttggaagaacctgtaggnctatataaatttattataatggatgngtaatatccttatcataatc

SEQ ID NO: 54329 - DNA, 745 bp, Homo Sapiens
cgtccgggactctttggccccaagccgggggcgaagtggagattctggaggagtgatggacagggtggtgtctcagctccttgccgagctagatgggctgcacagcactcaggatgtgtttgtgattggagccaccaacagaccagatctcctggaccctgcccttctgcggcctggcagatttgacaagctggtgtttgtgggggcaaatgaggaccgggcctcccagctacgcgttctaagtgccatcacacgcaaattcaagctagagccatctgtgagcctggtaaacgtgctagattgctgccctccccagctgacgggcgcggacctctactctctctgctctgatgctatgacagctgccctcaaacgcagggttcatgacctggaggaagggctggaacaaggtagctcagcactgatgctcaccatggaggacttgctgcaggctgccgcccggctgcaaccctcagtcagtgagcaggagctgctccggtacaagcgcatccagcgcaagtttgctgcctgctaggagccccccagggtctgggaccccgctcagcatggctgcaggtaccttgatagcccacagagagatctgggaaggaagggctcctcctcaggctgctgccaacccacctggaggccacctccctccaggagatcccagggtgcaaagtggcattgagacagcagcaacagctcaagagatatctcctgcctacttgcccctccttccagg

SEQ ID NO: 54330 - DNA, 647 bp, Homo Sapiens
  misc_feature (573)..(573): n is a, c, g, or t
  misc_feature (598)..(599): n is a, c, g, or t
  misc_feature (613)..(613): n is a, c, g, or t
tgaagctcttcaagatgcactcccctcagacttctgccatgctcttcacggtggacaatgaggctggcaagatcacgtgcctgtgtcaagtcccccagaatgcagccaatcggggcttaaaagccagcgagtgggtgcagcaggtgtcaggcttgatggacggtaaaggtggtggcaaggatgtgtctgcacaggccacaggcaagaacgttggctgcctgcaggaggcgctgcagctggccacttccttcgcccagctgcgcctcggggatgtaaagaactgagtggggaaggaggaggctcccactggatccatccgtccagccaagagctcttcatctgctacaagaacatttgaatcttgggacctttaaagagcccctcctaacccagcagtaactggaacacacttgggagcagtcctatgtctcagtgccccttaaatttctgccctgagccctccacgtcagtgccatcggtctagaaccactaaccccgcattgctgttgatcgtcacgctcgcatctatagataacggctctccagacctgagctttccgcgtcagcaagtangaatcgtttttgctgcagagaatannaggaccacgtgcantacttaatgccgcatgatctctatccctcttccc

SEQ ID NO: 54331 - DNA, 1016 bp, Homo Sapiens
gatggaaccagcggacagccgagcgagttagtgtcagccgagggccgaaaccggaaggcggtgctgtgccagcgttgcggctcccgggtgctgcagccagggaccgctctcttctctcgccgacagcttttccttccctccatgagaaagaagccagctctgtctgacggcagcaatcctgacggcgatctcctccaggaacactggctggttgaggacatgttcatttttgagaatgtgggcttcaccaaggacgtgggcaacatcaagtttctggtctgcgcagactgtgaaattggaccaattggctggcattgcctagatgacaagaacagtttctatgtggccttggaacgagtttcccatgagtaactgaggggaggggtaatcagctccatctccaaagataaacctactccccacaagaactggcctttaatgtggtataactgttccgctgccttcttgtctgtgctaatataaatactgagtaccagcatgtccatttgaacatgcagagggttaatcctgcttcctaaagcctcaagtacatgcctcctgcttagttcactttgtatcacatttcctaagctcccttttcccccagttttgggacactgtgcttacctccaaaaatctcatctcttccctggcattctccctaggctctgttttgcccaggggctcccgctttttcttgctctagaggagcagtattcaaccttttagctatgatgacacataacaaaagatgtttatgtactaatagttgaaatctgcctttttctcattcaagaaggcatacaaatatctgagagtgactttgttgtatggctacccttgtgatctacagtaatttattctttctaaaagtaaagattttcaaaactcagtatttaaccactaacagaacmwtactttggatgctcyctawacmtgkttgrscccctscctaggtgrgatgmatttwttgtgwarwggggkggccyctccctgaaattktaktttttttwtta

SEQ ID NO: 54332 - DNA, 681 bp, Homo Sapiens
  misc_feature (187)..(187): n is a, c, g, or t
cttgcacaaaccaattaaacccagtagtggtgactgtgggctccattcaaagtgagctcctaagccatgggagacactgatgtatgaggaatttctgttcttccatcaccccctccccccaccaccctcccactgccaaagaacttggaaatagtgatttccacagtgactccactctgagtcccanagccaatcagtagccagcatctgcctccccttcactcccaccgcaggatttgggctcttggaatcctggggaacatagaactcatgacggaagagttgagacctaacgagaaatagaaatggggaactactgctggcagtggaactaagaaagcccttaggaagaatttttatatccactaaaatcaaacaattcagggagtgggctaagcacgggccatatgaataacatggtgtgcttcttaaaatagccataaaggggagggactcatcatttccatttacccttcttttctgactatttttcagaatctctcttcttttcaagttgggtgatatgttggtagattctaatggctttattgcagcgattaataacaggcaaaaggaagcagggttggtttcccttctttttgttcttcatctaagccttctggttttatgggtcagagttccgactgccatcttggacttgtcagcaaaaaaaaaaaaaaa

SEQ ID NO: 54333 - DNA, 894 bp, Homo Sapiens
  misc_feature (864)..(865): n is a, c, g, or t
gcttgataagattctaatagagaaccctaagcaatggctaactttcaaataggatggttgcttatgaattcacaccttgagtataaaacttgcagagaacattcagcgatttccagtccactgtgagatattaatcagttacctaggactaatgacagatcatttccttctgatgagaactaggagggtttgccttctctgagaccagctattacaactgtgcctctagggagttactcagcctaattgagccctattattttaacttaacaaaataaatacagaagtacctatttctaaacaatgatttaaagtctatatcccctaagcggagttgttgtttttctccctaatctatcagctgcactacttgagaaaatttaaagtgtttctagttaaattatttccttcttgagcgatctaatgtttcttgtaatattgatgatcctactaattatcctgctgttctttaattaatgcttaatgaataatatggcactgtaaaatagcttcttcaacaagggaagttaaattttgagacttttttccccaaaggatactgactgtaatacaattaccaattcacaatgataaaaatattttgaaaggttaattttatactgtccacctatctatatattcttctactgaaatgattttgatatctttggctttccggtatctatttttgccatacattttgctgttttgcaaagtttgtataagaacacctaacactactgaattataaaaattcaatcataaaagtcaaaatatattacataatatagttttaatgaaatcattacatttataataacaaaggccaacaatttaaatttattgggaaagataataatgcgnnacaaaaaaagaggaaatgttttgccttta

SEQ ID NO: 54334 - DNA, 788 bp, Homo Sapiens
  misc_feature (682)..(682): n is a, c, g, or t
  misc_feature (692)..(692): n is a, c, g, or t
ggggattctttatcaccagtggccttacttcgtaagcagaatttccagcctacagcccaacaacaacttactaaaccagctaaaatcacttgtgcaaattgcaaaaagcctttacagaagggacagacagcttatcaacgaaaaggatcagctcacctcttttgctctaccacctgcctttcttccttctctcataaacgtactcaaaacacacgaagcataatatgtaaaaaagatgcatctacaaagaaggctaatgtcattcttccagtagaatcaagcaaatccttccaagaattttatagtacatcttgtttgtctccctgtgaaaacaactggaatcttaaaaaaggagtttttaataagtcaagatgtacaatttgtagtaaattagcagagattcgccatgaagtcagcgtaaataatgtaacacataaactgtgcagtaaccattgctttaataagtacagattggccaatggtctaataatgaactgctgtgaacactgtggagagtacatgcctagtaagagtactggaaacaacatcctggtgattggaggtcagcagaagagattttgctgccaaagttgtattaacgaatataaacagatgatggaaacaaaatcaaaaaaattaacagcatcagaaaatagaaaaagggatgcttttagagaagaanatgagaaacnattatatggatcgtcaaatacactttttgaaaaaaatagagggaaaatcccagaaaaaaaggaaaagacttcacagcctacagcttttcagtagga

SEQ ID NO: 54335 - DNA, 561 bp, Homo Sapiens
tgaagatgatgagactggtgactcagcaagaataggatggatggggctggagatgagctggtttggccttggggcacagagctgagctgaggccgctgaagctgtaggaagcgccattcttccctgtatctaactggggctgtgatcaagaaggttctgaccagcttctgcagaggataaaatcattgtctctggaggcaatttggaaattatttctgcttcttaaaaaaacctaagattttttaaaaaattgatttgttttgatcaaaataaaggatgataatagatattattttttcttatgacagaagcaaatgatgtgatttatagaaaaactgggaaatacaggtacccaaagagtaaatcaacatctgtatacccccttcccaggggtaagcactgttaccaatttagcatatgtccttgcagaatttttttttctatatatacatatatattttttaccaaaatgaatcattactctatgttgttttactatttgtttgacatatcagtatatctgaaacaccttttcatgtcaataaatgttcttctctaaca

SEQ ID NO: 54336 - DNA, 601 bp, Homo Sapiens
ccaaacttcacttcactgggagagaacatctggactgggtctgtgcccattttttctgtgtcttccgccatcacaaactggtatgacgaaatccaggactatgacttcaagactcggatatgcaaaaaagtctgtggccactacactcaggttgtttgggcagatagttacaaagttggctgcgcagttcaattttgccctaaagtttctggctttgacgctctttccaatggagcacattttatatgcaactacggaccaggagggaattacccaacttggccatataagagaggagccacctgcagtgcctgccccaataatgacaagtgtttggacaatctctgtgttaaccgacagcgagaccaagtcaaacgttactactctgttgtatatccaggctggcccatatatccacgttacagatacacttctctctttctcattggtaattcagtaattctaatactgcctggtataattaccattttggtacagcacaagtaccctaatttagttcttttggacttatacatttcaggaaagaaaaaacccaaaaaccaaccttattcacataatgggttttttttttaaccacata

SEQ ID NO: 54337 - DNA, 812 bp, Homo Sapiens
tccacacccctactggcttccaaactttatggatgttttcacatggtctatgccttttgagagggaaaaagtcacagagatgctggtaaatgtgctcaacatatgctctgatgacgaactgatttctgatgatgaagcagaaggaagcactacagttcgtaaggagatcatcaggaataagatcagagccattgggaagatggcacgggtcttttcaattcttcggcaagaaagtgagagtgtgctgactctcaagggcctgactcccacaggcacactccctctgggcgtcctctcaggaggcaagcagactatcgagacagccatcagagggttctcgcttcagcacaagatccggagttttgaagaagcgcgaggtctggaccgaattaatgagcgaatgccaccccgaaaggatagcatacacgctggtgggccaatgaaatctgtaacctcagcacactcacatgctgcgcacaggagcgaccaagggaagaaagcccattcatgacttagagtcctgccgtggctcaggtggatctaaaactcaagaacaaattctatttatttattattggaaaatgaaaagcaactcaaaacaacttcaacctggaggtgcatttataattcagtctgcatttattctgtaaaaaggtgactgttttataaattctttttaatttatgttcaatatatataaaaagtgcatctgttttgtatttcccttttttctccataaattttaagaaatgaatctgattgttgtcaacacatttgtgaagtcttgtgctaataaagggggaacttcccta

SEQ ID NO: 54338 - DNA, 690 bp, Homo Sapiens
  misc_feature (632)..(632): n is a, c, g, or t
  misc_feature (688)..(689): n is a, c, g, or t
tacaatctcagcaaggctgagggccatctgaaacagaggagaagattatactcagcaaatacaaagcaaggatgtagaattgacctctatgaaaggggaggttacctccatgaagaaagtactagaagaatacaagaaaaagttcagtgacatctctgagaaacttatggagcgcaatcgtcagtatcaaaagctccaaggcctctatgatagccttaggctacgaaacatcactattgctaaccatgaaggcacccttgaaccatccatgattgcacagtctggtgttcttggcttcccattaggtaacaactccaagtttcctttggataatacacctgttcgaaatcggggcgatggagatggagattttcagttcagaccattttttgcgggttctcccacagcacctgaacccagcaacagcttttttagttttgtctctccaagtcgtgaattagagcagcagcaagtttctagcagggccttcaaagtaaaaagaatttgagccacgcatagtgtcacgcacctgtgatcccagctacttaggaggttgaggctgggaggatcacttgagcccaggagtctgaggctttagtgatctaagatcatgccactgcactccagcctgngcaacagagtgagaccctgtttctaaaaaaaaaataagataatttagctaactttnna

SEQ ID NO: 54339 - DNA, 738 bp, Homo Sapiens
agtaaaacaaaaatttatggtcaaaatttctaacttggttcatcacattataagataaataaattaaattaatgaaaatgtgacttagagtaggggtagccctcaaaaatagatttactcattggaattttcttcaagtgttaaaggtacattttcactaggaaaagaaatcaaatatgcttatgcaatatatatttgtgtgtttttccttaatgttatatggtatatatgagccttcttgtttagtttcttttatctgctaagttgtaccttaattagagggcaatatatgtttcataaagaagagtctttataattttgtttgtcagatagtattttggaatttgtataataaggatgtttagaagccatataagtggctttttttaacagatagaatttgtatttttattgtactttaaaaagatttatgtaataggtatatatttagtggccatttattatcaatggtaacacaatggagtactaagatggtatttgcacatttaagatatgttactttaccaatttttaatggtaatcaactctgctactggcatgatgaaatagtacataactggtcattaattatgaacatttacttctccagtgcgtttttatgaagatctggttgaaaatcgtattctatgtaaactcaagatatgtttggttttcctgaaaataatgattttaataataaaaaaaaaaaaaaaaaaaaaaatttttgggggggccaaa

SEQ ID NO: 54340 - DNA, 603 bp, Homo Sapiens
gtagagcagactttctaacatacctagttttgtgtattggctttgctggagtatgatagcaaaatgaagactcttttactcagctctggtattgctcataacttaccaagaggctaatactaaacttggaaaattgtttaagtatgttttatcaagcagtctgggttttgttttttaatatactttttaatggatatgtgaaaactgaaggaaatgttaaaggttttttaatggtgcaagtgaaggtgccagttgctatttgatatcacactctacaaaagcttcattactttatttgatggtggttgctaagcagccattgcacagagcataagtctactgggtgcctttacatgccagaggctgatgctgcactgttgatgtcatgtgaggaaataatgcacatgctctaactgctcaacaggaaatgaacctagaaacagaaaatgaaaaggttgattgaaataaaacttgatcaacgcgactgtattttgaaacattccaggaaggttacttcttgtcaaacttgcctggcagtgtttgttcaaaacttgtatttaataaatgaacatctgacttacaaaaaaaaaaaaaaaaaaggac

SEQ ID NO: 54341 - DNA, 364 bp, Homo Sapiens
  misc_feature (80)..(82): n is a, c, g, or t
  misc_feature (103)..(103): n is a, c, g, or t
  misc_feature (299)..(299): n is a, c, g, or t
agcaagtcgaccacctgcaagcaggagatctccaggctggtgcgcgagagggacgcgtacaaggagaaatacgagaagtnnntgagcagcggcttccgagggnacggctcgagcagcgacaacccgtcctctcccgagtttttcataactgagcccactcgcaagttggagccatcagtgggatacgccacattttggaagccccagcatcgtgtacttaccagtgtgttcacaaaatgaaatttgtgtgagagctgtacattaaaaaaaaatcatcattattattattatttgcagtnatggagaaccacctacccctgacttctgtttagtctcctttttaaataaaaattactgtgttaga

SEQ ID NO: 54342 - DNA, 599 bp, Homo Sapiens
aacacgtgcttgtggacatcaggcctcctgccagcagttcttgaagcttctttttcattcctgctactctacctgtatttctcagttgcagcactgagtggtcaaaatacatttctgggccacctcagggaacccatgcatctgcctggcatttaggcagcagagcccctgaccgtcccccacagggctctgcctcacgtcctcatctcatttggctgtgtaaagaaatgggaaaagggaaaaggagagagcaattgaggcagttgaccatattcagttttatttatttatttttaatttgtttttttctccaagtccaccagtctctgaaattagaacagtaggcggtatgagataatcaggcctaatcatgttgtgattctcttttcttagtggagtggaatgttctatccccacaagaaggattatatcttatagacttgtcttgttcagattctgtatttacccattttattgaaacatatactaagttccatgtatttttgttacaaatcttctgaaaaaaaacaaaacaatgtgaaacattaaaattaaaaggcattaataataaaaaaaaaaaaaaaaaaaaaaaaaaaaag

SEQ ID NO: 54343 - DNA, 675 bp, Homo Sapiens
  misc_feature (486)..(487): n is a, c, g, or t
  misc_feature (652)..(652): n is a, c, g, or t
aaaccctcacctgctatgagactttgagcaagaccaacccttctgtcagctccttgctccagagggcacacgagcagtgcttcttaaagtccattgctgagggcatcggccctgaagaacggcgccaaaccctgttgcagaagatgagcagcttctgacttggcgtggggagctgggccccaacatggcgggtctgcagaagatcagcagcttcttacctgtgcgggagcgaaaaagctgggcttcaacatggcaggtctgtaggggtcagacccgagcagcctggactttacagttatgtgaaactgtccacaaaaagtcatggcaataatggtgtaaagaaaatagtttcttgggtatttgtaacgtacaaactatcataaaaattctcctctttcgcatctcactttgtctcttctaagtcggcctcagcaatagcccaggattaaatatgctctgaaattggaaaaaaaaaaaaaaaaaaannaaaaaaaaaaaaaaggaaaaaaaaaaaaaaaaaaaaaaaaaaaaccatgtcggccgccttggcccagtcgactctagactcgggcaagcttatgcatgcggccgcaattcgagctcacttggccaattcgccctattgtgagtcggattacaaatcactggccgncgttttcaacgtcgtgactgtga

SEQ ID NO: 54344 - DNA, 874 bp, Homo Sapiens
ggctggaccggtccggattctcgggatcacagtgtttccagatcctgctgaaagtgaacgagcctcagataaagcaaagatggattccagccaaccagaaagatcttcaagaagaccccgcaggcagcggaccagtgaaagccgtgatttatgtcacatggcaaatgggattgaagactgtgatgatcagccacctaaagaaaagaaatccaagtcagcaaagaaaaagaaacgctccaaggccaagcaggaaagggaagcttcacctgttgagtttgcaatagatcctaatgaacctacatactgcttatgcaaccaagtgtcttatggggagatgataggatgtgacaatgaacagtgtccaattgaatggtttcacttttcatgtgtttcacttacctataaaccaaaggggaaatggtattgcccaaagtgcaggggagataatgagaaaacaatggacaaaagtactgaaaagacaaaaaaggatagaagatcgaggtagtaaaggccatccacattttaaagggttatttgtcttttatataattcgtttgctttcagaaaatgttttagggtaaatgcataagactatgcaataatttttaatcattagtattaatggtgtattaaaagttgttgtactttgtctgtgaccttaattttctgcactgagttaccaaatatttccaaccaggtagtcttcagatcacctgatgaaaggagcagggaacaggaagagggtggtgtaaacattataaaaatttcacaaaccatgcctatttcattttcacttaaaactgcaatgttattttttgggtaaacacaaaagtttcactagcattttagttatacatgcttaaaaaaatgttag

SEQ ID NO: 54345 - DNA, 685 bp, Homo Sapiens
cgccaccttaccagccagaacccaggagacaccttcggcccagatggaaggcttcctcaatcggaaacacgagtgggaggcccacaataagaaagcctcaagcaggtcctggcacaatgtttattgtgtcataaataaccaagaaatgggtttctacaaagatgcaaagactgctgcttctggaattccctaccacagcgaggtccctgtgagtttgaaagaagctgtctgcgaagtggcccttgattacaaaaagaagaaacacgtattcaagctaagactaaatgatggcaatgagtacctcttccaagccaaagacgatgaggaaatgaacacatggatccaggctatctcttccgccatctcctctgataaacacgaggtgtctgccagcacccagagcacgccagcatccagccgcgcgcagaccctccccaccagcgtcgtcaccatcaccagcgagtccagtcccggcaagcgggaaaaggacaaagagaaagacaaagagaagcggttcagcctttttggcaaaaagaaatgaactcctttccttcacctcctgcccttctcttaccttttcagtgaaattccagcatgcaagctcagaaccaacacattactctctgtgcctaatgttcctcaatgtggttgatttttttttttttttaatttatagagcatttcg

SEQ ID NO: 54346 - DNA, 922 bp, Homo Sapiens
  misc_feature (653)..(653): n is a, c, g, or t
aggcccctgattccactgctgcaggaggctcagcctcgaagcggatggcgctggtgctggaacgggtgtgcagcactctcctgggcctggaggaacacctgaatgccctggaccgggctgctggtgacggcgactgtggcaccacccacagccgtgcggccagagcaatccaggagtggctgaaggagggcccaccccctgccagccctgcccagctgctctccaagttgtctgttctgctcctggagaagatgggaggctcatctggggcgctctatggcctgttcctgactgcggctgcacagcccctgaaggccaagaccagcctcccagcctggtctgctgccatggatgccggcctggaagccatgcagaagtatggcaaggctgctccaggggacaggactatgctggattctctgtgggcagcggggcaggagctccaagcctggaagagcccaggagctgatctgttacaagtcctgaccaaagcagtcaagagtgccgaagctgcagccgaggccaccaagaatatggaagctggagccggaagagccagttatatcagctcagcacggctggagcagccagaccccggggcggtggcagctgctgccatcctccgggccatcttggaggtcttgcacagctanggtgtgtgactgcctcccttggcctcagctcctctcactgctgtgctgaagggggcctttgtcacttcctttctgccttccaacccttcacgtcccccagccctggcccccattgggccccccttctaagttgagcaggaaatccctcccccaaggtttcccaaaacctacggacgggcacccccaaattggaacctgggaggggggtcccccatgggcctttttccaagcatgggcccctttcccacttttttgcaaggaaaggggtg

SEQ ID NO: 54347 - DNA, 842 bp, Homo Sapiens
agcggagtcgacgtagcagccatcttttccctggctttggtgattcagccctgacttctcaaaaagcactgcacagaggaggaggcagcagaaccccacttcagcttcttaggactctgcacttccccagaaggaagaattaaaaatgaatatgttcaaggaagcagtgaccttcaaggacgtggctgtggccttcacggaggaggaattggggctgctgggccctgcccagaggaagctgtaccgagatgtgatggtggagaactttaggaacctgctgtcagtggggcatccacccttcaaacaagatgtatcacctatagaaagaaatgagcagctttggataatgacgacagcaacccgaagacagggaaatttagatacattacttgtaaaagctcttttgctctatgacctggctcaaacttaaacttggatttgaagttagaagaaatgttggaagtcatttatatatgaagaaatgttggaaggactcatatatgcatacattccttgagtgactatgaatgactgccgggcagtaacttctgggctgtggttgtaaactgtgagcactacaaaatgtttttccttattgataccatattatggtaggaaagacatgggaataaaaaatttagatagtatgtcagtagttgtgtttttaaatgggtgtcatttagtgcttagcaattgggaagcttgggtggaccatctcttggttttggaccatctcttggtttccgtcagtatgtaaaccagaaacttcaaatgttgtcacaaaagatgagcagaactattccgaggttcctttaacgtctttaactctgacaaaaaaaaaa

SEQ ID NO: 54348 - DNA, 580 bp, Homo Sapiens
cttaatttttttcctcttctatgacttgagaatgtttttctctaaatgagagaaagacttagaatgtacacagatccaaaatagaatcagattatctctttttttctaaaggagagaaagacttagaacatacacagatcctaagtagaaccaggtaattgtctctttttctaataaggaatttgggtaatttttaattttttgttttttaaaaaataacctagactatgcaaaacatcaaagtgaattttccatgaatgtttttaatattctcatctcaacattgtgatatatgctactaaaaaccttttcatatacatcttacctcatttcaagtgaattattttaatctttttctctctttccaaaaatttacaggaatgtttagtgtaattggatttcgctatcagttcccatccttaagttttgatattcaatatctgatagatacactgcatctttggtcatctaagatttgtttacaaatgtgcaaattatttagagcatagactttataagcattaaaaaaaactaatggaggtaaaacctaaatgcgatgtgaaataattttagtgttgat

SEQ ID NO: 54349 - DNA, 638 bp, Homo Sapiens
catcacacaaaaggaacaaaagcgaaacacacaaaccagcctcaacttacacttggttactcaaaagaacaagagtcaatggtacttgtcctagcgttttggaagaggaaaacaggaacccaccaaaccaaccaatcaaccaaacaaagaaaaaattccacaatgaaagaatgtattttgtctttttgcattttggtgtataagccatcaatattcagcaaaatgattcctttctttaaaaaaaaaaaatgtggaggaaagtagaaatttaccaaggttgttggcccagggcgttaaattcacagatttttttaacgagaaaaacacacagaagaagctacctcaggtgtttttacctcagcaccttgctcttgtgtttcccttagagattttgtaaagctgatagttggagcatttttttatttttttaataaaaatgagttggaaaaaaaataagatatcaactgccagcctggagaaggtgacagtccaagtgtgcaacagctgttctgaattgtcttccgctagccaagaacctatatggccttcttttggacaaaccttgaaaatgtttatttaaaaaaaaaaaagatgacaaagaaaaacagagagagagaatattggagatgtcctgaatt

SEQ ID NO: 54350 - DNA, 499 bp, Homo Sapiens
ggtgggcacctcggcgggggtggtcctcgtggtgctgtcgtgggtgctgtgtcttggcgtgttctcctacgtgaaggtggcagccagctccctgctgcatggcgggggccggccggcattgctggcagccggcgtggccatccaggtgggctctctgctcggcgctgttgctatgttccccccgaccagcatctatcacgtgttccacagcagaaaggactgtgcagacccctgtgactcctgagcctgggcaggtggggaccccgctccccaacacctgtctttccctcaatgctgccaccatgcctgagtgcctgcagcccaggaggcccgcacaccggtacactcgtggacacctacacactccataggagatcctggctttccagggtgggcaagggcaaggagcaggcttggagccagggaccagtgggggctgtagggtaagcccctgagcctgggacctacatgtggtttgcgtaataaaacatttgtattt

SEQ ID NO: 54351 - DNA, 631 bp, Homo Sapiens
gttaattacatgtcagactcctagagggcctccagactaataggaagcatttctgtaaccaacctgccacccactgattcagaaatggaaatcacattccacaatctatggcttccaccagctagcccaggaaatacttgaaatcagcattccaattagtgttgagtctcttgattgtgtcatttaccaattaaataactgagacctaagtctgggaacagagccacgaatctgcctttgagatgctggcagatctcaaggccatcaattattgggggagggagggacaaacactcccaatcatccaccagtcagactgaatgtgtagctggcgaggaattacttccacttctggcccagcacaagccctgctttggccacctgtctgcaagagaggcggcccctgtgcttgcaacgcttacgtgttgatcccagtgtccttttccaaatgagtgctgtagctttagaagtggccctctatagaaagaagtcaaaagatgaggccccttctagaatctaggataacaagagtgttgacagtttgaggagtcgaattgagattcatcatcaaagagcaatgcagcgtcgttaaaataaaaactgtgccttttaaaaagaaaaatgcaaatat

SEQ ID NO: 54352 - DNA, 584 bp, Homo Sapiens
gtaatttagatttccaggatgtcttagacaaattggcagatatgggaattgcgatccgtgttgcctcacccaaactggttatggaagaggctcctgagtcctataagaatgtgacagatgtggtaaatacctgccatgatgctggaatcagcaagaaagccattaaactgagaccaattgctgtgatcaaaggatagaaccttggacagcagggctgcctgacaccaccaaccctctctgaagtggaagtggactgacatgctcttctgacatcagactcaaggcgggacaagttgcaaagtgtgcagctgtaactgctcacgccaaaatggctgatggggaggctgctgctttcaggggcccgtgcttgtaaaataaccttccaggaagaggcacattgcccacctttggaaagggaggaatatgccttctccttggttgttccacagagttttaggaaaatctgttagggatgggtagatgtcaaactgccttacgcagtcatactgatctttagccatcagattgatcttcttcacaccaagctctgtttacattccgagaggtgtcatgaagaaagttct

SEQ ID NO: 54353 - DNA, 913 bp, Homo Sapiens
  misc_feature (577)..(578): n is a, c, g, or t
  misc_feature (583)..(583): n is a, c, g, or t
  misc_feature (591)..(591): n is a, c, g, or t
  misc_feature (603)..(605): n is a, c, g, or t
aaacaaccaagaactctttcctgtaataagcaggatccagtttgagaaagtttagcgaatataaaagtaaaagccatttaaaaatctatattctttttttttttttgacacagagtcttgctctgttgcccaggctggagtgcaatggcatgatctcggctcaccgcaacctctgcctcccgggttcaagcgatcctcctgcctcagtctcccaagtagctgggattacaggtgtgcaccaccacgcctgactaattttgtatttttagtagagacagggtttcaccatgttagtcaggctggtctcgaactcctgacctcaggtgatccacccgcgttggcctcccaacgtgctgggattataggcgtgagccaccacgccccgcctaaaatccatattcaaagaagcaatttcagttcctttctaagctttgtcagtcaaggggctccactgacttcctaggcccctgtaatttaaccagtctttaaggttttgcaggaaagccccttcttccaagtgggtttttcaaatcgcacaatggcaaagcccaaaccgagggaagaaacatttaaaaannaaganggggaaangccacggaatgnnnacaaaaacaaaaaaaggggggcgggccggcttcccaaagtaaccccccccgagggggccccaaagtttttacccggaaccccggtttttttttggaacaaagggggcccccctaaaggggaggccccaattataaaaactaagggcacgggccccgcccctttttaaacaacccccccggaactggggaaaaactggccaaccctgggggaattttttggggaaaagaaacccttttctttcgggggggggggggaaaataaattgggaaaaagatttcctcccgggaaatttttagggctctcaagg

SEQ ID NO: 54354 - DNA, 873 bp, Homo Sapiens
  misc_feature (730)..(757): n is a, c, g, or t
  misc_feature (759)..(763): n is a, c, g, or t
  misc_feature (765)..(766): n is a, c, g, or t
  misc_feature (768)..(768): n is a, c, g, or t
  misc_feature (770)..(770): n is a, c, g, or t
  misc_feature (773)..(774): n is a, c, g, or t
  misc_feature (776)..(776): n is a, c, g, or t
  misc_feature (779)..(780): n is a, c, g, or t
  misc_feature (782)..(782): n is a, c, g, or t
  misc_feature (788)..(796): n is a, c, g, or t
  misc_feature (800)..(800): n is a, c, g, or t
  misc_feature (802)..(802): n is a, c, g, or t
  misc_feature (809)..(812): n is a, c, g, or t
  misc_feature (833)..(833): n is a, c, g, or t
aatgttacagagatactatttttttggttggaattactatattaaatttagaagcagaaactggtaaaatgttaaatacatgtacaattgcttttagttagcaattgattgtagcatgggttcctccaaggtttcaagcaatgggcagagtttaaaattatatcagattcgtttacttcgtttattattttacagtaaatttgaataaatcttaggggtcattatcacttaaataatactgtacctaggtctttcaaattaaaattatacctgaatgaagttgtttgtatacataaaggatatttgtgtacaattaccttttttcccccacacttgttttctttgtttttgttttttatggcaactggaaagtatttactatgggattcatttatgtctgtctttctatcataaagaattgatcaatatgtaaatatgtgatttgaaccatggttgacttacaagtgtcactacagctttttagaaaacatagccctaatatatgttaagcaggacccgggtgagccagtgggcttgcgctttatgtagagctggaagaaggccgtccatcctgtctcttgggcggacagtgtactttcctaatagggaagggaagcacaatggaaatacccctgaaccgttttattgcagtaatttttttcatatctgaaactattatttaatattttgaataagattttaaaaaataaatggcaaagatataaatctnnnnnnnnnnnnnnnnnnnnnnnnnnnnannnnnannananaannanaannanaaaaannnnnnnnnaaananaaaaaannnnaagggggggccccaaaaaaangggggcgcgggggcacaaaaaaaaaccggggaccgggccc

SEQ ID NO: 54355 - DNA, 1087 bp, Homo Sapiens
  misc_feature (758)..(763): n is a, c, g, or t
  misc_feature (770)..(770): n is a, c, g, or t
cttctgtgcctttgtaaaacgtgtagataaccgcagtggttggctgagccaagaactctcctaaatcagtggctttctccccaccccttgctggggagtcatttttaaaaaaatctgtgggatataaaattggcctcctgctgcttcagcctacctctccctctgctgacttaatgtcgtgattctgtttcttcagatatttaaggctgttaggttgtgtgagccttgaagtgtgtgtgtgtgtcccagcgactgtccactgtccaggagatgcatgtctttgtattggagatatttctgtaactcattctcttggtgctcacgattgccatggccatagggccacagtgccgtatctgctgcagacatgattgtttcttgttctagaggttttcttgttttcgaatcttgcctgatgaatccagccagaccaaggggcctagatttgacctctgtcctgggctcctgggccaggtgcaggaacatctgaggccactctgctggccacctccagtgggtgctgaccacaggatgggctttgtttacactcattttcaccctgattcttgcccccactttcataaaagaaacttcaaaatgctgacgctttggagagtaagaaaatcaatcttggctgggcacggtggctcctgcctgtgatcctagcactttgggaggctgaagctgaaggatcacttgagctcaggagttggagaacaaccctggcaacataacaagacccctgtctctacaaaaannnnnnacaacanaaaatttagcccgtgtgtaaccagtgaatgccctgtggtcccaactaattgggccccgaagggttgaaggattgctttgaaccctaaaaaattgcacctgagctatggaatctggccccaccgtacctccacccctgggatgacaaactggaaaccctgcctcctaactaaaaaaaaatacagggccagacgtgggggggcctacccccagcgtactcccacccctcttgttacagaccaagcgcgagggaaactaccccgctattctggaatttccacactcccctcgaaaaaatatggaggcacaaccttgttta

SEQ ID NO: 54356 - DNA, 537 bp, Homo Sapiens
  misc_feature (367)..(367): n is a, c, g, or t
taatttaaaaacacaaaggcctaaagaaatacgtatcttataatttttttaatttttgagacgttcatttaatgaattgtgcacgaatgaattctatatatataaaatatacatatatagctctatatttggggaggggcactgtctcttttttctctcatttttaaaatgaagtgttgttgcctttgtatgtggttcaaccatccagctcccagctggctaaactttgcctccagtggtcaaagatgggaaaagagtggggttggcaggagatggaaaacggaggtgccgccccagcatggggggcaggtcccccagtccaccctgcccctccccctgtggagaagacgcttagttgggggtgtgnggtttgggctccattctggattcggcggttccgggggagggggtgggtctgtgccgattactctgtcttgtacgtttgttctgctgctcttcaatattgtatcaacgccaggaaagggggggtgaaaagcctcttttaccccccaaataaattgtcacattccgaagctg

SEQ ID NO: 54357 - DNA, 623 bp, Homo Sapiens
agaaggggaggttctagttacagtggtggaggctatggcggtggctatagcagtggaggctatggtagcggaggctatggtggcagcgccaactcctttcgggcaggatatggtgcaggtgttggtggaggctatagaggagtttcccgaggtggctttagaggcaactctggaggagactacagagggcctagtggaggctacagaggatctgggggattccagcgaggaggtggtaggggggcctatggaactggctactttggacagggaagaggaggtggcggctattaaaacttggttatgtcagttcctgtgtgtagacagtaaggaaaaaaaggcatgctatgtgttacgtgttttttccagtatgtttatttgccaccaaaaagtaaatgcattttcacccattctgtggttcattgtagtttaaggaaaccaagcatatagatgcattagtgattttgtttatattatgtaaaatataacgatctcttaaaaataccacagtttgtattttttctttaaggagtaaagatttgcctttaaataacttggtattttcctggctttcgtttaatacaatagaaaataaagtattacaccgaaaaaaaaaaaaaaag

SEQ ID NO: 54358 - DNA, 698 bp, Homo Sapiens
tgtgcacctcactccatccagcctgtgtgcctcccagctgccggccaggccctggtggatggcaagatctgtaccgtgacgggctggggcaacacgcagtactatggccaacaggccggggtactccaggaggctcgagtccccataatcagcaatgatgtctgcaatggcgctgacttctatggaaaccagatcaagcccaagatgttctgtgctggctaccccgagggtggcattgatgcctgccagggcgacagcggtggtccctttgtgtgtgaggacagcatctctcggacgccacgttggcggctgtgtggcattgtgagttggggcactggctgtgccctggcccagaagccaggcgtctacaccaaagtcagtgacttccgggagtggatcttccaggccataaagactcactccgaagccagcggcatggtgacccagctctgaccggtggcttctcgctgcgcagcctccagggcccgaggtgatcccggtggtgggatccacgctgggccgaggatgggacgttttttcttcttgggcccggtccacaggtccaaggacaccctccctccagggatcctcttcttccacagtggctgggcccactcaggcccgagtacagccaaactcacctccttgacccccatgtaaatattgtctgctgtctgggactcctgtctaggtgcccc

SEQ ID NO: 54359 - DNA, 615 bp, Homo Sapiens
aatttagtgtgactaaggctttatttatgtttgtgaaactgttaaggtcctttctaaattcctccattgtgagataaggacagtgtcaaagtgataaagcttaacacttgacctaaacttctattttcttaaggaagaagagtattaaatatatactgactcctagaaatctatttattaaaaaaagacatgaaaacttgctgtacataggctagctatttctaaatattttaaattagcttttctaaaaaaaaaatccagcctcataaagtagattagaaaactagattgctagtttattttgttatcagatatgtgaatctcttctccctttgaagaaactatacatttattgttacggtatgaagtcttctgtatagtttgtttttaaactaatatttgtttcagtattttgtctgaaaagaaaacaccactaattgtgtacatatgtattatataaacttaaccttttaatactgtttatttttagcccattgtttaaaaaataaaagttaaaaaaatttaactgcttaaaagtaaagttttgccattgcttggagaaacttttttttccttctctgcgctgccagctgtaacacttcttctggattgctt

SEQ ID NO: 54360 - DNA, 671 bp, Homo Sapiens
gcaaataagatctatgacaaagccatgaaactggagcaggaatttggagagtactttacagccattgtacagggtgactcactggaagagatttataacaaaatcaaacaaatcattgaggaccagtctgggcactacatttgggtcccatcccctgaaaaactctgaagaatcccctccaaccattctcttgtgaacagaagaaatcaagtccctcttccctcctccctcttcattcctgtccccatggggagaacaaatgctactgttcttgtccccttttttagatatgtcaaaaaaaattaagttttctagtcctgttctttttttttttttaagtttttgtttgtttcagtttattttttgggatgatgccatctcattcatcatgtgactgtgcccattcctgcatggacctttcccaagcgctagcacaggtgcaaaatccatcagagccattgttttcataaaaaccaagcagaagtgaagagaaaagaggaggactgatggaaagacagactctggacagctgcacggcttgtgaagtgagctaaatgcaccacatgatgagatgctcctgggcatttctccctatctgtactgctgtcttgcagctctgaacggtgcaacgtaatggcgacagaaagtatcttatttatatatagatatat

SEQ ID NO: 54361 - DNA, 790 bp, Homo Sapiens
aattcccgggatagcagcgctttgcccacttcactgagctggccatcgtctctgtgcaggagatagttgactttgctaaacagctacccggcttcctgcagctcagccgggaggaccagattgccctgctgaagacctctgcgatcgaggtgatgcttctggagacatctcggaggtacaaccctgggagtgagagtatcaccttcctcaaggatttcagttataaccgggaagactttgccaaagcagggctgcaagtggaattcatcaaccccatcttcgagttctccagggccatgaatgagctgcaactcaatgatgccgagtttgccttgctcattgctatcagcatcttctctgcagaccggcccaacgtgcaggaccagctccaggtagagaggctgcagcacacatatgtggaagccctgcatgcctacgtctccatccaccatccccatgaccgactgatgttcccacggatgctaatgaaactggtgagcctccggaccctgagcagcgtccactcagagcaagtgtttgcactgcgtctgcaggacaaaaagctcccaccgctgctctctgagatctgggatgtgcacgaatgactgttctgtccccatattttctgttttcttggccggatggctgaggcctggtggctgcctcctagaagtggaacagactgagaagggcaaacatgcctgcgagctgggcaaggagatcctcccgtggcattaaaagagagtcaaagggttcgccccccaccaccccatacctaccacccaccccg

SEQ ID NO: 54362 - DNA, 501 bp, Homo Sapiens
tcaatcgatcttcctgccaaggttttggaattacaggtgtgagccaccatgcctggcctgctttgacatattttatagtgtgttaattacaaatagtcttcatatgccagaatataagagcaagtgttatctactttttagatgggaattgcagaagctgcatcaaaagtatgctttgaggtatatatagtgaaacagagcctttctgaagagaattatatcaaactaattacaaccaagaaataatagtatgaagcggatgctgtttggaggacaggaaaatttatcaggaaaattacataatccctctgattccactatccagagatagccattattattaatatttggtatgtacatccttatattatttttttcttatgcatgattttgtatatatggttatttttctttccataaaaatggtattaaactgtatatactgttttgtagcctacatatttcatatagaagtatattgttaacattttccatgtcaat

SEQ ID NO: 54363 - DNA, 899 bp, Homo Sapiens
  misc_feature (731)..(731): n is a, c, g, or t
cccacgcgtccgcccacgcgtccgctcatatggtgcctgaggttttgagcttccttaaggttacttggccccttcaagactgttctgaactccctcaactctctctgcagggcatggagattgtacagaccatgaacagtgatcctggcctggcagtggggtacacagcttttaatggagttgacttcgaagggaccttccatgtgaatacccagacagatgatgactatgcaggctttatctttggctaccaagatagctccagcttctacgtggtcatgtggaagcagacggagcagacatattggcaagccaccccattccgagcagttgcagaacctggcattcagctcaaggctgtgaagtctaagacaggtccaggggagcatctccggaactccctgtggcacacgggggacaccagtgaccaggtcaggctgctgtggaaggactccaggaatgtgggctggaaggacaaggtgtcctaccgctggttcctacagcacaggccccaggtgggctacatcagggtacgattttatgaaggctctgagttggtggctgactctggcgtcaccatagacaccacaatgcgtggaggccgacttggcgttttctgcttctctcaagaaaacatcatctggtccaacctcaagtatcgctgcaatgacaccatccctgaggacttccaagagtttcaaacccagaatttcgaccgcttcgataattanaccaaggaagcaatctgtaactgcttttcggaacactaaaaccatatatattttaacttcaattttctttagcttttaccaacccaaatatatcaaaacgttttatgtgaatgtggcaaataaaaggagaaagagatcattttttaaaaaaaaaaaaaaaaaggggcg

SEQ ID NO: 54364 - DNA, 866 bp, Homo Sapiens
gggagaagatcatttagatttgttttgcattccttagaatggagggcaacattccacagctgccctggctgtgatgagtgtccttgcaggggccggagtaggagcactggggtgggggcggaattggggttactcgatgtaagggattccttgttgttgtgttgagatccagtgcagttgtgatttctgtggatcccagcttggttccaggaattttgtgtgattggcttaaatccagttttcaatcttcgacagctgggctggaacgtgaactcagtagctgaacctgtctgacccggtcacgttcttggatcctcagaactctttgctcttgtcggggtgggggtgggaactcacgtggggagcggtggctgagaaaatgtaaggattctggaatacatattccatgggactttccttccctctcctgcttcctcttttcctgctccctaacctttcgccgaatggggcagcaccactgacgtttctgggcggccagtgcggctgccaggttcctgtactactgccttgtacttttcattttggctcaccgtggattttctcataggaagtttggtcagagtgaattgaatattgtaagtcagccactgggacccgaggatttctgggaccccgcagttgggaggaggaagtagtccagccttccaggtggcgtgagaggcaatgactcgttacctgccgcccatcaccttggaggccttccctggccttgagtagaaaagtcggggatcggggcaagagaggctgagtacggatgggaaactattgtgcacaagtctttccagaggagtttcttaatgagawatttgtatttatttccagaccaataaatttgtaactktgca

SEQ ID NO: 54365 - DNA, 656 bp, Homo Sapiens
  misc_feature (597)..(597): n is a, c, g, or t
ggaaaattgcacagaccgacagtcgtgaggatggcagagctgctgcattcccccacatggggatttctgtgtctgcttggcgacctccctgcgtgcacggcctaggaggtgcacgggccaccatagtcacactggcactgaaaagaaagcgttgccctggtgattctttcccccccgtttgtaatgttaactgatcaggaagtgcagtttgggtgggatgccgaatcgtcgtgctgacattgagtcacggatgaggaaggtacaagtcctttaagatcaaaactcaaacgggccgttctttctaaggtgtcggtatgtggggagtggtacaaaatggtctgatgctccttcaaaaacattcactttttacaacgtcaaggaattaagcataaaaaagattggttaaaagctttggtttctagtaaaggttagtgtgtgtggtttttttaagaagctgttttgctaaattatttttacttggaatgtttcaaacagatttcaggctgcaaacttgttttataatcgtttgcttctccaagtgaagctcagaaatacctaaaaatagctgtaacgttcgcgttaggaaccgatggtgtntattccagtttgcattttatggtgacataaaatccttttccactgaacaaacaacaaag

SEQ ID NO: 54366 - DNA, 654 bp, Homo Sapiens
cctcaacagtgttaaaagacagagggtttggagtctcctcaacagtgttaaaagaggaagtgacctcacagaccagctcagagatgttaccaagaatatcacagcccccagggtagggagacaagcagcagtttgttctgtctcagctcctgtcaaggatcctgcggggtgggccctctgtatagctgctctctgtcactggcccctggagtgggagcagcgtccttagtcactgcaggcccaggcgggcaggtggtcccaggacagaggtggggaagttgtcctgaggaagcagaagtaggccttgctcccgcccaacccaagggcctccagtggaccagcattcaagatgtgagtgcccgtggtgtgcaaggcactcccatggcaccgtatttattgactgatctgtgaaggcttccctgacccctgcccaggaagagttcactggtcgctctgttgtgccccacagcactttgttatacctctgccacacacttcacgcagcgcgttgtaactcatgtgtttacatgtctgtccccccagactgtgagctccttgagggcagggactgtacattctccagctctgtgtccccagggcctggcacattgtagacgcttaataaatgtctgttaaatgaaaaaaaaaaaaaaa

SEQ ID NO: 54367 - DNA, 684 bp, Homo Sapiens
attgtaacggttcctggaagctgggccctctcattggcatatacagtactcctcgctgcagggcactgtcccaccgggatccagttgcaaagtttgtcttgacagttgaaggcctcgcttagttgtactggattctcagggagccctctgtggccttttgctttgcgtgctgtttcccttgtaccagagggcggcaccgtggaaattctgttttccctgtagcatattgtgttggattgcattactggcagagaaaggacaaggtgccattcaagtcctagggtgggcttccagctgccttaatagaagtactcaagtcttttgggtagtgagctggaaagcctacaggaaaagaggggtacctgttttcatttgaaaactttgattcatggaacctttaaaactaatctcagaaaaatttttggtgcccatgcagctgtagttgttcactgctttcctggatggatgggactcttatgtcataacttctgttactcctttggcccatagctaaggtcatccttccccacaggggtggctttgggattggatgatacagcttttgcttctgtgtagtatacctgtacatacttgtttcaggcagcctttctttaatgttttcagttggtttgtattctgtagctcagtagctgctaataagttaaagatctgtgtcctgctttc

SEQ ID NO: 54368 - DNA, 913 bp, Homo Sapiens
attgaaaggggagcaaattttactttctgacaatgcagcttctcttgcagtgcaggcctttttgcaaatgtgtaacttgcctatcaaagtagtttgtagggcaaatgcagaatatatgtctccatctggtaaagtaccttttattcatgtgggaaatcaagtagtatcagaacttggtccaatagtccaatttgttaaagccaagggccattctcttagtgatgggctggaggaagtccaaaaagcagaaatgaaagcttacatggaattagtcaacaatatgctgttgactgcagagctgtatcttcagtggtgtgatgaagctacagtaggggagatcactcatgctaggtatggatctccttacccttggcctctgaatcatattttggcctatcaaaaacagtgggaagtcaaacgtaagatgaaagctattggatggggaaagaagactctggaccaggtcttagaggatgtagaccagtgctgtcaagctctctctcaaagactgggaacacaaccgtatttcttcaataagcagcctactgaacttgacgcactggtatttggccatctatacaccattcttaccacacaattgacaaatgatgaactttctgagaaggtgaaaaactatagcaacctccttgctttctgtaggagaattgaacagcactattttgaagatcgtggtaaaggcaggctgtcatagagttatgtgttagtctcaggagtcttaacttttgaaatatgttttacttggatgttacattagatattggtgtcagaattttaaaaccaaattactgcctttttgaaccctccaatatataatggatcttatgcatgcgccttaatattggtatttgggaaatccattaaaataattctggattaatttaaaaaaaaaaat

SEQ ID NO: 54369 - DNA, 685 bp, Homo Sapiens
cctaaaggcatggcacttgagaaatgtgaataagattgtaagttacaaatagcaaggtacagtcagatgttaacagtctcagcccctaaatgtcaccttgtattacagcatgttatataagcacatacaggcacatacatgaaatagtgatacttcattctcagtaatatcttcatccttctcactggaaagatctttgatgatttttaatcaacataggagtttcaatgatatctagaagtttaaaagggctcgttcaaacaaattatgaccacacacactgaagagtatgtttgtctcttgtggtgtaaatttttttttattacaccaaattatgttcacacaaaacctttgtaatcagggggaattaaagagccttcctggaaaatggaggttgcaatcagccgagatggtgccatcgcactctagcctggggaatagagtgagatcctgcctcaaaaaaaacaaaaaaattctttattttctccataaactacagtttatataagcaaaagtttcagtactaagcaattttagtctctgcagtctcttgtcttgaattaatacaacttttgttaattctcttatgaagttaatcttcctgcttgtatgtgaattaaatatatgtcaaactttttttgtaaaaaaaaaaaaaaaaaaaaaaaaatcttgattctgcggccgc

SEQ ID NO: 54370 - DNA, 417 bp, Homo Sapiens
ggcacgaggctgagccagcttatcactgctggggagaccaatctcagaaccttgtcccagccagtgaggatgacagtgacacccagagggagtagaatacgcagaactaccaggtggcaaagtacttgtcatagactcctttgctaatgctatgcaaaaaattctttagagattataacaaatttttcaaatcattccttagataccttgaaaggcaggaagggaagcgtatatacttaagaatacacaggatattttggggggcagagaataaaacgttagttaatccctttgtctgtcaatcacagtctcagttctcttgctttcacattgtacttaaacctcctgctgtgcctcgcatcctatgcttaataaaagaacatgcttgaatatcaaaaaaaaaaaaaaaaaacgatt

SEQ ID NO: 54371 - DNA, 715 bp, Homo Sapiens
  misc_feature (689)..(689): n is a, c, g, or t
  misc_feature (709)..(709): n is a, c, g, or t
aatgaaaaccaagagctacaagatggctgctctgaggcctttgagaagaggacatcacagaaaggagaatctccactcactgactgctatggacctttctcaggacagctaattgccaccatgaaagaagcatgtcgctatgcactgcaagtgaaacctcagcgcctgatggcagctatgtacacatgtgacatcatggccactggtgatgttctcggtcgagtctatgctgtcttgtcaaagagagaaggtcgggtacttcaagaagaaatgaaagaagggacagacatgttcatcatcaaggctgtgctgcctgttgctgaaagctttggttttgctgatgaaatcaggaagaggacaagtggcctggccagcccacaactagtattcagccattgggagatcattcccagtgaccccttctgggtgccaactactgaggaggaatacttgcactttggggagaaggctgactctgagaaccaagcccggaagtacatgaacgcagtacgaaagcggaaggggctttatgtggaagaaaagattgtggagcatgcagaaaagcagaggacactcagcaaaaataagtagctacctactactggtggattcttttccttatagtgaatttaaaagtatcatcaagggtttaatattgggaaaatttctttttgccacattatctctgnttattcactttcaataaagntgatcc

SEQ ID NO: 54372 - DNA, 791 bp, Homo Sapiens
tagcaccaacaccctcaccatcaaagtctgcgggtgcgacgtgaacggggcactgctctcctgcaacgcagaggcctacattctgaacgccggcctgagcacaggcgccctgatcgccatcctcgcctgcatcgtcattctcctggtcattgtagtattgtttgtgaccctgagaaggcaaaagaaagaaccactcattgtctttgaggaagaagatgtccgtgagaacatcattacttatgatgatgaagggggtggggaagaagacacagaagcctttgatattgccaccctccagaatcctgatggtatcaatggatttatcccccgcaaagacatcaaacctgagtatcagtacatgcctagacctgggctccggccagcgcccaacagcgtggatgtcgatgacttcatcaacacgagaatacaggaggcagacaatgaccccacggctcctccttatgactccattcaaatctacggttatgaaggcaggggctcagtggccgggtccctgagctccctagagtcggccaccacagattcagacttggactatgattatctacagaactggggacctcgttttaagaaactagcagatttgtatggttccaaagacacttttgatgacgattcttaacaataacgatacaaatttggccttaagaactgtgtctggcgttctcaagaatctagaagatgtgtaaacaggtatttttttaaatcaaggaaaggctcatttaaaacaggcaaagttttacagagaggatacattttataaaactgcg

SEQ ID NO: 54373 - DNA, 814 bp, Homo Sapiens
  misc_feature (22)..(22): n is a, c, g, or t
  misc_feature (65)..(65): n is a, c, g, or t
  misc_feature (773)..(773): n is a, c, g, or t
  misc_feature (791)..(791): n is a, c, g, or t
tttgggggggaccctttcaagnaagtgacccattccgtggctctgccactgacgacttcttcagnaaacagacaaagaatgacccatttacctcggatccattcacgaaaaacccttccttaccttcgaagctcgacccctttgaatccagtgatcccttttcatcctccagtgtctcctcaaaaggatcagatccctttggaaccttagatcccttcggaagtgggtccttcaatagtgctgaaggctttgccgacttcagccagatgtccaagcccccaccttctggccctttcacctcctccttgggaggggcaggattctcagatgacccctttaaaagtaaacaggacactcctgctctgcctccgaagaaacctgctcctccacggcctaaaccgcccagcggtaaaagtacacctgtaagccagcttggttccgcagactttcccgaggcccccgatccattccagccactcggggctgacagcggcgacccgttccaaagtaaaaaggggtttggggacccgtttagtggaaaagacccatttgtcccctcctctgcagctaaaccttctaaggcctctgcctcgggctttgcagacttcacctctgtaagttgagtcctccgcctccgggccaccccactcccttccgcttgcagcttccctgggatttttgtctccttttaaaggcaaacctcccagcttctttagcctcttggtacctcacactctctgtccctcgcgttatttattctacactgccacttnctgtagaaaaacagtttnctcaataaaaaaaaaagagcgca

SEQ ID NO: 54374 - DNA, 692 bp, Homo Sapiens
ggtagctacaaaattcctcagggatttcattttgcaggcatgtctctgagcttctatacctgctcaaggtcattgtcatctttgtgtttagctcatccaaaggtgttaccctggtttcaatgaacctaacctcattctttgtgtcttcagtgttggcttgttttagctgatccatctgtaacacaggagggatccttggctgaggattgtatttcagaaccaccaactgctcttgacaattgttaacccgctaggctcctttggttagagaagccacagtccttcagcctccaattggtgtcagtacttaggaagaccacagctagatggacaaacagcattgggaggccttagccctgctcctctcaattccatcctgtagagaacaggagtcaggagccgctggcaggagacagcatgtcacccaggactctgccggtgcagaatatgaacaatgccatgttcttgcagaaaacgcttagcctgagtttcataggaggtaatcaccagacaactgcagaatgtagaacactgagcaggacaactgacctgtctccttcacatagtccatatcaccacaaatcacacaacaaaaaggagaagagatattttgggttcaaaaaaagtaaaaagataatgtagctgcatttctttagttattttgaaccccaaatattttcctcatctttttg

SEQ ID NO: 54375 - DNA, 787 bp, Homo Sapiens
cagcattcatgacaggcgctaagtgtgcatgaagtgacactgactacagctagaaagccaggcgcacaaatgccccttccccccaggccgctctttccagcgcagtcatccagaaaggcccacgtgcagagcccctgtgtctcagatgctgcttcagttgcccgtcctgtcctcagaggccactgtgctggccctctatcatttgacctgactttagaacctgacctcaaggatatggcagcgctagcctttagctcccacagcacggatgggggtgatgccagttagaagtgggtagtgaacgtttgctgagctgttcactgtttctctcttctctttggaagcacctctccgagccatgtgagccccctgatgccaccgagcaggggcagcttcatgaccgatgtctggctgaggctgtggcggacactctcggggttgtctgcaggagagcaagccaggaggacatgggcctggacgacacggcctcgcagcaaagtgtgtcagacgagcagtgacgggcgtgcggccgggcggggaggctggctcccccacacctcccacctgcattgctctccctcgtgctccccaaatcaccacaaccaaccaataccgcgatccatgagggactcctcctgtggaacaggagagctgttccagaacacagaactgatctcaggtttttgaaaaaaacacaatcgtacaaaaaaattccacccgcccacaaaaaaacctccccctgttggggaccccaaaaaaaggcacaagaagccaaaaaaaccttccg

SEQ ID NO: 54376 - DNA, 416 bp, Homo Sapiens
ggtcgacgcacttcaaagatcatgaagagcaaggtaagtagaacatccataccctcctaaaacactttttgatcctctgagaatgaagctgttttctttaggaaaatggctgttgatcttttctaagtgtgtttcactttttcatgggatgatggctttgttgcagctgagattcatgtaactagatgtggtaataatagctttcacataggaacagatgcaagttcactctgttagttaactggtagtctttgttaaggtgattcaaggttttaaaatatttcggggccaggtgtggtggctcactcctgtaatcccagcactttggaatgccaaggcaggtggatcacctgagcctaggagttcaagatcagcttgggcaacatagtgaaacctggtctctacaaaaaaaaaaa

SEQ ID NO: 54377 - DNA, 893 bp, Homo Sapiens
  misc_feature (666)..(666): n is a, c, g, or t
  misc_feature (668)..(669): n is a, c, g, or t
  misc_feature (741)..(741): n is a, c, g, or t
cctcccgggttcaagcttgtccaggttgatcttgaactcctgacctcgtgatctacccacctcggcctcccaaaatgctgggattacaggggtgagccaccgtgcccaacctcacttgcttcttatccttacactcccccagccccagagaaactgccacatacaccacaaaaaccaaacatcccccaatgaccttagccccattgctccattcactcccaggtgagaattcaggcaaacgtccacaaaggtcacaggcagcgtacatacggttctgttataccccatatattaccccttcatgtcctaaagaagacattttctcttagagattttcattttagtgtatctttaaaaaaaaaatcttgtgttaacttgcctccatctttttcttgggtgaggacacccaggaatgacccttttgtgtctatgatgttgctgttcacagcttttcttgataggcctagtacaatcttgggaacagggttactgtatactgaaggtctgacagtagctcttagactcgcctatcttaggtagtcatgctgtgcattttttttttcattggtgtactgtgtttgatttgtctcatatatttggagtttttctgaaaaatggagcagtaatgcagcatcaacctattaaaatacattttaagcctttttnannaaaagagagaggggacaaaccccgggacaaaaaagagaaaaaaaaagaaagccaaaggcgatgtgtgtcttnttgggggggggcccccccaaaaaaaaccccccaggggggccccaaagttaaccgtttcccccattttttttgggaaaaagaggggcccccaaaagggggagcccggatttaaaaacctaggccctggggcccttttttttttaaaaagcggg

SEQ ID NO: 54378 - DNA, 1029 bp, Homo Sapiens
ttggaagacgggtcttgcaacccctatgactgcagtgaatcccggaacaatcggttctccaccccagagcaggcagccaagaaccgcatccagcaccccagcaacgtgctgcacttcttcaacgccccgctggaggtgaccgaggagaacttctttgagatctgcgatgagctgggagtgaagcggccatcttctgtgaaagtattctcaggcaaaagtgagcgcagctcctctggactgctggagtgggaatccaagagcgatgccctggagactctgggcttcctgaaccattaccagatgaaaaacccaaatggtccatacccttacactctgaagttgtgtttctccactgctcagcacgcctcctaattaggtgcctaggaagagtcccatctgagcaggaagacatttctctttcctttatgccattttttgtttttgttatttgcaaaagatcttgtattcctttttttttttttttttttttaaatgctaggtttgtagaggcttacttaaccttaatggaaacgctggaaatctgcagggggagggagaggggaactgttatctcccaagattaaccttcacttttaaaaaatcattgtacatgtgatttttttttttcctgctcatacatttgtgctgcccatgtactcttggcacatttcaataaaattgtttgggacctccccccattgtcccccctcctcttcacctttttttcccttttttggggccggccgctctaaaggatccccccgagggggcccaaggctcacgcggtacccaggtttttctggtaaaaagggggccccctaaacgcgggccggcattttaaccttaaggacctggggccgcgtttttaacaccgtccgggccgtggaaaaacctgctacccttggggaactttggggaagggaaaccttaacttccgggggggggggacctaaattgggcacaaacctcccttacgaaaattttcaaagcccctcaccgcccaaccattaaaattttttaacaggggta

SEQ ID NO: 54379 - DNA, 837 bp, Homo Sapiens
gcagcagcacaacatgtcctggattgaggtgcagttcctgaagaaggcagttgatgtcctctgccagtgtcgtgccacactcatgtacacttatgtcttcgctttctacctcaaaaagaataaccagtccattatctttgagaataaccaagcagatctagagaatgccacagaggtgctctcgggctaccttgaacgagatatttcccaagattctctgcaggatataaagcagaaagtacaagacaagtacagatactgtgagagtcgacgaagggttttgttacagcatgtgcatgaaggctatgaaaaagatctgtgggagtacattgaggactgagaatggccctgcataaaatgaactctgaaaactttaccatctagagtgctcatgcaattaaaacaaaacaaacacaaacaaggaggcactaagcctattctgacaccactggtctgtagtaccagaattgttttgttaatggaaagtttaagtaaattatattgtaataaaaaggtagataaaccattgtacaacagtattctaggccgccaacaaaagtgtgacagacacactaaaagccctccaactttaacttgtaacgtagcttcattctcaaagctgactccttttttttctttttccttttcctgagtgtagtacagttaaaatttcaaacagctccttgacactgcttttcatgttcaaaccagccattttgttgtactttggtaaaggacctcttccccttcctcccctacacatacagatacacccacacccagactgggactctctttctctcataccccaagggtcatgaagtgaatgatgcctta

SEQ ID NO: 54380 - DNA, 620 bp, Homo Sapiens
gaggcgcaggcgcgctgctcgcccgtctgcagcctcctcccactacaaccgtgtgatgtatgccattaagaaaattgtttttttaattttctatattataaacataaaataagtaatgagcactttctactcaagcaataaaaagcccaaatatattaatcctgcattcagcaaagtggcataaaaatcaccaggtaagtatgcagcacattgcttatatcctgggtatgcattattttaaatgttgtatcattaaaaacctcagaatgatgaaaaatatgaatgatgcattgtttttgcaattgacctatgacaaactgtgaacctgcagatttcacctattttgatttactataagagctgggatttgattcattttatttatgcctaagtcatctatgcattaacatgtcatattcttaactttgatctaatgctttttactaggaaattttaatactgaaggactattttattatttttttctaaagatgtttgtcactagtttttcattattaaatgctgaggccaataccaagaagtttattttctatattatacaattatgaattacatgctcagctatatatgtaataaaatactttggtctgtggaaatat

SEQ ID NO: 54381 - DNA, 475 bp, Homo Sapiens
tgcatgctcaggacccatagatgaactattagacatgaaatctgaggaaggtgcttgcctgggaccagtggcagggaccccggaacctgaaggtgctgacaaagatgacctgctgctgttgagtgagatcttcaatgcttcctccttggaagagggcgagttcagcaaagagtgggccgctgtgtttggagacggccaagtgaaggagccagtgcccactatggccctgggagagccagaccccaaggcccagacaggctcaggtttccttccttcgcagcttttagaccaaaatatgaaagacttacaggcctcgctacaagaacctgctaaggctgcctcagacctgactgcctggttcagcctcttcgctgacctcgacccactctcaaatcctgatgctgttgggaaaaccgataaagaacacgaattgctcaatgcatgaatctgtacccttcgggagggcactcacatg

SEQ ID NO: 54382 - DNA, 782 bp, Homo Sapiens
ctttccacaagtagataaggccatgttgattgagagaatagttaggctgcaaaaagcacatgcccggaaaaatgaaaagatagaatttatggaggaccacatcaaacaactggtggaagaaattaggaaaaaaacaaaaataattcaaagttatattttacgagaagaatcaggcacactttcttcagaggcatctgattttaacaaagttcatttaagtagacggggtggcatcatggcatctttatatacatcccatccagctgacaatggattaacattggagctctctttggaaatcaaccgaaaattacaggctgttttggaggatacgttactaaaaaatattactttgaaggaaaatctacaaacacttggaacagaaatagaacgtcttattaaacaccagcatgaactagaacagaggacaaagaaaacctaaaacaagcctcttgctcagtaaagagacaaaagccacacaggagtaggtgccactgacctctattgttggagactttgttccactttttgtttcagccagtaaaaatattgtttgcttcatctgtacacaaaaaaatacccttttacaatatgaatgcattgctgtatatactgtaaggactgaaaggctctgatgaaatctgtttagtatggtgcaatattgacaagcctgtcattgaatctaaacaacttaatctggctgtattcataagaagtgttgaaccattacaagggcttcacataaaaaaccctttgttcatatttcttcccttaacaatatg

SEQ ID NO: 54383 - DNA, 580 bp, Homo Sapiens
  misc_feature (526)..(526): n is a, c, g, or t
cagaacagacatgagacctcctccaggaccctgcggggctgggtactgtgtacccccaggctggctagcccttccctccatcctgtaggattttgtagatgctggtaggggctggggctaccttgtttttaacatgagacttaattactaactccaaggggagggttcccctgctccaacaccccgttcctgagttaaaagtctatttatttacttccttgttggagaagggcaggagagtacctgggaatcattacgatccctagcagctcatcctgccctttgaataccctcactttccaggcctggctcagaatctaacctatttattgactgtcctgagggccttgaaaacaggccgaacctggagggcctggatttctttttgggctggaatgctgccctgagggtggggctggctcttactcaggaaactgctgtgcccaacccatggacaggctcagctggggccacatgctgacacagacttaattagagacccttagacactggaccagggcttctnttaggcttttttttgttcagatttccaaagctggttaaggtgggcattgattaa

SEQ ID NO: 54384 - DNA, 541 bp, Homo Sapiens
tcatcgggaacagcacggccatccaggagctgttcaagcgcatctccgagcagttcacggccatgttccggcgcaaggccttcctgcactggtacacgggcgagggcatggacgagatggagttcaccgaggccgagagcaacatgaacgacctggtgtccgagtaccagcagtaccaggacgccacggccgaggaagagggcgagatgtacgaagacgacgaggaggagtcggaggcccagggccccaagtgaagctgctcgcagctggagtgagaggcaggtggcggccggggccgaagccagcagtgtctaaacccccggagccatcttgctgccgacaccctgctttcccctcgccctagggctcccttgccgccctcctgcagtatttatggcctcgtcctccccacctaggccacgtgtgagctgctcctgtctctgtcttattgcagctccaggcctgacgttttacggttttgttttttactggtttgtgtttatattttcggggatacttaataaatctattgctgtcagat

SEQ ID NO: 54385 - DNA, 661 bp, Homo Sapiens
ctataagcatgacatacttttaggttactctgtacatttatcattctattaataaatgtacagagtaacctataagcatgacatacttttgctttcagtagtttcatgtaaagaaaaaaacttgaaaatagtaatacctgagtacccatgggaataatagacactggggaggtagggtggggagcgggagcaagagctgaaaaacttacctactggggactgtgctcactacctgggtgacaggatcatacgtaccccaaacctcaacatcacacagtatactcagctaacaaacctgcccatgtgtttcctgaatctaaaataaaaatcgaaataatttttttaaaaaagaaaaagacaatagtattacccatgggacaaaatttgtactattagcaagaatcattttgtgtctcatttagaaacaatttgacttttgttccagtgtttaaactttgacaaaaatggttttgaatagatctttataacctgatgccataaatacaagattctctgataccttcatttaatatatcaatattgggcctaaaacagtattctgtaaagcttaaattggtattaactatgatcatcttgatgtctatgatagataataaacaaggtcatacataccttactaaacaaaaaaaaaaaaaaaaaa

SEQ ID NO: 54386 - DNA, 1195 bp, Homo Sapiens
gcgctcagcgccttcactgccatccccgctgtccttgccgcccccgccatgggcctagagctgtttcttgacctggtgtcccagcccagccgcgccgtctacatcttcgccaagaagaatggcatccccttagagctgcgcaccgtggatttggtcaaagggcagcacaagagcaaggagttcttgcagatcaacagcctggggaaactgccgacgctcaaggatggtgatttcatcttgaccgaaagggcggctgctggcatatcacagagatgaggttctcaaaatgcaaagcagaaggtccagccaagagtcggtgcccaaggcaacaaagacaggaggactcggccatcctgatttacctgagctgtaagtaccagacgccggaccactggtatccatctgacctgcaggctcgtgcccgtgttcatgagtacctgggctggcatgccgactgcatccgtggcacctttggtatacccctgtgggtccaggtgttggggccactcattggggtccaggtgcccgaggagaaggtggaacgcaacaggactgccatggaccaggccctgcaatggctggaggacaagttcctgggggacaggcccttcctcgctggccagcaggtgacactggctgatctcatggccctggaggagctgatgcagccggtggctctcggctacgaactgtttgagggacggccacgactggcagcatggcgtggacgagtggaggctttcctgggtgctgagctatgccaggaggcccacagcatcatcttgagcatcctggaacaggcggccaagaaaaccctcccaacaccctcaccagaggcctatcaggctatgctgcttcgaatcgccaggatcccctgaagggtctgggatgggggccaggagattagcaacaaggattcattctgttacttacttgcccctttttatctttccctcttgccccagtcccttctctccagcttcatgtgaagctctgcacagacaagacactcagtgtccttggcagtgctgctactcctcaggtgcagcatacataaccagtaagagactaaatctgcaatatataaagagctcctacaaatcagtaacatgaagaacactcaaaaattggcaaatgtcatcagtgttttaaacagaataaagattccaaacactttgaatagaaaaaaaaaaaa

SEQ ID NO: 54387 - DNA, 722 bp, Homo Sapiens
  misc_feature (541)..(541): n is a, c, g, or t
  misc_feature (684)..(685): n is a, c, g, or t
  misc_feature (715)..(715): n is a, c, g, or t
gggatccaaattacgcttatgcctatactctattagggcatgagtttgtcttaactgaagaattggacaaagcattagcttgttttcgaaatgctatcagagtcaatcctagacattataatgcatggtatggtttaggaatgatttattacaagcaagaaaaattcagccttgcagaaatgcatttccaaaaagcgcttgatatcaaccctcaaagttcagttttactttgccacattggagtagttcaacatgcactgaaaaaatcagagaaggctttggataccctaaacaaagccattgtcattgatcccaagaaccctctatgcaaatttcacagagcctcagttttatttgcaaatgaaaaatataagtctgctttacaagaacttgaagaattgaaacaaattgttcccaaagaatccctcgtttacttcttaataggaaaggtttacaagaagttaggtcaaacgcacctcgccctgatgaatttctcttgggctatggatttagatcctaaaggagccaataaccagattanagaggcaattgataagcgttatcttccagatgatgaggagccaataacccaagaagaacagatcatgggaacagatgaatcccaggagagcagcatgacagatgcggatgacacacaacttcatgcagctgaaagtgatgaanntttaaacttctggaaatcagaacttttacnactggga

SEQ ID NO: 54388 - DNA, 632 bp, Homo Sapiens
  misc_feature (509)..(509): n is a, c, g, or t
ggcaccagtgcccaacacatacagccccaccatcatccccttctcattttataaacctcaaagtggattcactttctgatagttaacccccataaatgtgcacgtacctgtgtcttatctatattttaacctgggagactgttgtcctggcatggagatgaccatgatgctggggttacctcacagtccccaccctttcaaagttgacatatggccatcccattggccagaatccacagacacacctaagcctgtggcactgggacagaatagattttccatttgagaggcacttcctgtgtcagtcttgtttgaaggaggtggtgatggtggatagaggtgaaggaggtagggagtgccctccaagtgcaaaaataacaaatatgattattgaccatcggggaattctcacacattgatttgttttttaagcaattgccagaaacccccttttttagcttttgcttggggtgggggtaggagttaaggtttattcaatcctgtcctgngtagggcgaaagttaatctagccatgtgatttttcagaaaagtaagtggaacatgctgccacttttcaattctgtcagtgcttccacatggaaacaaaatgcaataaaatttttccaaaacct

SEQ ID NO: 54389 - DNA, 703 bp, Homo Sapiens
aacccatttgtgcattgagttttcttttaaaaatgcttgttgtgaaagacacagatacccagtatgcttaacgtgaaaagaaaatgtgttctgttttgtaaaggaactttcaagtattgttgtaaatacttggacagaggttgctgaactttaaaaaaaattaatttattattataatgacctaatttattaatctgaagattaaccatttttttgtcttagaatatcaaaaagaaaaagaaaaaggtgttctagctgtttgcatcaaaggaaaaaaagatttattatcaaggggcaatatttttatcttttccaaaataaatttgttaatgatacattacaaaaatagattgacatcagcctgattagtataaattttgttggtaattaatccattcctggcataaaaagtctttatcaaaaaaaattgtagatgcttgctttttgttttttcaatcatggccatattatgaaaatactaacaggatataggacaaggtgtaaatttttttattattattttaacagatatgatttatcctgagtgctgtatctattactcttttactttggttcctgttgtgctcttgtaaaaagaaaaatataaatttcctgaagaataaaatagatatatggcacttggagtgcatcatagttctacagtttgtttgttttcttcaaaaaagctgtaagagaattatct

SEQ ID NO: 54390 - DNA, 619 bp, Homo Sapiens
  misc_feature (414)..(414): n is a, c, g, or t
  misc_feature (432)..(432): n is a, c, g, or t
  misc_feature (434)..(434): n is a, c, g, or t
ttgtcggcagggctgtcagggcacatgcctggccggctggggtccccacccgcggagacggtcctagacccagtggggagtgctgtgtctcctgggtctgcccacccgtggccaagcaggaactccaggtgcagggcgggcctccaggtgcagggcgggccagaagccccctcatcggcccgcagctggctggcccagtgctcctggctgggggctcttgcgtggtgagagtaggggtccccccaggagccatgctggacccatgagcctcgctggggcctcctccccaggcagccaatgggccccagacaagcctttggtggggaacagaacctccgcatcgtgtagttttgtgacataaggagacctcctacttgagctgtctgtaccccagaatcaaacacagaacctcanaaccagatttaggacctnanaatcctgcactcaaggtggcaggacccaatttctgttttatatgttcatgaactttaaacctggaaacatgtccttactaggtgttttatcaaaaaaaagttttcatatttatctctatccctaaccccccaaaaataggatgtcttattattgaagatatttttaaagcaaaaaaaaaaaaaaa

SEQ ID NO: 54391 - DNA, 503 bp, Homo Sapiens
aaacacatgtatctttcattatttataagtggcctctcttagctcagttactcaattcatacgtagtattttttaaaataattttatatctgtgtaccaccccatatatttcatattactgtttcacatgtacagctttctacttctttgtaagaacaccaaccaaccaaggtttaagtgattaataggcttgagcaccgggtggcagatgttctatgcagtgtggttcaagtttctttgaccgcacttatatgcattgctaatatggaatttaagataccatacacagtctctcatggacctatctctattgtagaattatgacttatgtcttacttggcaaatttttctgaatgtgacctttttttgctgatttgctgggtttgggattaactagcattattttgccacctttatattgtatttataaaaaaaaagtactatcaatcaatcatactactttggattgttgtgctggtgtaatgtggattaacatcaataat

SEQ ID NO: 54392 - DNA, 1047 bp, Homo Sapiens
tgaacacacacaattaagttggatcctttcctgcatggtcagactacctcgattacaacatttacatcagtggaaggcaaagactaccaagcagaagcacgatggcacggtgggcctgctcacatacccagtactccaggcagccgacattctgttgtacaagtccacacacgttcctgttggggaggatcaagtccagcacatggaactagttcaggatctagcacaaggtttcaacaagaagtatggggagttctttccagtgcccgagtccattctcacatccatgaagaaggtaaaatccctacgtgatccttctgccaaaatgtcgaaatcagaccctgacaaactggccaccgtccgaataacagacagcccagaggagatagtgcagaaattccgcaaggctgtgacagacttcacctcggaggtcacctatgacccggctggccgcgctggcgtgtccaacatagtggcggtgcatgccgcggtgacggggctctccgtggaggaagtggtgcgccgcagcgcgggcatgaacactgctcgctacaagctggccgtggcagatgctgtgattgagaagtttgccccaattaagcgtgaaattgaaaaactgaagctggacaaggaccatttagagaaggttttacaaattggatcagcaaaagccaaagaattagcatacactgtgtgccaggaggtgaagaaattggtgggttttctataggaagtttcaacgaatcacagcaaggcttttgtgccttgcactccatgcattctgataacggcagctttcctaaaaagaaaaagttatagttttgggacatttaatttggtatagctgattattggctttatttgatgaatattgctttgtagctttgaaatacgacagtgttccaaatcccatcaacaawatgctgtgaacammacaacaaaaaataaatcargaggcatagctgtctgatccccawtwttggrggccctcctgggctgcagaatgtgrttgagkdagggkaattgggrawggggttcwttgtgytt

SEQ ID NO: 54393 - DNA, 646 bp, Homo Sapiens
ccttagctccacaaacaggagaacactgttggaaaagatgagacacttctgtctgtttaacagacagtccatatctgtgaggccagcaaatattttcttaaactcatggggagacagcagattcttgccttggtgaggtcattgctgtgccatatgtcctacccccctgtcttcatgcagggaagttggaaatgggggctacatatgccctctcctccccgtctacaagagttgtggttttccatctgatccttccactcttgtcaggggaagaagggggcctggtatctcaggcagattgttgaattcctgttctatcccttctctatcccaccctgccttgataatatgttagcccataccccaaataactgtctatattagacacccccagccagtttctggctgcctgtctttgctgccatgttttttacaagaaggaaagaattcttgctatttttttttcataatttactatttatgatgtatttaagtgttttattaaggacagagttctgttaggggtgggagggaatatttgagggagggctgggtcttagggaaaggaatggggaagcaacattttttattaaagtgttactatttgcctctactttgtattgttcagaaatggcaaatacaatat

SEQ ID NO: 54394 - DNA, 601 bp, Homo Sapiens
atgtgcaaagggcttgcaggtctgccggcttcttgcttgaggagtgcaaaagatatgaaacatcggctaggtttcctgctgcaaaaatctgattcctgtgaacacaattcttcccacaacaagaaggacaaagtggttatttgccagagagtgagccaagaggaagtcaagaaatgggctgaatcactggaaaacctgattagtcatgaatgtgggctggcagctttcaaagctttcttgaagtctgaatatagtgaggagaatattgacttctggatcagctgtgaagagtacaagaaaatcaaatcaccatctaaactaagtcccaaggccaaaaagatctataatgaattcatctcagtccaggcaaccaaagaggtgaacctggattcttgcaccagggaagagacaagccggaacatgctagagcctacaataacctgctttgatgaggcccagaagaagattttcaacctgatggagaaggattcctaccgccgcttcctcaagtctcgattctatcttgatttggtcaacccgtccagctgtggggcagaaaagcagaaaggagccaagagttcagcagactgtgcttccctgg

SEQ ID NO: 54395 - DNA, 656 bp, Homo Sapiens
agcaaacaggtgctaatttgttttggatatagtataagcagtgtctgtgttttgaaagaatagaacacagtttgtagtgccactgttgttttgggggggcttttttcttttcggaaatcttaaaccttaagatactaaggacgttgttttggttgtactttggaattcttagtcacaaaatatattttgtttacaaaaatttctgtaaaacaggttataacagtgtttaaagtctcagtttcttgcttggggaacttgtgtccctaatgtgtttagattgctagattgctaaggagctgatactttgacagtgtttttagacctgtgttactaaaaaaaagatgaatgtcctgaaaagggtgttgggagggtggttcaacaaagaaacaaagatgttatggtgtttagatttatggttgttaaaaatgtcatctcaagtcaagtcactggtctgtttgcatttgatacatttttgtactaactagcattgtaaaattatttcatgattagaaattacctgtggatatttgtataaaagtgggaaaaaaatttttttaaaaaagggttcatttgttcgtaaccacaacatttgtttattgtgaagcaaaactcttaaaattttaaatgaccacctggattattttttttaatcaaaa

SEQ ID NO: 54396 - DNA, 479 bp, Homo Sapiens
  misc_feature (466)..(466): n is a, c, g, or t
ccacgcgtccgcgccaagatgtcgttcccaaagtataagccgtcgagcctgcgcactctgcctgagaccctcgacccagccgaatacaacatatctccggaaacccggcgggcgcaagccgagcggttggccataagagcccagctgaaacgagagtacctgcttcagtacaacgatcccaaccgccgagggctcatcgaaaatcctgccttgcttcgttgggcctatgcaagaacaataaatgtctatcctaatttcagacccactcctaaaaactcactcatgggagctctgtgtggatttgggcccctcatcttcatttattatattatcaaaactgagagggataggaaagaaaaacttatccaggaaggaaaattggatcgaacatttcacctctcatattaagtctggcaatgatgactatatgtattcctgcctaaataaatcatctattaatcattanaaaaaaaaaaaaa

SEQ ID NO: 54397 - DNA, 664 bp, Homo Sapiens
ctgaaaaccaaactccagccgctgccagtcgggacttggtcgcccggcgctgccagaatgctccactgccagccggcccccctgcctcggtttcccttctgtttagtggcgacacaggcacccagctttggggtggtgctgacgctcccaggggtgccaggagccactgggacagggtgaggctcccagacgctcctcgaggtgcccagctctccagggagcttctggcccaaggccgtctgagggatctgctccttaaccccccagtgccttggcgagggcaggttccaagccacagacgcctgccccgagtggactctgcggccagtccctggtgccctcctggccctgctgcccagtgagggctcctacgggtgggttcattggcctgggcccagcgagcccccacctgcattgaccttaggcccatagagagggcctgtcccggtgctgccccagccaggatctggtcgctgccccagggggactgatgggcagagtcgcccctgtggctggactgtgaccatccctgatggggcctgaccgcgggagctgaggaagcgccgctccaccgtctgccctccaaggacccgcatggaggcagtgggctggcagcttcctgctgctccctgtcagagtcaaagcacaaatcctcaggacgggc

SEQ ID NO: 54398 - DNA, 664 bp, Homo Sapiens
atggaaaggttgaggtgtatacctttgtgattttctaatgagttttccatggtgctacaaataatccagactaccaggtctggtagatattaagctgggtactaagaaatgttatttgcatcctctcagttactcctgaatattctgatttcatacgtacccagggagcatgctgttttgtcaatcaatataaaatatttatgaggtctcccccacccccaggaggttatatgattgctcttctctttataataagagaaacaaattcttattgtgaatcttaacatgctttttagctgtggctatgatggattttattttttcctaggtcaagctgtgtaaaagtcatttatgttatttaaatgatgtactgtactgctgtttacatggacgttttgtgcgggtgctttgaagtgccttgcatcagggattaggagcaattaaattattttttcacgggactgtgtaaagcatgtaactaggtattgctttggtatataactattgtagctttacaagagattgttttatttgaatggggaaaataccctttaaattatgacggacatccactagagatgggtttgaggattttccaagcgtgtaataatgatgtttttcctaacatgacagatgagtagtaaatgttgatatatcctataca

SEQ ID NO: 54399 - DNA, 879 bp, Homo Sapiens
cagccctcatggagacttacccatttatgttaaaacagtgtttgcaaagggagcagcctctgaagacggacgtctgaaaaggggcgatcagatcattgctgtcaatgggcagagtctagaaggagtcacccatgaagaagctgttgccatccttaaacggacaaaaggcactgtcactttgatggttctctcttgaattggctgccagaattgaaccaacccaacccctagctcacctcctactgtaaagagaatgcactggtcctgacaatttttatgctgtgttcagccgggtcttcaaaactgtaggggggaaataacacttaagtttctttttctcatctagaaatgctttccttactgacaacctaacatcatttttcttttcttcttgcattttgtgaacttaaagagaaggaatatttgtgtaggtgaatctcgtttttatttgtggagatatctaatgttttgtagtcacatgggcaagaattattacatgctaagctggttagtataaagaaagataattctaaagctaaccaaagaaaatggcttcagtaaattaggatgaaaaatgaaaatataaaataaagaagaaaatctcggggagtttaaaaaaaatgcctcaatttggcaatctacctcctctccccaccccaaactaaaaaaagaaaaaaaggttttctaatgaaaatctttaaaaatactgtcagtattttaaaattttcaacagtattataaaaacattgcatctccccacctctaatatgcatatatatttttcctgctaaaattggtttctacaattgagtaaatggcaaatatatgaagcaatgtccctaaattttataaagaaattatatttaatgcacattttca

SEQ ID NO: 54400 - DNA, 547 bp, Homo Sapiens
ataaaccctatgactctaagcaataaggtaaagcattcaatttttccatttctttttgaaaacttgaaaggactcactgaagaaaatccatatgaatgtttaaaatgtggtaaggcctgcagttgttccagtggtatttgatggtataacataactcattctagagaaaaactttatgaaggtatcgaatgtgagaatgccttcatttatcctataactcactcagagacacatggtaacacatactccagattgaccttataaataaaagaatgcccaccagattgaaatcctagaaatacagaaaattctgaattttaacaattactttaaaggtcatgtgaaaactcccactggaaataaatcctgtaaatgtaaatattatggaaaaccttatggaaaataattatagtacaattctcaagaaaattcactatgtgaatgagatgttttaggagctataaataaattgaatatattggttgctcatttttgaagagagtctctagaatatagattttcacttcttttgaaaaaaaaaaaaaaa

SEQ ID NO: 54401 - DNA, 955 bp, Homo Sapiens
  misc_feature (664)..(664): n is a, c, g, or t
atattttacataggctgttttttttaagtttaaattctcactgttaagttgcattgagagacaattagaaatgttgtaattgtcatatctttacatgtggattatgaacaaatgaaagtttgctgtgtgattgcagttttaaattataacatttcataaatatgtcaattttagaaactcaaactctttcccatcttttgtatggataaagtttatggtttcatttctgagaatagagttggtctgctgtgctaacttcatgtttcttattccaaaggcttgattatatttttttctccagtgattaaaaatgcagcgaaaatccaatctacaagttcatatatggtatttctagacatagtctagttctaaaagaatgtacttggtgtgcatttttaagtgtttcatgtagacagattaatatattttgtacaacattgtatttctacatttatttcaagactgtacttttcagtgactttttcaagtgcatgtgttaacagaagattgtttggaacgagagtgcagtggcttctttactagcaaagagaagtgtaatacaagtgatcatagaaaggtgagaatgtgtttatactgtatttggaaacctaatgcctcttttctaaagcttgttacatttttttcggggaaaatggattaaacntattttctctcttaaagagacaaagaaaaccaaaaagacaaaaccaaacgaaacaattcagcagcaacaacaaacgaacattgatacacgagacgctacaaacacaaacacaagcaacaaacatagatagaataaaaaaagagggagagagaataaacaaagagagagccaaaacacaacgttaaatcggcccaaaaggattataagaagaggaaaataacaggaaaaagcagtaggagaactgtagtggtcaacacaagagaaaaataggatgccgcgagatctcgagca

SEQ ID NO: 54402 - DNA, 784 bp, Homo Sapiens
  misc_feature (762)..(762): n is a, c, g, or t
  misc_feature (764)..(764): n is a, c, g, or t
  misc_feature (773)..(774): n is a, c, g, or t
ggagactgaggagagcattggctgaagcccagttcctttcccatccatccccaactccaataatcccccactcctcgcaggtctcagtgtcatgctgtcttggggcagggtgaaagggtagtggcagcagggcgcccactctggagatcctcaaaaaaggccctcctctgtggctggcagcctctgacctttccctgggcttcaaaggaaggctatggagtttgctgtgggccctgcaaccttcccagccactcctgctgcactaaggacttaggatccttttatcacaaatcgggattctctcccccaccccgaattctgtctgcttaaactggaatacacaggagcccttcctggcctggatggtgtctcccagcttccccgcccagcttgcccaccccatagttggtgagatgccaagtttggtctgagttgtgaccccttcagagtagatgcccggcaggctggggttggcccctggagggtcaggggaccatcttcttattccctcttttctcattcctccaacttcctcccctccttcaattatttttttgtaaagttgatgccttactttttggataaatatttttgaagctggtatttctatttcttttggattttttttaatgtaaggttgttttgggggatggagttagaaccttaatgataatttctttcgtttggtgtaggttttagagatttgttttgtggagaggtttttttcttttgatgtaataaaatttaaaatggaacatgacnanccccaaatnnaaaccaaaaa

SEQ ID NO: 54403 - DNA, 471 bp, Homo Sapiens
gcacgaggccgcccgcgtttttttttttttttttacatacgagcagctaaagaggcttcaaatctaagaactgaattatatgtgagcccagccctgccagcctttctactcctttgcccttttcccgtgttctaatgtattttgacaatgttgtaagtgtttaccaagccgttggtctcctaagggcctcctgatggaagaacagtggggtggttcaaagttatttctatgtttgtgttaccatgttaacttttccccgagagaaagtgttaacattgagactctggccccagattggtatcttctatgaagatggatactgatgggtgacattgaaaacggcctgctttccaaatgtggttaaatgtaattggttagccccagacttgggctagagcagaaggcataggccagggtggttattgctatatgtgttacagacctcggttctcattaaagtatttattggca

SEQ ID NO: 54404 - DNA, 723 bp, Homo Sapiens
aggctacccaggctggtcagagactattacattttatgcagcaaaacccagatgtcctgcagcagatgatgtctgtcctcatgaacaccattgtctttgaagactgtcggaaccagtggtcagtatccaggcctctcctggggctcatcctgctcaatgagaagtatttcagtgaactgagagcaagtttgataaacagccagcccctccccaagcaggaggtccttgcccagtgcttcagaaacctaatggaaggagtggagcagaacctgtccgtcaagaacagagacaggttcacccaaaatctgtctgtattcagaagagatgtggcagaggcgttgcgcagtgatggcaacactgaaccatgcagtctcgacatgatgagctgacccgacttttctgaccatgtgcggagcagcctttatcaagagactcctgaaggtctgggtctcaggacagtgatgttggctagcccaggggaatgtatttttcaaaacatacaagcaacagcaaaagccctaacttcttatacgtctagcctaattataagaatttctaacagtaccagtgtaaattcagtcttttctctgaaaagcaaaggatgtgttttcagtctttctatcaaatattatctttgttctcctaatgctctgaaaggatgtagaaacaatatttaaccaaagaacgtaataaaccaggtttgcacctaaaaaaaaaaaaaaa

SEQ ID NO: 54405 - DNA, 554 bp, Homo Sapiens
cctcaccccccgcctcccctactgttctcatggtgttggcctcgtgtttgctatgccaactagtagaaccttctttcctaatccccttatcttcatggaaatggactgactttatgcctatgaagtccccaggagctacactgatactgagaaaaccaggctctttggggctagacagactggcagagagtgagatctccctctctgagaggagcagcagatgctcacagaccacactcagctcaggccccttggagcaggatggctcctctaagaatctcacaggacctcttagtctctgccctatacgccgccttcactccacagcctcacccctcccacccccatactggtactgctgtaatgagccaagtggcagctaaaagttgggggtgttctgcccagtcccgtcattctgggctagaaggcaggggaccttggcatgtggctggccacaccaagcaggaagcacaaactcccccaagctgactcatcctaactaacagtcacgccgtgggatgtctctgtccacattaaactaacagcattaatgc

SEQ ID NO: 54406 - DNA, 604 bp, Homo Sapiens
ccatctttcagaagtgaagagggggctagaaggactctgagaagttggtagaagaaaactcccacttgtgaatatttttgtgagacataaattcttttattacgatttacctctaatttattacacttagtaaattcttccagatttttctatttgtttgacacttccttaaagtaaggaatacacattgcttgcgagaactggttatgagacattggaatacttcttgctgctacatgtcatcttaattttggatggcatgggtttgtaaaacttattctgccccagccaaacttttttgaaaccttaaatagtctaccttaattcagcctagaagagtacattgatttactgatcttttttcatattcataatactaaatgttttagtttgttcaaatatatgcttaaaatcacgttatttaaaaaacacatcagctctgtctcaagaagtaattttgttgaaactccatgttaaaatatccatcttcaacagtagtgtcttcataataactagtcattttttcagtcataaacagatgcaaataaaaaggaaattacacttttaaaaaaaaaaaaaaaaaaaaaaaaaaggaggaaaggaa

SEQ ID NO: 54407 - DNA, 549 bp, Homo Sapiens
gccccgttgcgaagctgtacaagtggctccccccgtatatgacctgccccaggggcgccactcattgttatgatgggtacattcatctctcaggaggtgggctgtccaccaaaatgagcattcagggctgcgtggcccaaccttccagcttcttgttgaaccacaccagacaaatcgggatcttctctgcgcgtgagaagcgtgatgtgcagcctcctgcctctcagcatgagggaggtggggctgagggcctggagtctctcacttggggggtggggctggcactggccccagcgctgtggtggggagtggtttgcccttcctgctaactctattacccccacgattcttcaccgatgatgaccacccacactcaacctccctctgacctcataacctaatggccttggacaccagattcttacccattctgtccatgaatcatcttccccacacacaatcattcatatctactcacctaacagcaacactggggagagcctggagcatccggacttgccctatgggagaggggacgctggaggagtg

SEQ ID NO: 54408 - DNA, 793 bp, Homo Sapiens
  misc_feature (550)..(550): n is a, c, g, or t
  misc_feature (561)..(561): n is a, c, g, or t
ggtcgcaaaccatcctgactacaagcaagacagtgtcataactgatgaaatgaattatagccttattttgaagtgtaaccaaattgcaaatgaattatgtgaatgcccagagttacttggatcagcatttaggaaagtaaaatatagtggaagtaaaactgactcatccaactagacattctacagaaagaaaaatgcattattgacgaactggctacagtaccatgcctctcagccagcccgtgtgtataatatgaagaccaaatgatagaactgtactgttttctgggccagtgagccagaaattgattaaggctttctttggtaggtaaatctagagtttatacagtgtacatgtacatagtaaagtatttttgattaacaatgtattttaataacatatctaaagtcatcatgaactggcttgtacatttttaaattcttactctggagcaacctactgtctaagcagttttgtaaatgtactggtaattgtacaatacttgcattccagagttaaaatgtttactgtaaatttttgttcttttanagactacctgngacctgatttattgaaatttttctctttaaaaacattttctctcgttaattttcctttgtcatttcctttgttgtctacattaaatcacttgaatccattgaaagtgcttcaagggtaatcttgggtttctagcaccttatctatgatgtttcttttgcaaattggaataatcacttggggtcacctttgcccccaagctttccccctcctgaataaataccccacttgaat

SEQ ID NO: 54409 - DNA, 766 bp, Homo Sapiens
ccaagctctaatacgactcactatagggaaagctggtacgcctgcaggtaccggtccggaattcccgggtcgacccacgcgtccgggagatcgcgctcggccggtgctttgatggcacatccgatggctcctccagaatcatgaagagcaatgtgggagtagccctcaccttcaactgtgtagagaggcaagtaggccgccagagtgccttccagtacctccaaagcaccccagcccagtcccctgctgcaggcactgtccaaggaagagtgccctcgaggaggcagcagcgagcgagcaggggtggccagcgccagagtggagtggtggcctctctgagatttcctagagttgctcaacagcccctgatcaactaagttttgtggtacttcaccctcttctgccctcatttcatgtgacagccattgtgagactgatgcacaaactgtcacttggttaatttaagcacttctgttttcgtgaatttgcttgtttgtttcttcatgcctttacttactttgtcccatgctactgattggcacgtggcccccacaatggcacaataaagcccctttgtgaaactgttctttaaatgaaacacaagaaattggccactggtaaaactctgcagcttcaactgtacttcatttaatgccattaatgcaaatatacttcctcttctttttgcatggttttgcccacctctgcaatagtgataatctgatgctgaagatcaaataaccaatataaagcatatttcttggcc

SEQ ID NO: 54410 - DNA, 582 bp, Homo Sapiens
caatgcaattgacatgattcgagaagctaatagcattattattacaccaggctatggtctctgtgcagccaaagctcaataccccattgctgatttggtaaagatgctcactgagcaaggcaaaaaagtcaggtttggaattcacccagttgcaggccgaatgcctggtcagcttaatgtgctgctggctgaggctggtgtgccatatgacattgtgttggaaatggatgagatcaaccatgattttccagatactgatttggtccttgtaattggagctaatgacactgttaattcagcagctcaagaagatcccaactctattattgcaggcatgccagtccttgaggtctggaaatcaaagcaggtgattgttatgaagaggtctttgggtgttggctatgctgcagtggacaatccaatcttctacaaacctaacacggccatgcttctaggtgatgccaagaaaacatgtgacgcgctccaggcgaaagttagagaatcctatcagaagtaaatattaaggatcaagctgttagctaataatgccacctctgcagttttggaaacaggcaaataaag

SEQ ID NO: 54411 - DNA, 583 bp, Homo Sapiens
ctgttcactttactttcaggttaaaaatgtttctaacacgcttgcaacttcccttatggcattaatcttgttgagggagagagacagaatcctggactctccaaagtatttaactgaaagtagggcctgctctgacagggcccatgtcccacaaggctgcttggcctcagtgggtgcttggctgtgctggatgatatgttgatctgtattggataaggaccaatgacagcaaagcaaaaatggctttaaagcttggtgttacttttcttaagttgtttaattatagttaagcaatttcaaaaatgctccaaagaaatgtgaaaggaccttttgtcacagcacttcagaaaatacacaacagccccttctgcccccgcacagaaatgctgcagagtatataaaacttgagacatttttgtaggatgcctgacgaggtgtagccttttatcttgtttccggatgcatatttattacgagtactctggttaaatattgaaaagttatatgctgtagtttttagtattttgtctttgtaatttacagaagttattggagaaaataaacttgtttcattgtgcaggaa

SEQ ID NO: 54412 - DNA, 645 bp, Homo Sapiens
ccgattcagtcaaggcattatggtttttaatcttgaaacttagagaaccctttgaatatttgcttttactggtgtacagtatgagtggaatataaactgtacacataattatcatgttgatataaatcataatttcaactagatcaagacatgttaaccttttataaatttaaagtcaataaagcacctttttaaaggaaacactgcaactttccttaacagcctgttaataaaggctttgtgacaagctctcaaaaaatgcatttctaaataggaggacatcaatgtattgatgaagagaaaaaactagtacttagttgccacactcatgcttacatagaaagagagcccaagaatattagatttcctcatgatacaagatactacagtaacaggctttaatttaggatccttaagattttggggtattatttgtgactctcctgaaattgtaaacttgtgcttctgtgtccagttttctaatgagtaggttcgtagcttgattgaattaataattgtgagcccatagacacaagggaagtgagaaacagtgctctggtgacatgataaatatatgtgtcaaccaccatttcagctattaaaaactcctgttatctccttgtttgaatttcaggtcattaaatt

SEQ ID NO: 54413 - DNA, 638 bp, Homo Sapiens
acatgaaatctttggttcacagactatttacaatcttgcatttagaagagtctcagaaaaagagagagcaccatttactggagaaaattgaccacctgaaggaacagctgcagccccttgaacaggtgaaagctggaatagaagctcattcggaagccaaaaccagtggactcctgtgggctggattggcactgctgtccattcagggtggggcactggcctggctcacgtggtgggtgtactcctgggatatcatggagccagttacatacttcatcacatttgcaaattctatggtcttttttgcatactttatagtcactcgacaggattatacttactcagctgttaagagtaggcaatttcttcagttcttccacaagaaatcaaagcaacagcactttgatgtgcagcaatacaacaagttaaaagaagaccttgctaaggctaaagaatccctgaaacaggcgcgtcattctctctgtttgcaaatgcaagtagaagaactcaatgaaaagaattaatcttacagttttaaatgtcgtcagattttccattatgtattgattttgcaacttaggatgtttttgagtcccatggttcattttgattgtttaatctttgttattaaattcttg

SEQ ID NO: 54414 - DNA, 1097 bp, Homo Sapiens
gatgcttcatagggtcatttatcagcaaattatccagacctacctgactgtgtgtaaagatgttgttatggtaggccttggtgaccatcagtttcagatgcaactcttacagcggagtcttggaatcatgcaaacagtgaagggatttttttatgtttcattacttcttgacattctgaaagagataactggaagttccttgattcagaaaacagattcagatgaagaagttgcaatgctgttggacacagtccagaaagtatttcagaaaatgttggaatgtattgcacggagcttcaggaagcagccggaagaaggcctgcggctgctttattctgttcagaggcctcttcatgagttcattactgctgttcagtctcggcacacagacacccctgtgcaccggggtgtactttctactctgatcgctgggcctgtggttgagataagtcaccagctacggaaggtttctgacgtagaagagcttacccctccagagcatctttctgatcttccaccattttcaaggtgtttaataggaataataataaagtcttcgaatgtggtcaggtcatttttggatgaattaaaggcatgtgtggcttctaatgatattgaaggcattgtgtgcctcacggctgctgtgcatattatcctggttattaatgcaggtaaacataaaagctcaaaagtgagggaggttgcagccactgttcacagaaaactaaagacattcatggaaattactttggaagaggatagcattgaaagatttctctatgaatcatcatcaagaactctgggagaacttttgaattcataaccaagccaacatctccagacatgtaaaaatagggaaaagtgattcaaattgaaatgcctgtgtattttcctattgtttttaatgttaataaccatataatagggraagggtgggatttttttgtggggatgtgggaaggtgggggttatggaggrgatactcaaacttcttcattttgctagtgcygcgtaawtatatattaatataaaggctccagkataatggkgtagaawcatgattcmagaaaaammtttttagcaactggtkttttwaa

SEQ ID NO: 54415 - DNA, 877 bp, Homo Sapiens
aggcagaggtgatcatgaactaccatgtcggggagacggtgctgtccttgcagaagaccacgctgatccctggaggctcagaatcacttgtctataccaccttgtctggaggaattggcatccttgtgccattcacgtcccatgaggaccatgacttcttccagcatgtggaaatgcacctgcggtctgaacatccccctctctgtgggcgggaccacctcagctttcgctcctactacttccctgtgaagaatgtgattgatggagacctctgtgagcagttcaattccatggaacccaacaaacaaaagaacgtctctgaagaactggaccgaaccccacccgaagtgtccaagaaactcgaggatatccggacccgctacgccttctgagccctcctttcccggtggggcttgccagagactgtgtgttttgtttcccccaccaccatcactgccacctggcttctgccatgtggcaggagggtgactggataattaagactgcattatgaaagtcaacagctctttcccctcagctcttctcctggaatgactggcttcccctcaaattggcactgagatttgctacacttctccccacctggtacatgatacatgaccccaggttccagtgtagaacctgagtcccccattccccaaagccatccctgcattgatatgtcttgactctcctgtctacttttgcacacacccttaatttttaattggttttcttgtaaatacagttttgtacaatgttatctctgtgggaggaaggaggcaggctgtggtgggactgggtagggtatagtatcactcctgagttccactgctctagaatctaaccagaaatagaaacctagtttttaaggtga

SEQ ID NO: 54416 - DNA, 677 bp, Homo Sapiens
aggagatggaacccttaggtaggatccacactcagcccaatgagtccccgacagttatcaccccaggatgtcaccacccatgccaagatcatggctgacaacccatcttgggatggcgagaagaccattatcatcacatgcagcttcacgccaggctcctgtacactgacggcctacaagctgacccccagtggctacgaatggggccgccagaacacagacaagggcaacaaccccaagggctacctgccttcacactatgagagggtgcagatgctgctgtcggaccgtttccttggcttcttcatggtccctgcccagtcctcgtggaactacaacttcatgggtgttcggcatgaccccaacatgaaatatgagctacagctggcgaaccccaaagagttctaccacgaggtgcacaggccctctcacttcctcaactttgctctcctgcaggagggggaggtttactctgcggatcgggaggacctgtatgcctgaccgtttccctgcctcctgcttcagcctcccgaggccgaagcctcagcccctccagacaggccgctgacattcagcagtttggcctctttccctctgtctgtgcttgtgtagttgacctcctgatggcttgtcatcctgaataaaatataatactaaatttcgtataaataggaaag

SEQ ID NO: 54417 - DNA, 913 bp, Homo Sapiens
  misc_feature (730)..(730): n is a, c, g, or t
  misc_feature (899)..(899): n is a, c, g, or t
ctgtgccaccaaaacccaaagatcaaaggtccatcatcaaaacaccaaagactcaagacacagaagatgatgagggagctcagtggaattgtaccgcctgtacttttttgaaccatccagccttaattcgctgtgaacagtgtgagatgccaaggcatttctgagccaaatggccctgtatcttctctaaaaccacatctaaagttcaagaaactagtctgtcatcgggaaaaagtttcactgctacataggattttgtcaaattgaaggtgtgacaagatggtgttctgctaatgttaaatgtcagcccacagagctaataatacctcagtataatgtcatgagcagttgaaattcatcacatgaaaagtaatctgctgaaagacttggttgcccactgcctaactgtgtacagtgttaccagtgtcccattatggataattctcaatatgttaacacctaggtgttcccaatacctttttcccctcatgtcactactgaattttgacaggaggaaggaatagaatgatagcttgttttatttgtaaagctttcagtgaaacactacatacacgaagaaaaggaacaaggtttaactatttaagaaccatttgctgccgcatagtgccattggatagggaagaacttcagaaatctgtggtactcttggccttgtctttgtcttccctgaacgtgtctccactctgtgaagccagcatctaggggctanagatgcaaaggaaagcagcatgcattgtctgtacaaatgtgcagcgaaataccccaaagcttttcctactgtacagatctctcgagtctgcttttaagtgattcttttcttcttgaatattttcctatatttccatatggatagggtaatagcctttttgttaactaanttttcttttttcct

SEQ ID NO: 54418 - DNA, 661 bp, Homo Sapiens
  misc_feature (645)..(645): n is a, c, g, or t
ggaaacccgctggttcagaaccaacacctaagtcacgcattgcagaccttcctcctgccaaccctgatcacatcggtggatacagactcgccacagccacgtttgcaggcatcgaaaacaaatttggcctttatctcccgaaatttaagtctcctagtgttgctgtggttcagccaaaggcagcagtggcagccactcagtgatgagacaactgttgagtgtggcaaaatggcgccttgaagaaagaggcctaggagagcagccctgtaatgtatccagtcagctgcatggtactgactgagctgaggagtcaaactcttctttctgtatgacatatacatatacttgtttataaaataatcatttgcccagggaaaaaaccacaacgctgtttcaagctttagtcttatgtgttgaaatgtttttgtaagccttggcatgaattagtgttctagactctgctttgcacagcttgcacttacagtgattgtacatattgtacatctttgtacagagacatcttggcacctcatcccaacaaatcacatttgtagaaatgtaatgcggttctgagtggcttgaatgtacagatgttttgaagtgtttattagatcaccaaataatgtataaataattcatctctantggactatgaaatagc

SEQ ID NO: 54419 - DNA, 582 bp, Homo Sapiens
ttctgtagagagggagtcaggatgctgtcttcccacgaatagtactcagtaacaaaccaattgcattttagttgggcagtgctcccacccaccctccagatcccttccagctaaaacccttcccccttccctccatgtgtttctcagtttcccgtttcgtttgttggactgttccactgcccctcctcctcaccctatcacccatggatcgtaatgtaaaattcttttaccatgtcaagaaattattaaaaatacaggtactttgacctctttctaaagccgcagaccctggtgcaatgctctggtggctagggatgtactcatgctcatatgtgtgcacgcttggacacccacctccatggacacctagccaccctgttgtgtgtccttatgccagttgagctgaatcttttccccagtatagtggaaagactgaggcttctgcctactgagcaaggttgggtgcttcatttgtgttcagtctgaattatgggaaagttagctcttcccagacctaagctgccttctctccctactttcagaagatcctagttccttccttcccgagtgatacccatgaac

SEQ ID NO: 54420 - DNA, 871 bp, Homo Sapiens
gctgcagcagcacgaaggttttcctcctgccctgggcccagtcgagaagaggattaaaggacgcaccggctggccgcagcaagtctgggcgctggagttaaaccagtgagccgaggcccgcgccgaggacctggccaggccagccactcctgaagccccgggaggagaggaaggcagcggcgaacgccaggctctgggctccggcgactggtgctacgcatcccgcggagcttctgctgagcgccggcaggtcgtcggctgcaaccacacacttggatcgcacgtgcaatgtcctttgattttttttaatacattaagagaaagagaaatatatatatatccacccccagcccaaccgagggcggcccttggcggcaacatgcaagaaggagggactgtcgaacccaagggctcaaagacgcactcttccacccttttggagcgaatttagaacctcagccctatctccatttccctatctggctctttctctcttgtccctccatatgatccgccccgacgccgtcttctctaattaaaatgcaataaggaatcaattcttttctgcctgagaaagagaaccagacgcaggaagatgaaaggctgccctttgttcttcgaatcgtggtggttttattttatttttctttttgtcgctgcacttcctgtttagttccaagggaaacactttctctctttctctgtctctctcttttcttccttcttttccttcctttttgtttctatctaaataaaagctttccctgtgttggaaagtttttatgtatttaaactacctaccatgcctgttgtgctcaggtgtttgttcatcctgccatccccaacccttttctacctcaagtctgtgtga

SEQ ID NO: 54421 - DNA, 723 bp, Homo Sapiens
tgcagcagtgcgaggacaaaagatcatggagtggtcaaaatattcagatgagacatttggcatgtcttcctttattcactgatattttctacccatggtcttatatcaccgtatgaaatggaaacttacaggacttaaatatcagtgaaatattttgagatctttgaataattcctttagaggaattatacaaaattaatatatatgagtcctttgtaatttatttttttttgagacaggatctcacttttaccgcccaggctggagtgcagtgccatgatcacagctcactgcaggttcagccttctgagttcaagcaatccttctgtctcagtctcctcagtagctggggctttaggtgggcactgccacaccgtactaatttttgtattttttgtagagacgaggtcccaccatgttgcccaggctggtgtcaaactcctgggctcagtcagtccccccatctcaccctccccaagtgctggaattacaggcgtgagctactgtgcccagccttacggacatccttttgaattatctttttcactcatagaatatgaatacatttatttagactttttctagaactttcctgttttcatgtctttgcttcatctggaattggcttaacacccttttataaagttttgtgtttgtaaaatttccattgtgacatcaatacgcaatatatttttgtatataggagtttctatttttttcttt

SEQ ID NO: 54422 - DNA, 655 bp, Homo Sapiens
  misc_feature (623)..(626): n is a, c, g, or t
  misc_feature (633)..(634): n is a, c, g, or t
  misc_feature (644)..(644): n is a, c, g, or t
gaaatacaaattttgtcatgtttctcaagcagtttttctgagtagtttctgaggaggaacaaattacaagtgtacccaataactgaaaatgttttaactcactctcatttgtaagcagtccacatagtagacaatgggttttccaagctgggcaaggtacatttaatcagtaaatcagtttcacatcatgtattgtgatgtttcaatgtgagacacaaaaacaatggcttgaaacttgtgtatcatatgtgattttgaaatgaacaccttgaatagcactaatttttatttgtggtatttttctataacaaaacaagtagctctaggaaaagaggttttattttgtaaacgatcatttgtgacctcagacactctctggctaatattttaataagctcacagcagataattctgagatcatgggtgaggggtggtgcatgttgagatttaaattggcataaagctgcatactttttgtctagctgtttgatttcattttttaatatagtatgccaattttgtgactgttaccatgtgaaagtcctgttgaaatgaacaattgtctgccccacaatcaagaatgtatgtgtaaagtgtgaataaatctcatatcaaatgcccannnnacacaannaaaaaaaaanaaaacccttgt

SEQ ID NO: 54423 - DNA, 595 bp, Homo Sapiens
  misc_feature (50)..(50): n is a, c, g, or t
  misc_feature (571)..(578): n is a, c, g, or t
  misc_feature (581)..(584): n is a, c, g, or t
  misc_feature (586)..(586): n is a, c, g, or t
  misc_feature (591)..(591): n is a, c, g, or t
ggtccggaattcctcgggatcaaaattattctctgagagggaaaggacantttgagggaaacatcaaatttccccataaataaatgaatggagtttgcaggaaggtgagggtgagcagagatgtgtgtggacatctctgaccatccatcgctgtattcaaatggattgttctattccattctggtctcaggcatgaccacgtccagtgaagacatttgaggcagcacatctcaggacccaggcaatagactggccccaactcaggctggactaaggtgtgattaattctttgttttttgtgtggaacagctcaccttgtcagacagcctcagggcatctctgagacacaggggcagaaaatgacattcatcttttgagtcctcatccatggagtgctgtgtttggggggctgcatctgctgaagcgagaaccccattctgccaccccaccaggatgcccattctccaggacttctccaacttactattagactaaaccagaacaagcaacaaactgtatttatgcaagcaaaattgatgagaaaattatattcaaataaagcaaaaattannnnnnnnaannnnanaaaanaaag

SEQ ID NO: 54424 - DNA, 650 bp, Homo Sapiens
ccggtcttagttataattagattgtgaatcagccaactgattatcctttttgcatatttcaatgtcctaaaaagacacggttgctctatatatgaagtgaaaaaaggatatggtagcattttatagtactagttttgctttaaaatgctatgtaaatatacaaaaaaactagaaagaaatatatataaccttgttattgtatttgggggagggatactgggataatttttattttctttgaatctttctgtgtcttcacatttttctacagtgaatataatcaaatagtaaagttgttgtaaaaataaaagtggatttagaaagatccagttcttgaaaacactgtttctggtaatgaagcagaatttaagttggtaatattaaggtgaatgtcatttaagggagttacatctttattctgctaaagaagaggatcattgatttctgtacagtcagaacagtacttgggtttgcaacagctttctgagaaaagctaggtgtttaatagtttaactgaaagtttaactatttaaaagactaaatgcacattttatggtatctgatattttaaaaagtaatgtttgattctcctttttatgagttaaattattttatacgagttggtaatttttgctttttaataaagtgga

SEQ ID NO: 54425 - DNA, 747 bp, Homo Sapiens
  misc_feature (675)..(675): n is a, c, g, or t
atctgcagtaggtccagtaaattgctctgctacctgctgtatttattatatggaagcatctaagtactgtcaggatggggtcttcctcattgtagggcgttaggatgttgctttctttttccattagttaaacatttttttctcctttggaggaagggaatgaaacatttatggcctcaagatactatacatttaaagcaccccaatgtctctcttttttttttttacttccctttcttcttccttatataacatgaagaacattgtattaatctgatttttaaagatctttttgtatgttacgtgttaagggcttgtttggtatcccactgaaatgttctgtgttgcagaccagagtctgtttatgtcagggggatggggccattgcatccttagccattgtcacaaaatatgtggagtagtaacttaatatgtaaagttgtaacatacatacatttaaaatggaaatgcagaaagctgtgaaatgtcttgtgtcttatgttctctgtatttatgcagctgatttgtctgtctgtaactgaagtgtgggtccaaggactcctaactactttgcatctgtaatccacaaagattctgggcagctgccacctcagtctcttctctgtattatcatagtctggtttaaataaactatatagtaaccttgaaaaatanacaatataacaaaaactcttaatgataacaaccgtccaaatatatatagcaaaattcttatactataatcaa

SEQ ID NO: 54426 - DNA, 965 bp, Homo Sapiens
  misc_feature (908)..(909): n is a, c, g, or t
tatgtcactgtcatgccaaccgcacgggcagagcatgcgaatgcagtggggacatggacagttgcatcagtcccgagggagggctctgcagtgggcatggacgctgcaaatgcaaccgctgccagtgcttggacggctactatggtgctctatgcgaccaatgcccaggctgcaagacaccatgcgagagacaccgggactgtgcagagtgtggggccttcaggactggcccactggccaccaactgcagtacagcttgtgcccataccaatgtgaccctggccttggcccctatcttggatgatggctggtgcaaagagcggaccctggacaaccagctgttcttcttcttggtggaggatgacgccagaggcacggtcgtgctcagagtgagaccccaagaaaagggagcagaccacacgcaggccattgtgctgggctgcgtagggggcatcgtggcagtggggctggggctggtcctggcttaccggctctcggtggaaatctatgaccgccgggaatacagtcgctttgagaaggagcagcaacaactcaactggaagcaggacagtaatcctctctacaaaagtgccatcacgaccaccatcaatcctcgctttcaagaagcagacagtcccactctctggaggagggagggacacttacccaaggctctttctccttggagacaatgggaactggagggtgagaggaaaggtgggtctgtaagaccttggtaggggactaattcactggcggagttcggccaccaccctacttcatttttaaagggacacccaagaggggctgctttccattgcctggaacccttgaattccatctggggcctacccccaacccaaagaaaaacaaataaaagcccttaaccccccgggagaaaagaaagnnagaggaaaaaaacctcccgagggccattctaattgttccgcggtgggcgggaaaaa

SEQ ID NO: 54427 - DNA, 1030 bp, Homo Sapiens
gcctccccacacagtgggggaagagccactccatccccaaattcaagattagaaagatccctgactgcttctcaagatccagaacattccttgacagagtatattcaccatttagaagtgatccagcaaagattgggaggggtactaccagattctacttcaaagaaatcctgccacccgatgattaaacagtgaataaaatgtcatggctctttcctgcgacaattctatttgaggaaaagatttgtttttcccttttcccaaggaagctcgtgggacagcatgggcactactcttcatgtgcggtgacaccagcccccagatgccttgaattaagtgtcctcacctttatgcatgactgcaaagccagctggagcattttctatggagcctccgtatgttttaggcccatgaccttcgtgaggtgacgggcactcactcccatgagccctggctgtgtgctgttgtgtgcctatcggcagatccatccttcctggcctccagggaggataccccgaagaatgggcttcccggtgggttttgtttatttttcctaaccgggtacagaatgggaaactttcctttacgcattgaagcacccaacctacctcccgatgggggaaggttcgcgcttggccgcctcgcccggcgtctccgggtgttggcccggacactcccgccagatcaactacaggtcgacaccgatgtgccaacaaccacaggattgagggggtacgcgccccgtacgtttcggcccccccgttctatcagcgctgttgtgacgggcgcggtggctcctcgtgggggggggcggccctcctatagacaattgtccctctccgcgggggggacaccacgccccaccctatgaggccccgccccttctgcgcgtatagcagtggcccgcccccaccgccgcgggttcacccatatcccacgccattggggtgggggcgcgcgcgcacccctcaaacacaccacttgcccgcacgagtacaccgcaccccttctccagcgacgtcccttggcg

SEQ ID NO: 54428 - DNA, 666 bp, Homo Sapiens
aagccagcctggcgcccctgcagattccagcagggtccctctgagtggggccaggcccaggactgtcacacaaggcttgagaagccccctctccctggtcctctcctacccacccatgtcctctcagaaccccagccttgaaaatagtggggggcactcagaggggccacctcctcagccgtgggtggtgggcccatggcagagaagcctgaactctttactgggttaccaggttcatacattgctgaggacctgacaggacaacctaggggcagggctggggtgggggccgcagagggcagccagggctggggaacactgtgaaagttacttggggagggtgggccggtggggccgtagctctctacctctccctgctcctggtgcctgcctctctcctccaccccaggcttagaggacagaaaaatgtgaagagacgccccacccaccctcagccagccctctccagtctcctttcctaggcttttttgggggcctaacccacgcagtgaccccagagggcagggctaggcgagagcctggggtggggcgggagggggaacagtatggaaaagactgaaggggaacggacgggaagggacgggagggtctgttctatctgttgctgtaaataaagatatttgtccatctcaacaaacaaaaaag

SEQ ID NO: 54429 - DNA, 553 bp, Homo Sapiens
cctgcctctgccctctgggacatcatgcgttgctgggagaaggaatgtccggtgaaacgggagcgactatcagagactagcccagcgttccgcattctcagtgtggagcccaggctgcaggccaacttcaccatccgggaagatgccaaccccagctcccgacagcgaggactcaagcgcttccaggctaacccggaggccaactggggtccccggcctcgtgcccggccagggggcaaggcggccgacgaagctatggaggagagacgcaggctgcttcagaacaagcggaaggagccgccggaagatgtggcccagcgggctgcccggctcaagacatttccttgcaagaggtttaaggagggcacctgtcaacgcggggaccagtgctgctactcccacagccccccgacacccagggtttctgctgatgctgcccctgactgtccagagacctccaaccagaccccccctggacctggggctgccgctgggccaggcatagactgaaccaataaagagatgtcacgtcaccttcaaaaaaaaaaaaaaa

SEQ ID NO: 54430 - DNA, 639 bp, Homo Sapiens
ccacgcgtccgcccacgcgtccggattcctcttggcagtcttaggcccggccacttctgctacctttgcgctgctgtgagcctcaccctgggcccctgggccctgcttctctgctcccctgggtgatgggtgggcccagaaggtggcagtcccacaccttgtcctcccacctccctgaactgtccattgcttttatagggtgaggtaagagacagcctcccaagcccaggctttggcactcagaatgggcccagtgggggctgggcaggcccattgagggccaccgccgaggtttctcctagggctgttcctgggcctggctcttacaggctcgtcccccaggcctgcccttctccactgccccctcctgtgtctgggtccacacacccttcaggaagggggagcactgagaagcacagcacaggggctcagcctgggatccggtgatggtctgggcagaggctgggtcaggagtcccaaaggtcagtgacagtttctcagaagaggcccagcgtccacctctctcccagggccagacaccccttcctggctcccccatccccctatgggctcccagccccttgcaccctcattgctgttcagattaaagcctctgttttgcacctgtcaaaaaaaaaa

SEQ ID NO: 54431 - DNA, 717 bp, Homo Sapiens
tatgaaacaacccagccagcctccacctcaggtaaatatttgttcccacaaccaaggagccatgccactcaaaggttccacaacctgaaaacacaaagattccagagccaggctgtaccaaggtccctgagccaggctttaccaaggtccctgagccaggttgtaccaaggtccctgagccaggatgtaccaaggtccctgagccaggttgtaccaaggtccctgagccaggctacaccaaggtccctgagccaggcagcatcaaggtccctgaccaaggcttcatcaagtttcctgagccaggtgccatcaaagttcctgagcaaggatacaccaaagttcctgtgccaggctacacaaaggtaccagagccatgtccttcaacggtcactccaggcccagctcagcagaagaccaagcagaagtaatttggtgcacagacaagcccttgagaagccaaccaccagatgctggacaccctcttcccatctgtttctgtgtcttaattgtctgtagaccttgtaatcagtacattctcaccccaagccatagtctctctcttattggtatcctaaaaatacgtactataaagcttttgttcacacacactctgaagaatcctgtaagcccctgaattaagcagaaagcttcatggctttctggtctcggctgctcgggtcatctgagattcgatgaaagaatgctgttcctgcaatg

SEQ ID NO: 54432 - DNA, 628 bp, Homo Sapiens
  misc_feature (574)..(574): n is a, c, g, or t
  misc_feature (595)..(623): n is a, c, g, or t
ggggaacctggaggccttggccttggatttgatggagccggaacaagcagtggacctgacattgcccaaggttgaagcaatgaataaaagactgggctccttggtggatgagtttaaggagcttgtttacccaccagattacaatcctgaagggaaagttaccaagagaaaacacgataatgaaggttctggaagcaaaaggcccaaggtggagtattcagaagaggagctgaagacccacatcagcaagggtacgctgggcaagttcactgtgcccatgctgaaagaggcctgccgggcttacgggctgaagagtgggctgaagaagcaggagctgctggaagccctcaccaagcacttccaggactgaccagaggccgcgcgtccagctgcccttccgcagtgtggccaggctgcctggccttgtcctcagccagttaaaatgtgtttctcctgagctaggaagagtctacccgacataagtcgagggactttatgtttttgaggctttctgttgccatggtgatggtgtagccctcccactttgctgttccttactttactgcctgaatanagagccctaagtttgtacccnnnnnnnnnnnnnnnnnnnnnnnnnnnnncgtgt

SEQ ID NO: 54433 - DNA, 909 bp, Homo Sapiens
gaaaataaatgactttaggaagaggtatacattttttaagtcgctctgcctccaaatctgaacagtcactgtaaatcattcttaagcccagatatgagaacttctgctggaaagtgggaccctctgagtgggtggtcagaaaatacccatgctgatgaaatgacctatgcccaaagaacaaatacttaacgtgggagtggaaccacatgagcctgctcagctctgcataagtaattcaagaaatgggaggcttcaccttaacaacagtgtgcaaatggcagctagaggttttgataggaagtatgtttgtttcttagtgtttacaaatattaagtactcttgatacaaaatatacttttaaacttcataacctttttataaaagttgttgcagcaaaataatagcctcggttctatgcatatatggattagctataaaaaatgtcaataagattgtacaaggaaaattagagaaagtcacatttagggtttatttttttacacttggccagtaaaatagggtaaatcctattagaattttttaaagaactttttttaagtttcctaaatctgtgtgtgtattgtgaagtggtataagaaatgactttgaaccactttggcaaattggtagaattcccccaaacaaataaaaattggacagattagcccaaaaaaagacacaatcacaacaaacaaaacaaaaactattgttggcggcactgtgcgccccaaagaaactctgtaaaacacctagcggttaggcacagcggccccataggaaagcgaacatgtgcaaacatgtccccagaaaaacccggaacaaaaaaacggcgcggaaacgcacccaaaaaacacgcccggggaaccgcggttttggacaaaccagagacatcacaacaaaaagagcaca

SEQ ID NO: 54434 - DNA, 661 bp, Homo Sapiens
  misc_feature (573)..(574): n is a, c, g, or t
  misc_feature (579)..(579): n is a, c, g, or t
  misc_feature (609)..(609): n is a, c, g, or t
  misc_feature (656)..(656): n is a, c, g, or t
tggactttggcctctccatcctgtggtttctgatcttcactccctgtgccttcctttgttggtaccgacccatctataaggcctttaggtccgacaactctttcagcttctttgtgttcttctttgtatttttttgtcaaatagggatctacatcatccagttggttggcatccctggcctgggggacagcggttggattgcagccctgtctacactggataatcattccctggccatatcagtcatcatgatggtggtggctggcttcttcaccctctgtgccgtgctctcagtcttcctcctgcagcgggtgcactccctctaccgacggacaggggccagcttccagcaggcccaggaggagttttcccagggcatcttcagcagcagaaccttccacagagctgcttcatctgctgcccaaggagccttccaggggaattagtcctcctctcttctctccccctcagcctttctctcgcctgccttctgagctgcactttccgtgggtgccttatgtggtggtggttgtgcccagcacagacctgggcaggttcttgccgtggctcttnnctctncctcagcgaccagctcttccttgaacgggnaggacaaggaaatttttccccctctatgtacaaaaacgctctctttncttcc

SEQ ID NO: 54435 - DNA, 566 bp, Homo Sapiens
agagggcaagtgttcccaaattgacgccaccataataatcatcaccacaccgggagcagatctgaaaggcacactttgatttttttaaggataagaaccacagaacactgggtagtagctaatgaaattgagaagggaaatcttagcatgcctccaaaaattcacatccaatgcatagtttgttcaaatttaaggttactcaggcattgatcttttcagtgttttttcactttagctatgtggattagctagaatgcacaccaaaaaaatacttgagctgtatatatatatgtgtgtgtgtgtgtgtgtgtgtgtgtgtgcatgtatgtgcacatgtgtctgtgtggtatatttgtgtatgtgtatttgtatgtactgttattgaaaatatatttaatacctttggaaaaatcttgggcaagatgacctactagttttccttgaaaaaaagttgctttgttattaatattgcgcttaaattatttttatacaccattgttccttacctttacataattgcaatatttcccccttactacttcttggaaaaaaattacaaaatgaag

SEQ ID NO: 54436 - DNA, 756 bp, Homo Sapiens
gacggtcactgtccagcctggagggaggcatggtggccaagggacaccctttgttgcccatggccattcacccccaggcctggtgcttctccccacacccctgtaggcctcaagtgactcttccccctcctgctccggccccgcccctgctgagccaaacccagtaggaggctgggcctgggtttgtgccgctggggtctccatcaccgggacctggagagggaggggctgtgtagccttggaagaacttgggtcatggggaggaagcacagctgttggggaagggccaggacctcaggcccagccccaaccccagctggggtggggtcttccccacctgtctcttatgccttatgggaaggcccagccataactcgggggccatgctggagctggggaccagcttaggcctcctccataggaacccagtgactggggggtgacgcctacacccccagctatttgcactctggtgtgtggtttgactctgcttttcttccggattggccctgtggtcacagcctcagggggccaggctgggggaacctcacctggcccgtactcctgggggtttccctttgccattgggccccctgagggactgtgggggctcaagggtaatgccagaggcccatggccccagcgaggggctgtggggcacctagagttctcggtgtgtctccttcattcattggcctctgctggggcctcctatgggtgtcttacgtctgtccatccatctgtccgtggtcagaa

SEQ ID NO: 54437 - DNA, 592 bp, Homo Sapiens
  misc_feature (570)..(570): n is a, c, g, or t
aggacatgaacaagctatcctttcatcgaggacagcaaacattatggtacatttggcttggaattatgtctttctcttttaatttgattgagtggaaatctgagtgaatacaaatataaatgaacaacataaaaacttttgttttgacatgtcaaattgaaacttgataaagtgcgtacttgctaagatattcctgtggctcatgcgttacaacacgaggacttaagccagtaatcgtttttgttcagatagaggtgtggaggtagagccagcccctcatgtctgttttggatgttttgtgtctctccagctacattgtaagttccttgagggcagggccatggcccattgctctgtgaatctcaaatgcccataaaaggtgcccataaaatgttttcttgaacatttgaatgtgctgttgtctggaaaggggtaatattgtgagctgaatcagcaataagtattagtctttttggactatggtattgttaaaaagactgcagccctctcagacttgagcgttaattggcttatttatttatggctttaaataaaatcgatttaacgttnaaaaaaaaaaaaaaaaacgcgg

SEQ ID NO: 54438 - DNA, 622 bp, Homo Sapiens
aagaggctgaggcacgagaatcacttgaacccgggagggagaggttgcagtgagccaagatcgtaccactgcactccagcctgggtgacagagtgagactccgtctccaaaaaaaaactttgcttgtatattatttttgccttacagtggatcattctagtaggaaaggacaataagattttttatcaaaatgtgtcatgccagtaagagatgttatattcttttctcatttcttccccacccaaaaataagctaccatatagcttataagtctcaaatttttgccttttactaaaatgtgattgtttctgttcattgtgtatgcttcatcacctatattaggcaaattccattttttcccttgtgctaaggtaaagatttaattaaataattttggcctctcatagttttctctctctttaaagagaataaatagagggccaggtgtggtggctcacgcctgtgatcccagcactttgggaggccaagaggggcggatcatgaggtcaagagatcaagatcatcctggccaacatggtgaaaccctgtctctactaaaaatacaaaaatgagctgggcatggtggggcgtgcctgtagtcccatgtacttgggaggctgag

SEQ ID NO: 54439 - DNA, 770 bp, Homo Sapiens
cctggagcaccgaggattcaagctgaacatctgggatgtgggtggccagaagtccctgcggtcctactggcggaactactttgagagcaccgatggcctcatctgggtagtggacagcgcagaccgccagcgcatgcaggactgccagcgggagctccagagcctgctggtggaggagcgcctggccggagcaaccctcctcatctttgctaataagcaggacctgcctggagcactgtcctctaacgccatccgcgaggccctggagctggactccatccgcagccaccactggtgcatccagggctgcagcgccgtcaccggggagaacctgctgccgggcatcgactggctcctggatgacatttccagccgcattttcacagctgactgaaccactccagatgccccccacctagcagtccaggtccctcaaccttcaccaaacactacccatggggggttgggagtcagccggccaaactaacactccccctcctccaccccagcctgctgctgctactgctgcccgctgctgctctgtggccacccggctcccatggcgggagggctgtgccctggctgtctctctggctcctgacctggcctttggctaccataccaagaagagagggctgggcggggaggagctgctactgctgctaccgaggctgtgggcctcatccttcactcagttgtgaaataaaccgctccttgccccgaaaaaaaaagcacaaccacaaaccactctctacaacaacaccaacaag

SEQ ID NO: 54440 - DNA, 583 bp, Homo Sapiens
ttattgtttttaattaatatttttgttttaattgatagcaaaatagtttatgggtttggaaacttgcatgaaaatattttagccccctcagatgttcctgcagtgctgaaattcatcctacagaagtaaccgcaaaactctagagggggagttgagcaggcgccagggctgtcatcaacatggatatgacatttcacaacagtgactagttgaatcccttgtaacgtagtagttgtctgctctttgtccatgtgttaatgaggactgcaaagtcccttctgttgtgattcctaggacttttcctcaagaggaaatctggatttccacctaccgcttacctgaaatgcaggatcacctacttactgtattctacattattatatgacatagtataatgagacaatatcaaaagtaaacatgtaatgacaatacatactaacattcttgtaggagtggttagagaagctgatgcctcatttctacattctgtcattagctattatcatctaacgtttcagtgtatccttacagaaataaagcagcatatgaataaaaaaaaaaaaaaaaaggccacatgtgctcg

SEQ ID NO: 54441 - DNA, 1036 bp, Homo Sapiens
acacacctcacttattgtacatgttggaaccaggacatgagagacatagaaaaacagaagtcatgaatgtaaattgaatgagaggcttaacatgcatgaaaatacagatggacctgcaggaaagtgagccaacatcgctgagtttgttttcttgttcgggagaatggggccggggctggcctggcctcccctggatatactctatagtgcaccaaaaggataaagcatctgtacatgtatttttttattttttatcagaagtgcttagacaagaacagaataagcaggctgtttggatgctacttgtggttgaattgtgttcccccaaaatatatggtgaagtcttaacccccatccccgtgaatgggaccttgtttggaaatagggtctttgcagatatagtcaagatgaggtcacattggattagggtgggccccaaatccaatgactggcatccttaggagaagagagagttttggtaatagacacaaatgcagtgggaagaagaccaggggacaagaggcaagttggagtgatgcagccggaagggaagggacaccaaggatctccggccaccagcagaagccagcagagaggcatgggacaggttccccacaagccttagaaggaagcatggccctgacttcagaattccagactccagaactggaagaataaatgtctgttgttttaagctgcttagttcatgctgagttcatgctgacttgttactatagccccagaaagctaatacagtcgtttatgtwattacataacctgacacacaagatcgacccattcactgctgcccagtccaccaattttcataatgaagtagaaatgggaggtaagaaaaacattccagccagttctgtttagccctggcacamatatttgtcccgtcaggaatcttatgccctcctggaaccccggccacctmagtcmaktccagtaaggcgamcggctytggaaagggatdaggtggyctaacaatggagawmattttyttggagrtggarwtgghartaccctgccc

SEQ ID NO: 54442 - DNA, 586 bp, Homo Sapiens
  misc_feature (540)..(540): n is a, c, g, or t
  misc_feature (577)..(577): n is a, c, g, or t
  misc_feature (580)..(581): n is a, c, g, or t
agagagaatgtatttgctggcaaccattaaagtcagaagttttactccaggttattgcaataaagtataatgtttattaaatgcttcatttgtatgtcaaagctttgactctataagcaaattgcttttttccaaaacaaaaagatgtctcaggtttgttttgtgaattttctaaaagctttcatgtcccagaacttagcctttacctgtgaagtgttactacagccttaatattttcctagtagatctatattagatcaaatagttgcatagcagtatatgttaatttgtgtgtttttagctgtgacacaactgtgtgattaaaaggtatactttagtagacatttataactcaaggataccttcttatttaatcttttcttatttttgtactttatcatgaatgcttttagtgtgtgcataatagctacagtgcatagttgtagacaaagtacattctggggaaacaacatttatatgtagcctttactgtttgatataccaaattaaaaaaaaattgtatctcattacttatactgngacaccattaccaaaataataaaaatcactttcattngannaaaaa

SEQ ID NO: 54443 - DNA, 606 bp, Homo Sapiens
tttttttttttccattaaattcagctgatcatattgatcagtagataaacgtaaatagcttcaaattttaaaagtggaattgcagtgttttttcactgtatcaaacaatgtcagtgctttatttaataattctcttctgtatcatggcatttgtctacttgcttattacattgtcaattatgcatttgtaattttacatgtaatatgcattatttgccagttttattatataggctatggacctcatgtgcatatagaaagacagaaatctagctctaccacaagttgcacaaatgttatctaagcattaagtaattgtagaacataggactgctaatctcagttcgctctgtgatgtcaagtgcagaatgtacaattaactggtgatttcctcatacttttgatactacttgtacctgtatgtcttttagaaagacattggtggagtctgtatcccttttgtatttttaatacaataattgtacatattggttatatttttgttgaagatggtagaaatgtactatgtttatgcttctacatccagtttgtacaagctggaaaataaataaatataacataaaaaaaaaaaaaaaacctcgtgcc

SEQ ID NO: 54444 - DNA, 937 bp, Homo Sapiens
  misc_feature (708)..(708): n is a, c, g, or t
  misc_feature (793)..(800): n is a, c, g, or t
  misc_feature (802)..(802): n is a, c, g, or t
  misc_feature (804)..(805): n is a, c, g, or t
  misc_feature (807)..(814): n is a, c, g, or t
ccgactctgcccatggcctgaagggccacatcatctctgatggaggctgtacgtgtccaggggatgtcgccaaagcctttggagctggagcagattttgtcatgctgggaggaatgttttcgggtcatacggagtgtgctggagaagtgtttgagaggaacggacggaagctcaagctcttctacgggatgagctctgacaccgccatgaacaagcacgcaggaggagttgctgagtacagagcctctgagggtaagactgtggaagttccttacaaaggagatgtggaaaacactatcctggatattctcgggggactgaggtccacgtgcacctacgtgggggccgccaaactcaaggagctcagcaggagggcaacattcatccgggtgacccagcagcacaacaccgtgttcagctaaccctggggacaaagcagcgtctggctcgagtggaagcgtccaaacctgcttttcccatctccccccaagtctgttccgtcagagcttctggctgctcctgaatggtggaatgctgtgtcctctcttctgtctcctgctgcctggaggcttcggggctctcccgcctgccttctcggggcccagacgcaaggcaccgattgggccaacatcagagccctgctgcccagaactcataacctcattgttcaaaccaacacttgcacctttctctttttctctttctctncccctttctttggttttctttcttttttaaaagaagaatggtttcacttttatataatgctattatctttagaaaaaaaaaaccnnnnnnnnanannannnnnnnnaactccaggcatcttatttccgggtgcgggaaaaaaaagggaaagaaaatggccacaggggccattagcctggtttcctgaacccagctttttcttgtaacaaaaggggggaaaatctgcccg

SEQ ID NO: 54445 - DNA, 576 bp, Homo Sapiens
aagtgactccaaccctcctgcttgctgtacttgggatgaaacgaccccacaggtcaggtggagggtggggcgtgggcatcagccaggattgccgttacagtctttttctcaggagctacaaagatctcttcctgttactaaatggtcgcaccccagcagcctctctcgcacaccggggccctgcatgtcagatggcgtggtctgcagggggagctctgtgccttagtggctcttggcaggacactgagggcctgcctgtggtgtgcccggctctgccactcccgggaggggaagggctgctcagctcaaggtgtcctgttcggtagagcaagtgtcctctgacagccgtgtccccggacagttcagacacccttggggatggcactccacacacgacagagatgcaggggccagggaagcccagcgctcggtgcccttcgtccagggttaaaatcggcctgtggggtgtggtgagaaggcaggttgtgcgggtgttgaccgatgtatcttttccttaaagttattataataatgggtaatttgtcaataaagcattcctttgggggaaaaaaaaaa

SEQ ID NO: 54446 - DNA, 801 bp, Homo Sapiens
tgacaatttattaatataagtgaattaaccatttctcaggtgggaaattctctttttttaaaaatgtgtgtttatcgtctggtgtggtggctcacacctgtaatcctaacacttggggaggctgaggcgggcagatcacttaaacccaggagttcaagaccagcctgggtaacatggtgaaatcccatatctacaaaataaacaaaaaattagccgaccatggtggtgcatgcctgtagtcccagctattcgggaggctgaggtaagaggatcacctaagcctgtgaggtcatggttgcaatgagtcatgatcacgccactgcgctacagcctgggcgacacagtaagaccctgtctcaaaaaaaagaagtgtgtttctggccaggcacggtggctcacgcctgtaatcccagcactttgggaggcctaggtgggcagatcatgaggtcaggagttcgagaccagcctggccaacatggcgaaacacctgtctctactaaaaatacaaaaattaggccgggcgcagtggctcacacctgtaatcccaacactttgggaggccgacccagatgggtggatcacctgaggtcaggagtttgagaccagccttgacaacatggtgaaaccccatctctggtagaaatataaaaaattaaccgggcatggtggtggacgcctgtaatcccagctacttgggaggctgaggcagaataatcgcttgaacccaggaggcagaggttgcagtaagccaagatcgtgcctctgcactccaacctgggtgatggagcaagactccatctc

SEQ ID NO: 54447 - DNA, 860 bp, Homo Sapiens
ttcccttgcacaaaaccaagaagacggacattgctgccttcgtgaaggagaatcctgggagaagactcataggggctgggcctcggaccccactccggccctccagagccccacagccccatctgcgggggcagtgctcacccacaccataagctactgccatcctggcccagggcatctgggaggaaccgagggggctgctcccacctggctctgtggcgagccatttgtcccaagtgccaaagaagcagaccattggggctcccagccaggcccttgtcggccccaccagtgcctctccctgctgctcctaggacccgtctccagctgctgagatcctggactgagggggcctggatgccccctgtggatgctgctgcccctgcacagcaggctgccagtgcctgggtggatgggccaccgccttgcccagcctggatgccatccaagttgtatatttttttaatctctcgactgaatggactttgcacactttggcccagggtggccacacctctatcccggctttggtgcggggtacacaagaggggatgagttgtgtgaataccccaagactcccatgagggagatgccatgagccgcccaaggccttcccctggcactggcaaacagggcctctgcggagcacactggctcacccagtcctgcccgccaccgttatcggtgtcattcacctttcgtgttttttttaatttatcctctgttgattttttcttttgctttatgggttttggcttgtttttcttgcatggtttgggaactgatcggtttttcccccacccccttagggtaccagcaaggaaaacccttgcccctctgcgccaagggtgggggcccat

SEQ ID NO: 54448 - DNA, 670 bp, Homo Sapiens
agggaacatcttgctgctctcagagccagaaaatgctgacagcctcatgctggtggacttcgagtacagcagttataactataggggctttgacattgggaaccatttttgtgagtgggtttatgattatactcacgaggaatggcctttctacaaagcaaggcccacagactaccccactcaagaacagcagttgcattttattcgtcattacctggcagaggcaaagaaaggtgagaccctctcccaagaggagcagagaaaactggaagaagatttgctggtagaagtcagtcggtatgctctggcatcccatttcttctggggtctgtggtccatcctccaggcatccatgtccaccatagaatttggttacttggactatgcccagtctcggttccagttctacttccagcagaaggggcagctgaccagtgtccactcctcatcctgactccaccctcccactccttggatttctcctggagcctccagggcaggaccttggagggaggaacaacgagcagaaggccctggcgactgggctgagcccccaagtgaaactgaggttcaggagaccggcctgttcctgagtttgagtaggtccccatggctggcaggccagagccccgtgctgtgtatgtaacacaataaacaagcttcttcttcc

SEQ ID NO: 54449 - DNA, 822 bp, Homo Sapiens
  misc_feature (599)..(599): n is a, c, g, or t
ggcaaatgttacagtttatattgtggaataaatccttcgtcctaacataacactaaatgctgattatttagagccattagagcacagcttcttctgcccctctactgttgcacagccagaaggggctgcttgcttttgcctctgcccaaccaggttgcagtagcagtggatgttagcctgcaaacaacattaggggattcttcttttgtgtcctgctctgtttggtgggccatatgcctacagccctcactaacaaagaacccctctgtcttcaaggactagaacctatctttaaagccgtgctcttttaaaataagctttctcagaatgttggcaaatcacttcaatcctcaaatcagtcttccttgtggaatgctgcctttattatatttgaattgacaggggaacttggtttagggttaagacgttggaaggaaatctaaggaaaattaatcctcacagaggtccgggtttagtatatgtcttgagaggagacttgtgaattcccagactctgcctcctggtttcctttctcatttctttctaactgtagctatcattactggctgtggatagcccatagctattttccttgcttnttcttttttaaaggggtctgttctgcagtggagaagacattcctggtgaccagacttttgcttacccttttcctattcctgttgccaattttttgttttcccccacatttctatagcccataaaccttgaaagatgagtaaaaactgggtggggtcttttaattaaaaaccaacaccccaaaaaccggccggtttgttgaatatagccacaaaggttttaaaa

SEQ ID NO: 54450 - DNA, 887 bp, Homo Sapiens
tgggagtaggagttgctcctaccccgttcctggggctgggtgtgtttcaggacagctgcttctgtgcatttgtgtctgcctgcctcatgctctctatagaggaggatggtcatcgtgacagcagcagctcaagttagcatttcaagtgatttgggggtgcaatgataatgaagaatggccatttgtaccagggctctgtattctgcaacagcctgtttgggaggctggagtggaaacaaagggtgggcatcaaagatgagaagccaaagcccctacaactccagccacccagccaggaggggctgtccaatcacattcaggcatgcgaatgagctgggccctgggtgaggtgggggtctggcctagtggggaggggcctggctgggtggggcagggcctggcctggtccaggcttgggctccattcccatcactgctgtccctcctgaggtctggattggggatggggacaaagaaatagcaagagatgagaaacaacagaaactttttttctctaaaggactggttaaatcaattctgatacagccttacaatacaatagtatgcagctaaaaaataattgtatgtctttatatactaatatgtaataatcttcaggtgaaaaaggcaagccacagaaatgtgtatagcgcacttcccatttgtgtttcagaaaggagtagaatataaacacataattgcttatgtatgcctattcagaataaatgggtacactgattacttttgggaggggaaccagtaggttgaggacaggagagggaaggggtcttaacacttacaccctttttgtacattttgaattttgaaccatgtgactgtattacctattcaaataacaataaatgggcccaaaaaaaaaaaaaaaaa

SEQ ID NO: 54451 - DNA, 587 bp, Homo Sapiens
aaaaacgatattaaaagaagatcttctctttatttgagactcagaattccttctagaagaaggaagtgctttttgttataggatcccttcttttcctttttttgtttttttgtaagatgtagatgcttattctttgctttagaaaacttctcacttaaaaagatggcatgcacctaggggaataaaaggtcacctcagacaccaggtgtcattcctggtgaggcctgcctcgtcggtggcctggggtctgccggcaggttctggctgcacctgaaggctgcgtgcaccttgtcccctggacaggtctcctttcctggccctgctccagcccagcccttcttctagtggtagctctggctttgcaggcccagctccaggccctgctcctcagagagactcttcgagagctggagctgggcacagccataagacaggactggaccagatgctcctgtaaacatccaggggtgtgccaggcccaccctcacaactgcttgttcaggtatcgtgatgggccactcggtccaaaatcagccaggccatcttttccatcatctcacttcaaataaacataataattatatttg

SEQ ID NO: 54452 - DNA, 486 bp, Homo Sapiens
gtatcggcattatggccgggggtcttccagcccatttccggggaagacgtgcgcgatgtgacagccctgaacgtgagcacgctgaaggcttacttcagatgcgatggctacaagggctacgacctggtctacagcccccagagcggcttcacctgcgtgtccccgtgcagtaggggctactgtgaccatggaggccagtgccagcacctgcccagtgggccccgctgcagctgtgtgtccttctccatctacacggcctggggcgagcactgtgagcacctgagcatgaaactcgacgcgttcttcggcatcttctttggggccctgggcggcctcttgctgctgggggtcgggacgttcgtggtcctgcgcttctggggttgctccggggccaggttctcctatttcctgaactcagctgaggccttgccttgaaggggcagctgtggcctaggctacctcaagactcacctcatccttaccgca

SEQ ID NO: 54453 - DNA, 679 bp, Homo Sapiens
  misc_feature (518)..(518): n is a, c, g, or t
gagaatagtagcacatttttggaatgcagtccgaagtcgcagagagcgctggtctattggcaattccagaggcgaaatgaagagcgaaaagaagagatcagagtggatgatcatatcatcaggacagatcaaggccttctgctacgtagtctacaacagaaggattcaggcaattacctctgccatgcggtggaacatgggttcatacaaactcttcttaaggtaaccctggaagtcattgacacagagcatttggaagaacttcttcataaagatgatgatggagatggctctaagaccaaagaaatgtccaatagcatgacacctagccagaaggtctggtacagagacttcatgcagctcatcaaccaccccaatctcaacacaatggatgagttctgtgaacaagtttggaaaagggaccgaaaacaacgtcggcaaaggccaggacataccccagggaacagtaacaaatggaagcacttacaagaaaataagaaaggtagaaacaggagganccacgaatttgagagggcacccaggagtgtctgagctgcattacctctagaaaactcaaacaagtagaaacttgcctagacaataactggaaaaacaaatgcaatatacatgaacttttttcatggcattatgtggatgtttacaatggtgggaaattcag

SEQ ID NO: 54454 - DNA, 656 bp, Homo Sapiens
gcgtccgccttcctcctgataggcccagtgctggggcacctcccccacctccaccatcaacatctattagaaatggcttccaagactctccatgtgaagatgagtgggaaagcagattctacttccatccgatttccgatttgccacctccagagccatatgtacaaacgaccaaaagttatcccagcaaactggcaagaaacgaaagccggagtggatccaaccgaagagaaaggggtgctccaccactccctcccatcccgaggtgatctttgcctgctcttctctacccaagctcaagagctgcttctgttgctatctaagaactgcataccctcctccctgcttcttcccttgtgcctcatgtatgggcaggaggaaaggtgggagggggagtgggaatatgcgtgtgtgggtgggaatcggtaagaaatgcacctagcttttcatattgtgtttattctccaggctattgcttgcttcagctgcagcctgcctgtgctggctgctggggtcgataggcttttgtcgtaataggcagagatgacttgcatcccagctttccaccaaccaaattcaaacattcactgcttatttgttacagactggaattattaaagtccctgagagctggtttctcccgttccctttttcgc

SEQ ID NO: 54455 - DNA, 831 bp, Homo Sapiens
  misc_feature (2)..(2): n is a, c, g, or t
  misc_feature (767)..(767): n is a, c, g, or t
  misc_feature (769)..(769): n is a, c, g, or t
  misc_feature (773)..(773): n is a, c, g, or t
gnaaaatcctagtacctccccctctccggggacccgagcagccagccagccacctaactcctcagaggctggccggaagccctgggagcggagcaactcggtggagaagcctgtgtcctcgattctgtccagaaccccgtctgtggcaaagagccccgaagctaagagcccccttcagtcgcagcctcactctaggatgaagcctgctgggagcgtgaatgacatggccctggatgccttcgacttggaccggatgaagcaggagatcctagaggaggtggtgagagagctccacaaggtgaaggaggagatcatcgacgccatcaggcaggagctgagtgggatcagcaccacgtaaggggccggcctcgctgcgctgattcgtcgagcccatccggcgacagaggacagccagaagcccagccagccccagactccagtgcaccagagcacgcacaggagcctgggcgcgctgctgtgaaacgtcctgacctgtgatcacacatgacagtgaggaaaccaagtgcaactcctgggtttttttagattctgcctgacacggaacaccaggtctgctcgtcttttttgtgttttatatttgcttatttaaggtacatttctttgggtttctagagacgcccctaagtcacctgcttcattagacggtttccaggttttctcccaggtgacgctgttagcgcctcagctggcggtgacagccggcccagcgtggcgccaccacacaccgcagagctgtccagcacagntncgtncccagcgctcatggtgttgaaactgtctgtcatgcaccaccgtgtctgggtccacaca

SEQ ID NO: 54456 - DNA, 762 bp, Homo Sapiens
  misc_feature (732)..(755): n is a, c, g, or t
agaaagctcttctgtccggttactttatgcagattgctcgggatgttgatggatcaggtaactacttaatgctgacacataagcaggttgctcagctgcatcccctgtctggttactcaatcaccaagaagatgccagagtgggtcctcttccataaattcagcatttctgagaacaactacatcaggattacctcagaaatctctcctgaactatttatgcagctggtaccacaatactatttcagtaatctgcctcctagtgaaagtaaggacattctacagcaagtagtggatcacctatcccctgtgtcaacaatgaataaggaacagcaaatgtgtgagacgtgccctgaaactgaacagagatgcactctccagtgactccccagcaaacacaaggtgcagcagggtcccaaaggtagctggatggctgaactgctggatatgggagatacatgacgcgaagacggatttcacatccacaggacggtcttgaagaaaataacactgtgtatattattttaaaataaaaaatagaagtttttattgagttctttaaattactactccatgcttttcttcttcttggaaaagtttttaaatcaaccactcataatttgaccaaaattttaaaaaactggtattttgtaaatgtgtcagagacacatgggacagaaccctactttttgtagaggaacttaatctgaataaagtctgagtttttcagtannnnnnnnnnnnnnnnnnnnnnnnaaaaaag

SEQ ID NO: 54457 - DNA, 833 bp, Homo Sapiens
  misc_feature (793)..(793): n is a, c, g, or t
  misc_feature (813)..(813): n is a, c, g, or t
acatgcaagacgtgcgcctatacccacttcaagctgctggagacctgcgtcagtgagcagcatgaataccactggcatgatggtgtgaagaggtttttcaaatgtccctgtggaaacagaagcatctccttggacagactcccgaacaagcactgcagtaactgtggcctctacaaatgggaacgggacggaatgctaaaggaaaagactggtccaaagataggaggagaaactctgttaccaagaggagaagaacatgctaaatttctgaacagccttaaataacccgaacttcagacattttcccacagacttcctggcctcctgtgactctggaaagcaaaggattggctgtgtattgtccattgattcctgattgacgccgtcaaaaacaaatgcttgttaagcccataagctttgcctgcttactttctgccattgggttggtttgataccacatttaacattgacatttaagtggaaaaccaagttatcattgtcttttctaagctcagtgtggatgattgcattacttcattcactgaagtttttgcccaaaaattggaaggtaaacagagagctatgtttctgtatcttttggttatagagtgttcacttctttatcataacaaaattctagtgtttatacgaacacccagaggcaaaagaatttggcttaattctcactccaggtaagtagcttaacttctgggcttcagttttctcatctgtaaaatcaggaagattggactaagtgatcctgaaatgtattttttagcactggatttctacnaataataaaactttcccatnctaaaaaaaaaaaaaaaaaa

SEQ ID NO: 54458 - DNA, 466 bp, Homo Sapiens
  misc_feature (407)..(407): n is a, c, g, or t
cacgaggggagaaaccactctatgtccaggcaaataactgtgtagaagctaatgaatggatagacgtactctgcagggtgagccgatgcaatcataacaggctcagtttttatcatccctctgtgtatctaaacggaaattggctctgctgtcaggagactggtgaaaacactctcggctgcaagccatgtactgcaggtgtccctgcagacatccaaatagatattgatgaagacagagaaacagaaagaatttattccctttttaccctcagtttacttaagctgcagaagatggaagaggcttgtggaactattgcagtctatcaaggaccacagaaagagcctgatgattattctaactttgtaatcgaggattctgtaacaacctttaagacaattcagcanataaaaagcataattgagaagctggatgaacctcatgaaaaatataggaagaaaagatc

SEQ ID NO: 54459 - DNA, 582 bp, Homo Sapiens
cagcactgcagcccagagtctgagcccaaaactcaaagccaaacctgtcagctctctgaatgagtgcacgaccaaggatgcccggcctggatgtctactcaggtctgatccctgaggtgaaccccagtgcaacaccaaacttcaggggcacaagcgaggacacatctaagggaccagaataagactcagctacaggcaaaagggctccttcccgtggctgcttcaacccagttccccaggcccagcttctggaatagacagttccttctggttagatgggtcctaccatgtggcaggaaacagccattgcctggcctccccctgcattcctgtctgggtgaagaggagacgtgttacggcagagcaggtgggcaaggccagggctaccccaggcccatgtggcctcctccttgcttggaaggggtgactctgagcacaggtagacgcagacgtgtgcagagaatgtgctcttcggaggaagaacactgatgagcgagctctgtaccagcccttgccatgtacagccaagagcctagaatgacatggcccttctcagcagtaataacagatggtctcagcgcc

SEQ ID NO: 54460 - DNA, 563 bp, Homo Sapiens
  misc_feature (44)..(44): n is a, c, g, or t
actcatagaaactggaggcaaaatgcatgacagtaacaatgtgngagaaagacattacaccatctgaattgcctgcaaacccaggttgtctgcattcaaaagagcattctattaaagctaccttaatttggcgcttatttttcttaatcatgtttctgacaatcatagtgtgtggaatgggtgctgctttaagcgcaataagagctaactgccatcaagagccatcagtatgtcttcaagctgcatgcccagaaagctggattggttttcaaagaaagtgtttctatttttctgatgacaccaagaactggacatcaagtcagaggttttgtgactcacaagatgctgatcttgctcaggttgaaagcttccaggaactgaatttcctgttgagatataaaggcccatctgatcactggattgggctgagcagagaacaaggccaaccatggaaatggataaatggtactgaatggacaagacagtttcctatcctgggagcaggagagtgtgcctatttgaatgacaaaggtgccagtagtgccaggcactacacagagagg

SEQ ID NO: 54461 - DNA, 690 bp, Homo Sapiens
  misc_feature (65)..(65): n is a, c, g, or t
tggcactgagttacaatgaaagatcctgttgaagcttgaaagacctcatggccaaaatgagaatnatgtagatatggactgggatatattgtatttctcatgttaaagctcttcccctgaaattaaaaaaaagtttaactgattgaaaatcctgtgacttgcctgtttctccccgctccaacgaaatcattacgtctcctaaaatgtgtttcattctagtaagaaaacctcaaaggatattgtaggatataaatcttacttgaaaacatagctgttgaaatgttttggccttttggagtgggggaaggacaaatctgatcctgtaatctttttctttccagtaatcccttgtgtctgttgcatgaggacatggccaataaagtagtatatgatcctcagatacagggagaaggacaaggcatacagcttattgattagagctggcaagcatctgctcattatgtttggaattgctttctataagaaaattgcccactactactaacttgatcaacaatgaattcaaaatagttaacctatgaaataacatcctctcaaatgtttgctgatgaagtacaagttgaaatgtagttattggaaaagtctgtaacctgtggatcatatatattcaaagtgagacaaaggcaaataaaaagcagctattttcatgaatagaaaaaaaaaaaaaaa

SEQ ID NO: 54462 - DNA, 571 bp, Homo Sapiens
tccccctccatcttgggggggcggagcagttgggcccaagctgcccgggagggtgggtgcagacacaggctgaggaccagccctggccctgccccgccatctgctttcaccaagctgtctctccaccgtggcttcccttctccctccaggccaaagtgctgctgattcccactcccttggttttcgcctgcccagcgttgctgtttgcgtggagggtggggggagctcagtggcagggaatcagcggtccgtggggtcgtggggacgggaacatgtgcccgaccgctccatcccctcctcctccttaggatgcataacctaccttgtctttttttttttaaattttctttccaggtagagtagctctttgtacataaagaatacttgaaaaattaattgtatgatgtatgagaagacagagtctcctagttttgtatcttgttgtatgactgccatgagttccaccagaaagccactctattttggtctctgtgacattttaaatgcgtgacagaagtgagcaaataaagtgaggaagaaatctatatatgagataatatagattgtattg

SEQ ID NO: 54463 - DNA, 885 bp, Homo Sapiens
  misc_feature (469)..(469): n is a, c, g, or t
cccgacacaccccaatgccttcccagcttggaagccaaggcagctgatgaagggagctcaggagagccgtcttcagctgggctggggttggggctgctgtgaggaaaacctgccattgtggccctggagagtcaccagcagctcttgggaaggacttgctgggaggctgagagaggctttgggcacagcctgctgtcttttccatttcctaaagtttacttcattgtcttgaggcttccaggttttgtttttgtttttgccaaagtagaaaaggcaggtggtgggcggctggcagggagtgcgggtccccgcccctcttcagtcctgccctcccctcctcagtcctgcccaccccgtgcagcccatgctgaggctgcagtggtgtcgtgggtgttacgtgcaggaacgtggagaccctgacgtgggctcactgcgtttggttttcttttcagaacttgggagcccccanggaggggctagtgttggtaggtcctagacgtggttccctccagcctccccaaaatcaaccctggtgttgagagaacgtccttctgtccatcgtgggtaacagccttggggagggtgcagagctctgcagagccatgggccaggtggggctgcctcagtcctgtccccttgggcactgaggagaggggcccattcacctttctcctagaatgctgttgtaaatgaacaaatggatccctcaaaaaaaaaacacaaaacataacagcaagaaacacacaaagaacagcatcaaagagacaaagagaagggggcgcgcgcgcaacagaaacaccacgagagggggcaccaaatacaggaagagatccaccgatttttgcggaaaaacaggggggccacaatagagagcgcgcgataaca

SEQ ID NO: 54464 - DNA, 864 bp, Homo Sapiens
gctttgttgtaaacattaagaatataaaatctcctctatatagaaacaagaattttgttaaaaagagaatttgaatcccttcctatactataaaatgctctatagggagacaaagtgtttcttttttcttttatgtttactgtttatgtggagtgaaatataaggctcttggatgtataacatactcaaaagctgttacactttctctgatctgctgtgatccactgaaaatgtgctggggtttgttctgctgtcactgtttatgctgctggaacttagcactgtcttgatttgaagcatatgattgagagccatttgaagcaatcttcattaatgcagataaaacaagtttacatgtgcagagttagaaaatgacatgttcaattctgtaagtggtgactttttgagcacctttcagtattatgtatttgtaaaaaccattgtttttggatataaagctaataagcactttaaaaaggaaaaggcagcctttactattttttctggttgagtcattgctctttagacctagcatcagcaatagatttcaaagataagtattaagcgctaccctaaagtgtgtaagtttttcattttgtcatattgaaaaatgatttgcatagtactgaatgttgacacacagcttatatgtatttacaagaatatctttaagtgtttttttgacacattaaaataaaggaaataaggaaattgtaagctttatttggatttttaaatacatttttaaaatttcagatgtaatttaacatcacatttgttttttcagtattgagtttagatgcctacttttatgagtaccatcagctgggacacagtgtctcgtgccctgtgtttggcgcactc

SEQ ID NO: 54465 - DNA, 642 bp, Homo Sapiens
ggggtgggagctcctccgcagaaggttggtggggggtccagtctgtgatccttggtgctgtgtgccccactccagcctggggaccccacttcagaaggtaggggccgtgtcccgcggtgctgactgaggcctgcttccccctccccctcctgctgtgctggaattccacagggaccagggccaccgcaggggactgtctcagaagacttgatttttccgtccctttttctccacactccactgacaaacgtccccagcggtttccacttgtgggcttcaggtgttttcaagcacaacccaccacaacaagcaagtgcattttcagtcgttgtgcttttttgttttgtgctaacgtcttactaatttaaagatgctgtcggcaccatgtttatttatttccagtggtcatgctcagccttgctgctctgcgtggcgcaggtgccatgcctgctccctgtctgtgtcccagccacgcagggccatccactgtgacgtcggccgaccaggctggacaccctctgccgagtaatgacgtgtgtggctgggaccttctttattctgtgttaatggctaacctgttacactgggctgggttgggtagggtgttctggcttttttgtggggtttttatttttaaagaaa

SEQ ID NO: 54466 - DNA, 578 bp, Homo Sapiens
aacaagatgacgctgaccaggacatgatgatggcagggatggcttcacaggctgctcaagaagccgagatcaatgccagaaaagccaaaaactctgttactagcctcctcagcattattaatgacctcttggagcagctggggcagctggatacagtggacctgaataagctaaacgagattgaaggcaccctaaacaaagccaaagatgaaatgaaggtcagcgatcttgataggaaagtgtctgacctggagaatgaagccaagaagcaggaggctgccatcatggactataaccgagatatcgaggagatcatgaaggacattcgcaatctggaggacatcaggaagaccttaccatctggctgcttcaacaccccgtccattgaaaagccctagtgtctttagggctggaaggcagcatccctctgacaggggggcagttgtgaggccacagagtgccttgacacaaagattacatttttcagacccccactcctctgctgctgtccatcactgtccttttgaaccaggaaaagtcacagagtttaaagagaagcaaattaaacatcctgaatc

SEQ ID NO: 54467 - DNA, 633 bp, Homo Sapiens
ccgggaataatactaatcttgttaaaagcaatagacctcaaactattgaaggaatatgatatatgcaatttaattttaattccttttaagatatttggacttcctgcatggatatacttaccatttgaataaagggaccacaacttggataatttaattttaggtttgaaatatatttggtaatcttaactattggtgtactcatttatgcatagagactcgtttatgaatgggtagagccacagaacgtatagagttaaccaaagtgctcttctctagaatctttacacctcctgtgtggttacaagttaactttgtaagtagcgtaccttccttccttaaaatatctagcttcctgtgccctttcatagatattcgattaatttttacattttaaacaagttgactatttcctttaggggttttgtttcaaacttttctgtcatctgtctctactacctcagaaactgcagcttggttctgatgatagaaattgaatttttccttgtagttattgtgataaagtatgaatatttttagaaagtctataccatgttctttcgttacagatttgctttatacaagattgttgcagtacctttttctggtaaattttgtagcagaaataaaatg

SEQ ID NO: 54468 - DNA, 687 bp, Homo Sapiens
cacgctgactacagtgccgccggcaataaaagcccaggagcccatttggagggcctgggccgtggctccctcactctcaggaaatgctgacccatgggcaggagactgtggagactgctcctgagcccccagcttccagcaggagggacagtctcaccatttccccagggcacgtggttgagtggggggaacgcccacttccctgggttagactgccagctcttcctagctggagaggagccctgcctctccgcccctgagcccactgtgcgtggggctcccgcctccaacccctcgcccagtcccagcagccagccaaacacacagaaggggactgccacctccccttgccagctgctgagccgcagagaagtgacggttcctacacaggacaggggttccttctgggcattacgtcgcatagaaatcaataatttgtggtgatatggatctgtgtataaatgagtttcacggtgtgatttagattattaattgtgcaagctaaacctaataaacgtggagaatcacaggcaaaaaaaaaaaaaagacaaagaaagaaaaaacaaacacaaaaaaaaaaaagaaaagaacagagagaaacaaaaaaagagaaaaaaaacacagaaagacacaaaacacaacacaaaacaacaacaaaaagaaaacaaacaagaaagcagaaaaaaa

SEQ ID NO: 54469 - DNA, 952 bp, Homo Sapiens
aacttcctggggtccaagaactcttgtgcctccgtccatcaccatgtgggttttgaagaccctcgactgcctccccgatgctccgaagcctgatcttccagggtggggaggagaaaatcccacctcccctgacctccaccacctccaccaccaccaccaccaccaccaccaccactaccaccaccacccaactggggctagagtggggaagatttcccctttagatcaaactgccccttccatggaaaagctggaaaaaaactctggaacccatatccaggcttggtgaggttgctgccaacagtcctggcctcccccatccctaggctaaagagccatgagtcctggaggaggagaggacccctcccaaaggactggagacaaaaccctctgcttccttgggtccctccaagactccctggggcccaactgtgttgctccacccggacccatctctcccttctagacctgagcttgcccctccagctagcactaagcaacatctcgctgtggacgcctgtaaattactgagaaatgtgaaacgtgcaatcttgaaactgaggtgttagaaaacttgatctggggagttttgttttgttttttttcttaaaacaacaccaacgggatcttgggctggctggcatggggttgaaacccatgggtggggtcctggtgaaacctgaaggttaaacaggttggttgtcctgggaaggatttttcttaccgcgaaaaatttgagattccctcccaagcccaaaaacccccagaaatgggcacaaaaggaatcagggccagcccttcccccgggagaaacaagccctttcggggtggggaacgacattgggcccatgcttctcacctttgaaccacccgcgggtgggatatagccaacccttttggcgagacccaccccttggggtaaaattccatacccggccctaggagcctgtct

SEQ ID NO: 54470 - DNA, 740 bp, Homo Sapiens
ataacaggcaccttatctactcattagtgaagagataattggattacacaggcaggcttgtttactacatccagaatgtagaaactgctttcttcaacatcttggttctagctagtaataacaatataattctttggcagatattcagaataacattttaaactacattttcttagaaaattgcattcttgtagtgagcagtgtatggtctcttttgttcagaatttaaaactgataaccaatgaaagccttttctcttattcctctaccgtcatttacatgataatctgaagctaatatgacaatatttaaatactaagtggtactagggaactacaagaatactgtaaagcttaagccattgttatcactgtcatttagcatttaataacaaaactatacagaattatgtgcataccaatgaatgttttgtaccatctagttaaattttttaaataaagttttatgggttaagcagaagacaactgtcatactgaattttattaaaagtatatatacttcaaattcaaagcatcccttaggacccacagaatatattaaaataccacccttaaattttatatttttgctttaagacagacatgcaaaggtaactgggcaagaggtgagcaaatgttttagaacatttatattattgcttaacatgagactctgacaattggtatacaatcttggttatgacgcaaaaccgcaaccgacaacctcaacaaacaaaaggg

SEQ ID NO: 54471 - DNA, 904 bp, Homo Sapiens
  misc_feature (750)..(750): n is a, c, g, or t
tccaacataaaagaactcatactgggagagaaaccctacaaatgtgaagaatgtggcaaatcctttactgcatcctcaactctaactacacataagagaattcatactggagagaaaccttacaaatgtgaagaatgtggcaaagcttttaactggtcctcagaccttaataaacataagaaaattcatattgaacgaaaaccctacatagtgaagaatgtgacagatcttttaaatgttcctccacttttaattagcataagataattcatactggagagaaaccctatgaatgtgatgaatgtgggaaagcctttaaccagccctcgactcttagtaaatttgagagtttatatggaacacaaaccctacaaatataaagaatgtgacaaagctttttaaggaagttctcaacccttattacacataattcataccaaacagaagccctacaagtgtgaagaatgtggcaaaacctataaacctataacaagttctcaattcctttttttgagatggagtttcactcttgtcaccgaggctggagtgcaatgacatgatctccgttcactgcaatctctgcctcctgggtttaagccattcttctgcctcagcctcccaagtagctgggattacaggagcccaacaccacgcctggctaatttttggatttttagtagagatgggggttcacaatgttggccaggctggtctcgaactcctgacctcaggtgatccacctgccttggncttccaaagtgctgggggtacaggcgggagccaccatgcctgggtacaagttcttaattcttaagagacaccatgcctgggtacaagtcttaattcttaaaagacatggcgaaaaattcatgcttaaagaggaatctggaaaacctgaaagagg

SEQ ID NO: 54472 - DNA, 561 bp, Homo Sapiens
agatggttttccaccaagccacaagagacgtcataatcaaggaaacacaggctccagcatatctcatagacctaatgcatgataagaataatgaaatccgaaaggtctgtgataatacattagatattatagcggaatatgatgaagaatgggctaagaaaattcagagtgaaaagtttcgctggcataactctcagtggctggagatggtagagagtcgtcagatggatgagagtgagcagtacttgtatggtgatgatcgaattgagccatacattcatgaaggagatattctcgaaagacctgaccttttctacaactcagatggattaattgcctctgaaggagccataagtcccgatttcttcaatgattaccaccttcaaaatggagatgttgttgggcagcattcatttcctggcagccttggaatggatggctttggccaaccagttggcattcttggacgccctgccacagcatatggattccgccctgatgaaccttactactatggctatggatcttgataaagtatctgtttccatgtgtaatctcagc

SEQ ID NO: 54473 - DNA, 866 bp, Homo Sapiens
  misc_feature (796)..(796): n is a, c, g, or t
  misc_feature (819)..(819): n is a, c, g, or t
tttgatgtcatggtcccctctcttaggtgctcactcgctttgggtgcacctggcctgctcttcccatgttggcctctgcaaccacacagggatatttctgctatgcaccagcctcactccaccttccttccatcaaaaatatgtgtgtgtgtctcagtccctgtaagtcatgtccttcacagggagaattaacccttcgatatacatggcagagttttgtgggaaaagaattgaatgaaaagtcaggagatcagaattttaaatttgacttagccactaactagccatgtaaccttgggaaagtcatttcccatttctgggtcttgcttttctttctgttaaatgagaggaatgttaaatatctaacagtttagaatcttatgcttacagtgttatctgtgaatgcacatattaaatgtctatgttcttgttgctatgagtcaaggagtgtaaccttctcctttactatgttgaatgtatttttttctggacaagcttacatcttcctcagccatctttgtgagtccttcaagagcagttatcaattgttagttagatattttctatttagagaatgcttaagggattccaatcccgatccaaatcataatttgttcttaagtatactggggcaggtccccctaattttaaaggcataattttttggtatttaggtgccttttccctgggcttctcaagaagaaggtatttaaatattttggataatttaaataaaataattaggtttaaaattaaggtaaaataaattggcgctaaatttttaaaccattggggnaaaaacacccaaaattttaaaanaaaaggaaatttcctttccccaaaaagaaaattttccccaaaaaaac

SEQ ID NO: 54474 - DNA, 743 bp, Homo Sapiens
aatcgctgcatggagagttctcagcctcggacagctccctcactgacatccaggagacccgcaggcagcctatgcccgaccctggcctgatgcccctgcctgacactgctgcagacttggattggtccaacctggtagatgctgccaaagcctatgaggtccagagagcctcattttttgctgctagtgatgaaaaccatcgccccttgagtgctgcatccaacagtgatcagctggaggaccaggctctggcccagatgaagccttacagcagcagtaaagactcctctcccactctggcttctaaagtggaccagctggaaggtatgctgaagatgcttcgggaagatttgaagaaggaaaaagaagacaaagctcaccttcaggcggaggtgcagcacctgcgagaggacaacctgaggctacaggaggagtcccagaacgcctcggacaagctgaagaagttcacagaatgggtcttcaacaccatagacatgagctagggaaggctgaggaggacaggagaagggcccagacactccctccagtgagtgtcctgcagcccttattccctccatagaaagcatcctcagagcaccttccctggcttcctactctgccccctttcggggagtgcacaacacaatagttgcagatcaacaatcatcacctgccttttgtagaaaagaaaaacaaaaaaagtaaataaaaattttaaacggtaaaaaaaaaaaaaaaaaaac

SEQ ID NO: 54475 - DNA, 615 bp, Homo Sapiens
ttttttttttttttctttaagaaaacttcagtttaacagtttctgcaatacaagcttgtgatttatgcttactctaagtggaaatcaggattgttatgaagacttaaggcccagtatttttgaatacaatactcatctaggatgtaacagtgaagctgagtaaactataactgttaaacttaagttccagcttttctcaagttagttataggatgtacttaagcagtaagcgtatttaggtaaaagcagttgaattatgttaaatgttgccctttgccacgttaaattgaacactgttttggatgcatgttgaaagacatgcttttatttttttgtaaaacaatataggagctgtgtctactattaaaagtgaaacattttggcatgtttgttaattctagtttcatttaataacctgtaaggcacgtaagtttaagctttttttttttttaagttaatgggaaaaatttgagacgcaataccaatacttaggattttggtcttggtgtttgtatgaaattctgaggccttgatttaaatctttcattgtattgtgatttccttttaggtatattgcgctaagtgaaacttgtcaaataaatcctcccctcgtgc

SEQ ID NO: 54476 - DNA, 583 bp, Homo Sapiens
  misc_feature (557)..(557): n is a, c, g, or t
aggttaggtccggctcagactgaataagaagagataaaatttgccttaaaacttacctggcagtggctttgctgcacggtctgaacctgttcccaccctcttgaccgaaatttccttgtgacacagagaagggcaaaggtctgagcccagagttgacggagggagtatttcagggttcacttcaggggctcccaaagcgacaagatcgttagggagagaggcccagggtggggactgggaatttaaggagagctgggaacggatcccttaggttcaggaagcttctgtgcaagctgcgaggatggcttgggccgaagggttgctctgcccgccgcgctagctgtgagctgagcaaagccctgggctcacagcaccccaaaagcctgtggcttcagtcctgcgtctgcaccacacaatcaaaaggatcgttttgttttgtttttaaagaaaggtgagattggcttggttcttcatgagcacatttgatatagctctttttctgtttttccttgctcatttcgttttggggaagaaatctgtactgtattgggattgtnaagaacatctttgcactcagacagtt

SEQ ID NO: 54477 - DNA, 576 bp, Homo Sapiens
acccttgacaccatcctgaatgaggggtccagcctgggggggactctaccaaggtcttcttgggctgggaaagcccatgtagggcaggccttctataagtgcgggcaccaagggcgcctacatccccaggccttgctggggtgcaggggtatatcaacttcccattagcaggagctccccagcggcaagcctggcccagtgggctcggtagtgcccagctggcaggcctgaggtgtacatagtccttcccggccatattaaccacacagcctgagcctggcccagcctcggctgccagaggtgcctttgctaggcccggagccgttggcccgggccggccttgccctattcctctcctcctcctcctcctgggtcccccagggtggctgggcttgggctatgtgggtggtggtggcggggggtcttgggggcctctcagctcccgcccatgcctccctgatgggtgggcccagggcggcctctctctgaggagacctcacccactcctcgctcagtttgaccactgtaagtgcctgcactctgtattctattaataaactaaaataaagggaaaaa

SEQ ID NO: 54478 - DNA, 946 bp, Homo Sapiens
cccggggggcccggctgactcgcccatcacctcatctccctgtggacttgggagctctgtgccaggcccaccttgcggccctggctctgagtcgctctcccacccagcctggacttggccccatgggacccatcctcagtgctccctccagatcccgtccggcagcttggcgtccaccctgcacagcatcactgaatcacagagcctttgcgtgaaacagctctgccaggccgggagctgggtttctcttccctttttatctgctggtgtggaccacacctgggcctggccggaggaagagagagtttaccaagagagatgtctccgggcccttatttattatttaaacatttttttaaaaagcactgctagtttacttgtctctcctccccatcgtccccatcgtcctccttgtccctgacttggggcacttccaccctgacccagccagtccagctctgccttgccggctctccagagtagacatagtgtgtggggttggagctctggcacccggggaggtagcatttccctgcagatggtacagatgttcctgccttagagtcatctctagttccccacctcaatcccggcatccagccttcagtcccgcccacgtgctagctccgtgggcccaccgtgcggccttagaggtttcccctccttcctttccactgaaaagcacatgggccttggggtgacaaattccctcctttggatgaatgtacccctgggggggatggtttcatactggaaggattaattttttatttcattcccatgggccataattctaaaaatattttaattttttttaataccccaaatggaaatacctttttttttttttttacggaaacaaaaaagggagcaaattggaatttaaagaaaatcctacctcccttgggaaaaaacaaaaaaaaaaaaaaaaaagggggcggggccc

SEQ ID NO: 54479 - DNA, 553 bp, Homo Sapiens
caggtagttcagtttgagacaatcaatttgaactctgcatcttcatggtttacagaaattggtgcaggcagccagcagttagattccattcatgtaacacagttggagagagataccgttttagtgtgtttagacaaatttgtgaaaattgtaaatctacaaggaaaattaaaatcaagtaagaaactggcctctgagttaagttttgattttcgcattgaatctgtagtatgccttcaagacagtgtgttggctttctggaaacatgggatgcagggtaaaagcttcaagtcagatgaggttacccaggagatttcagatgaaacaagagttttccgcttattaggatcagacagggttgtcgttttggaaagtaggccaacagaaaatcctactgcacacagcaatctctacatcttggctggacatgaaaatagttactaagcaacagaaactgatctcaaatgacaggaaaatgaatatactccattgaaaggaaaaataaggaaattcaatacaaactgcactatgatttgctttaactattatgggt

SEQ ID NO: 54480 - DNA, 589 bp, Homo Sapiens
  misc_feature (589)..(589): n is a, c, g, or t
ggggaacatagcaatatctgctcctttttcgagttgtttgagaaatgtaggctattttttcagtgtatatccactcagattttgtgtatttttgatgtacactgttctctaaattctgaatctttgggaaaaaatgtaaagcatttatgatctcagaggttaacttatttaagggggatgtacatatattctctgaaactaggatgcatgcaattgtgttggaagtgtccttggtgccttgtgtgatgtagacaatgttacaaggtctgcatgtaaatgggttgccttattatggagaaaaaaatcactccctgagtttagtatggctgtatatttctgcctattaatatttggaattttttttagaaagtatatttttgtatgctttgttttgtgacttaaaagtgttacctttgtagtcaaatttcagataagaatgtacataatgttaccggagctgatttgtttggtcattagctcttaatagttgtgaaaaaataaatctattctaacgcaaaaccactaactgaagttcagataatggatggtttgtgactatagtgtaaataaatacttttcaaccataaan

SEQ ID NO: 54481 - DNA, 575 bp, Homo Sapiens
ctaatttcaagattttaaaaaatgttatgcaggcttaacgtgtctgagagccataaatgacctaacgtttcccgttagtctctgaactaggtgatctcagttctctttcaactccagtactctgtaagtttctgtgacctgtagtgtaccattctcaggtggtgatatggtttggatgttttgtcccctccaaatctcatgttcaaagtgtgacattcagtgttagaggtgggcctagtaggaggtatttgggtcatgggggcggatcccttatgtatgactttgtgccatccccatagtaatgagtgagttctcactctggttgtttatgcaagagctggttgtttaaaagagcctggaacttcctcctctctcgcttgctctctctcaccatgtgacacactggctccccttcaccttctgccatgattgtaagcttcgtgaggccctcaccagaagcagatgccagcgccatgcttcctatacagttctatgcagaacagtgagccaaataaacctcttttctttctaaaaattgtcagtatttccttatagcaatgcaagccgactaacac

SEQ ID NO: 54482 - DNA, 846 bp, Homo Sapiens
gaaattatcagttcattgcctagcatagtaaatgacaaatatggaaggaaggtcctattgtacttactaagccccagagatcctgcacatacagtacgagaaatcattgaagttctgcaaaaaggagatggaaatgcacacagtaagaaagatacagaggtccgcagacgggagctcctagaatccatttctccagctttgttaagctacctgcaagaacatgcccaagaagtggtgctagataagtctgcgtgtgttttggtgtctgacattctgggatctgccactggagacgttcagcctaccatgaatgccatcgccagcttggcagcaacaggactgcatcctggtggcaaggacggagagcttcacattgcagaacatcctgcaggacatctagttctgaagtggttaatagagcaagataaaaagatgaaagaaaatgggagagaaggttgttttgcaaaaacacttgtagagcatgttggtatgaagaacctgaagtcctgggctagtgtaaatcgaggtgccattattctttctagcctcctccagagttgtgacctggaagttgcaaacaaagtcaaagctgcactgaaaagcttgattcctacattggaaaaaaccaaaagcaccagcaaaggaatagaaattctacttgaaaaactgagcacataggtggaaagagttaagagcaagatggaatgattttttctgttctctgttctgtttcccaatgcagaaaagaaggggtagggtccaccatactggtaattggggtactctgtatatgtgtttcttctttgtatacgaatctatttatataaattgtttttttaaatggtc

SEQ ID NO: 54483 - DNA, 558 bp, Homo Sapiens
tcctttggtcatgtttctgttagactgtagctgtgaaactgtcagaattgttaactgaaacaaatatttgcttgaaaaaaaaagttcatgaagtaccaatgcaagtgttttatttttttcttttttccagcccataagactaagggtttaaatctgcttgcactagctgtgccttcattagtttgctatagaaatccagtacttatagtaaataaaacagtgtattttgaagtttgactgcttgaaaaagattagcatacatctaatgtgaaaagaccacatttgattcaactgagaccttgtgtatgtgacatatagtggcctataaatttaatcataatgatgttattgtttaccactgaggtgttaatataacatagtatttttgaaaaagtttcttcatcttatattgtgtaattgtaaactaaagataccgtgttttctttgtattgtgttctaccttccctttcactgaaaatgatcacttcatttgatactgtttttcatgttcttgtattgcaacctaaaataaataaatattaaagtgtgttatactat

SEQ ID NO: 54484 - DNA, 589 bp, Homo Sapiens
  misc_feature (550)..(552): n is a, c, g, or t
gttcggcacctgtctgtgcctctggcaccaggttgtgtgtgtgtgcgtgtgcacgtgcgtgtgtgtgtgtgtgtgtcaggtttagtttggggaggaagcaaagggttttgttttggaggtcactctttggggcccctttctgggggttccccatcagccctcatttcttataataccctgatcccagactccaaagccctggtcctttcctgatgtctcctcccttgtcttattgtccccctaccctaaatgcccccctgccataacttggggagggcagttttgtaaaataggagactccctttaagaaagaatgctgtcctagatgtacttgggcatctcatccttcattattctctgcattccttccggggggagcctgtcctcagaggggacaacctgtgacaccctgagtccaaacccttgtgcctcccagttcttccaagtgtctaactagtcttcgctgcagcgtcagccaaagctggcccctgaaccactgtgtgcccatttcctagggaaggggaaggagaataaacagaatatttattannnaaaaaaaaaaaaaaaaaaaaaaaaaaaaaaaaaaaag

SEQ ID NO: 54485 - DNA, 569 bp, Homo Sapiens
gggattaatcttttaaaaataaatgctatatattaggaaaataaaaaatattttagagccaagttaacaagtacttcagcaaaacatgctagttttatgcaggggattctgtattccaaatggatacaatccgacatatataaaagaaacagattcttaactattgactcttatttagcaaatgcaacagacaagaatatccaacttgatatttataaaaggtagactttttccaaaagtgtataagctcaaagaaaaaatgcaacctgtcaattaatatatactatgtaatatatattattgtgtatttatgattagccatcataaatgcccattgcttggcctttaagaataatcacaaaatatttatattaaattatacaaatttgttgcagaagtgcctgtgagagaaatcttcaaaagacaaacctggtcaaataataataattttaatgtcaatgattttttttgtctgactcatctgagttatatttagttttcaagtggcaataaatttatctaccttctttattgcgactattccttttttcccccagaattagtgcttt

SEQ ID NO: 54486 - DNA, 574 bp, Homo Sapiens
  misc_feature (305)..(305): n is a, c, g, or t
  misc_feature (389)..(389): n is a, c, g, or t
  misc_feature (423)..(423): n is a, c, g, or t
  misc_feature (505)..(505): n is a, c, g, or t
  misc_feature (517)..(517): n is a, c, g, or t
  misc_feature (545)..(545): n is a, c, g, or t
  misc_feature (561)..(562): n is a, c, g, or t
  misc_feature (570)..(571): n is a, c, g, or t
tttgatgtctagaatcaggggatccaggatcatcaccaaggtcattttcccagacagatgtgctgaggctgtagaaagtgctttttatttggttgggagcttgtgcataaatgcgagaggggctgcacatctgacggactagaggtgactcatggctgaaccggaacaggacatcggggagaagccagcagtcagaattcagaaccccaaagaaaatgacttcattgaaattgaactgaagagacaagaactgagttaccaaaacctactaaacgtgagttgctgtgaactggggattaaaccanaacgagtggagaagatcagaaagctaccaaacacactgctcagaaaggacaaagacattcgaagactgcgggactttcaggaantggaactcattttaatgaaaaatggaagctccanattgacagaatatgtgccatctctgacagaaaggccctgctatgatagcaaagctgcaaaaatgacttattaaatactcccnggaatggccgcncgtggtggctcaccccctgtggtcccancactttggggaagccnnggtgggcnnatc

SEQ ID NO: 54487 - DNA, 649 bp, Homo Sapiens
actgctttgagagttactcggaaagtgatgctgactgccccacctgcctccctgaaaaccggaaggtcatggatatgatccgggcccaggaacagaaacgagatctccatgatcaattccagcatcagctcaagtgctccaatgacagcttttctgtgattgctgactactttggcagaggtgttttcaacaaattgactctgctgaccgaccctcccacagccagactgacctccagcctggaggctgggctgcaacgcgacctactcatgcactccaggaggggcacttaagcagcctggaggaagatgtgggcaacagtggaggaccaagagaacagacacaatgggacctgggcgggcgttacacagaaggctggctgacatgcccagggctccactctcatctaatgtcacagccctcagaactaaagcggactttctttccctgccttcttatttagtcagcttgccatccctcctcttcactagcagtgtagatcattccagatcagtgggggagggcacctcagcaacctctgagtgtggacaatagctgctttcttctctatccaagagcaccaggctgtgcttgggtccttgctctcagagtctataaataaaagaatataatgaaaaaaaaaaaaaaa

SEQ ID NO: 54488 - DNA, 883 bp, Homo Sapiens
  misc_feature (800)..(800): n is a, c, g, or t
  misc_feature (831)..(831): n is a, c, g, or t
gtgcggaccagtttaagaaggatatcctgctgggggctctcttccctatagcatccagacagctgaaaaacagaattggctgcattcctattttcacaaatggtcagctgagacttctggccgcagcaatgccatgccacatattaagacatatatgaggccttctccagacttcagtaaaattgcttggttccttgtcacaagcgcaaatctgtccaaggctgcctggggagcattggagaagaatggcacccagctgatgatccgctcctacgagctcggggtccttttcctcccttcagcatttggtctagacagtttcaaagtgaaacagaagttcttcgctggcagccaggagccaatggccacctttcctgtgccatatgatttgcctccagaactgtatggaagtaaagatcggccatggatatggaacattccttatgtcaaagcaccggatacgcatgggaacatgtgggtgccctcctgagaatcttgaggcactgtgaaatttaagtgtaagacattgagccacaaacatggaatctcttctttgtactggatgtccacttcccttaaagtcttatttgcacccttacaaaatctttccaaaggtcactcttatgaatggatgttggttatacttttaatggacattaacattcctaataaagtattaagttcctaattcacttttatatgttttggaaagaaaattagtgaacttctctatgttaaaaaatacgtactgcttgagtaacccctgtctgaaaatgcctggggaccagaaagtgtttcancttttgggatttttttgaaatttttgggaanattttgcatagcaataatgagataccttgggaatgggacccaaatccaaaca

SEQ ID NO: 54489 - DNA, 635 bp, Homo Sapiens
tctagcgaggtgacagcgtagaaccaggcaggcggaggcgctgacggcggggatggccggggtggccacagctgccgcgggggcgtggacacagccgcagctccggccggtggagctcccccagcgcacgcgccaggtccgggcagagacgccgcgtctgcggccagggggtcacgaatgcggccgcacatattcaccctcagcgtgcctttcccgacccccttggaggcggaaatcgcccatgggtccctggcaccagatgccgagccccaccaaagggtggttgggaaggatctcacagtgagtggcaggatcctggtcgtccgctggaaagctgaagactgtcgcctgctccgaatttccgtcatcaactttcttgaccagctttccctggtggtgcggaccatgcagcgctttgggccccccgtttcccgctaagcctggcctgggcaaatggagcgaggtcccactttgcgtctccttgtaggcagtgcgtccatccttccctagggcaggaattcccacagttgctactttcctgggagggcctcatgttttatctggttcttaaatgtttgttactacagaaaataaaactgcgctactaaaaaaaaaaaaaaaactctccagcgctg

SEQ ID NO: 54490 - DNA, 532 bp, Homo Sapiens
gccagaatatcccagccattgccaccactacagcagctgtggcaggcctgttgggcctggagctgtataaggtggtgagtgggccacggcctcgtagtgcctttcgccacagctacctacatctggctgaaaactacctcatccgctatatgccttttgccccagccatccagacgttccatcacctgaagtggacctcttgggaccgtctgaaggtaccagctgggcagcctgagaggaccctggagtcgctgctggctcatcttcaggagcagcacgggttgagggtgaggatcctgctgcacggctcagccctgctctatgcggccggatggtcacctgaaaagcaggcccagcacctgcccctcagggtgacagaactggttcagcagctgacaggccaggcacctgctcctgggcagcgggtgttggtgctagagctgagctgtgagggtgacgacgaggacactgccttcccacctctgcactatgagctgtgacaaggcagccaccctgtcacctagctcaatgg

SEQ ID NO: 54491 - DNA, 704 bp, Homo Sapiens
gccaggactgcaccctgaccaccaactccagccattgcaccccaaagcagtgccagccgtccgacacggtgtgtgccagtgtccgaatcaccgatcccagcagcagcaggaaggatcactcggtgaacaagatgtgtgcctcctcctgtgacttcgttaagcgacactttttctcagactatctgatggggtttattaactctgggatcttaaaggtcgacgtggactgctgcgagaaggatttgtgcaatggggcggcaggggcagggcacagcccctgggccctggccggggggctcctgctcagcctggggcctgccctcctctgggctgggccctgatgtctcctccttcccacggggcttctgagcttgctcccctgagcctgtggctgccctctccccagcctggcgtggctggggctgggggcagccttggcccagctccgtggctgtggcctgtggctctcactcctcccccgacgtgaagcctccctgtctctccgccagctctgagtcccaggcagctggacatctccaggaaaccaggccatctgggcaggaggcctggggatgagggtggggggggacccccaggtcccggaggggaagtgaagcaacagcccagctggaagggcgtcttctgcggagaaataaagtcacttttgagtcctgaaataaaaaaaaaacaaaaaaaaaaaaggg

SEQ ID NO: 54492 - DNA, 673 bp, Homo Sapiens
  misc_feature (562)..(562): n is a, c, g, or t
  misc_feature (613)..(613): n is a, c, g, or t
caggttcaagtccccaggggccgactcttcgcttttgactcagagggaaattacatgctgacatgttctgccacaggcggcgtcatctacaagctgggtggcgatgagaaggttctggagagctgcttgagcctaggtggccaccgagcccctgtggtcaccgtggactggagcactgccatggactgtgggacctgcctcaccgcctccatggatggcaagatcaagctgaccaccctcctggcccataaagcctgatgacttgccccaagggccacccgaggaagcagtattatctgcggtggggggaggagatataggacaggaaaaccacgtgctccactccagctccctgccagtgcagtgactctgcagggaaagactggcaaggaggctcaggtgcttccatctgtggtgactggaatgggacccacgtggagtaggtgacatatgcttcccagagactggtattgtggctgtgccaggagtacatgtgagactatgggaggaaagctccggaagaaggagaaacattgcagtggctactgtgttggcccagtanaaattgacagtattttgtatatatgtgcccatttatctttttcttttttanaaaaagagaatactcttgtggtcccctgaaaaaaaaaaaaaaaaaaaaatgcggcattgc

SEQ ID NO: 54493 - DNA, 582 bp, Homo Sapiens
cacgagggtcaccagtactataaccaagagtggacattgtgggatcgctttgaggtacaagggctgcagcctaatggtgaggagatgaccctcaaacagttcctcgactattttaagacagagcacaaattagagatcaccatgctgtcccagggcgtgtccatgctctattccttcttcatgccagctgccaagctcaaggaacggttggatcagccgatgacagagattgtgagccgtgtgtcgaagcgaaagctgggccgccacgtgcgggcgctggtgcttgagctgtgctgtaacgacgagagcggcgaggatgtcgaggttccctatgtccgatacaccatccgctgaccccgtctgctcctctaggctggccccttgtccacccctctccacaccccttccagcccagggttcccatttggcttctggcagtggcccaactagccaagtctggtgttccctcatcatccccctacctgaacccctcttgccactgccttctaccttgtttgaaacctgaatcctaataaagaattaataactcccaaaaaaaaaaaaaaaaaaaatggccttatc

SEQ ID NO: 54494 - DNA, 681 bp, Homo Sapiens
ggttccggtagtgaagtcaaactgttattcagagatgtttaatgcatatttaacttatttaatgtatttcatctcatgttttcttattgtcacaagagtacagttaatgctgcgtgctgctgaactctgttgggtgaactggtattgctgctggagggctgtgggctcctctgtctctggagagtctggtcatgtggaggtggggtttattgggatgctggagaagagctgccaggaagtgttttttctgggtcagtaaataacaactgtcataggcagggaaattctcagtagtgacagtcaactctaggttaccttttttaatgaagagtagtcagtcttctagattgttcttataccacctctcaaccattactcacacttccagcgcccaggtccaagtctgagcctgacctccccttggggacctagcctggagtcaggacaaatggatcgggctgcagagggttagaagcgagggcaccagcagttgtgggtggggagcaagggaagagagaaactcttcagcgaatccttctagtactagttgagagtttgactgtgaattaattttatgccataaaagaccaacccagttctgtttgactatgtagcatcttgaaaagaaaaattataataaagccccaaaattaaaaaaaaaaaaaaaaaaaaaaaaaatgg

SEQ ID NO: 54495 - DNA, 500 bp, Homo Sapiens
taaatcatgaaattaaagtctgaggacgagagcacgcctgggagcgaaagctggccttttttctacgaatgcactacattaaagatgtgcaacctatgcgccccctgccctacttccgttaccctgagagtcggcgtgtggccccatctccatgtgcctcccgtctgggtgggtgtgagagtggacggtatgtgtgtgaagtggtgtatatggaagcatctccctacactggcagccagtcattactagtacctctgcgggagatcatccggtgctaaaacattacagttgccaaggaggaaaatactgaatgactgctaagaattaaccttaagaccagttcatagttaatacaggtttacagttcatgcctgtggttttgtgtttgttgttttgtgtttttttagtgcaaaaggtttaaatttatagttgtgaacattgcttgtgtgtgtttttctaagtagattcacaagataattaaaaattcactttttctcagt

SEQ ID NO: 54496 - DNA, 580 bp, Homo Sapiens
aggaacccatatttgagagaaaccctgggtaaagggtgtaggaaaggttttgtcatcacacaaccctgtcacacatgaatgtgtagtggagagaaccttggtaaatgtaaagagtgtgggagagcctttagtcattttagttccacttgaagccatgaaagaacacacaaaagagaaagctcttgaatataagcaatgtccacacgtttttagccagcccacatgctttcaacaacatgtaagaatgtaccctggatcaaaacactataaatgtgaaaactacaaggaaggttttccattatacttttaaagtcatttgagggctctggctctgtggctttgtgggttaaagtacttgtctggcaaacaggagatgctggatttcaatcccagcagggcctcactagttgaggtattgaatttgaacagatgttttggctctggctgggtgtggtggctcacacctgtaatcccagcactttgggaggctgaggcaggaggatcacttgaggtcaggagtttgagaccagtgtgcaaaacatagcaagacctcatctcagaaaaaaaaaaaaaaaaaaag

SEQ ID NO: 54497 - DNA, 655 bp, Homo Sapiens
gagaatcaactacctgactttcttaaagaaaaaccacagactgagcaagtggagtagcagaaccaggagcctcttccatacatgaggaaagattgctgccttttcagcagaagggaaattcctaggattggctgtcccctgccaagcttggtggagcgtctgcaccttggctgcgccgcctgtgcatttgccagtttcctcccactgagaggatggaggtgtccgcacagctttgggcctcgtgagggatctgcctcctgagcaaagagctcttgatcccgatttcatgcacagccctgcagtaaggagcccagaaggaacatgtgtttcctgttaaaactcctcttgttctcttttcttacattatgacgtttgttttcaaggagagggtttaaaaatgggatcctgtaagcagacttgggcagtctccttttgaaataggttgtctgtacatgttctaatgttttgtagaacacgtgtgcctgtttaagtgtattgatgtgaataatattaaatatcctaattatttaattcattgtattgtttctgagaagttgggaaattaccattatacatttacaacctaatgacttttgtattttatttttcacaataaaagctttcaatgtgaaaaaaaaaaaaaaaaaaaaatggc

SEQ ID NO: 54498 - DNA, 515 bp, Homo Sapiens
tttttcttttttttgagaaggagaagactgcatgactttcctctgtaacagaggtaatatatgagacaatcaacaccgttccaaaggcctgaaaataattttcagataaagagactccaaggttgactttagtttgtgagttactcatgtgactatttgaggattttgaaaacatcagatttgctgtggtatgggagaaaaggttatgtacttattattttagctctttctgtaatatttacattttttaccatatgtacatttgtacttttattttacacataagggaaaaaataagaccactttgagcagttgcctggaaggctgggcatttccatcatatagacctctgcccttcagagtagcctcaccattagtggcagcatcatgtaactgagtggactgtgcttgtcaacggatgtgtagcttttcagaaacttaattggggatgaatagaaaacctgtaagctttgatgttctggttacttctagtaaattcctgtcaaaatcaattc

SEQ ID NO: 54499 - DNA, 498 bp, Homo Sapiens
gggttaactgtgtatattgactttcatgtcgtcatgcatctgtcatgaatgaatgatactttgcactgggctgtacgacagtgaggaccttagggcatgaagcctttttcctggtcccagcagcatctgccctgtgaagtttgttttctcccactgcctccaggccccactgatacccccaaatagatgctgggttatgagaaccagcgaaatcccccatgtcatcagtcttaaaaaaaaaattttacaaatccacgtatttgtcccattcttggagtagttttagtgtatgtctttacattaactactaacagtataaataacttgacatcgtaattgtctgcatcctgtccttgatatttttagcagttccaaatctttgtttttgtatttgtttgctgtgttcatgggcaaagtaagtactttttaatgcagttattttgagagtttggaagataattaccaaaagggtccattatttcataagagttactttgc

SEQ ID NO: 54500 - DNA, 643 bp, Homo Sapiens
ccctccccccctggagctggtgggccacccatgccaccaccaccgccaccaccgccaccgccgcccagctccgggaatggaccagcccctcccccactccctcctgctctggtgcctgccgggggcctggcccctggtgggggtcggggagcgcttttggatcaaatccggcagggaattcagctgaacaagacccctggggccccagagagctcagcgctgcagccaccacctcagagctcagagggactggtgggggccctgatgcacgtgatgcagaagagaagcagagccatccactcctccgacgaaggggaggaccaggctggcgatgaagatgaagatgatgaatgggatgactgagtggctgagttacttgctgccctgtgctcctccccgcaggacatggctccccctccacctgctctgtgcccaccctccactctcctcttccaggcccccaaccccccatttcttccccaccaacccctccaatgctgttatccctgcctggtcctcacactcacccaacaatcccaaggccctttttatacaaaaattctcagttctcttcactcaaggatttttaaagaaaaataaaagaattgtctttctgtctctccataaaaaaaaaaaaaaaagg

SEQ ID NO: 54501 - DNA, 515 bp, Homo Sapiens
ggggggtgctgcgtcctgccagtgtccaccacagctctgcctgcccttcagcccagcaaggtttaatcaaaatgcaatgctttgcaagtctttactgcttggaggtggctgagttgggggccctaggcaggggtaagctggcaggcagtgccatggcaggccaggtcccctcccatggggtctggcccccgttccagcatgtccagcccctgaagttggagtggggggcggtctgcctttgctgccactgccaggcctctgccctgcagctgaaacttggccatcacatcaacagaaaacccctcccagtgccagctgcccagcgtgggcaggccctggggacaatacaggtccacctgaggggctgcagggtgacacccagcagccgctgccccctcactgcccacccagcgagggcagcctacccgagcctgccccctgccaggtgtgtgccctgaggctggcggctggatgcgtggccaataaaaagcagacctagaaaaaaaaaaaaaaaa

SEQ ID NO: 54502 - DNA, 737 bp, Homo Sapiens
  misc_feature (646)..(646): n is a, c, g, or t
  misc_feature (697)..(697): n is a, c, g, or t
aatccttgtaaagtgtaaaaaggaaccctcctatcgtggaatgaaagattaagtatattaacacttttcagaatgatagtttctgtatttgatgttgctcagaaatgtctgagtatttgagtaagttttacatgacagtgggtactgaaattaagtcattttgttcagcactttaacgctttcttatagaattgtcttaaaacttctggatccttgagcaaatgattatagtctcctgactttcatgaggcttccattaggaacagaatgattgcatgttgtccccagaacactgccaccttgctatgcgaatgatgttctcagcagcacttctaagaaacactcttaaaagttatttattgaaaatttttcgtatgcttttaatattttaaagaattgacctaaggaaagcttatgattggacttattttccaaccagataacatttactctaagtacccagtttttataatttatatgaaatcagatttcaacacttactttgtcattttgtagatcattttttttaaatactgtgtaaaaactttttttacacctaagctgtgtttttgatactgatattttcctatgctgaatagttttcttactttcagggaaggtaagaaaatactttttttatatttgntacttatgtaacattcatatttttctcattttgatatttgtaacatactgnatgctttctacttgtaatgtcaacaatagaattaaaatat

SEQ ID NO: 54503 - DNA, 668 bp, Homo Sapiens
  misc_feature (567)..(567): n is a, c, g, or t
  misc_feature (607)..(607): n is a, c, g, or t
  misc_feature (615)..(615): n is a, c, g, or t
  misc_feature (668)..(668): n is a, c, g, or t
ggagggtggagacagtggaaaagaaccgaggacaggaaaggattgggtaggtgaaggggtcaggggactggtagtcacccaatcttggagaggtgcaaaaagcactgggggctacccgttagctgcatctgccctggctgtttgcccgttcatgtcacaaactgccactactatgtacctgcagtggggttgcagagatgggggagactcaagtcttactccccaggagctcccagggcccaaggaggagaatgctgcctcctttcagtctggtctacacccactttctggtagcctctctgcttcctgtaattctggctgtttttccagactcagctcaaatagtgcccctccttaagcccatccctcgcccccagcctgaggtgatctttccctcctctgaactattagagcagttactgtctgttcagttcgtttggcaggcacacacagtggcataaattctattgttttgaactctgatttaaaattaaattgcagctgggcgtggtggctcatgcttgtaatcccaacacttagggagtcaggagaatcacttgagctcangagttctagaccaatctggggcacagagagaccccatctnctttaaantaaaagttaaatgctttatttcccgtatcctggctgtctgcctttcaatattn

SEQ ID NO: 54504 - DNA, 602 bp, Homo Sapiens
  misc_feature (559)..(559): n is a, c, g, or t
  misc_feature (577)..(577): n is a, c, g, or t
  misc_feature (589)..(589): n is a, c, g, or t
attcccacaaaccctgctgacttgaccccattggcccagacccctgttccctgccactggatgagggctcctgcactgcctacaccctgcgctggtaccatcgggctgtgacaggcagcacagaggcctgtcacccttttgtctatggtggctgtggagggaatgccaaccgttttgggacccgtgaggcctgcgagcgccgctgcccaccccgggtggtccagagccaggggacaggtactgcccaggactgaggcccagataatgagctgagattcagcatcccctggaggagtcggggtctcagcagaaccccactgtccctccccttggtgctagaggcttgtgtgcacgtgagcgtgcgtgtgcacgtccgttatttcagtgacttggtcccgtgggtctagccttcccccctgtggacaaacccccattgtggctcctgccaccctggcagatgactcactgtcggggggtggctgtgggcagtgagcggatgtgactggcgtctgacccgccccttgacccaagcctgtgatgacatggtgctgattctggngggcattaaagctgctgntttaaaaggcanaaaaaaaaaaaaa

SEQ ID NO: 54505 - DNA, 885 bp, Homo Sapiens
ggacgcgtgggtgtccgcctctccccaaattatgtggtgtgccgagactgtgaagtcaccaatgatggacataccattcaggttatcctgaagtcaaaatcagttctttcgggaggaccattgcctcaagggcatgaatttgaactgtacgaagtgagatttcactggggaagagaaaaccagcgtggttctgagcacacggttaatttcaaagcttttcccatggagctccatctgatccactggaactccactctgtttggcagcattgatgaggctgtggggaagccgcacggaatcgccatcattgctctgtttgttcagataggaaaggaacatgttggcttgaaggctgtgactgaaatcctccaagatattcagtataaggggaagtccaaaacaataccttgctttaatcctaacactttattaccagaccctctgctgcgggattactgggtgtatgaaggctctctcaccatcccaccttgcagtgaaggtgtcacctggatattattccgataccctttaactatatcccagctacagatagaagaatttcgaaggctgaggacacatgttaagggggcagaacttgtggaaggctgtgatggggattttgggagacaactttcggcccactcagcctcttagtgacagaatccttagagctgcatttcagtagcccaaagaggaccgggaacaagtctgtccttcctgagggtatgtccagattaagtaagggaaaatgaggggcacagcctacttaaaccctagcggtacccaagggtacccttaaatggggatcccggggaaatttagtaaataaaagcggatgggaccttcatcctggaaaaaaaaaaaaaaaagggcggggccgcctct

SEQ ID NO: 54506 - DNA, 816 bp, Homo Sapiens
  misc_feature (637)..(637): n is a, c, g, or t
tgtgccaccgatagtgtttgttcaagacaagggaaatgcagctctagctgagcttgatcagttactggcagtcgcagactttggaccccgggatgaaagagacaactttgtacaaaatgatttcagggaccctgatgccccacaaccctgcggcaccacagagccgaccacaagctccagtctgtgtgggatcgatcatgaggcgctcaacaagcagattatggagtacaaaaggaggaaagataaagggctcgggggcctggtgtggcaggggcaggtggctgagctgacaacgcagatgaaaaagggaaggaagagggccaagccccgcctggagcaggacagctccctcaagagttacctgtcaggcgaggaggttgaagatgacctggacctggttggtgccccggagtacgaatgctatgccccggacacagaggagttggaggcagagagaggaggtggcagaacagaggatggccacagctgcggagcaagcagggagtagatggagaggctctgcccatcccacatttgcagggaaaagcattggcacgcaacgcagcatgtggcttcattgaggcagttgatggagttaaaccatctgctcttctgctacttcaacattttctagctnttccgtgtatcttaacacaattgctacacaagtcactgttttttttccatgcactgtgtgtcatttaacattaaatggcatcttatccagattctcgcaaaaaaaaacaacacctgaacccggtccccggggcccccccccgttttcgtttttaaaaagccaattccttcgggggccaa

SEQ ID NO: 54507 - DNA, 973 bp, Homo Sapiens
  misc_feature (747)..(747): n is a, c, g, or t
  misc_feature (909)..(909): n is a, c, g, or t
  misc_feature (948)..(948): n is a, c, g, or t
aggcttcctgcattgcttccctgtgagtccaaggccttcccccaccactgggcagaggctggacagcacggacttctagagagagccgcgttgccagttcctctcccactcgctcgtccttatccaccacgctattatagtttccgttgtcctccaccagcatttcccttactctgaagttccggcattcacatcattcatgttttcttttgtcttttagctaaaggaaaagcattggcgatttgtctgattctggttttgagttactctttgttcagtaatgcactttattttattgtccaaagagagtcagagctaagcatacaggcttgggggtgagccctgctgtgagagttcaggccctgggaggctcagccacctcctcttgtgggaaggaggtctcagccccacctcgcatcttcacctgcccttggtgtggacacaccctctcatgctaccagcaccataatccagtgggggtgactgggtgcacacctgcccaggtgaacacagcggctgccagtctcctggtcccgagaggaggtggggcctggccctggctccctccaaccagctgctcctgggacacaggtgctcctgcttcggctctgtttcggctcacaggtgtgcatcactgggcttggatttgcattacattgaccccagccctgcagtggaacctaataaaagcgcctgaagcaaaaaaaaaaaaaaaaaacagatgctcacactacgagaagcatgggngaacaaaggtgggacaaatggggacccgtgtacagtcccagtgttggacaagggggggtcaatctctttgcggctaaaccgatctcatttctctggcccagtgggtatagaagtggaatccaaccccatgttgtgaaatgatgggccctcttttccccccangaacaggctggatgcctcctttgttcccctgggccagcnccccacttttcaggaatggagggaa

SEQ ID NO: 54508 - DNA, 566 bp, Homo Sapiens
acgccgtggaggtcacgggtctgcctgatgacatccccttccggaaccccaacacgtacgacatccaccggctggagaagatcctgaaggcccgagagcatgtccgcatggtcatcattaaccagctccaaccctttgcagaaatctgcaatgatgccaaggtgccagccaaagacagcagcattcccaagcgcaagagaaagcgggtctcggaaggaaattccgtctcctcttcctcctcgtcttcctcttcctcgtcctctaacccggattcagtggcatcggccaaccagatctcactcgtgcaatggccaatgtacatggtggactatgccggcctgaacgtgcagctcccgggacctcttaattactagacctcagtactgaatcaggacctcactcagaaagactaaaggaaatgttatttatgtacaaaatgtatattcggatatgtatcgatgcctttagtttttcccatgatttttacactatatttctgcccaccaggccttttttaattagttaaaaaagaaaaaaaaaaaaaaaaaaaaacttgggggggggcc

SEQ ID NO: 54509 - DNA, 498 bp, Homo Sapiens
  misc_feature (456)..(456): n is a, c, g, or t
cacgatgctcccccagcggagagcatgatccgtgcccttgcttctgactttcgcctctgggacaagtaagtcaatgtgggcagttcagtcgtctgggttttttccccttttctgttcatttcatctggctccccccaccacctccccaccccaccccccaccccctgcttcccctcactgcccaggtcgatcaagtggcttttcctgggacctgcccagctttgagaatctcttctcatccaccctctggcacccagcctctgagggaaggagggatggggcatagtgggagacccagccaagagctgagggtaagggcaggtaggcgtgaggctgtggacattttcggaatgttttggttttgttttttttaaaccgggcaatattgtgttcagttcaagctgtgaagaaaaatatatatcaatgttttccaataaaatacagtgactacctganaaaaaaaaaaaaaaaaaaaaaaaaaaaaaaaggctctctcag

SEQ ID NO: 54510 - DNA, 405 bp, Homo Sapiens
ggagacgagctccgagccaggtcaggcttcggaggccacaagctcagcctcaggcccaggcactgattgtggcagaggggccactacccaaggtctagctaggcccaagacctagttacccagacagtgagaagcccctggaaggcagaaaagttgggagcatggcagacagggaagggaaacattttcagggaaaagacatgtatcacatgtcttcagaagcaagtcaggtttcatgtaaccgagtgtcctcttgcgtgtccaaaagtagcccagggctgtagcacaggcttcacagtgattttgtgttcagccgtgagtcacactacatgcccccgtgaagctgggcattggtgacgtccaggttgtccttgagtaataaaaacgtatgttgcaaaaaaaaaa

SEQ ID NO: 54511 - DNA, 529 bp, Homo Sapiens
ccaagtccacagtggaaccagcccagacccttctccttagaagtggaagtagtggagcccctgctctggtggggctgccaggggagaccccgggagccggggaaggaggccgtccatcccgtcgacgtagaacctcgaggtttctcaaagaaatttccactcaggtctgttttccgaggcggccccggccggggtggattggatttgtctttggtgaacattgcaatagaaatccaattggatacgacaacttgcacgtattttaatagcgtcataactagaactgaattttgtctttatgatttttaaagaaaagttttgtaaatttctctactgtctcagtttacattttgtatatttgtatttaaatgaaagtgagactttgagggtgtatattttctgtgcagccactgttaagccatgtgttccaaggcattttagcggggagggggttatcaaaaaaaaaaaaatgtgactcaagacttccagagcctcaaatgagaaaatgtctttattaaatgtagaaagt

SEQ ID NO: 54512 - DNA, 559 bp, Homo Sapiens
gcacgagctaggttttatttcatcaataagcttcatctctggaggaaacttttttaatatatgaaagctgtgataaaaatgtttcagatgtttagtcaattgtgaaatttttcttaaggcaattttcttttctatcagtttgtatattactaagccccaagagacatttcctgtgctagagtccaatatttgagtctctcgtgcaaatgagactattctttgtggtacaattccacctatcatatgtgaaaactgcagtaaaaataaacccagatgctaaatcattcctacaaaggtttgactgaaactgtggcagatgtctcatcttctttatatgttaagcagcatactcttctgatttttattgcaatcttttaccaagtggtgcacaaacttggtattgatgtctttattccattttgagtttagattgagaatatttttattttctgaaggcagagatatctactgtataattgcaccaaagtacatttgaaaggaaggttttcaatagtgtaatactgcagcgatgtagataaaatcacaaatgtataatgtg

SEQ ID NO: 54513 - DNA, 607 bp, Homo Sapiens
  misc_feature (590)..(590): n is a, c, g, or t
gacgaacctggacaaacaccagactcagacgtaccgagggcacaggcaacagcattattgagaaaagcccttacagaagagtgtggccgtagtcagctattcacagtagtgaatcatcttgcagcttgccatctattctgaatgacaatagtggaataaaggaagccaaacctgctgtatggctcaacagtgttcctacaagggaacaagaagtttcaagtggctgtggagacaagagcaagaaagaaaatgtggctgcagatatcccaatcacagaaacagaagcctatcagttgctgaagaaggccacccttcaggataatacaaatcaaactgaaaacaggtttcaaaagacagatgcttctgtgtcacacttgtcaggtttgaatattggcagcggtgcattccgagacaaagacagctaacaaaattgcttcggaagctagttttttcatctagtgaaggaagtcctttgtcaaggcatgaaaacaaaaagaaacccgtgatcaatttaaatctaatgccctctgggatgagtctgatgacagtactccagaaattgaggctgctttacgccccagaaccatacnccgtgattctgatgatt

SEQ ID NO: 54514 - DNA, 595 bp, Homo Sapiens
gagaaaagccaaagttaatgcaacctagtggaaactgtaagaccatttgagtattgtttgttttattgatgcatttggattttgttgtttgatggaatttgagccaaaaaaaaaatacgcaggctttcctatttctacaactgattgtacttatgcattttgtaccagtggaactttttatactggagattaaaaaaaaaatggaaatttttgtggcttgctctggtgggcccctgacaatgactgatttcaagtttgatttcgggttgattgattgattgattgatagaaagaaagttgcttttcttttgagaattaaaaactttggcttgatttcttttttccctttgcttatatctagcattagaattttgtcttaaaataacagcggtaagtttcactttttattctgtattgtgcagttacacaataaggtaattagatttagaagtactcagtcactttaagtggataaatgtattagttaaaactttagggtttgcttttttgctgtttagatcaaagttttttctgattcttctgtcctcattgtgaacataaccgtgtagttgaaacagtcaaacttatttttgta

SEQ ID NO: 54515 - DNA, 829 bp, Homo Sapiens
tgaatacattctgctttatcttggtcacatacaattatttttacagttctcccaagggagttaggctattcacaaccactcattcaaaagttgaaattaaccatagatgtagataaactcagaaatttaattcatgtttcttaaatgggctactttgtcctttttgttattagggtggtatttagtctattagccacaaaattgggaaaggagtagaaaaagcagtaactgacaacttgaataatacaccagagataatatgagaatcagatcatttcaaaactcatttcctatgtaactgcattgagaactgcatatgtttcgctgatatatgtgtttttcacatttgcgaatggttccattctctctcctgtactttttccagacacttttttgagtggatgatgtttcgtgaagtatactgtatttttacctttttccttccttatcactgacacaaaaagtagattaagagatgggtttgacaaggttcttcccttttacatactgctgtctatgtggctgtatcttgtttttccactactgctaccacaactatattatcatgcaaatgctgtattcttctttggtggagataaagatttcttgagttttgttttaaaattaaagctaaagtatctgtattgcattaaatataatatgcacacagtgctttccgtggcactgcatacaatctgaggcctcctctctcagtttttatatagatggcgagaacccaagtttcagttgattttaccattgaaatgactaaaaaccaggaagaccaccttaaaacaatatttgtttctaaaaaaaaaaaaaaaaaggc

SEQ ID NO: 54516 - DNA, 553 bp, Homo Sapiens
  misc_feature (152)..(152): n is a, c, g, or t
agcatttttacaccccttagggtgcttaattctgttgaaaccaaaaagatttgtctacaaatgctatcttttttagaaactattagaaatgactccctttcaaagtcaatctttggaaaatattgaggaggtcactaattagttggtgcagntaatataattcaagatgatttggatgatgggaagtttgagaccgctgcattttgtttttaaattatgcaccttctgataacccccaaatacagaaatgttctacatctctgaatgacctctgactttaaaaaagtttttatttgcatggctgtatttacattaacactgacattttcttctactcttctcccttctttcatcttggggttgggtagagaaacacaaaggaaactgaagcatgtgccattctatactgtcattccaaattctcatggactattgcctgttgtgaaaatgcttgaaactgcactgaaagctgcatctgtctgtatctttcttttgtaaatgacctcacatgtaaattcaccaaataaatattacattcaaaaaaaaaaaaaaa

SEQ ID NO: 54517 - DNA, 626 bp, Homo Sapiens
tttttttttttttttagtagagatggggtttcaccacgttagccaggatggtctcgatttcctgacctcctgatgcgcctgcctcagcctcccagtgctgggattataggtgtgagccactgcgcctggctaagttattattatttttttgagacagtctcctggtgtcacccaggctggagtgcagtggtgtgatcttggctcactgcaacctccgcctcctgggttccaacgattctcctgcctcagcctcccgagtagctgggcctaaaggtgcccaccactatacccggctaatttttgtatttttagtagagacaggggtttcaccatattggccaggctggtctcgaactcctgacctcgtgatccacctgccttgacctcccaaagtgctaggataacaggtgtgagccaccgcaccctgccaagttattttaaaatgtaccattattattgactatagtcacctggttgtgttatcaaatagtatgtcttattcattctttctttgtgtgtgtgtgtgtgtgtgtgtgtgtgtgtgtgtgtgtggaacccattaaccttccccatctcgctgccaggccctaactaccctccccagcctccaggaactatccatccac

SEQ ID NO: 54518 - DNA, 980 bp, Homo Sapiens
  misc_feature (64)..(64): n is a, c, g, or t
tgggctgatgttggtcaaatgacctagaaacaggattctacctgaactgaaaggactgtgtgancctcccccaagccaaccactttcacctgggatgactttcgattatgctttgttttggggctgtatttttgaaatactctacaagaaagctgtggctcaacacatgagaagaagcacgaagcagttaggctgtacatcagacagaagggtaatgcgtgcagttcctgctgcctgcaggcagacgaggcctttgctttacagcactgtatgtgttgcacgatggatccgtgacagcactttcctgttgcactgaaactcttggccatgtagaggaaaagatatggagttatgtggatttcatcactagtatgtgtgcgtgagctggtcagttgccaaaggaggaaataaggttagaagcctgaaccgttacaaaagaagagctcactatggtcaaaaagtgatggctttcaggacttgttttttatcctgcctcacagttgttaaaggctgttccaaggcatcaccttccttctctacccaacaaccctgtgtaacaactaaagtagaaatatctctcatttggtgttggttttccttaaaattaccaaacaaagcaaaaaatacccttggtttttatagttgagatgtcaagaagttaaattgaggcttaatgagcctaggtagcttgtccaaggtcttatgaccagtcaaagggcagcttggaggtaataaatctaattttatattgactcagcacttggttcattacaaatttgtttttcccagcataatggaggggctttagagtttgggctttttaggggttaggcaaaatggcctgcagggagtttttatgggggacaaaaatagattttgatcaattggccaagaaattagaaattagttgtttttggggcagcttttttaaaaaataaagggccggttttaaacccgggtgggaattctggtggggaact

SEQ ID NO: 54519 - DNA, 499 bp, Homo Sapiens
cctgtcagcatggggccggaagccagttccacagaggaccccggctccggttcttccggagaggggtgttcatgctctgctgtctaaggtgatcagactcatcctcttcaaaattagatgtgggaaccaggagtgctcgtgtgctgagagcccagtgaggcacgggagcggcgtggccccccttccctgggaagatgttgaagaggggcagcgttggggggaggagggagctggtgctgcagtggccagtggctgtggctcatttcaggcctcaagctccggggaaaggacattggaaagcccatcgagaaggggcctagggcgaaatgaacacaaagcctcgaaatcagtgcgctccagctgatctcgttccgccggttccccttggccgccagttccgttctcctcacgggccgaacggaacaaggggtccagcttgcgggggaccctccccagcccattcctgctgtcaaacaaacaaaaccttgcaaagcaaaaa

SEQ ID NO: 54520 - DNA, 445 bp, Homo Sapiens
gagccgccggacggacgctcgtcttcgcccgccatggccgagagcgactgggacacggtgacggtgctgcgcaagaagggccctacggccgcccaggccaaatccaagcaggctatcttagcggcacagagacgaggagaagatgtggagacttccaagaaatgggctgctggccagaacaaacaacattctattaccaagaacacggccaagctggaccgggagacagaggagctgcaccatgacagggtgaccctggaggtgggcaaggtgatccagcaaggtcggcagagcaaggggcttacgcagaaggacctggccacgaaaatcaatgagaagccacaggtgatcgcggactatgagagcggacgggccatacccaataaccaggtgcttggcaaaatcgagcgggccattggcctcaagctccggggaaaggccacat

SEQ ID NO: 54521 - DNA, 1137 bp, Homo Sapiens
  misc_feature (657)..(657): n is a, c, g, or t
cctgccatcagacattgagactgagaaaacctgccccgaatcacattcaccttcagaagactcctttgtgagaagctgagggcctggccctcttcctcttcctggagagaacagccctccaccacccacagacctcgcgggcctcacttagcgtgctcctccctgtccgagaacccgagggtccccatgtggattatccagccagtgtgtggtcctttgaggccccaagcgcaggcctgtgatgaggaccaaagaggtgacttatggtcaggagtactccaaacagctctcagagtaggcatctttcctgggtctctaaagagtcatgctgacctggtgtgcaaattcccttccacccatccctctacctcctctggggatggcttgccgacatgctttagaaactcccctcttgggaatgctcctctgactgagggctccaacagctttaatgaaatcagccgagagggtaaaaaccaacctgttgcatagaatggaggggggaaaaagcacatactcaatagatttttgagtgtggtactctgtatttttgcagcgtttattttccaaatgaccagtttagaaatatgtgatgtaaagtacatactgtacgtttgctgaaaatttatattaaaagcactattttaattcttaccnccagcgaccccgatccttacccatccccccctcgacccttccgcgccctccctttagcaaagtcccccgcgggcccacacaacccttttcatgagggccaccctctcttttctgtcgggccgcctctttcccgggggcaatgcgtcgctcctctttatcaaaaacgcctcgctccccttacattttggcagtcgcctacgcagcgcggttacccactgtttccagcccgggccgaaacattgcggcaccgccccgtataccttttcgcccgagagcccccttcttctcgtcggccgggcaccatttaccttctggcgacaacacgttcccttaccgcgcggaatatccccggttctcctgtcgggtatactatactcgcgctacgatcgccgttgcttaaacctgccgcttcgtccggttcctttcgccgatgcgcccccctacaccctccccagtgccaaacacttttccgacccctcc

SEQ ID NO: 54522 - DNA, 877 bp, Homo Sapiens
  misc_feature (863)..(863): n is a, c, g, or t
ggacgcgtggggccttaactttagtttgttcacagggaggcaagctgacatgaaccttttgtcgtgggacttcaggccacattggcttgaaggcattcgtttccttctggggtggggacaggccctcatggcaggcttgttcccgtggctctgagcgaggcctcttcctgctgggctcccagactcctgcatccaggcccccaccttctcggcttctggtttttctttctttttggtagaacacaacatctaccattcagttaaaccttctttatctcctcctctggcatccatttttccaaagaagagtcgagtcctctgaggtctgtgcttgaaaaccgtccgaaggcattcttgttagctttgcttttctccccatatcccaaggcgaagcgctgagattcttccatctaaaaaaccctcgacccgaaaccctcaccagataaactacagtttgtttaggaggccctgaccttcatggtgtctttgaagcccaaccactcggtttccttcggattttcctccctttgttcggggtttggtttggctcctctgtgtgtgtccgtatcttgttcggtgtcctcgaggttgagcttcactccactgcggcagaggcagcgtgcacactcggatttgctacgtttctatatatcttgaagctaaatgtatatatgagtagtttgccatgagataacacagtgtaaacagtagacacccagaaatcgtgacttctgtgttctctccatttgagtattttgtaattttttttgaaatattttgtggacataaaataaaacccagctacactacaaaaaaaaaaaaaaaaagggcgggcccgctctagaagtattccctcgaggggnccccaagctttacg

SEQ ID NO: 54523 - DNA, 859 bp, Homo Sapiens
  misc_feature (668)..(668): n is a, c, g, or t
acgaatagaaggctgtcgtgaatcacatcagatgtaaaatcattccttctgtttactcttttaattttcatcctttgcaggtagtgcaaattcaacttcaaatatggtgtaggttttgctagattccatatttttttcttggatttttgctaattatttttagcaaaaaatttttgctcagtggcaccctccctagtgtccatgggttagggccatgctggggaaaacgggccggtatttacacacgtgcaaaacacccagagacggcacaaggaggttgaactcatgtttcagttcgcgaacattgactccttacgaaagtcacttcattctaactagatgcgcccacttccggtcattatttcgtttgcatgatgtattgcttcttcacgttttgtttttattgagcacggagtagaattccagggctgccttgacttcttccctgcatgctccctcccagtgactttccttccctttcacatgaggatctgccgttcatgttgctttctcctttgtcctcttggacttgagggcattgtgaaaagctttgctgtgatttaaaaatgccagcaattttaatctagcagtgttgaagctgggaattttttggcgcaatccatgtagcagtgacccaggcttgggagccagaaacaagtgtgacctgngattttatttaacacaactgttgccaaagagttggctttgtttatttggtttttggcggggaaaaggagtggtatttgaatgctttctgtgggacaatgtaccccctaaacacatcatgtatttttaaattgccaccctacctaaaataaaaccataagccatatttgaaaaaaaacaccccacatcacct

SEQ ID NO: 54524 - DNA, 673 bp, Homo Sapiens
agcagatgccatcttctggcttcctcaaggagccagttaaaaaaccagagcattcctttttattgaaaaataaaattaatttgttatcaggttgtttcagttgtattggatgccctatctatctgctaaagcaaaaagtactaggctactaagtgcattttcatcacagaaaagagttgcatttgtattaacaagaaatttgtatacccacgcttcagctactatctaatcatcacccgaagatttaagatacaccaaatttcagtttgtttgtaacattgttcatctttagtgcactttgttttatataataaagtatgcctgttatattaaataataagaatatggcaattagcgatatagcatacccaaacaaagatgttctcgatacagtctggcaaagactatcccaaggttattttaatgaattcagacattttttcctgtggatatttctccatcctaaaaaaagtggcaaccaaggaaaatatttagatgcaacttactagagtgatgatgtgaaagaaatggtgattctggtatcatggtgtttattttctttcttataactgcagagaaaatatcctgactaaaaaaaattcatttttttggattcctttcttttacaaattgtgctgaggcaactatggcatagaaataaacatttgacatt

SEQ ID NO: 54525 - DNA, 533 bp, Homo Sapiens
gctgaacaaggtcgtcacctcttccatcatggtgctagtctgcgccatcaacctctacttcgtggtcagctatctgcccagcctgccccaccctgcctacttcggccttgcagccttgctggccgcagcctacctgggcctcagcacctacctggtctggacctgttgccttgcccacggagccacctttctggcccacagctcccaccaccacttcctgtatgggctccttgaagagaaccagaaaggggagacctctggctaggcccacaccagggcctggctgggagtggcatgtatgacgtgactggcctgctggagagggggcgcgtgcaggcagcaggatggagtgggacagttcctgagaccagccaacctgggggctttagggacctgctgtttcctagcgcagccatgtgattaccctctgggtctcagtgtcctcatctgtaaaatggagacaccaccacccttgccatggaggttaagcactttaacacagtgtctggcacttgggacaaaaacaaacaaac

SEQ ID NO: 54526 - DNA, 339 bp, Homo Sapiens
ttttacattttaggacactgtgaggggaaaggacaattttgaaattccttttcaaggaaaaaaaaggtctttatgctttgccatgaggccacattcagctgctatttaaacttaatatcttgaacctaaagaatgctgacttttcctacatttccagagttaggcagtattctacacttaaagactactactatttttataaaaggtaatctattcaaatttcttcacagatttcaagtctctcaaacatcaagacaacttcagcagtcggtacaagtcacatttcattttgattgaatacatgatcttgaacagctcctgtacttgctctttgtaaaa

SEQ ID NO: 54527 - DNA, 639 bp, Homo Sapiens
cctccacaaagagcagcttggcaaagcccacctggttacgcggcatgggcaggcagggctgctggctgtgctgtgggcagggctgcagtgctcaggtggggtggggctgctctaccccaagctgctgccccgatggcccctggcgaagctcaagctataccatgctacttctgggctggtgggctacctgctgggtagtgccagcctcttgctgggcatgtgctcactctggttcactgcctctgtcactggtgcagcctggtacctggctgtattatgccctgtcctcaccagcttggtcattatgaaccaggtgagcaatgcctacctataccgcaagaggatccaaccatgagctcttcccagcctaggggaagcctggatttgcccctccatgtaggagctgggcctagggacctgttgaactctctcagctgagtcaggggacacctcaggcactgggacagttgggcatttggaggcccgtgtgtgaattcctgctcctcatgctggagtgcctcccatttccttcccctttctctgtcatcccagaggaacataggcatcatgtgtctggatgaagctggggctgcaagactgcctctcctgcaaggcagctcatacttgtactgtatgttc

SEQ ID NO: 54528 - DNA, 699 bp, Homo Sapiens
aaaccctatgagtattccgactacagagtttgcccaaatcaactgtaaatgacacttgtgtaacgtatatatagtgtttcatgaggtgtatataaaatagcaaattatgacagaacagtgatcacatatatttggatttatatgatatacagttacagtttactctgcagaggtaccttacctggtattctttgaattttttttttttttggaggaggaagagagcaacaaatttgattatatttttaagtgtcttagatcctgagaaagatttattgtgcattatttgaaccctgtcaatatctttttgagtaattgttttgtttcttacccttaaatagtcttgtgaagctgtaggcatgatagataacatggcttttactccttactgtttgaaaagataagtactttagcttctttctgcagccatttcatctgcgccaacactttggaacctaatactgtgtaaggctttacaatatacggattggctttttgtgacccagattgattggttgccacatgttatgtttgttgaagtggttctcatgcaaaaatattacacatttgtgttctgggtttttttttttttttaaccaactcaatatgtgtttgatgatagtgaattgataaaacccgaagcttttccctgtaaatcttacatctttgcctttaaagaatgggttacaaccatcacta

SEQ ID NO: 54529 - DNA, 777 bp, Homo Sapiens
  misc_feature (718)..(718): n is a, c, g, or t
ctgatcaagacacatggcttgaaaatggaagacacaaaactgagagatcattctgcactaagtttcgggaacttatccccgacagtgactgaactcactgactaataacttcatttatgaatcttctcacttgtcccttgtctgccaacctgtgtgccttttttgtaaaacattttcatgtctttaaaatgcctgtggaatacctggagtttagtatcaacttctacacagataagctttcaaagttgacaaactttttgtgacgtctttctggaaaagggaaagaaacatagtcttccttctttcttgggcaatatccttcactttactacagttacttttgcaaacagacagaaaggatacacttctaaccacattttacttccttcccctgttgtccagtccaactccacagtcactcttaaaacttctctctgtttgcctgcctccaacagtacttttaactttgtgctgtaaacagaataaaattgaacaaattagggggtagaaaggagcagtggtgtcgttcaccgtgagagtctgcatagaactcagcagtgtgccctgctgtgtcttggaccctgccccccacaggagttgtacagtccctggccctgttccctgacctcctctcttcaccccgttaggctggttttcaactgtaatgctgccgtccttctcttgcactgccttctgcgctaacacctccattcctgtntataaccgtgtatttattacttaatgtatataatgtaatgtttgtaagttattatttat

SEQ ID NO: 54530 - DNA, 901 bp, Homo Sapiens
  misc_feature (745)..(745): n is a, c, g, or t
  misc_feature (795)..(795): n is a, c, g, or t
  misc_feature (883)..(883): n is a, c, g, or t
  misc_feature (897)..(897): n is a, c, g, or t
agaactgaatccatatttcaacagagccctattggcttactgaaagacaggagtttatctatcggaagaacatgaatctctaacagctccatacttctttcactactcaaatggcattgggctgagtaagtaaccatatcacctctcttcttagtaaaaagccctatgtgaaaagatcccaagatggagaggaagaaacgctaattcagcatgtgttcattctgcattgagaaggaactgatacatctgatgcatgctttgagaccagaagaaaagacttacctgaataattactacattagggaagctactgtctacgttaagataaagggtattgccttggctctatttggcatggatggagcccagttggaaaattcccaaatattacaacaagtccttgaacccaggccatgtggttagacgttggtgttaaggttagaccttatgttagagtcatttctgatgttccagcttctagccatgtagtgctctcagtcttcataccccagaaattattggtatatttgtagataccgagaatgatccctcagtctgagaggttagaatgatcatctgtaatctgagggttaatttctaggcaggtggagagagtggtaaaaaagaaatgaaattgacaagctaggaaagaggaggcagaaagatttggaaaattcacagagtttcacccttaagctgtaaagagtgggtcacatttgttagccacggaacatagaaacatacncaaggccagaaaaagaagaaggagctcaactaaaagtggcatagagaatncccttttaaaaccatatattggcatatgctcctaaagaggagaaagggtgattgaaggaaaaaaattcttaaatattggaaatgggangggttctttggaanaata

SEQ ID NO: 54531 - DNA, 625 bp, Homo Sapiens
  misc_feature (474)..(474): n is a, c, g, or t
  misc_feature (491)..(491): n is a, c, g, or t
  misc_feature (578)..(578): n is a, c, g, or t
  misc_feature (600)..(600): n is a, c, g, or t
  misc_feature (614)..(614): n is a, c, g, or t
ctcagttaggggaacttctctgtaaagaaccctgggtattgagcaaaaaccttattatcgttaatgacctataattggaagcttcctgcctttttctttggttgctcctgtggaaaatactgaaaagattactttgttttattttgttgtctttttataaaaggggaggtggagagaccccttcagagcagggattgtgccgggagagtgcctctgactttgggacatttcatccacagaaatttccaagccaatggtttcttttgggttttggtttttatgtttgttttttggggtttggaaaaacatgcatttttaccgtgcacgtaaattggtcagcagaaaagggagcccagaaaaggcagcagatggaccatgcccttgctgggttttccttttctttgggactgtgaggggaaatggtttttagaggtgagggttggtccatgtggaggaaagaagtgtctctgttgngggacagaggaacctgnggagtccatcgcatgtcctacaatctgctcttagacacggccttgccaggagagcctgccctcagactgcaggaccagaacccctgncttcatctttccaagcaccggngcgaaaaaccacanaggaaaggaag

SEQ ID NO: 54532 - DNA, 740 bp, Homo Sapiens
gccgaggggtggtggctataacgtacagcaaccctgtgtcggtgccccctgcccgcttctctagtgtcctacgggtcctggtaccagcacgtgcaggagtggtgggagctgagccgcacccaccctgttctctacctcttctatgaagacatgaaggagaaccccaaaagggagattcaaaagatcctggagtttgtggggcgctccctgccagaggagaccatggacttcatggttcagcacacgtcgttcaaggagatgaagaagaaccctatgaccaactacaccaccgtcccccaggagctcatggaccacagcatctcccccttcatgaggaaaggcatggctggggactggaagaccaccttcaccgtggcgcagaatgagcgcttcgatgcggactatgcggagaagatggcaggctgcagcctcagcttccgctctgagctgtgagaggggctcctggagtcactgcagagggagtgtgcgaatctaccctgaccaatgggctcaagaataaagtatgatttttgagtcaggcacagtggctcatgtctgcaatcccagcgattgggaggttgagctggtaggatcacaataggccacgaatttgagaccagcctggtaaaatagtgagacctcatctctacaaagatgtacaaaaattagccacatgtgctggcacttacctgtagtcccagctacttgggaagcagaggctggaggatcatttcagccag

SEQ ID NO: 54533 - DNA, 720 bp, Homo Sapiens
gaccaccttagaggtcagcgtgtgtgactgtgaaggggccgccggcgtctgtaggaaggcacagcctgtcgaagcaggattgcaaattcctgccattctggggattcttggaggaattcttgctttgctaattctgattctgctgctcttgctgtttcttcggaggagagcggtggtcaaagagcccttactgcccccagaggatgacacccgggacaacgtttattactatgatgaacaaggaggcggagaagaggaccaggactttgacttgagccagctgcacaggggcctggacgctcggcctgaagtgactcgtaacgacgttgcaccaaccctcatgagtgtcccccggtatcttccccgccctgccaatcccgatgaaattggaaattttattgatgaaaatctgaaagcggctgatactgaccccacagccccgccttatgattctctgctcgtgtttgactatgaaggaagcggttccgaagctgctagtctgagctccctgaactcctcagagtcagacaaagaccaggactatgactacttgaacgaatggggcaatcgcttcaagaagctggctgacatgtacggaggcggcgaggacgactaggggactcgagagaggcgggccccagacccatgtgctgggaaatgcagaaatcacgttgctggtgggttttcagctcccttcccttgagatgagtttctggggaa

SEQ ID NO: 54534 - DNA, 634 bp, Homo Sapiens
gtacccgccacccccgcacccatacaacccgcacccgggcttcccggagctgggctacagctacggcgggggcagcgccagcagtcagcacagcgaaggcagtcggagcagtggctccaaccgtagcggcagcgatcggaggaaggagaaggacccgaaggccggggactccaagtccgggggcagcggcagcgaatcggaccacaccacacgcagcagcctgcgggggccgcgggagcgggcgcccagcgagcgctcagggccggcggccagcgagcacagccaccgcagccaccattccctggccagcagccttcgcagccaccacacacacccgagctacggtcctcccggagtgccccctctctacggcccccccatgctgatgatgcccccgccgcccgcggccatggggcccccaggagcccctccgggccgcgacctggcctcagtgcccccggaactgaccgccagcagacagtccttccgcatggccatgggaaaccccagtgagttctttgtggatgtgatgtgagcagggcccctcccccagctccattccgctcccaccccagccggctgcgttcctctctccatccgtcccgtcttttttactttgtctggtacctgaaaa

SEQ ID NO: 54535 - DNA, 724 bp, Homo Sapiens
cttaaagtggaaataagactatttttgacaaaagatgccattaaatttcagactgtagagccacatttacaatacctcaggctaattactgttaattttggggttgaacttttttttgacagtgagggtggattattggattgtcattagaggaaggtctagatttcctgctcttaataaaattacattgaattgatttttagaggtaatgaaaacttcctttctgagaagttagtgttaaggtcttggaatgtgaacacattgtttgtagtgctatccattcctctcctgagattttaacttactactggaaatccttaaccaattataatagctttttttctttattttcaaaatgatttcctttgctttgattagacactatgtgctttttttttttaaccatagttcatcgaaatgcagctttttctgaacttcaaagatagaatcccatttttaatgaactgaagtagcaaaatcatctttttcattctttaggaaatagctattgccaaagtgaaggtgtagataatacctagtcttgttacataaaggggatgtggtttgcagaagaattttctttataaaattgaagttttaagggacgtcagtgtttatgccatttttccagttccaaaatgattccattccattctagaaatttgaagtatgtaacctgaaatccttaataaaatttggatttaattttaaaaaaaaaaaaaaa

SEQ ID NO: 54536 - DNA, 501 bp, Homo Sapiens
gcacgagcgcttccgcgtcctgcctgaccacaccgagccccgcaggaagccggagctggtcctgcgcgcagagggcggactttggctgcgggtggagccctgagctgagttctgcagagacccactctgaccccactaaaatgacccctgattcatcaaaagtgaggcctagaattaccctaagaccctgttccacatttttgtattccatcctagatatctactcaaaataattgattctgttttcaaacagaaagacgcttgtgcgtgaatgttcatggcagccctattcacagtagccaaacgatgaaaacaaccccaagctatatattaccagatgaaaggataaacaaaatatggtccatccatacaatggagtattacacagccataaaaaggaatgaagcagtgatccccactacactgtggatgaaccttgaatgcatgatactgaatgaaagacatcagatgcaaaaggtcaaaaaaaaaaaaaaaaaactc

SEQ ID NO: 54537 - DNA, 550 bp, Homo Sapiens
gggaactacagagacctggacccagctgcactattttaatgtaaaaataacagtatggccaggtgcagtggctcacgcctgtaatcccatcactttgagcagccaaggcgggcggatcacgaggtcgggagattaagaccatcctggccaatatggtgaaaccctgtctctgctgaagtacaaaaaattagctgggcatggtgttgcgtgcctgtagtcccagctacttgggaggctgagacaggggaattgcttgggcccgggaggcggagattgcagtgagccgagatcacgccactgcactccagcctggcgacagagtgagactctatctcaaaataataataataataataataataataataataataataacagtatatttggtgtcaggagagggctcaattctcatttctgcctttcctgtgctggctcatggtagctgggcatgacttgccttcctacataggttgtcttcatacatatgcactgggaatcaataaaagcccatggtgagaaaaaaaaaaaaaaaaaaaaaaaaaatggc

SEQ ID NO: 54538 - DNA, 754 bp, Homo Sapiens
acaacaccatcatttgtgcgcgagctgggaaagacctggtctccagcctcacctcggggctgctcaccatcggggatcggtttgggggtgccttggatgcagcagccaagatgttcagtaaagcctttgacagtggcattatccccatggagtttgtgaacaagatgaagaaggaagggaagctgatcatgggcattggtcaccgagtgaagtcgataaacaacccagacatgcgagtgcagatcctcaaagattacgtcaggcagcacttccctgccactcctctgctcgattatgcactggaagtagagaagattaccacctcgaagaagccaaatcttatcctgaatgtagatggtctcatcggagtcgcatttgtagacatgcttagaaactgtgggtcctttactcgggaggaagctgatgaatatattgacattggagccctcaatggcatctttgtgctgggaaggagtatggggttcattggacactatcttgatcagaagaggctgaagcaggggctgtatcgtcatccgtgggatgatatttcatatgttcttccggaacacatgagcatgtaacagagccaggaaccctactgcagtaaactgaagacaagaactcttcccccaagaaaaagtgtacagacagctggcagtggagcctgctttatttagcaggggcctggaatgaaacagccactgggtacaggcaccgaagacaacatccacggctaacacccctcagtccc

SEQ ID NO: 54539 - DNA, 789 bp, Homo Sapiens
catccatgacctaactcagatccactctgacatgaatctcccagtccctgaccccattcttctcaccaatagccatgatggactggatggtcccacttataagaagcgaaggttggatgagtgtgaagaagccttccaaggaaccaaggtgtttgtgatgcccaatgggatgctgaaaagcaaccagcagctggtggacattattgagaaagtgaaacctgagatccggctgttgattgagaaatgtaacacggtcaaaatgtgggtacagctcctgattcccaggatagaagatggaaacaactttggggtgtccattcaggaggaaacagttgcagagctaagaactgttgagagtgaagctgcatcttatctggaccagatttctagatattatattacaagagccaaattggtttctaaaatagctaaatatccccatgtggaggactatcgccgcaccgtgacagagattgatgagaaagaatatatcagccttcggctcatcatatcagagctgaggaatcaatatgtcactctacatgacatgatcctgaaaaatatcgagaagatcaaacggccccggagcagcaatgcagagactctgtactgaggccagggccagggccaggggactctgtgagtctggctcaagaccgacattgccttggtttgttacatgactatcgtgatggggaaactggctggaaatagtaatcacacctctctgtttttagttagagtctaatgaaactctcatctagttctgtgatgtgtttacctcttttt

SEQ ID NO: 54540 - DNA, 851 bp, Homo Sapiens
  misc_feature (827)..(827): n is a, c, g, or t
cagttacacaggaaccctaaagcaaatctgccaccgtgggggaactgacgctggagatgcaaggtgctggtgggtctgagctggacgtcgcggtgtgtcctctgtgcccacggtctgagctagctagcgcaccgccgagttaaagaggagaaggaaaacatgctgctctggtgcacgcctgagcgtcctccatcttccaggatggcagcaatggcgctgtgcggcctcaccaggcccacgaggagcagcagcgctcggcccggagcagcaggaaggcccctctgtggagcgcccgccgtctgctccggggtggttcagtcactgcttgttgacatcaacatggcaattgcactcatgtggactgggaccgtgcgagctgccgtgtgggttagtcgggtgccaggacaatgaaatactccagcacctgtggctgacgaatttgtttctacagaaataacagctggggacaactgcggtgatgatgtaaaaaccttcccataaaatgtaagaaaagctgatgaggctggtgacgttcagcctttgtcaataaacctgtcatgtgcggatccttccggaggctctgtcttgggggtctgccaagtggggtgggacgtggggtgggcatggggcactcgggagaatccctcccccctcacagaaaacacagccctcccctgccaccctgaaaactctcacaaggccagcctctgagtccggccagccggacctaacctggcatttccaggctgtccaaaatgccgtgggggcacttctgtgtcatgcttgggtgccatgacaagcttcccatgaattgtaggaggcagggnctcagccttgtccagcagcctgtg

SEQ ID NO: 54541 - DNA, 517 bp, Homo Sapiens
tgagtcctgcgaggagcggcgttatgtgcagagtgcccagtcccagatccataacacatgctgggccatgatggggctgatggccgttcggcatcctgacatcgaggcccaggagagaggagtccggtgtctacttgagaaacagctccccaatggcgactggccgcagtggccttcaagtcacaggacgcagcgattccctgccctcttcggtgttattacacaggcaggacttcagtgtcagtatccctgccttcagtcttctttagaaatcacatctgtgttcaatccattgtttagagggagtgtatttttcctgttccatgaagaggactttttgttcacaattggatcacaatgcagaggagtctgttcctcccccgtcggcttctcggtgctgggagggtgacctgtcccagatgactcatcaccctgacatgctcttgacaaaggacaccaccaagaggagatggcagctgtaccggtgcagcctctgtctgagggggatatttgcctc

SEQ ID NO: 54542 - DNA, 993 bp, Homo Sapiens
aaggacctgagctgggaaatagcgagaggcggggatgttggggattttaaaacttatgtagatcaggcatgtagagctgctgaggagtttgtcaatatttactatgagacaatggataaaagaagacgggcactaaccaggctgtatctggacaaggccaccttaatatggaatggaaatgctgtttcagggctggatgccctaaataatttttttgacacattgccttctagtgagttccaggtcaatatgttagattgccaaccagttcatgagcaagcaactcagtcccaaactacagttcttgttgtgaccagtggaactgtgaagtttgatggaaacaaacaacatttcttcaaccagaacttcctgctgactgctcagtccactcccaacaatactgtgtggaagattgcaagtgattgcttccgttttcaagattggtctagtagttaaaggggcaaaagtccattctcatttggtccattagttccagcaattgaaatttatgtgaattattttgattgtagaagcactataatatgtgctgaaactaaatttctttaatattttctattcctgtcagcaccttttctagcagctgccagtttggagcattgccctctaagagctttaaaactatttttttacatgccttatatacattccactaatgacattcttataataatattaaacacatgatcttggtactaacatactcactgtgaacccagcctattgcaaaaataaaatctttttataatattatctatgggatgtcagcacaatataacactctgggaagaaatggagttttttgggtaattaggttaattttctagtaaaacacttgcctgtttttcagttaacactggtaaatgccatttttaatataatggctttttccaatcagtttcggggaaaatagaacccgaatttagggtttaaattaccaactctggaattattgggaattgcctattaaaaaaa

SEQ ID NO: 54543 - DNA, 731 bp, Homo Sapiens
ggatagaccagtggcactgttgtttcacaagatgatgtttgaaactattccaatgttcagtggcggaacttgcaatcctcagtttgtggtctgccagctaaaggtgaagatatattcctccaattcaggacccacacgacgggaagacaagttcatgtactttgagttccctcagccgttacctgtgtgtggtgatatcaaagtagagttcttccacaaacagaacaagatgctaaaaaaggacaaaatgtttcacttttgggtaaatacattcttcataccaggaccagaggaaacctcagaaaaagtagaaaatggaagtctatgtgatcaagaaatcgatagcatttgcagtatagagcgtgcagataatgacaaggaatatctagtacttactttaacaaaaaatgatcttgacaaagcaaataaagacaaagccaaccgatacttttctccaaattttaaggtgaagctgtacttcacaaaaacagtagaggagccgtcaaatccagaggctagcagttcaacttctgtaacaccagatgttagtgacaatgaacctgatcattatagatattctgacaccactgactctgatccagagaatgaaccttttgatgaagatcagcatacacaaattacaaaagtctgaatttttttttatcaagagggataaaacaccatgaaaaataaactttgaataaactaaaaaaaaaaaaaaaaaaaaaaaa

SEQ ID NO: 54544 - DNA, 734 bp, Homo Sapiens
ccaagctctaatacgactcactatagggaaagctggtacgcctgcaggtaccggtccggaattcccgggtcgacccacgcgtccgcttctgtttctcttttggtttctgcttctctcttctctcaacccctttgtaatggtttgggggcagactcttaaatatattgtgagttttctatttcactaatcatgagaaaaactgttcttttgcaataataataaattaaacatgctgttaccagagcctctttgctggagtctccagatgttaatttactttctgcaccccaattgggaatgcaatattggatgaaaagagaggtttctggtattcacagaaagctagatatgccttaaaacatactctgccgatctaattacagccttatttttgtatgccttttgggcattctcctcatgcttagaaagttccaaatgtttataaaggtaaaatggcagtttgaagtcaaatgtcacataggcaaagcaatcaagcaccaggaagtgtttatgaggaaacaacacccaagatgaattatttttgagactgtcaggaagtaaaataaataggagcttaagaaagaacattttgcctgattgagaagcacaactgaaaccagtagccgctggggtgttaatggtagcattcttcttttggcaatacatttgatttgttcatgaatatattaatcagcattagagaaatgaattataactagacatctgctgttatc

SEQ ID NO: 54545 - DNA, 709 bp, Homo Sapiens
gtggcttcaggagtataaattcagctaattatttctatattattatttttcaaatgtcatttatcaggcatagctctgaaacattgatgatctaagaggtattgatttctgaatattcataattgtgttacctgggtatgagagtgttggaagctgaattctagccctagattttggagtaaaaccccttcagcacttgaccgaaataccaaaaatgtctccaaaaaattgatagttgcaggttatcgcaagatgtcttagagtagggttaaggttctcagtgacacaagaattcagtattaagtacataggtatttactatggagtataattctcacaattgtattttcagttttctgcccaatagagtttaaataactgtataaatgatgactttaaaaaaatgtaagcaacaagtccatgtcatagtcaataaaaacaatcctgcagttgggtttgtatctgatccctgcttggagttttagtttaaagaatctatatgtagcaaggaaaaggtgctttttaattttaatccctttgatcaatatggcttttttccaaattggctaatggatcaaaatgaaacctgttgatgtgaattcagttattgaacttgttacttgttttgcccgaaaatgttattaattaactgttcatggttgggagataattaaacacaacactcacgatacttaccaaacacacaaag

SEQ ID NO: 54546 - DNA, 671 bp, Homo Sapiens
tccgcaagagtaaaggaaataagagcattcacaacagagtgaaaaatcttaagtaccaatgggaagcagggaattcctggggtaaagtatcacttttctggggctgggctaggcataggtctctttgctttctggtggtggcctgtttgaaagtaaaaacctggttggcgtgtaggttccgtatctccctggagaagcaccagcaattctctttcttttactgttatagaatagcctgaggtcccctcgtcccatccagctaccaccacggccaccactgcagccaggggctggccttctcctacttagggaagaaaaagcaagtgttcactgctccttgctgcattgatccaggagataattgtttcattcatcctgaccaagactgagccagcttagcaactgctggggagacaaatctcagaaccttgtcccagccagtgaggatgacagtgacacccagagggagtagaatacgcagaactaccaggtggcaaagtacttgtcatagactcctttgctaatgctatacaaaaaattctttagagattataacaaatttttcaaatcattccttagataccttgaaaggcaggaagggaagcgtatatacttaagaatacacaggatattttgggggggcagagaataaaacgttagttaatcccttt

SEQ ID NO: 54547 - DNA, 500 bp, Homo Sapiens
tcctccgcgcacgcagttctcagggctgcgcagggacctgccgccctcggtgcacctgctcacgctggccagctggggccccgaaatggtgctgctgcgcttggagcaccagtttgccgtaggagaggattccggacgtaacctgagcgcccccgttaccttgaacttgagggacctgttctccaccttcaccatcacccgcctgcaggagaccacgctggtggccaaccagctccgcgaggcagcctccaggctcaagtggacaacaaacacaggccccacaccccaccaaactccgtaccagctggacccggccaacatcacgctggaacccatggaaatccgcactttcctggcctcagttcaatggaaggaggtggatggttaggtctgctgggatgggccctccaagcccaagcctcctgctccgggggcagaccagactctgactctcctcttggggctgctgccattaaaacgctactactaagactcaaaaa

SEQ ID NO: 54548 - DNA, 1012 bp, Homo Sapiens
  misc_feature (827)..(827): n is a, c, g, or t
  misc_feature (901)..(901): n is a, c, g, or t
tttgaagtgattgcaacagagagagcacgaatggagcaaaccatagcggatgtcaagcggcaggccgcagaggatgctttcctcgtcatcaatgagcaagaggagtccacggagaactgctggaactgtggccgcaaagccagcgagacatgcagtggctgcaatatcgcgcgatactgtggctctttctgccagcacaaggactgggagcggcaccaccgcctctgtggtcagaacctgcatggccagagcccccacggccagggccggccgctgcttcctgtaggcaggggctcctctgccaggtccgccgactgcagcgtgcccagcccagccctcgacaagacctcggcaaccacatcgcgttcctcaacacctgcttctgtgacagctatcgacaccaacggactctgagccccggactctgcttaccctgatggctgctcagcaccacagagtgcttgggctgagggactgactgttggaacccgtgcatgtagctgccgggtcatcagcaagaaatgaattggaggcaggaagagtccaagcctgaataataacaccccacagcctctctgtgcacttgctgtctgcggagccagtgtgccattctctgcacatgggcagccagcctgagctgcctcctccatggctttcctggtttgttcctctctccactgaagctgacttagccggccccttttcagtgtagaccaccagctccccctccccatctccttgagtcagcagactgtccaatgtgctcagccaagctgggaggcgcaggcggcaggcagcaggctgtggagggagcccctcggtcaggnagcggcctgcctcacccctgaatagctccttccgccccatctcccatcctcagcagatgacactggattggccntcacggggaacttgtgttaggcaacaggccggcaattcagggactcttcctcaaaccctggctgtttcagaacctggaataaaaatctccgaagtccccccaggggaaaaa

SEQ ID NO: 54549 - DNA, 639 bp, Homo Sapiens
ttttgttccacattctctctctttacctttgccctaccttctgtttgtaaggatgattttaatattaattccaggaacacatgtttttatttcctctgctggaataggagaaagcttaatatattcccaagctgaatgttcttgaattatatctgcatttaccactgtatatgcatatagtgacagtataacctgtctatactacagtagttccagtcctaactttctgaattatttttaaagatcttctctaacaagctatgggaatttggcttcatactctttctttgcaacagcagtgttctgggtgataattttgaattgatacctgttcctttttctgggttttgttggctttttgaaaaattgtctttccttatcattggtgggaggcttggtagcaaagtaacattttttggaaaagaggacagaaaaattgaactacagcttgagaacgtattctttttttcctactttgttattgcaaattgaggaatcacttttaactgttttaggtgtgtgtgtccagagtgagcaaggattatgtctttggattggtcaaagagggatgcttagtcctttaaaattacaaattacttttaccaatcccaacaaattaatagctacacctcaccaacc

SEQ ID NO: 54550 - DNA, 727 bp, Homo Sapiens
ggaattcccgggataagtggtctccccaattctcccctccctccagtattgccccctctcactttagcatatattaattagcaggttgggctagagaaatcagctgctatgcgggttgattattattattatttctaatccttttccttatttgccttctactccccttaatctaatctaaaagctctgttccatgcaactggagttccttatccctctcttccccttcccttatatattgaggctatggggtaggagaaaagtgcacaacccaccaccccctttactcgtgcattaaaatttcttatttacccttttcccccttcccatttcttcccactttcatctaccttttctggcaaaaaggagccttttgctctctgtgaccctaagagcacactgcacagggaaaattgccccatccagacctggctccactcttgatctctcttgtcctcttctgctcttttcctggtgctcttttttctcggtggggtgtgggtaatagaacagccgtgggcttttggggacctttaacttttttttctctcttttgtttataaaaaacactaaacattcaattccagagaaccaaaaatcccaccttcccaccgaacactactaaggggcttgtgttctgctccataccttttctcttttctttctgtcttgttaatgcttttaaaaacaaatgagttttttatataaataaagtttttaaagtgtg

SEQ ID NO: 54551 - DNA, 701 bp, Homo Sapiens
gtaacagttgtgtcataaattacacaataaagcagtcctgttcaaatttttttttaacgtggcttgtagaatttttaaaaaagtgatcttaggttgttttttcatgcgggatgcagatgggtgctatcagagcctctcccacaccactatagtgtaataatgttattattactctacactgaaacgtattcagagttagatattattttagcttcagttgttctttagaggctttcaaatgtaccgatgatactgtttcttgcactgaatatataaacactccacagtgtttatattgggaagatattgggaaggaaatatatttgtaaaagatgaaggctgtatctatttttttttctttttaaagtttgttcacttaaattcttttgaggatgggatgtatttttcttgctgttcagtgctttttccttttcatctgttgttctgtggtcacagtgaccttagctacatagcagactttcccaaatgtattgattacaaataaacagttgttacttagcaagacctgaaaatatgtctgcaggtttctccttgaagcaaatgtgtgggatcattgcatttccagaaatctgcctccttcaccctccgttgacagtatatgtcatgcctcactttcttctagctgagctttaaatcattagagcttaaattgtcagatcgttcattgcctttccaggtta

SEQ ID NO: 54552 - DNA, 611 bp, Homo Sapiens
cgagccgtcacacctcaggcgtgtgcggggcggggacggggggtctcctggttacattttggattaaacctgtttcccggttatgtgtagggaacagcagagtgatgcacgaactttgaacattcgttatggggaaaacatcctttaacttcggggtcgtctgccagagcagggtctgggagggtccatgcagttcccgctggtgtggagggaaatgccctggtctggcctccgagcccccaggtccaccgtctcccctcccctcatttgtaagaatagctacacactaacattttgggaaggagaggcacataactttttttaacatttggtaactaggttatgggctctacattgtcagctacttgggatatatatttaattttcttaaattcccgttaaactctattttatggttttgatttcagattgcaaacatgtaaaacctgcatagcagcgagtcctcggttttgccggtttctttagttctttactgtcactgtcatgtaatcagctaattctctgtggatgttgctgtaaagtatgcatgttcctttcatgtgtatttaatcatgatgtttaattttgcacacttatttgtaatgtttctt

SEQ ID NO: 54553 - DNA, 592 bp, Homo Sapiens
  misc_feature (554)..(554): n is a, c, g, or t
gctgccttctcggatactgaaaggtcgagttttctgaactgcactgattttattgcagttgaaaaaaaaaaaaagctattccaaagatttcaagctgttctgagacatcttctgatggctttacttcctgagaggcaatgtttttactttatgcataattcattgttgccaaggaataaagtgaagaaacagcaccttttaatatataggtctctctggaagagacctaaattagaaagagaaaactgtgacaattttcatattctcattcttaaaaaacactaatcttaactaacaaaagttcttttgagaataagttacacacaatggccacagcagtttgtctttaatagtatagtgcctatactcatgtaatcggttactcactactgcctttaaaaaaaaaaaccagcatatttattgaaaacatgagacaggattatagtgccttaaccgatatattttgtgacttaaaaaatacatttaaaactgctcttctgctctagtaccatgcttagtgcaaatgattatttctatgtacaactgatgcttgntcttattttaataaatttatcagagtgaaaaaaaaaaa

SEQ ID NO: 54554 - DNA, 610 bp, Homo Sapiens
cgtggagcaggtggcgcggcggctgacgctggcccggagggacgacgaccctctcaacgcacgcgtggcgctgctgcagtttggtggccccggcgagcagcaggtggccttcccgctgagccacaacctcacggccatccacgaggcgctggagaccacacaatacctgaactccttctcgcacgtgggcgcaggcgtggtgcacgccatcaatgccatcgtgcgcagcccgcgtggcggggcccggaggcacgcagagctgtccttcgtgttcctcacggacggcgtcacgggcaacgacagtctgcacgagtcggcgcactccatgcgcaagcagaacgtggtacccaccgtgctggccttgggcagcgacgtggacatggacgtgctcaccacgctcagcctgggtgaccgcgccgccgtgttccacgagaaggactatgacagcctggcgcaacccggcttcttcgaccgcttcatccgctggatctgctagcgccgccgcccgggccccgcagtcgagggtcgtgagcccaccccgtccatggtgctaagcgggcccgggtcccacacggccagcaccgctgctcactcggacgacgccctgggc

SEQ ID NO: 54555 - DNA, 540 bp, Homo Sapiens
gggaaatacaatcagattttggcatttcgacctacaggatggacacactctaacaagttcactagaatagcagatgttattccccagaccaaaggaaacatttcaatatatggaattccttacagtgaacacagcagctacctagaaatgaagcgctttgtccagtggctgaagccccagaaaatcatacctactgtaaatgtgggcacctggaaatctaggagcacaatggagaaatattttagagagtggaaattggaagctggatattgatgatacctccgaggattcagtagtagttaagttccttggatgtagcttgttagtagttaaatctatagaaatgtgaaatacactttgtgtggaaaaacctcatgaagattgttcagatactttattttctcatttatgtttgaacaacatgttcgtggtgctgaatgcctctcagcatcatcaaggataactgaaactgggtctccctgggacccttaatttcttgtcccctgccctccatgggcagttatattctgcatcaagcct

SEQ ID NO: 54556 - DNA, 606 bp, Homo Sapiens
attcggcacgatgggggccacccgtgcctctgggccagggaaaccagctactcagggacttctcttgcctggagggtgcagtgatagctcctcctcactgccccactgtgctcctgggcctgtgaccccagtgctcaggcaccttgcactagaggcttctgactcctgggactttggagcttaccagagatgcagtccctcccaggaacctgttggagaggcaggacctgctgctttagagtgcggctgaacccgggccttgcgtccctgtttggccagagcaaggatctggcctggagaggcccatcctataccccttattagagccatgacagcctacagagtgaggtgaggtgctcccaccttcccagatggttcctttctgccccttcctggaagaaaggtgaggctgccaatagcctcctggcaccagccagacctcacccttgaccaacctctcggggctgggggttcattcctggggcactgtggcctggttttgctttgaaaccaagaaagagcaaagggaacccagcagttctgagtgagttctgagccagccctacctcaggctggctgttgagacatgctacaattttcattttt

SEQ ID NO: 54557 - DNA, 740 bp, Homo Sapiens
  misc_feature (426)..(426): n is a, c, g, or t
cacgaggccatgggggctgtctttgcagggcacagatgaccaaagtcccttcctgcttcctgttacctgtcttgctcctggggagaaagaggggcctgatgagactccactcaggtgcacacatcaccaggtgcatctgcaggcaccgggctggctgcttgcagccaggagaaggtcagcgagaaggagtgtatgagtgtgagtgtgtgtgcatggaagttggggcactgggcgtctgactccctccccacccaagagaggaaggacccctcaccacccccactggcgagacagtttactttgccgacttgccatgtttttgccaaaaccaagattttgaaggaaatgagtggccagcgccagggcccaggccatgtggcctgcccagcctcaatgtcacttggtggcggggtggggtgggggtanaaaaaacatttcattaatgattcatctactattatataaattaaactattaatttatactaattagtttcaattatttccatagatataaaaaattatttgacttgtttaattatattcattgatttcattattataaattattttacaatttttcaaaataataacttgcaaatactaattaaaaaatttatttattatctacttttttcacatgatatatctatcctcattctctaaaattacttttatctagatatttgatatagataccaaattaacttttacttcttttcatcctttatttcttcttta

SEQ ID NO: 54558 - DNA, 874 bp, Homo Sapiens
  misc_feature (758)..(758): n is a, c, g, or t
  misc_feature (764)..(764): n is a, c, g, or t
  misc_feature (841)..(841): n is a, c, g, or t
  misc_feature (858)..(858): n is a, c, g, or t
gaaacaaaaccagacccagccctacactttggtttgtcatggtgtcagcgcagcagcctacaactaagttcctaaacgccactttggactaatttaaaaaagaatcccagtttttacttttactggatggtgaaattggttgctcttgtattttatgaaaaaaaatgatttttttaaccttcatacatagaagcaaaaatactttaactgctgtaaaccttcaaaagttaatagaagtgagatcatactggtttgtttcttattttgattggagaaaaattaaattgctgcatttcgcagtgacccatttacatggcattctcagcttagactgcgtaagaagaaatatatgtggtgaaatgttggaaccatttctctcttggtctctgtttaatgttgaaagggtgagctaataggaggcactttcaacttcactccctcacgctaccccgtccccctccagactggcagtttcaaggatgcaaattgcattgcaaaatcaaactgactcatgaagcatttgggccagtgcactgtttacttccatctgtttgcagacacatttgtgcccggcgtttgggagccctttgtatcaatgttctgacaagggtccctataaccttaacctactcgaaaccggtttgggatggatatgatggggcttctgtgctattgctgggattgggagaaataaaacatgcaatttaagtggaagcgaagaatttaaagaggattttattttgcttgggtcaatcctntgttanaggggaggtggatgtgttttcccttgtgttggatggcatgagaatatgtgaatgttttgatttattaaaatgaactngcaggtttttcacaggnaacgacagacatgtat

SEQ ID NO: 54559 - DNA, 887 bp, Homo Sapiens
  misc_feature (678)..(678): n is a, c, g, or t
acacaaagaggccttgtgggcaaacctggagaaccctcctaaatccatagagttttcaaaatgtgaatctttggaagccttgagttcagaatctgctgctctggaatatttcccttcgatcttatctcagtcacttcgtttttgagaagagtgatgccttgggcatgcttttttttttttcttttttagaaaacagggagttgaagtccaacctatttaaaaaccccaccatttggagaattacaagggttttgtcctgaattgtagtgttggcaagcccaagccactcgtgctaactgctttttgtctcggttgctattccaagaacagaaggaggaagttggccaattacagcgtgtgtgcatggatgtgtgtggggggcgtgcctctcagaaacgcggccagaagacaagcagggaagtgaaaggtcccaggcacacaccctgcccattgcaggtggctcttacagctctctggtgccagcacgggatccctgaagtgactcagccaggcagacatgagacatggcggagtgtccaaatggatcctttattggtggtagagcaaaaaaacccaaacacgataaacctttcaaaagactttctaaggatgatattggaatgcaccagccctcacatgtgtatgcacatttgccagaatataagagttttgttttanatacagtcttgttaggattttacgttattgttattatggaaagggattgtgatgctatttattcttcagggtcacctctggggcaaaagagaaaggtcctcagcccatggccccccagcacctttgccccatagggggtcctggaataaaaagttttcaaaaaaattaaaccccctttttttgaggcccccgacattatatttataggg

SEQ ID NO: 54560 - DNA, 1136 bp, Homo Sapiens
  misc_feature (709)..(709): n is a, c, g, or t
cggtccggaattctcgggatctcaaggagaaactagttcaactgaaagactcatgctctgattgtggtggggtggggatccttgggaagaattactcccaagagtaactctcattatctcctccacagaaaacacacagcttccacaacttctctgttttctgtcagtcccccagtggccgcccttacacgtctcctacttcaatggtaggggcggtttatttatttattttttgaaggccactgggaggagcctgacctaaccttttagggtggttaggacatctcccccacctccccacttttttccccaagacaagacaatcgaggtctggcttgagaacgacctttctttctttatttctcagcctgcccttggggagatgagggagccctgtctgcgtttttggatgtgagtagaagagttagtttgttttgttttattattcctggccatactcaggggtccaggaagaatttgtaccatttaatgggttgggagtcttggccaaggaagaatcacacccttggaatagaaatttccacctccccaacctttctctcagacagcttatccttttcaaccaactttttggccagggaggaatgtcccttttgttcttccccctgagaagccattcctttgtctgccaacctccctggggtcctgcctgtttctcccaatggagggtttttttgggggggtggtncccgtccgggggggcccctcccgcccgtactccacggtctccctggcttctccccccctgtcattttggacacaacaatcctatttctcaaatggcggtctttcaatacggcgaaaaagggagcacaatcctctccccacacatttggcgccgcccgccctagccaacaaaacgcccctttatcttcaaccgcctaaaagccccgccccgtgggtacacactgggcgggcaccggcgcgcgagacaagcagcgaacaatggcgtccacactggtgcaccatgggttaccaccacgtgcgcacccccatgcggaatggcggcgagaagggatcatgcggacatatagcggtggcggacgacacctaatccacctgacacttgtagttcaccgtcgcacttcggagacacgtacacacgtgtgtacacc

SEQ ID NO: 54561 - DNA, 904 bp, Homo Sapiens
  misc_feature (732)..(732): n is a, c, g, or t
tgagaagcagaagaaggaggagattcttaagacgacatgcttcatctgtggtctggagagggacaagtttgataacaagacagtgtcatttgaggaacacatcaagctggagcacaacatgtggaactacttgtacttcattgtgctggtccgcgtgaagaacaagaccgactacacgggccctgagagctacgtggcccagatgatcaagaacaagaacctggactggttcccccggatgcgggccatgtcccttgtcagcaatgagggcgagggggagcagaatgagattcggattctccaggacaagctcaactccaccatgaagctggtgtcccacctcactgcccagctcaacgagctcaaggagcagatgacggagcagcggaaacgcaggcaacgcctaggctttgtggatgtccagaactgcattagccgctgaggagagccaccgaaggccccaacaggggatgctcatcactggagactgcgactgggaagaacactgccccctcctccgggggtggggtggcccagccagctggccagcctccactcccactctgccagacaccctgacacccacccaggctttgaaaagcatggagggggagcctcagagctgacagtcctgcttagagcccttaaaaagacttgaaagttcactgggactcagtttaccttaatgccttagcagaagataaatcctacctagagacctttgttccttanagcaataactgacaactctttgtagtcctcccttgtggggtagtttaaagagtgggggtcaccccctttaactcccagcactacatttttggcggctgccggccctcctggggggaggtgggcagttatgctggttactaagtgatttttaagggctttggttaatttaacc

SEQ ID NO: 54562 - DNA, 605 bp, Homo Sapiens
cagtaacagcccaaattatgaggagatcaccaagtggtacctgggttggaagtcgatgttctcagaccaagtgctggcacatccatctgtcaaggacaaatttaatgaggcacttgatatcatgaaccgggcggtgtcctccaacgttggtgcctacatgcagccaggagcacgggagaacattgcctatctcacccacacggagcggaggaaggacttccagtacgaggccatgcaggagaggcgggaggctgagaacatggctcagaggggcattggcgtggccgctagctctgtgcccatgaactttaaggacctcattgagaccaaggctgaggagcacaacattgtcttcatgcccgtcattgggaagcgacacgaagggaagcagctctacacctttggccgcattgtgatctacatcgaccggggagtggtctttgtccagggcgagaagacgtgggtgcccacctcactgcagagcctgatcgacatggccaagtgaactgtggcaggtccagaaccagtcagagacttgcccctaagagggatgtactgtaaataaacagtatttttagatcaccttcaaaaaaaaaaaaaaaaaa

SEQ ID NO: 54563 - DNA, 656 bp, Homo Sapiens
  misc_feature (629)..(630): n is a, c, g, or t
  misc_feature (634)..(635): n is a, c, g, or t
gtccggaattctccggatgaagacactttattcgtttatattgtgagaaaacagccccatcaggcttgtgttaaggcaatggactgaatgagtgcgtgctgggtggggtggggcacggaggctggcgggttgcttcagccagtgcagtgagaacagcagccccacggccccatgggaggcggcgctgctctccccgagggcggctgggcagagcacatcccccaggacttgatgaccacacggggcagagagaaaccaaccaaggccagcacctccgtcggaagcatttggcacacacaccttcaatacacgtcaaggtcgcttccagttttagaaaacagaaatctgcatctcagcctgagacgcacagagaggtctcttcctgacccagacgcactcacgagccaggtcctgggggtatgggggctgccaggggcgcccgagccctctcctggggggcctgctgggcaggcgacctgctgacccacggtcactgctgtgttcagcccctcagctcggccccagcctatttcccgcctccatttgatgtttccaggttttcaaaactgcatttaacctgcgccagagagttcaccgtaggcatctttaataaactaactccagcaagnngaannggggggggccgccaaaaaaag

SEQ ID NO: 54564 - DNA, 594 bp, Homo Sapiens
gcctgctcagggcacccagtcccatcgaccacccaagggctgaggagtgcctttggagcagggcacgggactggcaggcagctctacctgcagcccctgtgcaggatccactgggtgaaagccagctgggctcctgagtctggtggggacttggagaacctttatgtctagctaagggattgtaaataaaccaattggcactctgtatctagctcaaggtttgtaaacacaccaatcagcaccttgtgtctagctcagggtttgtgaatgcaccaatagacactctgtatctagctactctggtggggacttggaaaacctttttgtcaacactctgtatctagttaatctggtggggacatggagaacctttgtgtctagctcagggattgtaaacgcaccaatcggcaccctgtcaaaacagaccactcggctctaccagtcagcaggatgtgggtggggccagatgagaataaaagcaggctgcccgagccagcagtgacaacccactcgggtccccttccacaccgggatgctttgtttgttcgctctttgcaataaatcttgctgctgctcaaaaaaaaaaaaaaaaaa

SEQ ID NO: 54565 - DNA, 670 bp, Homo Sapiens
aatttaggtgacactatagaagagctatgacgtcgcatgcacgcgtacgtaagcttggatcctctagagcggccgcctactactactaaattcgcggccgcgtcgactgtggaatggagtaaaccagtgaaagggcattccaaagcgccactgaatgaaactggagaagttgtcaatgaaaaggccaagacccatgttcttgacattgagcagcgactacaaggtgtaatcaagactcgaaatagagtgacaggactgccgttatctattgaaggacatgtgcattaccttatacaggaagctactgatgaaaacttactatgccagatgtatcttggttggactccatatatgtgaaatgaaattatgtaaaagaatatgttaataatctaaaagtaatgcatttggtatgaatctgtggttgtatctgttcaattctaaagtacaacataaatttacgttctcagcaactgttatttctctctgatcattaattatatgtaaaataatatacattcagttattaagaaataaactgctttcttaataaaaaaaaaaaaaaaaaaaagtcgacgcggccgcgaatttagtagtagtagtcgacccgggaattccggaccggtacctgcaggcgtaccagctttccctatagtgagtcgtattagagctt

SEQ ID NO: 54566 - DNA, 709 bp, Homo Sapiens
  misc_feature (650)..(650): n is a, c, g, or t
gggactctccctgcacagctcagcaggacctcagccatgagacttctcatcctggccctccttggcatctgctctctcactgcatacattgtggaaggtgtagggagtgaagtctcagataagaggacctgtgtgagcctcactacccagcgactgccggttagcagaatcaagacctacaccatcacggaaggctccttgagagcagtaatttttattaccaaacgtggcctaaaagtctgtgctgatccacaagccacatgggtgagagacgtggtcaggagcatggacaggaaatccaacaccagaaataacatgatccagaccaagccaacaggaacccagcaatcgaccaatacagctgtgactctgactggctagtagtctctggcaccctgtccgtctccagccagccagctcatttcactttacacgctcatggactgagtttatactcaccttttatgaaagcactgcatgaataaaattattcctttgtatttttacttttaaatgtcttctgtattcacttatatgttctaattaataaattatttattattaagaaatcaaaaaaaaaaaaaaaaaaaaaaaaaaacatgtcggccgcctcgccctcgagagcttctagacattcgttgcgcgcgccnatagtagtgactgtctactgttctagagactgtcagacatgctgatccacataaacgcg

SEQ ID NO: 54567 - DNA, 526 bp, Homo Sapiens
tgtcctctacatcaattaacatcgtgggtcactacagggagaaaatccaggtcatgcagttcctggcccatcaactgtattgggccttttggatatgctgaacgcagaagaaagggtggaaatcaaccctctcctgtctgccctctgggtccctcctctcacctctccctcgatcatatttccccttggacacttggttagacgccttccaggtcaggatgcacatttctggattgtggttccatgcagccttggggcattatgggttcttcccccacttcccctccaagacccatgtgttcatttggtgttcctggaagcaggtgctacaacatgtraggcattcggggaagctgcacatgtgccacacagatgacttggccccagacgcatagactgaggtataaagacaagtatgaatattactctcaaaatctttgtataaataaatatttttggggcatcctggatgatttcatcttctggaatattgtttctagaacagtaaaagccttattctaaggtg

SEQ ID NO: 54568 - DNA, 875 bp, Homo Sapiens
  misc_feature (771)..(771): n is a, c, g, or t
gcagaagctgaagggtgggtcccagaagaccaaagggaaaagaaagcagcagcttcccacctgttcccatttgagcagctgtgagctgagcgcccactagaggggcacccaccagttgctgctgccccactacaggccccacacctgccctgggcatgcccagcccctggtggtgggggcttctctgctgagaaggcaaactgaggcagcatgcacggaggcggggtcaggggagacgaggccaagctgaggaggtgctgcaggtcccgtctggctccagcccttgtcagattcacccagggtgaagccttcaaagctttttgctaccaaagcccactcaccctttgagctacagaacactttgctaggagatactcttctgcctcctagacctgttctttccatctttagaaacatcagtttttgtatggaagccaccgggagatttctggatggtggtgcatccgtgaatgcgctgatcgtttcttccagttagagtcttcatctgtccgacaagttcactcgcctcggttgcggacctaggaccatttctctgcaggccacttaccttcccctgagtcaggcttactaatgctgccctcactgcctctttgcagtaggggagagagcagagaagtacaggtcatctgctgggatctagttttccaagtaacattttgtggtgacagaagcctaaaaaaagctaaaatcaggaaagaaaaggaaaaatacgaattgaaattaaggaaatgttagtaaaatagatcagtngtaaactagattgtattcattactagataaaatgtataaagctctctgtactaggaggaatgacttttatacattttgagaaaataataaagcatttatctaaa

SEQ ID NO: 54569 - DNA, 1047 bp, Homo Sapiens
  misc_feature (931)..(931): n is a, c, g, or t
gatgccaatgtccagattgctagtatctcagaggaactggccaagaagacggaagatgctgcccgccagcaagaggagatcacacacctgctatcgcaaatagttgatttgcagaaaaaggcaaaagctctgcgtgagctggaggacaagtacgcagagtgcatggagatgctgcatgaggcgcaggaggagctgaagaacctccggaacaaaaccatgcccaataccacgtctcggcgctaccactcgctgggcctgtttcccatggattccttggcagcagagattgagggaacgatgcgcaaggagctgcagttggaagaggccgagtctccagacatcactcaccagaagcgtgtctttgagacagtaagaaacatcaaccaggttgtcaagcagagatctctgaccccttctcccatgaacatccccggctccaaccagtcctcggccatgaactccctcctgtccagctgcgtcagcaccccccggtccagcttctacggcagcgacataggcaacgtcgtcctcgacaacaagaccaacagcatcattctggaaacagaggcagccgacctgggaaacgatgagcggagtaagaagccggggacgccgggcaccccaggctcccacgacctggagacggcgctgaggcggctgtccctgcgccgggagaactacctctcggagaggaggttctttgaggaggagcaagagaggaagctccaggagctggcggagaaaggcgagctgcgcagcggctccctcacacccactgagagcatcatgtccctgggcacgcactcccgcttctccgagtcaccggcttctctggcatgtccttcagcagccgctcctacctgccctgaaaacctcccgatcgtgaaaaccccctggaaggttctgcccaacctccccccctggcaagcanttggcccaaacctcacctttgggggcatcctggaccccccgggcccggggggggcccccaagggctttcccggacccttgaatgttttacccggaacaacagtgtcttgcccttca

SEQ ID NO: 54570 - DNA, 636 bp, Homo Sapiens
gtatcggccattatggccgggggtgttgtggctgggatgttactttgggcctgctgcactctacatttgggcagtggggatcctggctgcaggacagagctccaccatgacaggaacctattctggccagtttgtcatggagggattcctgaacctaaagtggtcacgctttgcccgagtggttctgactcgctctattgccatcatccccactctgcttgttgctgtcttccaagatgtagagcatctaacagggatgaatgactttctgaatgttctacagagcttacagcttccctttgctctcatacccatcctcacatttacgagcttgcggccagtaatgagtgactttgccaatggactaggctggcggattgcaggaggaatcttggtccttatcatctgttccatcaatatgtactttgtagtggtttatgtccgggacctagggcatgtggcattatatgtggtggctgctgtggtcagcgtggcttatctgggctttgtgttctacttgggttggcaatgtttgattgcactgggcatgtccttcctggactgtgggcatacgtgccatctgggattgacagctcagcctgaactctatcttctgaacaccatggacgctgactc

SEQ ID NO: 54571 - DNA, 685 bp, Homo Sapiens
gcggccgagccaacttttacattgttggacgagaccctgctggcatgcctcatccagaaacagggaaggatctttatgagccaagtcatggtgccaaagtgctgacgatggcccctggtttaatcactttggaaatagttccctttcgagttgcagcttacaacaagaaaaagaagcgtatggactactatgactctgaacaccatgaagactttgaatttatttcaggaacacgaatgcgcaaacttgctcgagaaggccagaaaccacctgaaggtttcatggctcccaaggcttggaccgtgctgacagaatactacaaatccttggagaaagcttaggctgttaacccagtcactccacctttgacacattactagtaacaagaggggaccacatagtctctgttggcatttctttgtggtgtctgtctggacatgcttcctaaaaacagaccattttccttaacttgcatcagttttggtctgccttatgagttctgttttgaacaagtgtaacacactgatggttttaatgtatcttttccacttattatagttatattcctacaatacaattttaaaattgtctttttatattatatttatgcttctgtgtcatgattttttcaagctgttatattagttgtaaccagtagtattcacattaaatcttgctttttttc

SEQ ID NO: 54572 - DNA, 448 bp, Homo Sapiens
ttccccggctcgagcggccggcctggcctttcccgcgcaaccccagcagatgcccgtgcagcacccgcggctgcaggccctgaaggaggagcctcagacagtgcccgagatgcccggcgagacaccgcccctgtcccccatcgacatggagtcccaggagcggatcaaggcggagaggaagcgcatgaggaaccgcatcgctgcctccaagtgccgaaaaaggaagctggagagaatcgcccggctggaggaaaaagtgaaaaccttgaaagctcagaactcggagctggcgtccacggccaacatgctcagggaacaggtggcacagcttaaacagaaagtcatgaaccacgttaacagtgggtgccaactcatgctaacgcagcagttgcaaacattttgaagagagaccgtcgggggctgaggggcaacgaaaaaaaaaaaaaaa

SEQ ID NO: 54573 - DNA, 571 bp, Homo Sapiens
gctggtcatggaacacaaaaggaagaaatacctgaggaggaattagcagaggatgttgaagagattgatcacgctgaaagggagttgcggcgtggccaaatcttgtggtttagaggtctgaacagaatccaaacacagattcgagtggtgaatgcatttcgtagttctttatatgaagggttagaaaaaccggaatcaagaagttcgattcacaactttatgacacatcctgagtttaggatagaagattcagagcctcatatcccccttattgatgacactgatgccgaagatgatgctcctacaaaacgtaactccagtcctccaccctctcccaacaaaaataacaatgctgttgacagtggaattcaccttacaatagaaatgaacaagtctgctacctcttcatccccaggaagcccactacatagtttggaaacatcactctgattgtaagctgaatgttaacacactagctgcattgtaaagaaacaaattgaaactgggtcttttcacatattgtgatggacaagctagtattcttgtctttggacttcaacagaagacacac

SEQ ID NO: 54574 - DNA, 827 bp, Homo Sapiens
gggatgacaatgacaacgagtacaccacggaactcgaactctcgcctttcagtaccatacgccgtgaaatgtccacttttgcttctttcggaactcattgctgaaggacagtacttggttgggtcagatttatttgtttgattttcatatcccgtgaaagtttttaattcatatttttccttatagggaaaaatgcaaaaaagaaacaataaagaaagaaatattaactactgtagaactgattttacaaattaatatttgtgctttgaaaaaaagtttctatttagttatttaagaagaatgagaaggccaatagttttagattattttatctggtatggtgctaatattttatttgaaaaaagttactgcaacttaacttaaaattgctaacgttttttcttcttttaaaaatacaattattgtatattgattatagcaatgtgattttgtaggttattttatatttgagttgtgattgaaagtatgttgtatatggtattgtgagatgatttgtacttggaagcattcacaaagtagcaccaaataaattacactttattctttaatgtcattgtcaatctacttttaacaatattcaataaatcttctaattgccttaaagatacaattactggttctatgcacaatttaaaaccggcctactgttttataacgtattttcttttaaggcaggtaatcattatggtataaagaagtttttctaataccagtattttatatgcatgattcataaaactatgttgtatgttaaaaacaaagctggattttttataatcaaggatagatgtcaaattactttctga

SEQ ID NO: 54575 - DNA, 521 bp, Homo Sapiens
gcaggctctctcctctctctctttgtgggttggccaggaggttcccccgaccaggttggggagacttggggccagcgcttctggtctggtaaatatgtatgatgtgttgtgcttttttaaccaaggaggggccagtggattcccacagcacaaccggtcccttccatgccctgggatgcctcaccacacccaggtctcttcctttgctctgaggtcccttcaaggcctccccaatccaggccaaagccccatgtgccttgtccaggaactgcctgggccatgcgaggggccagcagagggcgccaccaccacctgacggctggggacccacccagcccctctcccctctctgctccagactcacttgccattgccaggagatggccccaacaagcaccccgcttttgcagcagaggagctgagttggcagaccgggcccccctgaaccgcaccccatcccaccagccccggccttgctttgtctggcctcacgtgtctcagattttctaagaaccaaaaaa

SEQ ID NO: 54576 - DNA, 799 bp, Homo Sapiens
atgggcgctggatgaagtggcacagtcagcttccctgggggccggtgtcatgttgggctcctggggcgggggcacggcctggcatttcacgcattgctgccaccccaggtccacctgtctccactttcacagcctccaagtctgtggctcttcccttctgtcctccgaggggcttgccttctctcgtgtccagtgaggtgctcagtgatcggcttaacttagagaagcccgccccctccccttctccgtctgtcccaagagggtctgctctgagcctgcgttcctaggtggctcggcctcagctgcctgggttgtggccgccctagcatcctgtatgcccacagctactggaatccccgctgctgctccgggccaagcttctggttgattaatgagggcatggggtggtccctcaagaccttcccctaccttttgtggaaccagtgatgcctcaaagacagtgtcccctccacagctgggtgccaggggcaggggatcctcagtatagccggtgaaccctgataccaggagcctgggcctccctgaacccctggcttccagccatctcatcgccagcctcctcctggacctcttggcccccagccccttccccacacagccccagaagggtcccagagctgaccccactccaggacctaggcccagcccctcagcctcatctggagcccctgaagaccagtcccacccacctttctggcctcatctgacactgctccgcatcctgctgtgtgtcctgttccatgttccggttccatccaaatacactttctggaacaaa

SEQ ID NO: 54577 - DNA, 580 bp, Homo Sapiens
tgaagtttttaaacttgacatcagagaaagtctctcaggaaaggtgactgagatgatgaaaaagttctgtgctcagccttgggaggagataaaaacatcttacgctggagtaaaggagaagtacctgagtgaatactgcttttctggtacctacattctctccctccttctgcaaggctatcatttcacagctgattcctgggagcacatccatttcattggcaagatccagggcagcgacgccggctggactttgggctacatgctgaacctgaccaacatgatcccagctgagcaaccattgtccacacctctctcccactccacctatgtcttcctcatggttctattctccctggtccttttcacagtggccatcataggcttgcttatctttcacaagccttcatatttctggaaagatatggtatagcaaaagcagctgaaatatgctggctggagtgaggaaaaaaatcgtccagggagcattttcctccatcgcagtgttcaaggccatccttccctgtctgccagggccagtcttgacgagtgtgaagcttccttggcttttactgaagcc

SEQ ID NO: 54578 - DNA, 867 bp, Homo Sapiens
tggcgcctaagaaatcacatggcatttttggtggataatcttcagtactatctccaggtagatgtgttggagtctcagttctcccagctgcttcatcagatcaattctacccgagactttgaaagcatccgattggctcatgaccacttcctgagcaatttgctggctcaatcctttatcctattgaaacctgtgtttcactgcctgaatgaaatcctagatctctgtcacagtttttgttcgctggtcagtcagaacctaggcccactggatgagcgtggagccgcccagctgagcattctcgtgaagggctttagccgccagtcttcactcctgttcaagattctctccagtgttcggaatcatcagatcaactcagatttggctcaactactgttacgactagattataacaaatactatacccaggctggtggaactctgggcagtttcgggatgtgaaaatttctggctcataaattgaaataacagccacgttcccaaggttgtaacagaagattcaaaacatcccattctagccacacacaaataaatatctgcggcttagtgataggactctaccttttctcctagaagcagttactgaacatccaggagtacaactccttcccatcattcccatgtggaagggtctctcccatcaagggagaacatgtggcatctctgatccctttacatttgagaacctttgtcggtctgttcctttttcatagtcttttattgagcccctactaccgtaccttggttctgtccaggctggggagatatcggggcgacaacaatattgagccgaagttatttttttggtccttgtgcgcgttttcttttctgaccccgcgggtgtcc

SEQ ID NO: 54579 - DNA, 787 bp, Homo Sapiens
tgagaacttacggacaacatcctttctgtctgaaacaaacagtcacaagcacaggaagaggctgggggactagaaagaggccctgccctctagaaagctcagatcttggcttctgttactcatactcgggtgggctccttagtcagatgcctaaaacattttgcctaaagctcgatgggttctggaggacagtgtggcttgtcacaggcctagagtctgagggaggggagtgggagtctcagcaatctcttggtcttggcttcatggcaaccactgctcacccttcaacatgcctggtttaggcagcagcttgggctgggaagaggtggtggcagagtctcaaagctgagatgctgagagagatagctccctgagctgggccatctgacttctacctcccatgtttgctctcccaactcattagctcctgggcagcatcctcctgagccacatgtgcaggtactggaaaacctccatcttggctcccagagctctaggaactcttcatcacaactagatttgcctcttctaagtgtctatgagcttgcaccatatttaataaattgggaatgggtttggggtattaatgcaatgtgtggtggttgtattggagcagggggaattgataaaggagagtggttgctgttaatattatcttatctattgggtggtatgtgaaatattgtacatagacctgatgagttgtgggaccagatgtcatctctggtcagagtttacttgctatataaactggacttatgtgtgaaaaaaaaaaaaaaaaaagggg

SEQ ID NO: 54580 - DNA, 931 bp, Homo Sapiens
  misc_feature (820)..(820): n is a, c, g, or t
ttgatttgcaaacctcatagacttacccaggaatattggcagtgctgtggggcttttggagctgatgattggaacctaaatatttacttcaattgcacagattccaatgcaagtcgagagcgatgtggcgttccattctcctgctgcactaaagatcccgcagaagatgtcatcaacactcagtgtggctatgatgccaggcaaaaaccagaagttgaccagcagattgtaatctacacgaaaggctgtgtgccccagtttgagaagtggttgcaggacaatttaaccatcgttgctggtattttcataggcattgcattgctgcagatatttgggatatgcctggcccagaatttggttagcgatatcgaagctgtcagggcgagctggtagaccccctgcaaccgctgctgcaagacactggacagacccagctttcgggaccctcccgcgtgccgaactgatcttcgagctgcatggacctaatcacagatgcagcctgcagtctcgcctaatggagctgccattaggggagtgtaaaactgggaaatgctgctcactgacagaattaaaaaaaaaaataaccagtatgaaagtcgttgcgccgtgaatctctactgtagccatgaatttatggacagttagatgcttaccaaaaaagaaaaaaagggagggtaggggacccagatgtacttgaatgtgcagaaaaacattcttgtcctcatcttccgtaattggagggctgggagaggcagctttgctcttaccacaccttggacgaccaccttctttctgttcatggcctgaaggagtgcatctnctaaagactcaggcccttacctggaagggcaggggtttgggggcattcctccatgtacattttagggaacacttgccaccctcatctggaggagaaacaactcacttttgg

SEQ ID NO: 54581 - DNA, 624 bp, Homo Sapiens
  misc_feature (561)..(561): n is a, c, g, or t
  misc_feature (591)..(607): n is a, c, g, or t
  misc_feature (609)..(618): n is a, c, g, or t
gctacagatttctggggagcactccagccgaggcctgcagtgtggggcccccctcagtcttgtggacctggccgggagtgagcgacttgaccccggcttagccctcggccccggggagcgggaacgccttcgggaaacacaggccattaacagcagcctgtccacgctggggctggttatcatggccctgagcaacaaggagtcccacgtgccttaccggaacagcaaactgacctacctgctgcagaactctctgggtggtagtgctaagatgctcatgtttgtgaacatttctccactggaagagaacgtctccgagtccctcaactctctatgctttgcctccaaggtgaaccagtgtgttattggtactgctcaggccaacaggaagtgaagacggatccagatctgtgtgtgtgtgtgtgtgtgtgtgtgtttgtgtgtgtccctatgtctatgtatcgggtgaggggtgggagggttgctggagggtgctttattgggtggagggcaccatgtcccagggctatcaaataaagaatagtttggttttttttttanataaaggttttattagcatttgcccaagannnnnnnnnnnnnnnnnannnnnnnnnnaaaaac

SEQ ID NO: 54582 - DNA, 621 bp, Homo Sapiens
taaatcttcttggagcctgcacacaggatgggcctctctatgtcatagttgagtatgcctctaaaggcaacctccgagaatacctccgagcccggaggccacccgggatggagtactcctatgacattaaccgtgttcctgaggagcagatgaccttcaaggacttggtgtcatgcacctaccagctggccagaggcatggagtacttggcttcccaaaaatgtattcatcgagatttagcagccagaaatgttttggtaacagaaaacaatgtgatgaaaatagcagactttggactcgccagagatatcaacaatatagactattacaaaaagaccaccaatgggcggcttccagtcaagtggatggctccagaagccctgtttgatagagtatacactcatcagagtgatgtctggtccttcggggtgttaatgtgggagatcttcactttagggggctcgccctacccagggattcccgtggaggaactttttaagctgctgaaggaaggacacagaatggataagccagccaactgcaccaacgaactgtacatgatgatgagggactgttggcatgcagtgccctcccagagaccaacgttcaagcagttgggta

SEQ ID NO: 54583 - DNA, 719 bp, Homo Sapiens
cccgacccaggctaagcttgagcatggctgagcaggagcccacagccgagcagctggcccagattgcagcggagaacgaggaggatgagcactcggtcaactacaagcccccggcccagaagagcatccaggagatccaggagctggacaaggacgacgagagcctgcgaaagtacaaggaggccctgctgggccgcgtggccgtttccgcagaccccaacgtccccaacgtcgtggtgactggcctgaccctggtgtgcagctcggccccgggccccctggagctggacctgacgggcgacctggagagcttcaagaagcagtcgtttgtgctgaaggagggtgtggagtaccggataaaaatctctttccgggttaaccgagagatagtgtccggcatgaagtacatccagcatacgtacaggaaaggcgtcaagattgacaagactgactacatggtaggcagctatgggccccgggccgaggagtacgagttcctgacccccgtggaggaggcacccaagggtatgctggcccggggcagctacagcatcaagtcccgcttcacagacgacgacaagaccgaccacctgtcctgggagtggaatctcaccatcaagaaggactggaaggactgagcccagccagaggcgggcagggcagactgacggacggacgacggacaggcggatgtgtcccccccagcccctcccctcccc

SEQ ID NO: 54584 - DNA, 575 bp, Homo Sapiens
ggacgcgtgggtaaattctgaactgtatccatattttaaggaaggagctaaaaatggaaattcatgaaacataaatggtatcaagaactttatcagtatgctttgttgaaagcagaaattaagataataattgagttcaattcgcctctccgcattgcctattgatacactttactaatcatgaaattctaacctaaaaggaaaacattttcctgcttgtcttagaagaaagtggaataattccactgattgtgataatggtttcaatttctacacaatataaatatccagtataaaggaaagcgttaagtcggtaagctagaggattgtgaatatcttttatgtcctctagataaaacacccgattaacagatgttaaaccttttaatgttttgatttgctttaaaaatggccttcctacacattagctccagctaaaaagacacattggagagcttagaggataagtctctggagaagaatttatcacacacaaaagttacaccaacagaataccaagcagaatgatgaggacctgtaaaataccttgtgccctattaaaaaaaaaaaaaaag

SEQ ID NO: 54585 - DNA, 616 bp, Homo Sapiens
  misc_feature (458)..(458): n is a, c, g, or t
  misc_feature (583)..(584): n is a, c, g, or t
cacgaggaagcccatatcaccggctgctgacttgtttacgaaatgtccacaaggtcaccacctgctgagcgccatggtgggagagactgtgaggcggcagctggggccggagcctttggaagtctgtgcccttgtgccctgcctccaccgagccagcttggtccctatgggcttccgcacatgccgcgggcggccaggcaacgtgcgtgtctctgccatgtggcagaagtgctctttgtggcagtggccaggcagggagtgtctgcagtcctggtggggctgagcctgaggccttccagaaagcaggagcagctgtgctgcaccccatgtgggtgaccaggtcctttctcctgatagtcacctgctggttgttgccaggttgcagctgctcttgcatctgggccagaagtcctccctcctgcaggctggctgttggcccctctgctgtcctgcagtanaaggtgccgtgagcaggctttgggaacactggcctgggtctccctggtggggtgtgcatgccacgccccgtgtctggatgcacagatgccatggcctgtgctgggccagtggctgggggtgctannacaccggcaccattctcccttctctcttttct

SEQ ID NO: 54586 - DNA, 426 bp, Homo Sapiens
tgattttctagtgctggtatttgttgactaccatgcagaagggctatctttctattcacgtcaaacttttggttgtgtggggttttttgttgttttttgggttttgttttttaatactttagggtcctgatttgtgggaacagaccttcttgtaaataaccactatttgagttgtggcaggaggatgataaagcacgcggcccctcccaaaggagcccttgagctagggaggtggtgcagtcagcctcgctctcaacgtgacccggggaatgaccacccagagggatgagctagcctgtagaggggaactggggtccaaaggtctttggggagggaggcagagctggctggctcagctaagtggcacgatgacgcatgaaggagattatgttgtgctctttattgccaaaaataaacacttttaaa

SEQ ID NO: 54587 - DNA, 551 bp, Homo Sapiens
ttttgagacttccctccgagtgttcgttgcagtgttgaaagcgcgagcgaagctgctgcataaatacctgtgtgacgagcagaaggagctacaggcgctctacgccctccaggcccttgtagtgaccttagaacagcctcccaacctgctgcggatgttctttgacgcactgtatgacgaggacgtggtgaaggaggatgccttctacagttgggagagtagcaaggaccccgctgagcagcagggcaagggtgtggcccttaaatctgtcacagccttcttcaagtggctccgtgaagcagaggaggagtctgaccacaactgagggctggtggggccggggacctggagccccatggacacacagatggcccggctagccgcctggactgcaggggggcggcagcagcggcggtggcagtgggtgcctgtagtgtgatgtgtctgaactaataaagtggctgaagaggcaggatggcttggggctgcctgggcccccctccaggatgccgccaggtgtccctctcctccccctggggcacagagatata

SEQ ID NO: 54588 - DNA, 800 bp, Homo Sapiens
  misc_feature (780)..(780): n is a, c, g, or t
atctaatattagccttgtctttgattttatggaaactgatctagaaggttataataaaggataatagtcttgtgctgacaccatcacacatcaaagcctacatgttgatgactcttcaaggattagaatatttacatcaacattggatcctacatagggatctgaaaccaaacaacttgttgctagatgaaaatggagttctaaaactggcagattttggcctggccaaatcttttgggagccccaatagagcttatacacatcaggttgtaaccaggtggtatcgggcccccgagttactatttggagctaggatgtatggtgtaggtgtggacatgtgggctgttggctgtatattagcagagttacttctaagggttccttttttgccaggagattcagaccttgatcagctaacaagaatatttgaaactttgggcacaccaactgaggaacagtggccggacatgtgtagtcttccagattatgtgacatttaagagtttccctggaatacctttgcatcacatcttcagtgcagcaggagacgacttactagatctcatacaaggcttattcttatttaatccatgtgctcgaattacggccacacaggcactgaaaatgaagtatttcagtaatcggccagggccaacacctggatgtcagctgccaagaccaaactgtccagtggaaaccttaaaggagcaatcaaatccagctttggcaatcaaacaggaaaagaacagaggccttagaacaagggaggattgcccaaganactaatttttaaagagaaca

SEQ ID NO: 54589 - DNA, 950 bp, Homo Sapiens
actgccagcacccgccgtgccgcatgagcatcgcggagcttgacccgtccatcgctgtggggtttttctgtaagactgaagatgacttcaatgattggtgccagcaagtcaaaaagctgtctctgctcggaggtgccctgcccatgtttgagctggtggagcagcagccttcacatctggcctgccccgacgtcctgaacctgtccctagattcttctgatgtagagcgactggaaagattcttcgactcagaagatgaagactttgaaatcctgtccctttgaaaatcctggggtcgggggtggcacctgtgagagcctggggctcctggtgccgctgcgtttcatccatcccgcccgctcgcctgccgagggctgcgccccgtgctgcctccccccagagggccacccgctgtgctcgtggactgaggctgcgctgcccgggaggccttactgcttggtgtcagactgcccagctcagagtgcccgtcagggcctgtgcatccgcacgcggagccgtctgttaggagcttccagagcgttctctcgacactgccagccccgtgttagcacctgggcctcagtcccacttgctcccaggcgccggttctgtggttggtttggaattaaagtcctgtttgaagttgtcagacacagacatgaatttctggggcgctccctgagtcagagtctcagaagacctgtgcaggctggcgtgagaagagcggcaaccacactgcggccccacgcccaaggattgggctgctctcgaaggggggcggcgcccaccgctgtgttcttctctgccccggcctggctttaccaaggggctaccttcattgggaagaatgaggtttggaaggaaacaaaagccgaggtttcctcccttggctttggggggagaaaaatatattcccgaaaattggggggtgttggtgggaaaaacccttc

SEQ ID NO: 54590 - DNA, 488 bp, Homo Sapiens
  misc_feature (452)..(452): n is a, c, g, or t
cctgctgcaagctcagctgactttggagcggaagcagaagcaggactacatcacccgctcagcacagaccagccgtgagctagcaggcctgcaccacagcctctcacactcacttcttgccgtggcccaggcccctgaggccactgtcctggaggcagagacccgcaggctggatgagtccctgactcaaagtctgacatccccagggccagtcctgctacaccccagccccagcactacccaagccgcctccaggtagcagccacagccaggagcacacagacagaagactgtgtcatgggtcatggcccctccgcacacctacaggtttgccaaaggaaaagcctggctctgttaggcacccaggagccccaggtcggcgggtgttcccaggaagaggaagtaaatctgcaaccctggggaggaccccaactcacctgggaatgaggcanattgcatttgcttgctccctatggaatcacccagag

SEQ ID NO: 54591 - DNA, 633 bp, Homo Sapiens
ttgagtcgttggttcccatggtgagatgcttgttaagacttttacttgggtcaatctctcactttattttgtagaaccatttgaaatcctaggatgtgcttgttctggaaggatgacatgggcccagactgaacaagtcagcttgatgatcttaaatgatggaagtataggacgttgcttattttaaaacaagggaaggacacaaaatggaatgactgcttagtcctttctcagatactcttaaaacaattttttattgttaaatttgtggtaatacatggtcacaaccgtggatcaaacaaggtcagtctaaagtggcaggtcctaggtgtgacctgataccaccaccctttgtggcagcaccgggctggactgccctgatccctgggacgtgagacttagcttccagccagtgtgaatcattgtatctgtctcataatcacagcacagctgcagacacaacaacgtgcagcattttttacataaaaatatggtagaattaatttatgacatggaaatgccttacgtggtatcacacttagtcttgaaaaaaacaccaaggtgacgtttaaaatttttagtacatatcctcaaattggagctaagttatacttcttttataacctttttggg

SEQ ID NO: 54592 - DNA, 770 bp, Homo Sapiens
  misc_feature (669)..(669): n is a, c, g, or t
  misc_feature (748)..(748): n is a, c, g, or t
gaaattagaacagatgacctttgcttggatgtttccaaacttaatggcccagttacaatgctcaaatgccaccacctaaaaggcaaccaactctgggagtatgacccagtgaaattaaccctgcagcatgtgaacagtaatcagtgcctggataaagccacagaagaggatagccaggtgcccagcattagagactgcaatggaagtcggtcccagcagtggcttcttcgaaacgtcaccctgccagaaatattctgagaccaaatttacaaaaaaacgaaaaaaataaggattgactgggctacctcagcatacatttctgccacattcttaagtagcaaaaaaggaaaagtgctttcctcctctgcaggatgtaaggtttatcagccattaaaacttagacttctctagcttttcactagctgtgaaccagccttcctgtccatggacgtgaaactgcatagtaatgagactgtgcacactgatgtttacaagattgaaagagtctttctccgaaaatcatggtaaagaatactgagacaatgaaaaaaaatcaacaaaatatgctttctggagaactgtaccttttatggtttgcttgcacatcagtagtttctgctgaacgtgctgtcataatgaagagatttccaagatttttttttccctgantagaactgggaaccagtatattaaatattgatataaaaattaaaggaactgggaaccagattcagaatccatggaaaancaacaatttttacaacaaccaa

SEQ ID NO: 54593 - DNA, 911 bp, Homo Sapiens
  misc_feature (879)..(879): n is a, c, g, or t
agaagaaacctcctgaggctgacatgaatatttttgaagacattggggattacgtaccctccacaaccaagacacctcgggacaaggagcgggagagatatcgggaacgggagcgtgatcgggaaagagacagagaccgtgaccgagagcgagagcgagaacgagatcgggaacgagagcgagagcgggaccgagagagagaagaggaaaagaagagacacagctactttgagaagccaaaagtagatgatgagcccatggacgttgacaaaggacctgggtctaccaaggagttgatcaagtccatcaatgaaaagtttgctgggtctgctggctgggaaggcacagaatcgctgaagaagccagaagacaaaaagcagctgggagatttctttggcatgtccaacagttatgcagagtgctacccagccacgatggatgacatggctgtggatagtgatgaggaggtggattatagcaaaatggaccagggtaacaagaaggggcccttaggccgttgggactttgatacccaggaagaatacagcgagtatatgaacaacaaagaagctttgcccaaggctgcattccagtatggtatcaaaatgtctgaagggcggaaaaccaggcgcttcaaggaaaccaatgacaaagcagagcttgatcgccagtggaagaagattagtgcaatcattgagaagaggaagaagatggaagctgatggggttgaagtcaaaagaccaaaatactaatcactagttacaaccagagatgctccacaaggatatgctccccactgttttctttctacaattttcaaaggttgcaagatgtttttttgtggatgaatataaaattttatttgtggaattactgggntccattaaaattggttaacttgctaaaaaaaa

SEQ ID NO: 54594 - DNA, 1081 bp, Homo Sapiens
  misc_feature (713)..(793): n is a, c, g, or t
  misc_feature (796)..(828): n is a, c, g, or t
  misc_feature (830)..(896): n is a, c, g, or t
  misc_feature (898)..(905): n is a, c, g, or t
  misc_feature (907)..(929): n is a, c, g, or t
  misc_feature (931)..(948): n is a, c, g, or t
  misc_feature (950)..(954): n is a, c, g, or t
  misc_feature (956)..(959): n is a, c, g, or t
  misc_feature (961)..(1003): n is a, c, g, or t
  misc_feature (1008)..(1010): n is a, c, g, or t
  misc_feature (1015)..(1015): n is a, c, g, or t
  misc_feature (1018)..(1021): n is a, c, g, or t
  misc_feature (1029)..(1030): n is a, c, g, or t
  misc_feature (1036)..(1036): n is a, c, g, or t
  misc_feature (1038)..(1038): n is a, c, g, or t
  misc_feature (1053)..(1053): n is a, c, g, or t
  misc_feature (1074)..(1074): n is a, c, g, or t
  misc_feature (1078)..(1078): n is a, c, g, or t
gcagcgctcgcgacacgcgtgccaggagtgggagcgagcggcggggccagctgcgttctgagcctgggcgcagctgccatctgctctgggaagcaccagggtgtccccgccgccctcagctcgaagtcagccaccatggaggcgcaggcacaaggtttgttggagactgaaccgttgcaaggaacagacgaagatgcagtagccagtgctgacttctctagcatgctctctgaggaggaaaaggaagagttaaaagcagagttagttcagctagaagacgaaattacaacactacgacaagttttgtcagcgaaagaaaggcatctagttgagataaaacaaaaactcggcatgaacctgatgaatgaattaaaacagaacttcagcaaaagctggcatgacatgcagactaccactgcctacaagaaaacacatgaaaccctgagtcacgcagggcaaaaggcaactgcagctttcagcaacgttggaacggccatcagcaagaagttcggagacatgagacgaaagtaggcggtacgaaccctaatggaggcagttttgaggaggtcctcagctccacggcccatgccagtgcccagagcttggcaggaggctcccggcggaccaaggaggaggactgcagtgctaatcaccacgtgagtgatcagaacgcatacagctttgctggttcataaacaacctgaacatatagnnnnnnnnnnnnnnnnnnnnnnnnnnnnnnnnnnnnnnnnnnnnnnnnnnnnnnnnnnnnnnnnnnnnnnnnnnnnnnnnnagnnnnnnnnnnnnnnnnnnnnnnnnnnnnnnnnngnnnnnnnnnnnnnnnnnnnnnnnnnnnnnnnnnnnnnnnnnnnnnnnnnnnnnnnnnnnnnnnnnnngnnnnnnnngnnnnnnnnnnnnnnnnnnnnnnngnnnnnnnnnnnnnnnnnngnnnnncnnnngnnnnnnnnnnnnnnnnnnnnnnnnnnnnnnnnnnnnnnnnnnnggggnnnggggnggnnnngggggggnngggggngnggggggggggggggngcccggggggggggggggggngggnggg

SEQ ID NO: 54595 - DNA, 592 bp, Homo Sapiens
ggcccctttgatggacataaaggctctttacagagccacctaccatctcgagaaaagagccgcactgatcctgcagttctttataggccggaggcctgatcaccctaggctcatgaatgagcgcagtggccatggggaagggcgcaacgggaaccgagaccctggggactgattgggctgcatacttgcgaggtgggcaacgtgttctgttaacaacagggaaccctcgtccacaggtggccaccccttgctcttgagtcccacccaaaacctctagtagggttttaataacgctcaccgtaaaggtgtcttcataattactagtgacaagttctcttgactctagcaaggttcccgtgtggtcatcaagtacagaatgcaatttcttaatgatttatctgatattaaaagctatttatgatctctaaaaaaaaaaaaaaaaaaaccaaaacaaaaaaaaagaaaataacacaaaaaccaaaaaacccccccaacacacaaaaacaacaacaccaaacacacccacaaacaccacacacgaagccacaaattacacccccccccccaccatggcccaccccccccctccata

SEQ ID NO: 54596 - DNA, 890 bp, Homo Sapiens
  misc_feature (624)..(624): n is a, c, g, or t
  misc_feature (645)..(645): n is a, c, g, or t
  misc_feature (890)..(890): n is a, c, g, or t
tgaattttgactctccactctatgtaggaggcatgccagggaagagtaacgtggcatctctgcgccaggcccctgggcagaacggaaccagcttccacggctgcatccggaacctttacatcaacagtgagctgcaggacttccagaaggtgccgatgcaaacaggcattttgcctggctgtgagccatgccacaagaaggtgtgtgcccatggcacatgccagcccagcagccaggcaggcttcacctgcgagtgccaggaaggatggatggggcccctctgtgaccaacggaccaatgacccttgccttggaaataaatgcgtacatggcacctgcttgcccatcaatgcgttctcctacagctgtaagtgcttggagggccatggaggtgtcctctgtgatgaagaggaggatctgtttaacccatgccaggcgatcaagtgcaagcatgggaagtgcaggctttcaggtctggggcagccctactgtgaatgcagcagtggatacacgggggacagctgtgatcgagaaatctcttgtcgaggggaaaggataagagattattaccaaaagcagcagggctatgctgcttgccaaacaaccaagaaggtgtcccgattanagtgcaaaggtgggtgtgcangagggcagtgctgtggaccgctgaggagcaagcggcggaaatactctttcgaatgcactgacggctcctcctttgtggacgaggttgagaaagtggtgaagtgccgctgtaccaagtggtgtgtcctaaaacacactcccgggcagctctgtcttttgggaaaaaggtggaataacttccttgaaccatggtggggacctaaatggaatggctttcactaagggggaaaataattttgaaaattn

SEQ ID NO: 54597 - DNA, 699 bp, Homo Sapiens
cccacgcgtccgagaggaggggcacagtaggacacagtgactgcccaggtgtccacacacctgtaggcctctgagccagcgtccagggtacaggtgcgggtggtggggatgaaggcctgaccagggagggagaagcaggtttggagaggaccctgtgcccaccctgacagacaccctggctggccctgactgactgtattctctggccacattcaagtcccccattggtgggggcagagaagtaggaccaggccatccttggctccagagctcgaagaccccaagacagccctctgctctcagcggcgccacagagagcctgggctcagccttctgcatcaggacatggcctcgtccactgagggcacgatttaaacatttgacatcagaagctttatttgtaaacctcacacagataaggaccaagggctggcggtgtggccagaggacaggggaagctgaaggccccgtgcttgagctcggcagtcctgctccttgcagtgaagccaccatgggtgaccgtccagcctcacccggtggcctgcacagtgagggaagggcttcagggccatctgctcccagggcaggggacaggccaccaaggacctttggcaaatgaaggtttacatttctgtagtttgtttgttttagagcttaatttgtagttttttagctattaagaaccatttgaatttttaa

SEQ ID NO: 54598 - DNA, 670 bp, Homo Sapiens
  misc_feature (665)..(665): n is a, c, g, or t
gaggcagtggccgagatctgcacggagatgctgcgtcagttacagggaaccccaacattccaaaaccttggcgaatcttgcgctcggcctggggcagcaacccttacttccgcggctcctattcatacacgcaggtgggctccagcggggcggatgtggagaagctggccaagcccctgccgtacacagagagctcaaagacagcgcccatgcaggtgctgttttccggtgaggccacccaccgcaagtactattccaccacccacggtgctctgctgtccggccagcgtgaggctgcccgcctcattgagatgtaccgagacctcttccagcaggggacctgagggctgtcctcgctgctgagaagagccactaactcgtgacctccagcctgccccttgctgccgtgtgctcctgccttcctgatcctctgtagaaaggatttttatcttctgtagagctagccgccctgactgccttcagacctggccctgtagcttttctttttctccaggctgggccgtgagcaggtgggccgttgagttacctctgtgctggatcccgtgcccccacttgcctaccctctgtcctgccttgttattgtaagtgccttcaatactttgcattttgggataataaaaaaggctccctcccctgcccctcanaaaaa

SEQ ID NO: 54599 - DNA, 848 bp, Homo Sapiens
  misc_feature (781)..(781): n is a, c, g, or t
tggccgctatgaagagctggctcggatgctgatggggctggacctgctggtgttcgcccacgaccatgttggccacggacagagcgaaggggagaggatggtagtgtctgacttccacgttttcgtcagggatgtgttgcagcatgtggattccatgcagaaagactaccctgggcttcctgtcttccttctgggccactccatgggaggcgccatcgccatcctcacggccgcagagaggccgggccacttcgccggcatggtactcatttcgcctctggttcttgccaatcctgaatctgcaacaactttcaaggtccttgctgcgaaagtgctcaaccttgtgctgccaaacttgtccctcgggcccatcgactccagcgtgctctctcggaataagacagaggtcgacatttataactcagaccccctgatctgccgggcagggctgaaggtgtgcttcggcatccaactgctgaatgccgtctcacgggtggagcgcgccctccccaagctgactgtgcccttcctgctgctccagggctctgccgatcgcctatgtgacagcaaaggggcctacctgctcatggagttagccaagagccaggacaagactctcaagatttatgaaggtgcctaccatgttctccacaaggagcttcctgaagtcaccaactccgtcttccatgaaataaacatgtgggtctctcaaaggacagccacggcaggaactgcgtccccaccctgaatgcattggccggtggccggctcatggtctggnggatgcaggcaggggaaaggcagagatggcttctcagatatggcttgccaaaaaaaaaaaaaaaaaa

SEQ ID NO: 54600 - DNA, 871 bp, Homo Sapiens
gcacacctgctgggtccctcctcacccagcaggcctggtccacctctcattgcaagccccaagcactgagccagcaggtgccaggagccacccgccccccatcgcttctgcacacctcagactcaccccatcaccttggcagcaaagcactggctctgccgtctgacccctgatccaggcagccccctccgcagagaaaagggttggggagaagcctctgcagtcctggaagatgtggggtgctgggtgagaggcatcagcccccacaagtatgtttttgtgtcttaagatagcagtttactttgaaaaagtgaaaaaggcttccgggctgtcctctgcccagtgagatggaggacgctagagaaagtgctgagtgtcccgagagaggcccccgagccagtgcatggaggtccttcggcctggctcagctgggctgcaggatgcccactttgaggagggaggcacagggcttgggcgaggggcagaggccatcagaactgcccggcttttttggaaactgaggacccaacaactaaccacgtttacacgacttgagttttgaaccccgattaatgtctgtacgtcacctttcctagttctgaccctgagccctggggaacaggaaagcgtggctggcctcttgcactgctttgtctccaaaataaactactgaaatcaaaaccggcaaaacaacacacacagaagccgggagatgactacaagaccaaggacgccagagggcacacgagggcatgtagaatatggggccaaaaaacccccgggggttctacgacggtgggcccccccggaaaatgtacgcgggggccaccagagcgccaacacaccgggggcacaagcgcgcggcaacacc

SEQ ID NO: 54601 - DNA, 642 bp, Homo Sapiens
acaatttacccctctaattagtactatatgtatgtgacttccctccccctgccagaatactccttggtcaattgtaggtattctttttggtttaatttttgccaatgtaattaaaaaatggtatgtcatttttaaaatttgtatttctttcattacaaataagattgttatgtcagtattgttattggcttttcgtattcctcttaacgtgaaccgtctgttcattgtttttacctgttttcgttttagcaagtagtacttaatttaaagtgtgaacttaatatataagatgccaggaccatcatattgatgacaaaaatctattatgtggttgtagtgcatgtcttggagttaaactcttaagtatcaagaagtaaaataatttcattgtttctgttackaacattaaaagtgtgcaaattgtataaaattaggtacttcgattagtaaaagaaaaaaatttgaatgttttttttttttattttattaagcatgcccagttatgccaagcatagtaaataaaggtcaagtagcatttataatagaggaagtattgttatccctagcatgagtgtaatggtgatatgaaaaactttgtcttgtsattataataataaaaaaatgaacatttattatggratt

SEQ ID NO: 54602 - DNA, 739 bp, Homo Sapiens
  misc_feature (730)..(730): n is a, c, g, or t
atgatctcttctggtgttgactggactgcttggggtgggggacgatcaggaggaagtgagcagtcgcctgcctgcagcaggcagcttctactcctgcctcatgcatacgtcccacaaatgcaggtgtcctgagcaccacacccagtgggaagagtgtgggggaggcgcacagtgtgagcccgcccccacgtcgtggggtaacatctgttatcaaactgctgtcgttgttgtggaagcatgtagactgtgccagaggccagacccacgggctcatgcacccctgagccagcagggcatcttggaaaaggaactcttggttcgatacctggagcagaggaggggaaagtccagggctatagggtgtgatgaagtcacccctttctgtcccactacatctgggactgactttccgagcctccagtccaaagccggcttgatttccgtgaactctggtgctcctgcatctcatgagtgtgccccatgggtcccctcccctctcagcatttccttgtcccgtctggacctggggagtggttaggcagcaagctttggtttatggttttcattcattggtgaagtaaattaggcagtgctaaagcctgtgggtttggtccttgaacaagatgtgggccttgcaagatgggagagtaaaccttgaagggctttattaaagaaataaaaaagaacttttgtatcttttatcctgggagcactgcgttttcctagctgnggtattcct

SEQ ID NO: 54603 - DNA, 502 bp, Homo Sapiens
taccaaaactgtgataacccttttttacttactgtaaagagtcattttcataaagatcaattcattgatttgttttttgtaaagctatcattcaatatatattataaattaatataaatttaagggaagctctatgtaaggagacttagagccaaactgtttaagctgtatcatcccaacaaagtatcctttcatgaacggggcatgcaatagcttaagaattgctaggattaaattaaggaaagtaaagctactcagagcagcaggttccacaagcacaaactttacacatttgtacaattttgaaatgcactacaataaacaaattagagcaacacatttgaaatacaggcttctttacataaactgagaggttatacaaaactcagtttcacaagggaacaatctatacctttctaaaagttaatatttcaagtctctaataggcagaatattttactctttaaaatcctgcctttctgaccaaaaaaaaaaaaaaaaa

SEQ ID NO: 54604 - DNA, 550 bp, Homo Sapiens
acaaaaagattgtagtggatctaatttttaagaaattttgcctttaagttattttacctgtttttgtttcttgttttgaaagatgcgcattctaacctggaggtcaatgttatgtatttatttatttatttatttggttcccttcctattccaagcttccatagctgctgccctagttttctttcctcctttcctcctctgacttggggaccttttgggggagggctgcgacgcttgctctgtttgtggggtgacgggactcaggcgggacagtgctgcagctccctggcttctgtggggcccctcacctacttacccaggtgggtcccggctctgtgggtgatggggaggggcattgctgactgtgtatataggataattatgaaaagcagttctggatggtgtgccttccagatcctctctggggctgtgttttgagcagcaggtaagcctgctggttttatctgagtgaaatactgtacaggggaataaaagagatcttatttttttttttatacttggcgttttttgaataaaaaccttttgtctt

SEQ ID NO: 54605 - DNA, 686 bp, Homo Sapiens
  misc_feature (591)..(591): n is a, c, g, or t
ggctcccctctgaaccccatatcttctgtttcataatgcagaagtattcttttcaattatattgttagtggacttgttttaattttagagaaactttgagtacagatactgtgagcttacattgaaaacagatattacagcttatttttttctacataattgtgaccaatacatttgtattttgtgatgaatctacatttgtttgtattcatgttcatgtgattaactcttagaagtgttgtaaaagatgcagagtaagtattatgccccagttcagaaatttggcattgatcttaaactggaacatgcttttactttattgccctaacaattttttattaaatttatttgaaaatgcatcacatgatgaaaaattatagtagcttataagagggcatatacagtgaagagtaagttttccctcctactctcgatcttccagaagctgtacttttaccagtttctttgtcccaccaacttaaaaaaaaaaagtacaattcattgttttgcaaaagtgtatggtaggggcttaaaagaaactataaagttttatttgaatgaacactatgcactgctgtaactggtagtgtncagtaaaagcaaaatgatagttttctagatgacattaaaattacatttaatacagataagtgttcttcagtgtaatgtgacttcatgctatatat

SEQ ID NO: 54606 - DNA, 608 bp, Homo Sapiens
gtcgggaaaaactatggatttgtatggaatactgtggtggcggatcacttcaagatatttaccatgttactggaccattatcagaattgcaaatagcctatgtatgcagagaaaccttacagggtcttgcctatttgcatactaaaggcaaaatgcatagagatatcaaaggtgctaatattttattgacagaccatggcgatgtaaaattagctgactttggtgtggctgcaaaaataacagctaccattgcaaaacgaaaatctttcattggcaccccttactggatggccccagaagttgcagcagtagagaagaatggtggctacaaccaactctgtgatatctgggcagtaggaataacagcaattgaacttggagaacttcagccacctatgtttgatctccacccaatgagggctctcttcttaatgtcaaaaagtaattttcagcctccaaaactaaaggacaaaacaaaatggtcatcaacattccataattttgtcaaaatagcactaaccaaaaacccaaaaaaaagaccaactgctgaaagacttctgactcacacttttgttgcacagccaggtctctctagagccctagcagtt

SEQ ID NO: 54607 - DNA, 1373 bp, Homo Sapiens
ccaaagtgctggctacctgctgagcgcccccgtaactctgacacagtagtaatttgagcctctgcaattgccgtctgcttcctgtgaaagtcctttccgtgcccactgacccttgagtgggcctttgagctgctgactttcagctggaacttgaagggaccccaaccctgagacactatggccctgacctcagacctggggaaacagataaaactgaaagaggtggaggggaccctcctgcagcctgcaactgtggacaactggagccagatccagagcttcgaggccaaaccagatgatctcctcatctgcacctaccctaaagcagggacaacgtggattcaggaaattgtggatatgattgaacagaatggggacgtggagaagtgccagcgagccatcatccaacaccgccatcctttcattgagtgggctcggccaccccaaccttctgtgcttgtactacgcagatgtttcctcttgagctattttaaaggtgtggaaaaagccaaagcaatgccctctccacggatactaaagactcacctttccactcagctgctgccaccgtctttctgggaaaacaactgcaagttcctttatgtagctcgaaatgccaaagactgtatggtttcctactaccatttccaaaggatgaaccacatgcttcctgaccctggtacctgggaagagtattttgaaaccttcatcaatggaaaagtggtttggggttcctggtttgaccacgtgaaaggatggtgggagatgaaagacagacaccagattctcttcctcttctatgaggacataaagagggacccaaagcatgaaattcggaaggtgatgcagttcatgggaaagaaggtggatgaaacagtgctagataaaattgtccaggagacgtcatttgagaaaatgaaagaaaatcccatgacaaatcgttctacagtttccaaatctatcttggaccagtcaatttcctccttcatgagaaaaggaactgtgggggattggaaaaaccacttcactgttgcccagaatgagaggtttgatgaaatctatagaagaaagatggaaggaacctccataaacttctgcatggaactctgagcaagatgtaaataaaattaaaaggtggatggcaagagtgcaaatactatcttcaatccttcagtcccagccagaagaatctctgaaagcatattgtgaatgtatacaatgtagtacaaacaatctctgtgatgattaacagtatgtcaccacttcattttttaaaaaggatcacgtctaatgcccattttcccaactattctttccaaagtaagatataaggtagcttaataaactaagtaaaacgtaaaaaaaaaaaaaaa

SEQ ID NO: 54608 - DNA, 619 bp, Homo Sapiens
gggattctcgtggcaacgtgaatttgataggcatagtggaagtgatagatctggcctgaagcacgaggacaaacgtggaggtagcggatctcacaactggggaactgtcaaagacgaattaactgacttggatcaatcaaatgtgactgaggaaacacctgaaggtgaagaacatcatccagtggcagacactgaaaataaggagaatgaagttgaagaggtaaaagaggagggtccaaaagagatgactttggatgagtggaaggctattcaaaataaggaccgggcaaaagtagaatttaatatccgaaaaccaaatgaaggtgctgatgggcagtggaagaagggatttgttcttcataaatcaaagagtgaagaggctcatgctgaagattcggttatggaccatcatttccggaagccagcaaatgatataacgtctcagctggagatcaattttggagaccttggccgcccaggacgtggcggcaggggaggacgaggtggacgtgggcgtggtgggcgcccaaaccgtggcagcaggaccgacaagtcaagtgcttctgctcctgatgtggatgacccagaggcattcccagctctggcttaactggatgcc

SEQ ID NO: 54609 - DNA, 872 bp, Homo Sapiens
agaggatttgaatgtgggacacaaaggtcccatttgcagttagaaaatttgtgtccacaaggacaagaacaaagtatgagctttaaaactccataggaaacttgttaatcaacaaagaagtgttaatgctgcaagtaatctcttttttaaaactttttgaagctacttattttcagccaaataggaatattagagagggactggtagtgagaatatcagctctgtttggatggtggaaggtctcattttattgagatttttaagatacatgcaaaggtttggaaatagaacctctaggcaccctcctcagtgtgggtgggctgagagttaaagacagtgtggctgcagtagcatagaggcgcctagaaattccacttgcaccgtagggcatgctgataccatcccaatagctgttgcccattgacctctagtggtgagtttctagaatactggtccattcatgagatattcaagattcaagagtattctcacttctgggttatcagcataaactggaatgtagtgtcagaggatactgtggcttgtttgtttatgttttttttcttattcaagaaaaaagaccaaggaataacattctgtagttcctaaaaatactgacttttttcactactatacataaagggaaagttttatccttttatggaacacttcagctgtactcatgttttaccaactccggaatgtgaatgctataatactctttttatatcacaaaggtcctcaagcactttatttctattctaatgcattggtgtgtccttttaccattaactcacaactgtttcctccagactggattacagcaaatactcctgggtcaaaacaaatacaacaacacaaacaaacagggg

SEQ ID NO: 54610 - DNA, 602 bp, Homo Sapiens
aaaaccaaaaaaacctgtccagtgtgcaagcaaaaagttgttccttctcaaggcgattcagactctgacacagacagtagtcaagaagaaaatgaagtgacagaacatacccctttactgagacctttagcttctgtcagtgcccagtcatttggggctttatcggaatcccgctcacatcagaacatgacagaatcttcagactatgaggaagacgacaatgaagatactgacagtagtgatgcagaaaatgaaattaatgaacatgatgtcgtggtccagttgcagcctaatggtgaacgggattacaacatagcaaatactgtttgactttcagaagatgattggtttatttccctttaaaatgattaggtatatactgtaatttgattttttgctcccttcaaagatttctgtagaaataacttattttttagtattctacagtttaatcaaattactgaaacaggacttttgatctggtatttatctgccaagaatatacttcattcactaataatagactggtgctgtaactcaagcatcaattcagctcttcttttggaatgaaagtatagccaaaacataaaaaaaaaaaaaaa

SEQ ID NO: 54611 - DNA, 637 bp, Homo Sapiens
  misc_feature (578)..(578): n is a, c, g, or t
gttgtagttacgagttttccctcagtgaagtagcaataggctgtaatcaagaaaatatgccatttatagagataagataaatgaaataatacttcagccaccaggtttttctgtctcacatacataagcagcatttcattgcagatatgggactgattctggggcttaccttgattaacatcttttggaagttttgctagggtgctttcctttctttactatgtttctcagattcctttgtatcagggttttgggtgtcacttaggttttgtccatcagattctgtgagacaccaggcatcgttttgaggatgtgggttatacacatggagtgcttctggaactatcagcccacttgaccacccagtttgtggaagcacaggcaagagtgttcttttctggtgattctccaggccatttaataccctgcaatgtaattggccctctgtggctcacatttcattagtgagccatgaaatcaactcagtgggacatagccagcatttttgcataccaggttgggctataaaaaatttctgttgtcaataaatttaaatgttttcctgctaacaaaaaggngaagtcaaaaaacaaattggcgggcccagcctattcccttagcgagggtaattttacct

SEQ ID NO: 54612 - DNA, 762 bp, Homo Sapiens
ttttttttttttttttttaagatttttaaaatttttcttttaataaaaaagctttacacaaacaagccattagcttatttcaagaaagaaaatcgaaaattagtctaaggcctttgttttaaatcagcttaagctatatgatatatatatatgtatgtatatatatatatatatatataaaatcgcactagatctttttttgctatcctctttctgaagtttttgggatccattcttcaattcacattctaaaatacctatattagcagagtcttcacatagcaccagttaagtgagaactgtgcgaacacagtaataattgctggtatgcatataaaatgcatcaaaaattgctatatgtaacaatgagattacccatcccaacccctcccactgaaaactatataacctcttacagaatgttagtgttccaagtcttagtgtaacttgatatcgtagtgagctgcttggtccctttcgatcctttttcttattgatgggttcagttgtttcctactgtaagaggcagttttctgtcagcatctcaatatgtagttcatttcccactgaaacatgggataggtaatttatttccagtaagtctgattgtttttgtatatgcattaaaaatgttttaaagtcttctttgacttttcttgatgacttcccttgcaaatgtttatgtcagtactgccactaacagcctgaagtccatggtggagctgctattttatttctcacatgtcactagtccttctgttt

SEQ ID NO: 54613 - DNA, 285 bp, Homo Sapiens
gaacatgtacatgatagaaaaattcttcatcgagacattaaatctcagaacatatttttaactaaagatggaacagtacaacttggagattttggaattgctagagttcttaatagtactgtagagctggctcgaacttgcatagggaccccatactacttgtcacctgaaatctgtgaaaacaaaccttacaataataaaagtgacatttgggctctggggtgtgtcctttatgagctgtgtacacttaaacatgcttttgaagctggcagtatgaaaaacctg

SEQ ID NO: 54614 - DNA, 902 bp, Homo Sapiens
  misc_feature (872)..(872): n is a, c, g, or t
  misc_feature (902)..(902): n is a, c, g, or t
cacaatgatgacctatatgtgcaatggggagaatccacagaattttattagcagatgcctattttatgaagtagaagtcaataacagccaaactgagacacataatgttttctacgtccaagaggctaaatgtgagaatccagaatttgagagaaatgtggagaatacatcttgtttcatggtccctggtgttcttcctgatactttgaacacagtcagaataagagtcaaaacaaataagttatgctatgaggatgacaaactctggagtaattggagccaagaaatgagtataggtaagaagcgcaattccacactctacataaccatgttactcattgttccagtcatcgtcgcaggtgcaatcatagtactcctgctttacctaaaaaggctcaagattattatattccctccaattcctgatcctggcaagatttttaaagaaatgtttggagaccagaatgatgatactctgcactggaagaagtacgacatctatgagaagcaaaccaaggaggaaaccgactctgtagtgctgatagaaaacctgaagaaagcctctcagtgatggagataatttatttttaccttcactgtgaccttgagaagattcttcccattctccatttgttatctgggaacttattaaatggaaactgaaactactgcaccatttaaaaacaggcagctcataagagccacagggtctttatgttgagtcgcgcaccgaaaaactaaaaataatgggcgcttttggagaagagtgtggagtcattctcattgaattataaaagccagcaggcttcaaactaggggaccaagcaaaaagtgatgaattagtggtgggagttaatctttatcaagagttngtgacaactttcctggagggatctataacn

SEQ ID NO: 54615 - DNA, 659 bp, Homo Sapiens
cgcgtccggaagagcgagcccagcagcacagagaagctctgatagcacagatcagcaccaacgttgaacagctaatgaaggcaccaagtctgaaggaggcagaagggaaagaacctgagctcttcctaagtagatccaggcctgtggcagccaaggccaagcaggcccatctcacaaccctgaagcacatacaagcaccctggtggaagaagcttggagaagaatctggagatgagattgatgttccaaaggatgagcttagtatagaattagaaaatttattcattggtggaaccaaaccaccttagtgagtaaccctaagaattgacacaaatctcatattttaggagattatattggttctgcctctggcatgctggtagactagggccatcctaacttattattttccagaggttctcctccagacaagacctgcagtaagcaaagagttatattctacctctctctcaattttctttttcttttctctgtatcctcatccttagccacacacagatttgtgtggcttttattgtagaactaaacttagcatagtgttctgttgtttacatgaagtgtgtttttctttggtttcttctgttttccaactaaatatttttttctaaataaatattttcaacaattgaaaaaaaaaa

SEQ ID NO: 54616 - DNA, 717 bp, Homo Sapiens
ccccaaaccactgataactcgatttgtccgaatcaagcctgcaacttgggaaactggcatatctatgagatttgaagtatatggttgcaagataacagattatccttgctctggaatgttgggtatggtgtctggacttatttctgactcccagatcacatcatccaaccaaggggacagaaactggatgcctgaaaacatccgcctggtaaccagtcgctctggctgggcacttccacccgcacctcattcctacatcaatgagtggctccaaatagacctgggggaggagaagatcgtgaggggcatcatcattcagggtgggaagcaccgagagaacaaggtgttcatgaggaagttcaagatcgggtacagcaacaacggctcggactggaagatgatcatggatgacagcaaacgcaaggcgaagtcttttgagggcaacaacaactatgatacacctgagctgcggacttttccagctctctccacgcgattcatcaggatctaccccgagagagccactcatggcggactggggctcagaatggagctgctgggctgtgaagtggaagcccctacagctggaccgaccactcccaacgggaacttggtggatgaatgtgatgacgaccaggccaactgccacagtggaacaggtggcaccactgtgctggccacagaaaagcccacggtcatagacagcaccatacaatc

SEQ ID NO: 54617 - DNA, 687 bp, Homo Sapiens
tttccgggacgtcgcgcgccgtgtggggcgcgcacgcagggctgggcgtgagggggcgtgcgcgtgcgcaggcgacgcgccgaggtactaggcagagccgtggaaccgccgccaggtcgctgttggtccacgccgcccgtcgcgccgcccgcccgctcagcgtccgccgccgccatgggagtgcaggtggaaaccatctccccaggagacgggcgcaccttccccaagcgcggccagacctgcgtggtgcactacaccgggatgcttgaagatggaaagaaatttgattcctcccgggacagaaacaagccctttaagtttatgctaggcaagcaggaggtgatccgaggctgggaagaaggggttgcccagatgagtgtgggtcagagagccaaactgactatatctccagattatgcctatggtgccactgggcacccaggcatcatcccaccacatgccactctcgtcttcgatgtggagcttctaaaactggaatgacaggaatggcctcctcccttagctccctgttcttggatctgccatggagggatctggtgcctccagacatgtgcacatgaatccatatggagcttttcctgatgttccactccactttgtatagacatctgccctgactgaatgtgttctgtcactcaactttgcttccgacacctctgtttcctc

SEQ ID NO: 54618 - DNA, 625 bp, Homo Sapiens
tgggagctgtttattggtcgccgtgagaagcctatatacaaagaaggcacaaggagggatttgagagaataaaacaaaagtatgctgagttgaaggaccggttgggtcagagttccatgctgggtgagcagggtgcccggatccagagtgtgaagacagaggcagaggagctgtttggggagaccatggagatgatggacaggatgaaagacatggagttggagctgctgcggggcagccaggccatcatgctgcgctcagcggacctgacaggactggagaagcgtgtggagcagatccgtgaccacatcaatgggcgcgtgctctactatgccacctgcaagtgatgctacagcttccagcccgttgccccactcatctgccgcctttgcttttggttgggggcagattgggttggaatgctttccatctccaggagactttcatgtagcctaaagtacagcctggaccacccctggtgtgtagctagtaagattaccctgagctgcagctgagcctgagccaatgggacagttacacttgacagacaaagatggtggagattggcatgccattgaaactaagagctctcaagtcaaggaagctgggctgggcagtatccccc

SEQ ID NO: 54619 - DNA, 573 bp, Homo Sapiens
ggggattgtgtgtattttatacaaatttaatacaatgtcttacattgataaaattcttaaagagcaaaactgcattttatttctgcatccacattccaatcatattagaactaagatatttatctatgaagatataaatggtgcagagagactttcatctgtggattgcgttgtttcttagggttcctagcactgatgcctgcacaagcatgtgatatgtgaaataaaatggattcttctatagctaaatgagttccctctggggagagttctggtactgcaatcacaatgccagatggtgtttatgggctatttgtgtaagtaagtggtaagatgctatgaagtaagtgtgtttgttttcatcttatggaaactcttgatgcatgtgcttttgtatggaataaattttggtgcaatatgatgtcattcaactttgcattgaattgaattttggttgtatttatatgtattatacctgtcacgcttctagttgcttcaaccattttataaccatttttgtacatattttacttgaaaatattttaaatggaaatttaaataaacatttgatag

SEQ ID NO: 54620 - DNA, 854 bp, Homo Sapiens
cagggagtcagggcacgggaggccctatctcccatcctgtggaacccgccccattggccaccccatgctgctgctgcctgggtctctgctctagcacccagaggcatgacaggccctgctcagaggtcagagggtctgggcagaggagggaccacattcccctgccttgcccctgagcacttctggagactgcgtcctgtcctatctgctcaccatcacccttcctgcccgacggagctgcttctgctccctggggcatatggactgacccacctcctgctgagaaccttcccctaggccctgtgcagaagggctactgccccttaggcctcagctgggggaaaggcagttctggtgctgtagaggccctggtgcagaaagtgggacgtcttttttcctaaggtgtttaagcacaggcttgataagtttggtttttaaaaaataatctaggaaatgaataattctaaatctagtaatgaggaaactgagcatttcttttgccctccagggtgccaagaccctacatatgacagaacccttggcccttctccatgcctgtgggatctgtttctttaaagcactttgtactgttattcaggaggttgataatctccttgacccatgtctttctaccctaatccccacttccctgcagaatcaatctgagggaggggataaagaggaagccataaaaaaaaaacatccgacagagcagctctggctttgccagcctggccagcagctcagagtgcaccgaggagggaaggatggctaagctggggaccgcagtcctcacagggtgccctgttgagaaaagacatttttacccccccctcctagtcacatcactgacc

SEQ ID NO: 54621 - DNA, 837 bp, Homo Sapiens
  misc_feature (698)..(698): n is a, c, g, or t
cttttctatgaagacaggaacagagccatctttgagggtttattatacactgtcagatgttggtgccaatcaaacagtgctgtttgccaaccccaactttctgcgtagcattggaaagttctggaaaagtagaggaatccatgccaagcgcctgtccacaggactttttctggtgagcgcagctctgggtctctgtgaagaggtggccatctatggcttctggcccttctctgtgaatatgcatgagcagcccatcagccaccactactatgacaacgtcttacccttttctggcttccatgccatgcccgaggaatttctccaactctggtatcttcataaaatcggtgcactgagaatgcagctggacccatgtgaagatacctcactccagcccacttcctaggaacaatggaagaagaaaggactgaaccagggtatttttgttaggttttctatgtgactccaagagggaatggtcaagttgtttcatgagtttgcatgggcccttggaaaaacaggaaaggagcaatgaagatccaagcaaaactttactttcagcgttggcttggaggacaaataagaaatgaaacatcctatgaaatactttatagcacatggcagatttgcaactagtaaaatgctggtgaaatgctgttggtaaagcacatggttcaaatctagaagatgcagttcanaaacaagacagactcgagttgttagggctgaggaaccaatcaaggtagaacaaagaaaatgttgggggtaaaagtgtttgctgattgtcaacacaaaactgggcttaataatatttaataagaaacctggtcttattac

SEQ ID NO: 54622 - DNA, 545 bp, Homo Sapiens
ttttttttttttgtttttctgctttagacttgaaaagagacaggcaggtgatctgctgcagagcagtaagggaacaagttgagctatgacttaacatagccaaaatgtgagtggttgaatatgattaaaaatatcaaattaattgtgtgaacttggaagcacaccaatctgactttgtaaattctgatttcttttcaccattcgtacataatactgaaccacttgtagatttgattttttttttaatctactgcatttagggagtattctaataagctagttgaatacttgaaccataaaatgtccagtaagatcactgtttagatttgccatagagtacactgcctgccttaagtgaggaaatcaaagtgctattacgaagttcaagatcaaaaaggcttataaaacagagtaatcttgttggttcaccattgagaccgtgaagatactttgtattgtcctattagtgttatatgaacatacaaatgcatctttgatgtgttgttcttggcaataaattttgaaaagtaaaaaaaacctcgtgc

SEQ ID NO: 54623 - DNA, 565 bp, Homo Sapiens
  misc_feature (2)..(2): n is a, c, g, or t
  misc_feature (196)..(197): n is a, c, g, or t
  misc_feature (199)..(199): n is a, c, g, or t
  misc_feature (438)..(438): n is a, c, g, or t
gntttctaggactttaaaacataatggtatatccaaaattctttatttcagaatgcaacaatagattccattaatatagactcaagatcaaaacagcatacctgctaagctaagatagatggtgttgattccactgggttttgatcaatacaataacaaacctttttcctttgacatactctgaattttgttgttnngngggagggggtgtgtgtgtgtgtgtgtgtgtgtgtgtgtatgtgtgtgtgtgtgtgtgcacgcgcagtgtccatcagtatcagtgcctgcctgagttaggaaaattacattcctggttctgtattgaggagaaggatgtataaagcaacatgaaacattagccctccttttattttaaagactaatgttaattgttcttaaaactggattttttttccttaaagcaatttttttcctttncgatttaatgaagtattgctagctgaagccagtttgacatagagagatgtcagattgatttgaaaggtgtgcagcctgattaaaaccaaccccgaaccctttaaagaccataaacatttttcccgca

SEQ ID NO: 54624 - DNA, 460 bp, Homo Sapiens
gtgattcatattcagtactgtttttaatcactttttaaaatataaggaccgaatgcaaggaaaccaaagtttattaataatttttatataactaaaataaaatagatgtggagggatctgtgatcatataaaaagggagggttactgaaagaattttagcaatatattgattcaggaaaaggagctgttttataaatgatcattcactgttcctatggttctatgtatctttcaaaccgatacctttactatttaaagagcgtaaatagtgaaagtaagatggtcatacttactgactttatctatttaagtttgatggagataaactatatcttggctagtggctactgtgtctgtgaatgtaaccagtacttctttaagctctattcagtagggttccagccactgcttttttgttgtttctagccactgtttttttttgcttgtttccttataaaac

SEQ ID NO: 54625 - DNA, 1081 bp, Homo Sapiens
caagaagaaatgtgtttcataaaaggatatttatatctctgttgctttgactttttttatataaaatccgtgagtattaaagctttattgaaggttctttgggtaaatattagtctccctccatgacactgcagtattttttttaattaatacaagtaaaaagtttgaattttgctacatagttcaatttttatgtctcttttgttaacagaaaccacttttaaaggatagtaattattcttgtttataacagtgccttaaggtatgatgtatttctgatggaagccattttcacattcatgttcttcatggattatttgttacttgtctaagatgcaatttgattttatgaagtatataccctttacccaccagagacagtacagaatccctgccctaaaatcccaggcttaattgccctacaaagggttattaatttaaaactccattattaggattacattttaaagttttatttatgaattccctttaaaaatgatatttcaaaggtaaaacaatacaatataaagaaaaaaataaatatattaataccggcttcctgtccccatttttaacctcagccttccctactgtcaccaacaaccaagctaaataaagtcaacagcctgatgtgtatctttctgtccctttcttcctgcttatatttagaacatatgctcatttgagaaaggatctttctgcatattattattataattatacatcatactgcaacctgcttttttgcatttaatagtacagcctttcagatcagatatgggctctaacttactctttttacctgctgcctaatacccacaggtttttaatttcttaacttggcccatatcaaaatttagccccacacaataaaaggtacgggggtggagcccctttttttggttaatagggttatatttacttatagggaaaaactttacaagggataattaacccccttttcttgaaaatgccgtaaccgaaattccagcaaaaagggggaaataccgaataaaaatttgaaaaaaaatgaactttttcggaaagcaaacggaacccccccaccctgtaaaagtttgaa

SEQ ID NO: 54626 - DNA, 642 bp, Homo Sapiens
ccttccccagtgatcactgtcataaccagtgctctaccgtatcccatcactgaggactgatgttgactgacatcattttatcgtaataaacatgtggctctattagctgcaagctttaccaagtaattggcatgacatctgagcacagaaattaaggcaaaaaaccaaagcaaaacaaatacatggtgctgaaattaacttgatgccaagcccaaggcagctgatttctgtgtatttgaacttagggcaaatcagagtctacacagacgcctacagaaagtttcaggaagaggcaagatgcattcaatttgaaagatatttatgggcaacaaagtaaggtcaggattagacttcaggcattcataaggcaggcactatcagaaagtgtacgccaactaagggacccacaaagcaggcagaggtaatgcagaaatctgttttgttcccatgaaatcaccaatcaaggcctccgttcttctaaagattagtccatcatcattagcaactgagatcaaagcactcttccactttacgtgattaaaatcaaacctgtatcagcaagtttaatggttccaattctgtgattttctattatttgaagggagttggcaaaagtccatgttttatggaatctttacaaga

SEQ ID NO: 54627 - DNA, 497 bp, Homo Sapiens
gccaggacagtgatgccaccagggagagcttccgcttggtgaccagggacatgtcccagatggacatagaagcccctctctgcctccctgggattttttagacttttacttttgatttccctaggatggaagagtataggtgggagataagggaagtggggtgagaggagaaaggaaatgttggcatgggcctgtgtgatgtccctgaggcagaagagccggggactgatgggttcaggtgggagctgctgggtgaggcagggaacccttttcactcccattccttagctttagtctaatggagccaaggactgctgggaccttcaaccctgatcttttgtcttccagtcttctcttagtgtcctgctcctaggtttccctctcttctggttcttctcccaggtattctcttcccaggcctctctggccactgctttgtatcagggtttttcacgcttttgtagaactgaggtttcaataaacagtttcagttgaaa

SEQ ID NO: 54628 - DNA, 673 bp, Homo Sapiens
tcgggcctttgcctgaccaaagagaagaaccgtatgttccctttactgcacggcctttatccttctgggcccctggggcggggacctgagctggctgtttcctgctttgcctgcacattgttctcccttcctcccaactcctcagggccttctgtatctgtgcctggccagtggcagcactagcagtggtattagcttatgccaaatacagctttggaaggatctttttttctttaactagatggtcaccttcttccctaccacacatgggtgggaaggtggacaggctaacctctccagctgtgagcctcttagactactgcatgtagcaaatgttcagcagctcaggcccccatgtccagttctgtccccactgtcctcaaccctgtcctgaaaattctactgctttgatggctggggccagtctcttgtcactttggaaactgaggacgcgtggattctactcaagcctccaagtagtggcatatcagtcttggagctcctagctggtgatacggagagggctttggaggacttgggacagcagggccaatttttttgcccaagtgcctaggctgctaactcactgactagaacttaatctggtactttacagttttgcaccaactctgccaagccactggatcttacattaaacatcatactcaaacca

SEQ ID NO: 54629 - DNA, 1060 bp, Homo Sapiens
gtccggaattcccgggatttggaacgttgagaatgtccaattatcttctccctttctaacaaaatgttcttttaataattatgtttaaggcaaagagaactagcctctatttttccatatttcaaggatctaatttgaaactagatacttgccagttcattatttgtgtatataaacactgattataatatttcatattaatattttaatggcataaggacttgcattattgcattagggagcgggtcatgctggtggtcaggaagcctgtgtagagtaccaaattatatgttgaaagagatgcataaccattctgtcaatatttgcagaaatatagttcctttcatattacagttgttttgcaagcaatttccacatttataggtgtaacaaaagctaaatgttgtaaatgttgttgccctcaggtataactaaaaacattccagtaaatatatttttgactgtgaaaaaaaaaaaaaaaaaaaaaaaaaaaaaaaaaaacaacaacaaacacaaaaaaaaaacacaaacacaacaaccccacccacaaggggggggggcccctcaaaaattcccccgggggggcccaattttccgcgacccccctttttttgaaaaaaggggccccttgaggggccgttttataacccagggcccgggcccctttttaacacccccggggggggaaaaatccctatctgggaattttgggagagaaccccttttttgggggggggaattcatgggcacaccctcctcccaaaaatttaacccctccaggggaaaaaacaaattttttaacggggaaaggggggctaaaaaacccccaaaaatccctgccccttaaaaaaatttcctcctcggggtgttttttttaaaaaattttttcccccggggccccggggtcccccccctgtgggcggggattttaaaaaataacaagccccccgggggtttttttgggggcccccctggccccccaaaagggggttgttgggtggtcaaaatccccccccacccctcttgtggaaaagtgtttttctctttttaaaaacacccc

SEQ ID NO: 54630 - DNA, 627 bp, Homo Sapiens
  misc_feature (478)..(478): n is a, c, g, or t
cgatcccgcagccgctccctccggggctcctaccatttatcccagtggctcaacaacttttttgccctccccttctcctccatggcttcccagcttgacatgtcttccgtggtgggggcaggggaaggcatagcccagactcttggagcaggtgttccccctggggactctgtcagaggctccatggaggcctctcaagtccaagtgcctctggaagcctctccaattacattcccaccaccctgtgccccagaaaggccccccatcagcccagtcccaggcgcccgtcaagcaggcctctgagagtgctacccttctcttgtaaccttgcagccaacacccctgcccggcccctgagctgcctcctccagcccatgctcttacaggccctgcacagagtagcactcattaattcttggttaaggaatgaatcaacgaatgaatggctatgcatggacctctgggcagggagacctgngtcttctctggctgagaggggaaggctaaggcatggctgagattcaagccaccattccaggcctctttgcccaagaaagaaacttctgtcacccttgcactctcctgtgttctgagtccctggccaatagcacagccttccatgccccg

SEQ ID NO: 54631 - DNA, 861 bp, Homo Sapiens
ccaccacccactccggacacagaacatccagtcatggataaaaatgagctggttcagaaggccaaactggccgagcaggctgagcgatatgatgacatggcagcctgcatgaagtctgtaactgagcaaggagctgaattatccaatgaggagaggaatcttctctcagttgcttataaaaatgttgtaggagcccgtaggtcatcttggagggtcgtctcaagtattgaacaaaagacggaaggtgctgagaaaaaacagcagatggctcgagaatacagagagaaaattgagacggagctaagagatatctgcaatgatgtactgtctcttttggaaaagttcttgatccccaatgcttcacaagcagagagcaaagtcttctatttgaaaatgaaaggagattactaccgttacttggctgaggttgccgctggtgatgacaagaaagggattgtcgatcagtcacaacaagcataccaagaagcttttgaaatcagcaaaaaggaaatgcaaccaacacatcctatcagactgggtctggcccttaacttctctgtgttctattatgagattctgaactccccagagaaagcctgctctcttgcaaagacagcttttgatgaagccattgctgaacttgatacattaagtgaagagtcatacaaagacagcacgctaataatgcaattactgagagacaacttgacattgtggacatcggatacccaaggagacgaagctgaagcaggagaaggaggggaaaattaaccggccttccaacttttgtctgcctcattctaaaatttacacagtagaccatttgtcatccatgctgtcccacaaatagttttttgttta

SEQ ID NO: 54632 - DNA, 639 bp, Homo Sapiens
gtccgggcgcacacctgtattcccatctagtcaggaagctgagatggaagaattaattgagcccacgagttcaaggctgcagtgagtcgtgattgtgccactgcactccagccggggtgacagaagagaccttgtctcgaaaaggaatctgaaaacaatggaaccatgccttcataattctagaaagttattttcaactgataaatctatattcacccaaataatcaagggtgaaggtaaaataatacatttttagacaagcaaagactcaggggttacctccatgtgccctttttagggaagctgttggagaaaatactccagcaaaatgaaggagtacacaaaccagagaatgacatgaatccagcaaataggatccaacacaggcaatattccagctatggagctagctttaaaaaggaacagtaaaaatattaatcggttagctgggtggaatggcccatgcctgtagtcccagctactcaggaggctcagcagcaggacgacttgagcccaagagttccagaccagcctggccaccttagtgagatcccttctcttaaaaataataacttattgccagatttggggcatttggaaagaaagttcattgaagataaagcaaaagtaaaaaaaaaa

SEQ ID NO: 54633 - DNA, 631 bp, Homo Sapiens
  misc_feature (527)..(527): n is a, c, g, or t
  misc_feature (564)..(564): n is a, c, g, or t
  misc_feature (609)..(609): n is a, c, g, or t
tctttgctataccactgactgtattgaaaaccaaagtattaagaggggaaacgcccctgtttatatctgtaggggtattttacattcaaaaatgtatgtttttttttcttttcaaaattaaagtatttgggactgaattgcactaagatataacctgcaagcatataatacaaaaaaaattgcaaaactgtttagaacgctaataaaatttatgcagttataaaaatggcattactgcacagttttaagatgatgcagatttttttacagttgtattgtggtgcagaactggattttctgtaacttaaaaaaaaatccacagttttaaaggcaataatcagtaaatgttattttcagggactgacatcctgtctttaaaaagaaatgaaaagtaaatcttaccacaataaatataaaaaaatcttgtcagttacttttcttttacatattttgctgtgcaaaattgttttatatcttgagttactaactaaccacgcgtgttgttcctatgtgcttttctttcattntcaattctggttatatcaagaaaggaataatctacantaataaacggcatttttttttgaatcttgaaaaaaaaaaaaaaanaaatgcggccgttccgagctcc

SEQ ID NO: 54634 - DNA, 668 bp, Homo Sapiens
ttttcctttgccagttccttgtgccggactgccgtgctcactgagctcctctgtcacaccccattcttgcccctcactgggcaggccatggcctacagcttgcagggagtaaagcaggcccgcctccctttcttcccatccacatactcctcttctgctttccagtgactccaccagtttgatgtgggaagtgttagcttcctttccttcttccatcccttcttccatctttccagctgtcaaatccaatccagtctctaacctagatgcagatcatttatttaaaagtaccaaacataacccagagtttgtggaatatgggcaacatatatatagccttctgtatttaacgatcttctgcttcttaaccgtaccagttttctatttataactcttatctatccatgatgttttaaagtctccacttgctgttatttacaaacgacagtgcattcagcagcccagtgccgtgagccctgacagatgccgtatttctgagtgcttccatgtgaatgctgccctcctgtagcatgtgtccaagtggacatagccactaaccaactagttacctttggactgcaacaaaaaatgtgaaaatgaagatttatttcttttaatttacttaaaaagaaacctctgtgctagcaataaagcatttatattgtgta

SEQ ID NO: 54635 - DNA, 276 bp, Homo Sapiens
tgtccatcctgacctgcgggtcctcagctgctcccacacttgtgccagcccggagggactggtcccggtcaccgcggacgtgctggccttggtatgtgccaggcttgcctgggctgggcagccttgggggggctgcctttgtggtgggcgctggggaagtacgtcccagcggcctcagggtctaaggagcgctagtgccttgcccacaggtgcgggaccatctgatgtgatgtgaatactcttcccacatacattaaacacacttaagtgagtgtg

SEQ ID NO: 54636 - DNA, 735 bp, Homo Sapiens
  misc_feature (703)..(703): n is a, c, g, or t
  misc_feature (705)..(705): n is a, c, g, or t
  misc_feature (707)..(707): n is a, c, g, or t
  misc_feature (710)..(710): n is a, c, g, or t
gtcgacaagtcattatttagcaatgttgttaccaaaaataaagatttgccagagtctgccctccgagacctcatcgtagccaccattgctgtcaagtacactcagtctaactctgtgtgctacgccaagaacgggcaggttatcggcattggagcaggacagcagtctcgtatacactgcactcgccttgcaggagataaggcaaactattggtggcttagacaccatccacaagtgctttcgatgaagtttaaaacaggagtgaagagagcagaaatctccaatgccatcgatcaatatgtgactggaaccattggcgaggatgaagatttgataaagtggaaggcactgtttgaggaagtccctgagttactcactgaggcagagaagaaggaatgggttgagaaactgactgaagtttctatcagctctgatgccttcttccctttccgagataacgtagacagagctaaaaggagtggtgtggcgtacattgcggctccctccggttctgctgctgacaaagttgtgattgaggcctgcgacgaactgggaatcatcctcgctcatacgaaccttcggctcttccaccactgattttaccacacactgttttttggcttgcttatgtgtaggtgaacagtcacgcctgaaactttgaggataactttttaaaaaataaaacagtatctcttaaaaaaanananacnacaaaaaaaaaaaaaaaaaaaaaag

SEQ ID NO: 54637 - DNA, 587 bp, Homo Sapiens
ggaggtgtaccgggcggtgacgccgctggggccgcctgacgccgagtactggaacagccagaaggaagtcctggagaggacccgggcggagttggacacggtgtgcagacacaactaccagttggagctccgcacgaccttgcagcggcgagtggagcccacagtgaccatctccccatccaggacagaggccctcaaccaccacaacctgctggtctgctcagtgacagatttctatccagcccagatcaaagtccggtggtttcggaatgaccaggaggagacaaccggcgttgtgtccaccccccttattaggaacggtgactggaccttccagatcctggtgatgctggaaatgactccccagcatggagacgtctacacctgccacgtggagcaccccagcctccagaaccccatcaccgtggagtggcgggctcagtctgaatctgcccagagcaagatgctgagtggcattggaggcttcgtgctggggctcatcttcctcgggctgggccttattatccatcacaggagtcaggggctcctgcactgactcctgagactattttctgggatcgggtatc

SEQ ID NO: 54638 - DNA, 903 bp, Homo Sapiens
  misc_feature (476)..(478): n is a, c, g, or t
  misc_feature (480)..(480): n is a, c, g, or t
  misc_feature (482)..(482): n is a, c, g, or t
ccagcgcccggagtccacccaccagcccctggggttcacccaccagccccaggggtccatcctcccccatcagcgggggttcacccccaggccccgggggtgcacccagcagcccccgccgttcaccctcaggccccaggggtgcacccaccagccccagggatgcaccctcaggccccgggggtccacccccaacctcccggggtccatccgtcggctcctggggtccaccctcagcctccgggagttcacccctcaaatcctggggtgcaccccccaactcccatgcccccaatgctgaggcccccacttccctccgaaggcccagggaacatacctccccctcccccaaccaactgagaagctgctccctcccccagcaagcccagcgccaggtgctcttgccttttcccactgagagaaggctgctcttttgtactgccccccgctcattaaacagcctcccccaaaaaaannncncnacacacacacaacaccaaaaaaaaaacaaggggggccgttctaaagtatcccccgaggggtccaagcttaaacgaaaccagcttttttgtaaaaagtggaccctatagagaaccgcattataaacaaggcactggcccgttgataataaaacacccgggatgccaaaaactgctaccttgcggattttcttttaaaggagatcttattttttgggcggggtcataactcggaaaaaactaactttcataaccttctaaagcccccaaaaatgaaaacaacacctctttaagtggcaataagggagaagaaaaataacgattgaatatgagtatggatggcttaaacaaaaagtttccccctctttggacgaaacaatatttattcggactattatattaaacaacattcggtcccaaagct

SEQ ID NO: 54639 - DNA, 572 bp, Homo Sapiens
  misc_feature (509)..(509): n is a, c, g, or t
  misc_feature (560)..(561): n is a, c, g, or t
gacaacaaacgaattgcaatttggggctggtcatatggagggtacgtaacctcaatggtcctgggatcgggaagtggcgtgttcaagtgtggaatagccgtggcgcctgtatcccggtgggagtactatgactcagtgtacacagaacgttacatgggtctcccaactccagaagacaaccttgaccattacagaaattcaacagtcatgagcagagctgaaaattttaaacaagttgagtacctccttattcatggaacagcagatgataacgttcactttcagcagtcagctcagatctccaaagccctggtcgatgttggagtggatttccaggcaatgtggtatactgatgaagaccatggaatagctagcagcacagcacaccaacatatatatacccacatgagccacttcataaaacaatgtttctctttaccttagcacctcaaaataccatgccatttaaagcttattaaaactcatttttgttttcattatctcaaaanaaaaaaaaaaaaaaaaaaaaaaaaaaaaaaaaaaaaaaaaaaaaaaaaaannaaaaaaaaaaa

SEQ ID NO: 54640 - DNA, 542 bp, Homo Sapiens
taagtaaactacttgaaaatagttgtatatattacctaacttctagtgtagtactggttctaacaagtaacaagcaagttttaaaattttaatgttttggctttcattacttcatcttaattatagctttgtatgttactcttatttaatataatctctattgtattgatttcttctgtatttaccttttggattttgtaaaacagaagtttaagaccacaagttagaagaaaggtcacatatttcaaacacaactagatggggctctgaaagatttgtatctctgtgcttgaacttgaatggccttaaacctgtttcagctttaacagtagaattttacttgggcaatatttgcccattctggtgtaacttatgtgactctagtgcttaacagctgccgttgaagctatattcagttctgtagagttagaataccttttgttgttgaagatgtgaatgaagtatgcatgtgcattaactgttgaattcacttttgtgccatttttgtaaatacagtagttttgcacaacctctcacaaatg

SEQ ID NO: 54641 - DNA, 901 bp, Homo Sapiens
  misc_feature (710)..(710): n is a, c, g, or t
aatatgactcataagctgtgcagtgaccactgctttaatagatatagaatggccaatggtttaataatgaattgctgtgaacagtgtggagagtacttgcccagtaaaggtgctggaaataatgttctggtgattgatggtcaacagaaaagattttgctgtcaaagttgtgtcagtgaatacaaacaggtaggtagccatccaagcttcctgaaggaggttctagatcacatgcaggactctttcttaatgcagcctgagaaatatggaaaactgacaacttgtactggttgccgaacacagtgcaggttttttgatatgactcagtgtataggtcctaatggatatatggagccatattgttcaactgcttgtatgaacagtcacaagacaaaatatgcaaaatcacaaagtttgggaattatttgccatttttgtaagcgaaactctttacctcaataccaagccacaatgcctgatggaaaactgtacaacttttgcaattccagttgtgtggctaaatttcaggctctaagtatgcagtcatctccaaatggccagtttgtagcgccaagtgatattcagttgaaatgcaactactgcaaaaattccttttgttcaaaaccagaaatcctggaatgggagaacaaagtgcatcagttctgcagcaaaacttgttcagatgactataagaagttgcattgcatagntacatattgcgaatactgtcaagaagagaagactcttcatgaaacagtaaatttctctggcggtaagagaccttttctgtagtggaaggctgtcaatttattatacaaaccaggattttgccacgacgtttagggattgagatggtgttacttggcaaactatttggtcctcagcctatgttaagaaaggg

SEQ ID NO: 54642 - DNA, 582 bp, Homo Sapiens
ttttgctatactcctgttctggggacagtttggtattaaaacacttaaatatagatccggtggtatggatgagaaaacaattgctttacttgttgctggactagtgatcactgtcattgtcattgttggagccattcttttcgtcccaggtgaatattcattaaagaatgctactggccttggtttaattgtgacttctacagggatattaatattacttcactactatgtgtttagtacagcgattggattaacctccttcgtcattgccatattggttattcaggtgatagcctatatcctcgctgtggttggactgagtctctgtattgcggcgtgtataccaatgcatggccctcttctgatttcaggtttgagtatcttagctctagcacaattacttggactagtttatatgaaatttgtggcttccaatcagaagactatacaacctcctaggaaagctgtagaggaaccccttaatgcattcaaagaatcaaaaggaatgatgaatgatgaataactgaagtgaagtgatggactccgatttggagagtagtaagacgtgaaaggaatacactt

SEQ ID NO: 54643 - DNA, 616 bp, Homo Sapiens
ttttttttttttttttttgtagagacggggttttagtagagacttggcctcccagaacccccttcctctgctcctccatgaatgacaattccaggcctcccctacctcatgtcctctcatttgggggattgctccgtgctgtccctttctctcaaggccgaagttgggaagtgagaaaccatgtttttaacttgtggctgcttttgctgctgctgctcctccgtatctggctgtatgggtggagaacccaccccctgcccaccacaggggtctccttccaggccactcaggacatttttagcttctctcctccccatgttcccttttttctctaaagtcccctgacatcagccctcccaactcctaagagggactacccatgagagtggggttctgaggctcccctatggggacagttccgttcttgaagtgtcagtgttggggaatatctgtggcctatgaggcccatctcaggtttggggatcccccagtccctatgatcagtgttggagtaccccctgggagagcctagtttctttgaggccccaggccctcttttacctacctttgcataggtgttatccctgtatttatgggaatacagttccatttcctc

SEQ ID NO: 54644 - DNA, 775 bp, Homo Sapiens
ttgttattttatttatttttaatttataatttattcaaattggattgccttggtaacctcccacacctgataattggcatcactcctccccgcttcccactctcagatattgctccaacctcaggagttgaagaggcttatgcggtgggggcaggaggagaactgctttccctcagctgagggaagaggggctattccagagggactgagtcagtagccaaagactcagcttcccctgtccttccccagtcccttcacttcccctaccctctgacctatctctgaaagccaagttatgcgtatgtgtgtgtgcacaagcttgtctttgtgtggtatgtgtgtgtgagtgtgcatgtatgcacacacacaggggttaaccacccctcacctagggctccagactccagttgtccctctcctcctacctgtgtctccttgttttggggtcctgactgaagaaggtgtccagggggcagagtcagggccaagcactggggtgcctcctctcacctggccagactctgacccacctacctcagctggggtgaggggcacccctcaaactcagtcatgtggttccaaactaccccattccccactccagactctgacccagcctcagtcctaactcctggggctgggctgaggggaacaagcatttgctgaaacttgaaaaaacaaagcaaatcaaaaacaggaaaaaattgtacctggtacttttttttagaaaaaaagattaaaaaagaaagaataaattcttgtttggaaacttgaa

SEQ ID NO: 54645 - DNA, 1105 bp, Homo Sapiens
gaaggtctccaccagctcctggccgggttcgaggacaagtcagcctatgcgctctgcacgtttgcactcagcaccggggacccaagccagcccgtgcgcctgttcaggggccggacctcgggccggatcgtggcacccagaggctgccaggactttggctgggacccctgctttcagcctgatggatatgagcagacgtacgcagagatgcctaaggcggagaagaacgctgtctcccatcgcttccgggccctgctggagctgcaggaatactttggcagtttggcagcttgacttctgcagctggaggaggcccctcaggccggggatctggggagggctagcccaaaacctcccgcatcgggcaggcaccccctgaagtacttccttcagggtttcccctttgtgagggtgtcaagtagcctcaccggcctgtctggaggagcagctggctctgctctgagaaactctggcaagtggacgccattctcttgcccttaggattcactgctctctcctacagccgccaggcctggggtcctgaaaggaccttgggtggtaaagctgtacttggtgggagtgagggcgtggggaggaaccatgcaaatcgccttccatggtttttaaatgcagtaaataacatttctggatgagacttgtttcccaaaattaaccagctatatctgttttgaaaacacaaaaagcaacgcacagcacacacgcccacacacggcggcaaaaacaaggagacccagcaactccgagacacaaaagaagacaaaaagaggcgcgcgcaaaaagtaaaccacacaggggaggccacaaatagcagagcacaccgacatagaaacagggcgcaccaatgcaggagcgcgatacaacgccgacgagcagggcgcgagaaacaaacacgacgaggcggagagaacacggtgccgcacggagagctggggagagccccccacacgcgagcggcggacacataagggagccccacaccacagagaggaagaccaccgaggacacaaacacaccgaacaggacgtgcaagacacacgacgcatcgccgccggcgcgagaggaggcagagagacgacacagaaat

SEQ ID NO: 54646 - DNA, 871 bp, Homo Sapiens
  misc_feature (708)..(708): n is a, c, g, or t
  misc_feature (801)..(801): n is a, c, g, or t
ggacacattggacctttcctgaggaagagggactgttcttttgtcccagaaaagcagtggctccattggtgttgacatacatccaacattaaaagccacccccaaatgcccaagaaaaaaagaaagacttatcaacatttgttccatgagcagaaaactggagctctggcctcagtgttacagctaaataatctttaattaaggcaagtcactttcttcttcttaaagctgttttctagtttgagaaatgatgggattttagcagccagtcttgaaggtctctttcagtatcaacattctaagatgctgggacttactgtgtcatcaaatgtgcggttaagattctctgggatattgatactgtttgtgtttttagttgggagatctgagagacctggctttggcaagagcagatgtcattccatatcacctttctcaatgaaagtctcattctatcctctctccaaacccgttttccaacatttgttaatagttacgtctctcctgatgtagcacttaagcttcatttagttattatttctttcttcactttgcacacatttgcatccacatattagggaagaggaatccataagtagctgaaatatctattctgtattattgtgttaacattgagaataagccttggaattagatatggggcaatgactgagccctgtctcacccatggattactccttactgtanggaatggcagtatggtaaagggataaatagggggcggggagggatagtcatggatcccagaaagtccttaaaaatagggggaaggaaaaaggnggtggaaaactcatgccctgtaaattattaaccttcagcctactaagaacagggggtgggtgggcctcct

SEQ ID NO: 54647 - DNA, 541 bp, Homo Sapiens
atcgcagaccccttcttcaggagcgcccagccctggatcgcagccctggcagggaccctgcctatcttgctgctgcttctcgccggagccagttacttcttgtggagacaacagaaggaaataactgctctgtccagtgagatagaaagtgagcaagagatgaaagaaatgggatatgctgcaacagagcgggaaataagcctaagagagagcctccaggaggaactcaagaggaaaaaaatccagtacttgactcgtggagaggagtcttcgtccgataccaataagtcagcctgatgctctaatggaaaaatggccctcttcaagcctggtgaggaaatgcttcagatgaggctccaccttgttaaataaattggatgtatggaaaaatagactgcagaaaaggggaactcatttagctcacgagtggtcgagtgaagattgaaaattaacctctgagggccagcacagcagctcatgcctgtaatcctagcactttggaaggctgaggagggcggatcacaaggtcaggagatcaaga

SEQ ID NO: 54648 - DNA, 582 bp, Homo Sapiens
tgcgaagcgctctggagaatcccggacagccctgctccctgcagccaggtgtagtttcgggagctcactggggccaaagtgagagtccagcggtcttccagcgcttgggccacggcggcggccctgggagcagaggtggagcgaccccattacgctaaagatgaaaggctggggttggctggccctgcttctgggggccctgctgggaaccgcctgggctcggaggagccaggatctccactgtggagcatgcagggctctggtggatgaactagaatgggaaattgcccaggtggaccccaagaagaccattcagatgggatctttccggatcaatccagatggcagccagtcagtggtggaggtgccttatgcccgctcagaggcccacctcacagagctgctggaggagatatgtgaccggatgaaggagtatggggaacagattgatccttccacccatcgcaagaactacgtacgtgtagtgggccggaatggagaatccagtgaactggacctacaaggcatccgaatcgactcagatattagcggcaccctcaagtttgcgtgtgagagcattgt

SEQ ID NO: 54649 - DNA, 575 bp, Homo Sapiens
gatacatacgcagaacaaagttacgaaggctacgaaggctattacagccagagtcaaggggactcagaatattatgactatggacatggggaggttcaagattcttatgaagcttatggccaggacgactggaatgggaccaggccgtcgctgaaggcccctcctgctaggccagtgaagggagcatacagagagcacccatatggacgttattaaaaacaaacatgaggggaaaatatcagttatgagcaaagttgttactgatttcttgtatctcccaggattcctgttgctttacccacaacagacaagtaattgtctaagtgtttttcttcgtggtccccttcttctccccaccttattccattcttaactctgcattctggcttctgtatgtagtattttaaaatgagttaaaatagatttaggaatattgaattaattttttaagtgtgtagatgcttttttctttgttgtttaaatataaacagaagtgtaccttttataataaaaaaaagaagttgagtaaaaaaaaaaaaacacacaaacctgttagtttcaaaaatgacattgct

SEQ ID NO: 54650 - DNA, 684 bp, Homo Sapiens
cccacgcgtccggctttttctccctcctcctcaagttcctttttgcaccgtcaccacccaacaccttccatgacacttccttgctttggccagaagccatcaggtaaggttggaaagagcctctgacctcccttgtttagttttggaaccatactcactcactctccaccagcctgggaaatgaatattgggtcctcagccctgccaccctctgctgtcatcagctgatgcattgtttttagctcaggttttgataaggtgaaaagaatagtcaccagggttactcagacctgccagctctcggagtccttggtggttgaacttggagaaagaccgcatgaagatacttgtaagcacacatgatccctctgaattgttttactttcctgtaactgcttttgcttttaaaaattgaagaagttttaaacagggctttcatttggtcatccttgcaatccattggggtctagtttggaatctgacaactggaacaaaaagaaccttgaatccggtgcatgccttggttttggtgctgctgctgcttcccaagatcctcagcagggattaagaaggaacccggtgtgcacagcagatccccgaaattggtgggcttgacctcctggcaaattgctgcgtctttccacttgctgttcaggaccactaaatgctgaaatgtggatgcat

SEQ ID NO: 54651 - DNA, 606 bp, Homo Sapiens
ggctgacaggaacagcatggattccgtggatagctgttgcagtctcaagaagactgagagcttccaaaatgcccaggcaggctccaaccctaagaaggtcgacctcatcatctgggagatcgaggtgccaaagcacttagtcggtcggctaattggcaagcaggggcgctatgtgagttttctgaagcaaacatctggtgccaagatctacatttcaaccctgccttacacccagagcgtccagatctgccacatagaaggctctcaacatcatgtagacaaagcgctgaacttgattgggaagaagttcaaagagctgaacctcaccaatatctacgctcccccattgccttcactggcactgccttctctgccgatgacatcctggctcatgctgcctgatggcatcaccgtggaggtcattgtggtcaaccaggtcaatgccgggcacctgttcgtgcagcagcacacacaccctaccttccacgcgctgcgcagcctcgaccagcagatgtacctctgttactctcagcctggaatccccaccttgcccaccccagtggaaataacggtcatctgtgccgcccctggtgcggacggggcctg

SEQ ID NO: 54652 - DNA, 714 bp, Homo Sapiens
  misc_feature (678)..(679): n is a, c, g, or t
  misc_feature (686)..(686): n is a, c, g, or t
  misc_feature (688)..(688): n is a, c, g, or t
  misc_feature (690)..(691): n is a, c, g, or t
  misc_feature (693)..(695): n is a, c, g, or t
  misc_feature (702)..(704): n is a, c, g, or t
aatattaaatcaggaaaaaaaaatgcagggaggtatttaacagctgagcaaaaacattgagtcgctctcaaaggacacgaggcccttggcagggaatatttaaagcaacttcaagtttaaaatgcagctgttgattctaccaaacaacagtccaagattaccatttcccatgagccaactgggaaacatggtatatcatgaagtaatcttgtcaaggcatctggagagtccaggagagaagactcacctctgtcgcttgggttaaacaagagacaggttttgtagaatattgattggtaatagtaaatcgttctccttacaatcaagttcttgaccctattcggccttatacatctggtcttacaaagaccaaagggatcctgcgcttgatcaactgaaccagtatgccaaaaccaggcatccaatttgtaaaccaattatgataaaggacaaaataagctgtttgccacctcaaaactttatgaacttcaccaccactagtgtctgtccatggagttagaggggacatcacttagaagttcttatagaaaggacacaagtttgtttcctggctttaccttgggaaaatgctagcaacattatagaaattttgccttgttgccttatcttcttccaaatgtactgttaaataaaaataaagggttaccccatgcaaannaaaaaananannannnaaaaaannnaaaaaaaaag

SEQ ID NO: 54653 - DNA, 501 bp, Homo Sapiens
attttgtaattaactgtcaagcctgtggatgatttttttgaacttggtagttcataaaggtttacagtgaataaaaggatatcatcttgagtatagcaatatcaaaaggaattcagtagttactgctgtttaggaatataaggttaagatatcatatgggtcaggtcattttttttttctgtgctggttgccacatcttagcaagcaccaaaaaactaaagcagtttttaaaccgatatttacgtaaagaaaatcataaaatccaatgcttctgcatactgtgttatgttacagtccagttttgtgtgctttactacacagtttggttacaggacttctgtgcattgtaaacataaacagcatggaaaaggttaaatacctgtgttcagattgtaagatctagtccggacttgctgtgtatattgtaacgttaaatgaaaaaagaacccccctttgtattatagtcatgcggtcttatgtatgataaacagttgaataatt

SEQ ID NO: 54654 - DNA, 959 bp, Homo Sapiens
tgggactccacatgcgccggaaggagcttcaggtgavcactgctcatgtgtggatgcccctgcaacaggctttcytgtctgtagagccaggggtgcaagtgccatccacacttgcagtgaatggcttttccttttaggtttaagtcctgtctgtctgtaaggcgtagaatctgtccgtctgtaaggcgtagaatgagggttgttaatccatcacaagcaaaaggtcagaacagttaaacactgcctttcctcctcctcttattttatgataaaagcaaatgtggccttctcagtatcattcgattgctatttgagacttttaaattaaggtaaaggctgctggtgttggtacctgtggatttttctatactgatgttttcgttttgccaatataatgagtattacattggccttgggggacagaaaggaggaagttctgacttttcagggctaccttatttctactaaggacccagagcaggcctgtccatgccattccttcgcacagatgaaactgagctgggactggaaaggacagcccttgacctgggttctgggtataatttgcacttttgagactggtagctaaccatcttatgagtgccaatgtgtcatttagtaaaacttaaatagaaacaaggtccttcaaatgttcctttggccaaaagctgaagggagttactgagaaaatagttaacaattactgtcaggtgtcatcactgttcaaaaggtaagcacatttagaattttgttcttgacagttaactgactaatcttacttccacaaaatatgtgaatttgctgcttctgagaggcaatgtgaaagagggagtattacttttatgtacaaagttatttatttsatagaaattttggtacagtgtacattgaaamcatgtaaaatattgaagtgtctacaawgggcatgaagtgtcttwataaaggtcwttwtaatgyca

SEQ ID NO: 54655 - DNA, 700 bp, Homo Sapiens
gggagaaggggagccagctggctgcgggacagaaacaacgtctggccattgcccgggcccttgttacgagacccgcgggtcctcatcctggatgaggctactagtgccctagatgtgcagtgcgagcaggccctgcaggactggaattccctgtggggatcgcacagtgctggtgattgctcacaggctgcaggcagttcacgtcgcgcccaccagatcctggtgctccaggagggcaagctgcagaagcttgcccagctccaggagggacaggacctctattcccgcctggttcagcagcggctgatggactgaggccccagggatactgggccctcttctcaggggcgtctccaggacccagagctgttcctgctttgagtttccctagagctgtgcggccagatagctgttcctgagttgcaagcacgatggacgatttggacactgtgtgccttttggtggggtggagaggtggggtggggtggggtgtggtggggtggaggctgtctgtgtccaggaaacttaattccctggtgactagagctttgcctggtgatgaggagtatttagtggcataatacatatattttaaaatattttccttcttacgtgaactgtatacattcatatagaaaatttagacaatataaaaaagtacaaagaagaacagtaaacataaacacagcaacacacacac

SEQ ID NO: 54656 - DNA, 503 bp, Homo Sapiens
gtttttcctcttttaccaagacccgccaacatgggccgcgttcgcaccaaaaccgtgaagaaggcggcccgggtcatcatagaaaagtactacacgcgcctgggcaacgacttccacacgaacaagcgcgtgtgcgaggagatcgccattatccccagcaaaaagctccgcaacaagatagcaggttatgtcacgcatctgatgaagcgaattcagagaggcccagtaagaggtatctccatcaagctgcaggaggaggagagagaaaggagagacaattatgttcctgaggtctcagccttggatcaggagattattgaagtagatcctgacactaaggaaatgctgaagcttttggacttcggcagtctgtccaaccttcaggtcactcagcctacagttgggatgaatttcaaaacgcctcggggacctgtttgaattttttctgtagtgctgtattattttcaataaatctgggacaacagcaaaaaaaaaaaaaaaaa

SEQ ID NO: 54657 - DNA, 779 bp, Homo Sapiens
acatgggcacaatcaagtatttgtccagcctattgcaggcttttcctgactttaaaataaattgtgatcaataatagtacctttgattatacatttattattgtgtctctctctgatgtactgtggattgtacatttaactttggaatggctttgtaataatcagtcttaagaaaatgttgacaagctctggttgcttatttttagaaaatgaggacatttaataataataaaaaaaaagggattaatagcttttgacctcaagtcttttgtcttctgagtgttggagcttggctgaagacatgtttaatactgtacaatttctgaagatggttattaacactgtgctgttaagcatccatttaaaaatatttgttatcttctttgcctgcctgtattttaaaaagaaatacaaagttgtaaaagtaatggatttctttggatgctgaatgcagtgatgttatcagtcagattctttccttggctcagttgtgtttgtatttcctttcttaattccccaaatcttggctgggcacggtggctcacgcctgtaatcccagcactttgggaggctgaggcaggtggttcactggaggttgagttcgagaccagcctggccacatggtgaaaccctgtctctactaaagatataaaaattagctggatgtggtggtgcacacctgtgatcccagctacttgggaggctgaggtgggagaattgcttgaacctggaaggcagaagttgcagtgagctgagatcacaccactgcactccagcct

SEQ ID NO: 54658 - DNA, 1016 bp, Homo Sapiens
  misc_feature (60)..(60): n is a, c, g, or t
atggagtrgccggcgcggctctgcgggctgtgggcgctgctgctctgcgccggcggcggngggcgggggcgggggcgccgcgcctacggaaactcagccacctgtgacaaatttgagtgtctctgttgaaaacctctgcacagtaatatggacatggaatccacccgagggagccagctcaaattgtagtctatggtattttagtcattttggcgacaaacaagataagaaaatagctccggaaactcgtcgttcaatagaagtacccctgaatgagaggatttgtctgcaagtggggtcccagtgtagcaccaatgagagtgagaagcctagcattttggttgaaaaatgcatctcacccccagaaggtgatcctgagtctgctgtgactgagcttcaatgcatttggcacaacctgagctacatgaagtgttcttggctccctggaaggaataccagtcccgacactaactatactctctactattggcacagaagcctggaaaaaattcatcaatgtgaaaacatctttagagaaggccaatactttggttgttcctttgatctgaccaaagtgaaggattccagttttgaacaacacagtgtccaaataatggtcaaggataatgcaggaaaaattaaaccatccttcaatatagtgcctttaacttcccgtgtgaaacctgatcctccacatattaaaaacctctccttccacaatgatgacctatatgtgcaatgggagaatccacagaattttattagcagatgcctattttatgaagtagaagtcaataacagccaaactgagacacataatgttttctacgtccaagaggctaaatgtgagaatccagaatttgagagaaatgtggagaatacatcttgtttcatggtccctggtgttcttcctgatactttgaacacagtcagaataagagtcaaaacaaataagttatgctatgaggatgacaactcctggagtaattggrgcaagaaaatgagtwtaggtaaga

SEQ ID NO: 54659 - DNA, 906 bp, Homo Sapiens
cagtatgtggaagtgtgggtctgtgtgtgtgtatgtgggggtctgtgtgtttatgtgtgtgtgttgtgtgtgggagtgtgtaatttaaaattgtgatgtgtcctgataagctgagctccttagcctttgtcccagaatgcctcctgcagggattcttcctgcttagcttgagggtgactatggagctgagcaggtgttcttcattacctcagtgagaagccagctttcctcatcaggccattgtccctgaagagaagggcagggctgaggcctctcattccagaggaagggacaccaagccttggctctaccctgagttcataaatttatggttctcaggcctgactctcagcagctatggtaggaactgctgggcttggcagcccgggtcatctgtacctctgcctcctttcccctccctcaggccgaaggaggagtcagggagagctgaactattagagctgcctgtgccttttgccatcccctcaacccagctatggttctctcgcaagggaagtccttgcaagctaattctttgacctgttgggagtgaggatgtctgggccactcaggggtcattcatggcctgggggatgtaccagcatctcccagttcataatcacaacccttcagatttgccttattggcagctctactctggaggtttggtttaaaagaagggtgtcaccctttagccagcaccatctctttacctcccaattccacaccctcactgctgtagacttttgctatgaacctgggggaatggctcccctgaaccaaatgcttttcctccaaggggaaagaagtgcctaatggaaaaagccaaagggcctgggcccaaaggctttccggccctcctgtgtccctcatccctaagccaacctcccccttaccccgggcccc

SEQ ID NO: 54660 - DNA, 431 bp, Homo Sapiens
cctcgtgaacaagacaaatgtttatgctaaaaataacaccaaaatgtggttgaactcttaaggacttttcccttcaagtgtgaaggaaggtgtgatgaatgctgtggagaggcatctggaacagaaattcaaaataaagccttgacattaaataccccttccactgctcactttgtggatggtagcatgagctgtctaccaagaagaaacctgctgctctcttaattttaatatttcctaatttgttgatggccttttgtgttgtgaaccacaacaaagagaggcctcttttgtggctggttattccagttccctgggattttaaattctttggtctattaagtatccttgtattggatacgtaataccttagtgctgtcataatgttgtacaagatcatgatcagcttctccctttcttcattttctgtg

SEQ ID NO: 54661 - DNA, 907 bp, Homo Sapiens
  misc_feature (699)..(699): n is a, c, g, or t
gaattgccactttgaataattatcaaagagtgtgtgcattagagcagcaaaagagtgctatgcagaccttgaaaggcatagtccggttcttgtccaagactgataagaggctattgtactcgcataaaagctgatccacattgtttaaatttcttgtgtaattttgggaaaatggaaagtggaaaagaagccagtgttcatatccaactggaaggccggccatccatttctagaagatggatgagacttcagcactcaagtttgaaataagagcaacaggttttgccagagccaaatccaagagtaattgaactaaacaaggatgagaatgttgcgcatgttctactggaaggactacatcatcagaagagccaaacgtgtatttcaccatagtgattatttcaagtagcttgctacttggacttattgtacttctgttgatctcatatgttatgtggaaggctggcttctttagaagacaatacaaatctatcctacaagaagaaaacagaagagacagttggagtaatatcaacagtaaaagcaatgatgattaaggacttctgtcaattgagagaatgggaaagagactccggttgtagtaagaattaaaagaaactgtttaccaggagaaagtgaattttgttggcactttcttttactcatgatctgtggacatatatatgtctttcatggccnggggacatttccaggaaggattatctttgagaaaagaggactgggcaggggattataaaggcaagaataaccctaagtgtcacgggggaggaaccctcaagactagtgtttgaaaagagaaactgaaaatgagaggaagatatcagagaaaatgggaagagaaaaaaaataacagttgcggaaagagaggggagaacgacaaagaaat

SEQ ID NO: 54662 - DNA, 880 bp, Homo Sapiens
tagaaaaagaaaagtttagaagagcgaagtaaacaaaaaacataagtcctcttcttcctcatcttcctcctcctcctcctcttcctctactgagacttcagaaagcagtagtgagagtgagagtaacaataaagaaaaaaaaatacaaaggaagaaaagaaagaaaaacaagtgttcagggcataacaacagtgattctgaagagaaggacaagtctaagaagagaaagcttcatgaagaactttctagcagtcaccataaccgggaaaaagccaaggaaaagcccaggttcttaaaacacgagagttctagggaggacagcaaatggagccattctgattctgacaaaaagtccagaacccataaacatagcccagagaagagaggctctgaaagaaaggaggggagcagcagaagccacggcagggaggaaaggagccggagaagccggagcagaagtcctggtagttacaagcaaagggagacaaggaaacgggcacagcgaaatcctggtgaagagcaaagcagaagaaatgacagcagaagccatggcacagacttgtatagaggagaaaaaatgtacagagagcacccaggaggtacacatactaaagtgacacaaagagaatgaagcagaagtagagaagaaagactgtatgtgacaattacctgggaataaaaaaatctccacttttttattgaatacctttagcaaggggtaaattatgtactgttgtctttttaataaaaaagcttaattttaatttttcatctctagactggcaattcaagtaccaaacttcatgagtactatggagaatgaatttttgcaaatattttgtaagtaagcttttttgggggcttggggaaaatttttttt

SEQ ID NO: 54663 - DNA, 705 bp, Homo Sapiens
tgagtatttggacccaagccctgaggtacagaagaagaagtatgccttcaaatgtcacagactaaaagaaaataatattgagcagatttacccagtcaatgccatttcttttcacaatatccacaatacatttgccacaggtggttctgatggctttgtaaatatttgggatccatttaacaaaaagcgactgtgccaattccatcggtaccccacgagcatcgcatcacttgccttcagtaatgatgggactacgcttgcaatagcgtcatcatatatgtatgaaatggatgacacagaacatcctgaagatggtatcttcattcgccaagtgacagatgcagaaacaaaacccaagtcaccatgtacttgacaagatttcatttacttaagtgccatgttgatgataataaaacaattcgtactccccaatggtggatttattactattaaagaaaccagggaaaatattaattttaatattataacaacctgaaaataatggaaaagaggtttttgaatttttttttttaaataaacaccttcttaagtgcatgagatggtttgatggtttgctgcattaaaggtatttgggcaaacaaaattggagggcaagtgactgcagtwttgagaatcagwwttaamcttgatgattttttgtttccactgtggaaataaatgwtttgtaaataagtgtaaaaaaaa

SEQ ID NO: 54664 - DNA, 860 bp, Homo Sapiens
  misc_feature (775)..(775): n is a, c, g, or t
gagcccccctctcctccccttcctcaaccactggacgtttatatattataggcagggatgaaatgggcacctagtcagatcttctcagcttgctagccagaaatgactgtgattctgctgggggctgctgagaaggtaatgtaggttgaaaaggggctctaagtttatttatttcgttagattgacacttccacacactccctgtagtccaggtagggcctagaaataggaaaggctaggattggataatgctgcaaatgctttttttgtgtgagaaactggagagatgtgatttctccttttgggagagaatgtcccaaaattgattaggctgagccttgggaatagtttggcaggtttaacatcccaaggctaacctaacgtagttgggaaaggtagattgaatgagacatgttttctgtgcttctaagtgttctgtcccttaggctgctattgcttcatgtttccattatggcaggtttagagaatccttaaaaagaaaaattgacttgcttgcctaaaactacagtgcccccttagcctccattacttagtatctcttacagtttgctctggctctcaaataatataaagattgatgaacattattcacagaaaatgggcaccttctctctctcttccagcatgttgcttttgaaagtatcatgggatagtgggacgagcactggtttaggagtcaagatatctgggttctcactctactcagtcccagcagagctgttgtataaccttgattaagtcatttagcctctcntggattctatttcctcatctgtaaatagagttaaatgtatgtaagattgattctgattctgaagtcttaactgtcagcagaaaaa

SEQ ID NO: 54665 - DNA, 878 bp, Homo Sapiens
  misc_feature (467)..(467): n is a, c, g, or t
ggcccctgggagcacagctcatcaccatggactggacctggaggttcctctttgtggtggcagcagctacaggtgtccagtcccaggtgcagctggtgcagtctggggctgaggtgaagaagcctgggtcctcggtgaaggtctcctgcaaggcttctggaggcaccttcagcagctatgctatcagctgggtgcgacaggcccctggacaagggcttgagtggatgggagggatcatccctatctttggtacagcaaactacgcacagaagttccagggcagagtcacgattaccgcggacgaatccacgagcacagcctacatggagctgagcagcctgagatctgaggacacggccgtgtattactgtgcgagagtaagatattgtagtagtaccagctgcctgtactactttgactactggggccaggaaccctggtcaccgtctcctcagggagtgcatccngcccaacccttttccccctcgtctcctgtgagaattccccgtcggatacgagcagcgtggccgttggctgcctcgcacaggacttccttcccgactccatcactttctcctggaaatacaagaacaactctgacatcagcagcacccggggcttcccatcagtcctgagagggggcaagtacgcagccacctcacaggtgctgctgccttccaaggacgtcatgcaaggacacagacgaacacgtggtgtgcaaaagtccagcacccaacggaaacaaagaccagaacgtgcctctttccagtgattgctgagctggctcccaaagtgagcgtcttcgtccaccccggacggttcttcggaacccggaagtccagtcaactgcaggcaacggtttcaagtcccggagatca

SEQ ID NO: 54666 - DNA, 836 bp, Homo Sapiens
  misc_feature (824)..(825): n is a, c, g, or t
  misc_feature (828)..(831): n is a, c, g, or t
  misc_feature (833)..(836): n is a, c, g, or t
gatccaggccaggaacacaacaggtgtgactgaggaggccctcaaagaattcagcatgatgtttaaacactttgacaaggacaagtctggcaggctgaaccatcaggagttcaaatcttgcctgcgctccctgggctatgacctgcccatggtggaggaaggggaacctgaccctgagttcgaggcaatcctggacacggtggatccgaacagagatggccatgtctccttgcaagaatacatggctttcatgatcagccgcgaaactgagaacgtcaagtccagcgaggagattgagagcgccttccgggccctcagctcagagggaaagccttacgtgaccaaggaggagctctaccagaacctgacccgggaacaagccgactactgcgtctcccacatgaagccctacgtggacggcaagggccgcgagctccccaccgcgttcgactacgtggagttcacccgctcgcttttcgtgaactgagccactccctgggtcacccacccctcgctgcttgccctgcgtcgccttgctgcatgtccgctcctctgtgtgctctcactttccactgtaaccttaagcctgcttagcttggaataagacttaggagaaaatggtgcttcactaacccgcttccggtccagtcacaatcatcatgtcactgtggggacccagatctgtgtcttgaagcagctgccctcattccgacttcagaaaatcgaagcagctggctcctccccttgttctctctcccaccctcccccaaatctgttttcatgtaaaagacaaataaatgatgacttccccccaaaaaaaaaannaannnnannnn

SEQ ID NO: 54667 - DNA, 566 bp, Homo Sapiens
agcccctgaactgctgttgggaaccaccacgcagaccaccagcatcgacatgtgggctgtgggctgcatactggccgagctgctggcgcacaggcctcttctccccggcacttccgagatccaccagatcgacttgatcgtgcagctgctgggcacgcccagtgagaacatctggccgggcttttccaagctgccactggtcggccagtacagcctccggaagcagccctacaacaacctgaagcacaagttcccatggctgtcggaggccgggctgcgcctgctgcacttcctgttcatgtacgaccctaagaaaagggcgacggccggggactgcctggagagctcctatttcaaggagaagcccctaccctgtgagccggagctcatgccgacctttccccaccaccgcaacaagcgggccgccccagccacctccgagggccagagcaagcgctgtaaaccctgacggtgggcctggcacacgcctgtattcccacaccaggtcttccgatcagtggtgtctgtgaagggtgccgcgagccaggctgaccaggcgcccggga

SEQ ID NO: 54668 - DNA, 591 bp, Homo Sapiens
  misc_feature (547)..(547): n is a, c, g, or t
cggactgaaccctcgggctgcggtcatatatgagaacttgctccgcgcggtcccctttgccgggatgtttccattgcttcatgtttcagtaaacaaaaggagtttgtgaccaactatgttttctttcttaattcttctaagttgacttttctttcctcctgaaactagtctctgtagcctttcactctgttccttatattctcagcctctgagcagccctaggtaaggattatgctggcatcccctttttcctgtgcagtggaacccctcttatcttgctttccctaggagttgaatccttctccctgcctacctgcagcatctcctttccctttaaaatgaccatgtagtggcaagcagccttttactcttctgttagctctggactcttaacacttaagttactcttctgaaattgctaggaccattgggggttttgttgttttgtttgttttttatgtccgacctgtgatcgtggtacagcattagctgaaatttacccttgttttactccactcctcccttttttaaaaaaattttttgacanataaatgtttctaacacttaaaaaaaaaaaaaaaaaaaaatagt

SEQ ID NO: 54669 - DNA, 865 bp, Homo Sapiens
gcagatggtcccagtaatagatactcagcactagactaacataacaggtcactacacgggtgcagaatcactttacaaaagaagactctgttttacgaaggggattcactacagggacttagagaacagtctcttttctgcctttaaaatgagagttcctccatttaccaaaatttgacacgcacacattcttcaggggcatgccaattgcgtaaagtgaggctcgcctgcatagctaatcctgttaaagacaacttctcaaagcacaacgtgcttgtttcctatcgggctccctgcggggctttctctcactacaagtcaagcttgggctctcaaagccctgcgcctgttaccacggatgcccacagggcctgggcagttgctgtggcgacaggaagagctaatcttcagagagctcagactctctaatgatgctgaaggagcaaaggctgagtcagaaacacacttaagagaaaaggattggccgggcgcggtggctcacgcctgtaatcccagcactttgggaggccgaggcgggtggatcatgaggtcaggagatcgagaccatcctggctaacaaggtgaaaccccgtctctactaaaatacaaaaaattaccgggcgcggtggcggcgcctgtagcccagctactcggaggctgaggcagagatggcgtgacccggagcggactgcatgagcgaatgcgcatgcatcccatccgctggcacaagcagatctctcataaaaaaaaaaaaaaaaggcgcgttatactcagatgtcttggagcataacagctgcccttaaccgcggacgactgattgaacccttggaatgaaccgataccgaaatagagacccgggatcgag

SEQ ID NO: 54670 - DNA, 550 bp, Homo Sapiens
cacgagggagaccctggactttgatttctgcagcaccaatgttattaataaaattattctgcagtcagaggggctccgtgaagcattttctgaattggatatgacgagtgaagtcctacaaattaccatgtctcctgacaagccttatttcaggttatctacttttggaaatgcaggaagttcccaccttgactatcccaaagattctgatttgatggaagcatttcattgtaatcagacccaagtcaacagatacaagatttccttactgaaaccctctacaaaggcattagtcctatcttgtaaggtatctattcggacagataacagaggcttcctttcattacagtatatgattagaaatgaagatggacaaatatgttttgtggaatattactgctgccctgatgaagaagttcctgaatctgagtcttgagtatgacaattcactgatatttatgtgtacatttatgatagatgaagttcttattctgagtacagtactctttgtcatttcatattgggttttctatagagaagaagcacaatg

SEQ ID NO: 54671 - DNA, 753 bp, Homo Sapiens
ggatggtatcaaagtaacagtggaaaatgcaaagtgtgtgcaagcaaatgcttttattcagggactttaactgcacttcgaatgtgttaccaaggttatggttaccctttgatgctgttcctggaagaaggaggagtggtgacagtctgcaaaatcaatacacaggaacctgaggagaccctggactttgatttctgcagcaccaatgttattaataaaattattctgcagtcagaggggctccgtgaagcattttctgaattggatatgacgagtgaagtcctacaaattaccatgtctcctgacaagccttatttcaggttatctacttttggaaatgcaggaagttcccaccttgactatcccaaagattctgatttgatggaagcatttcattgtaatcagacccaagtcaacagatacaagatttccttactgaaaccctctacaaaggcattagtcctatcttgtaaggtatctattcggacagataacagaggcttcctttcattacagtatatgattagaaatgaagatggacaaatatgttttgtggaatattactgctgccctgatgaagaagttcctgaatctgagtcttgagtatgacaattcactgatatttatgtgtacatttatgatagatgaagtttcttattcctgaatacagaactctttggcattttcctattggatttttctattaagaaagaagccccatggggaaagataggagcaagggccatggtaccc

SEQ ID NO: 54672 - DNA, 729 bp, Homo Sapiens
cctgaatgcccccggccccggctcctccgacgcgatggggaaggtgctatccaaaatcttcgggaacaaggaaatgcggatcctcatgttgggcctggacgcggccggcaagacaacaatcctgtacaagttgaagctgggccagtcggtgaccaccattcccactgtgggtttcaacgtggagacggtgacttacaaaaatgtcaagttcaacgtatgggatgtgggcggccaggacaagatccggccgctctggcggcattactacactgggacccaaggtctcatcttcgtagtggactgcgccgaccgcgaccgcatcgatgaggctcgccaggagctgcaccgcattatcaatgaccgggagatgagggacgccataatcctcatcttcgccaacaagcaggacctgcccgatgccatgaaaccccacgagatccaggagaaactgggcctgacccggattcgggacaggaactggtatgtgcagccctcctgtgccacctcaggggacggactctatgaggggctcacatggttaacctctaactacaaatcttaatgagcattctccacccatcccctggaaggagagaaatcaaaaacccattcataggattatcgccaccatcacctctttcaattgccactttctcttcttttgaatttgaactctggagttactgttctacagtttggcggggacggggcttgggggttttctctttt

SEQ ID NO: 54673 - DNA, 882 bp, Homo Sapiens
gggggaactgatggcgttcctgttacctctcatcattgtgttaatggtgaagcacagcgattccccctgtgtgaactgtgaattggcgatatgggtgggtgtaatcagactgggggctggcatgagatttctcatgcattgccatatgtgatttgtatgtttcatctcgacataaccaagggacgcactctctgagatattttcgcctgggcgtttcggatcccatccatggggtccctgaatttatttcggttgggtacgtggactcgcaccctatcaccacatatgacagtgtcactcggcagaaggagccacgggccccatggatggcagagaacctcgcgcctgatcactgggagaggtacactcagctgctgaggggctggcagcagatgttcaaggtggaactgaagcgcctacagaggcactacaatcactcagggtctcacacttaccagagaatgattggctgtgagctgctggaggatggaagcaccacaggatttctgcagtatgcatatgacgggcaggatttcctgatcttcaataaagacaccctctcctggctggctgtagataatgtggctcacaccatcaagcaggcatgggaggccaatcagcatgagttgctgtatcaaaagaattggctggaagaagaatgtattgcctggctaaagagattcctggagtatgggaaagacaccctacaaagaacagaatcagaaactatccctcttgtgatgaaagctgtctctgggtccattgtccttgtcattgtgctggctggagttggtgttctagtctggagaagaaggccccgagagcaaaatggagccatctaccttccaacaccagatcgatgattacagatccctcttttcc

SEQ ID NO: 54674 - DNA, 798 bp, Homo Sapiens
gatcaattttggttgttccagaatttcttcataccttttccacatccagatttcatgtgcgttcatggagaagatcacttgaggccatttggtacacatctctggaggctgagtcggttcatgaggtctcttatcaaaaatattactcagtttgcaagactgcattgtaactttaacatacactgtgactgacgtttctcaaagttcatattgtgtggctgatctgaagtcagtcggaatttgtaaacagggtagcaaacaagatatttttcttccatgtatacaataatttttttaaaaagtgcaatttgcgttgcagcaatcagtgttaaatcatttgcataagatttaacagcattttttataatgaatgtaaacattttaacttaatggtacttaaaataatttaaaagaaaaatgttaacttagacattcttatgcttcttttacaactacatcccattttatatttccaattgttaaagaaaaatatttcaagaacaaatcttctctcaggaaaattgcctttctctatttgttaagaatttttatacaagaacaccaatataccccctttattttactgtggaatatgtgctggaaaaattgcaacaacactttactacctaacggatagcatttgtaaatactctaggtatctgtaaacactctgatgaagtctgtatagtgtgactaacccacaggcaggttggtttacattaatttttttttttgaatgggatgtcctatggaaacctatttcaccagagttttaaaaataaaaagggtattgttttg

SEQ ID NO: 54675 - DNA, 532 bp, Homo Sapiens
gggacccctacaagtggactagccacccgtcccacaaggaagtggtggatggcagcccggcagcagcatcaaccatctctgagataacagcagaagtcaacaacttgcggctatccagatggccgggcaatggcagggcaggtgccgtggccctgcaggccctcaagggctcccaggacagctcagagaatgatctggtgcgaagccccaagtcggctggcagcagaaccagcagctccgtcagcagcaccagcgccacgatcaacgggggcctgcgccgggaacaactgatgcaccaggctgttgaggacctgccagagggcgtggaccctgcccgcagggagttctatctctcagactctgacttccaagatatctttgggaaatccaaggaggaattctacagcatggccacgtggaggcagcggcaggagaaaaagcagctgggcttcttctgaacccaagccctctcgactgcccctatcccctggaccccaacatacctacaatgctggggaggccctgcttccac

SEQ ID NO: 54676 - DNA, 816 bp, Homo Sapiens
ggctcctggcgtggacaaggggtctgtgaagggcgggaactgggtgagcacctggggcaggtgggtggttaaggtccttcccacttcgcaggtgtcagaacctagggctgggctctcggggccaggcaggccagcccagcccacgccgagctgggcagcgtctgctctggtaggactgtcagacgcacacgcgcacgcacctagacacacccactcatgtacatgctcacacatgcagacacacctgggcgtcccgaggtcacatgttctggggatgatggccttcaggggtcatctggcaaacagcccctgggctgtgcctggatccccctctagctcctgctcacccacgcccacccagtagtcctgcctgtctgcacaggagaggggcttctcttcctggctggggctggggtgaactggaggctggttaagttgcagccgctgggtcctcgggggcttactcatctcccttttttaaacaaaaagcaaaaaagtaaaatgctgcactgcccagcagcccggttagggctcctggagccaccttaggaaagggcttctcatgagctctgctgcggcagcttcagctggcagagaggctttcccagaaaaaaaaaaaaaaccatttttaaaaagaagaaagcctaaagactctcggcctagggacgtccgtctgtgccgcctctgtttcctgtaccagatttttgtattctattttcctagctgttgttgcgtccttgtttgctgaggggtgggagccacccagcgtctcagggacctgtccctccgtcacgtcgtcaagtgtgccttgtgtct

SEQ ID NO: 54677 - DNA, 587 bp, Homo Sapiens
  misc_feature (470)..(470): n is a, c, g, or t
agccatgagcagacgacgtcccacagcatgggctccccctttctgctggcgggcttgatcgggggcgcggtgatatttgtgctggtggtcttgctcagcgtcttttgctggcatatgcacaaaaaggggcgctacacctcccagaagtggaaatacaaccggggccggcggaaagatgattattgcgaggcaggcaccaagaaggacaactccatcctggagatgacagaaaccagttttcagatcgtctccttaaataacgatcaactccttaaaggagatttcagactgcagcccatttacaccccaaatgggggcattaattacacagactgccatatccccaacaacatgcgatactgcaacagcagcgtgccagacctggagcactgccatacgtgacagccagaggcccagcgttatcaaggcggacaattagactcttgagaaacactcgtgtgtgcacatanagacacgcagattacatttgataaatgttacacagatgcatttgtgcatttgaatacgtctgtatttatacggtgtactatataatgcgatttaaaaaaagtgctatcttttctatt

SEQ ID NO: 54678 - DNA, 778 bp, Homo Sapiens
  misc_feature (747)..(747): n is a, c, g, or t
  misc_feature (763)..(763): n is a, c, g, or t
atccatagggtgaaattttgagacctagactctgtaaaaataatcctagtcttcctccaggggtcagttcctcacagtggttctgtaccaaaacttgccaaattcctccatggccaagtgttaaaatctgtgtttggaaaatagcgaattaacctaagacacagaaggcagactgggtgaggagacctagcatgccctattggcagtgctcaggagctgcatcccacttttccctgctctgaatcgaagtcctagttccttcctttgattctcctttggtaggtggaatcagttaatgttttgagaaacctgcctgggctctgcccttagtcatgacatctcgctgagccagacccactctgttccttggaacctagagctggagtgaggagtagaggtctccggctattccagaaagaaaagtgagccacatgcaggctgatgaatgccgacacttccagaatgtatagaaatagtccctgtcctggcctgccactgaccctgtctgtattttctcggaggttgtttttctccttctccttcccaggaaggtctttgtatgtcgaatccagtgcactcaagtttggccaagggactccacagcacccagaagactgcatgcctcaaggtttatgtcactcctctgctgggctgttcattgtcattgctgtgttcagggacctttggaaataaaacctgttctgtcccaaataaaaccagcctgtgatgttcaagggactgggatanagtggcttacgacctngaaaaaaaaaaaaaa

SEQ ID NO: 54679 - DNA, 460 bp, Homo Sapiens
tttgttctaggggaaatgaatgtgcaaaaaaagaaaaagaactgttggttatttgtgttattctggatgtataaaaatcaatggaaaaaaataaactttcaaattgaaatgacggtataacacatctactgaaaaagcaacgggaaatgtggtcctatttaagccagcccccacctagggtctatttgtgtggcagttattgggtttggtcacaaaacattctgaaaattcgtgcgtgggcttctttctccctggtacaaacgtatggaatgcttcttaaaggggaactgtcaagctggtgtcttcagccagatgacatgagagaatatcccagaaccctctctccaaggtgtttctagatagcacaggagagcaggcactgcactgtccacagtccacggtacacagtcgggtgggccgcctcccctctcctgggagcattcgtcgtgcccagcctgag

SEQ ID NO: 54680 - DNA, 1006 bp, Homo Sapiens
ggatggtggtcatggcgccccgaaccctcttcctgctgctctcgggggccctgaccctgaccgagacctgggcgggctcccactccatgaggtatttcagcgccgccgtgtcccggcccggccgcggggagccccgcttcatcgccatgggctacgtggacgacacgcagttcgtgcggttcgacagcgactcggcgtgtccgaggatggagccgcgggcgccgtgggtggagcaggaggggccggagtattgggaagaggagacacggaacaccaaggcccacgcacagactgacagaatgaacctgcagaccctgcgcggctactacaaccagagcgaggccagttctcacaccctccagtggatgattggctgcgacctggggtccgacggacgcctcctccgcgggtatgaacagtatgcctacgatggcaaggattacctcgccctgaacgaggacctgcgctcctggaccgcagcggacactgcggctcagatctccaagcgcaagtgtgaggcggccaatgtggctgaacaaaggagagcctacctggagggcacgtgcgtggagtggctccacagatacctggagaacgggaaggagatgctgcagcgcgcggacccccccaagacacacgtgacccaccaccctgtctttgactatgaggccaccctgaggtgctgggccctgggcttctaccctgcggagatcatactgacctggcagcgggatggggaggaccagacccaggacgtggagctcgtggagaccaggcctgcaggggatggaaccttccagaagtgggcagctgtggtggtgccttctggagaggagcagagatacacgtgccatgtgcagcatgagggggctgccggagcccctcatgctgagatggaagcagtcttccctgcccaccatccccatcatgggtatcgttgctggcctggttgtycttgcagctgtagtcactggagctgcggtsgygctgtgctgtggagaaaaaa

SEQ ID NO: 54681 - DNA, 946 bp, Homo Sapiens
ctggaccggtccggaattttcagaatgggcaagtgacatgtgtgattctcctcacaagaaagcacctcctagccagcctccaaggatcatcagttcagtattgtctggttcacgctatataatcacctgggatcatgtcgttgcactatcaaatgaatctacagtgacgggatataaggtactctacagacctgatggccagcatgatggcaagctgtattcaactcacaaacactccatagaagtcccaatccccagagatggagaatacgttgtggaggttcgcgcgcacagtgatggaggagatggagtggtgtctcaagtcaaaatttcaggtgcacccaccctatccccaagtcttctcggcttactgctgcctgcctttggcatccttgtctacttggaattctgaatgtgttgtgacagctgctgttcccatcccagctcagaagacacccttcaaccctgggatgaccacaattccttccaatttctgcggctccatcctaagccaaataaattatactttaacaaactattcaactgatttacaacacacatgatgactgaggcattcaggaaccccttcatccaaaagaataaacttttaaatggatataaattgaaaacaaaaaggacatcgacaatcagttcagagctaagtaaaaccgttatacctcttataagattcttcgaatacagaagatcgcaaacatgcaaacatcaccttttcttccaactccgaaccatcgataatccaaccatcctcaaaaaaacaagggggggggcgcccctcctaaaaaaaaacccccccggggggcgccccccacttttaccctccccccccattttttttgtaaaaaagaaggcggcccccacagaggggcgcgttcttttataattaaaaaccgtcgtgtgcgcctcccttttttttataacccgccgt

SEQ ID NO: 54682 - DNA, 1093 bp, Homo Sapiens
gtccgaattcccgggatattttgctttagtacatggagctcaggtttctggacaagaagagccttttagcacatcactgagaagatggcactgtccagggcccatgtagctggcaagctgcaaaaggcctgtgatccaggaaagatgtcccacagggaccacatccaccccagccccactgccctccagggccaggattcaggcctctgaggagcccacggggcaaagctgctgggccagtggcactctgtgtgggaaaatggcagaaagatggagaggcatgggggcccaaaggggagcgtggggaggggctgaggataccccaaagtccaggctaattagaggatgtggcaggggcagtggcctggatgcacagtgcctgatgggagtaggctccagacaggaggagtgggacagacagcagctggacttgaaggtttgatgccaaagcagacattttcctcacacccacctgctgctgtatgaatagctgtgtatctgtttttccataagattttgataatatatacaaacctttagctgtgaatggctgtgccccacctgttgtcctgaactgtgagtcctgatcctaaccctgggctccctggaggactctagaagctcaggttccctgccacactatttgagttggccaagaaataaattcacatcctcagaaagtgcagcatggaggaaaatctgaactctaagcagaagactctccactgacctggttggccaggtctagaaggccaggcctctactaggtctgctcctgaaccagtcctgctgcctggagtcagtagccagagttgttctcaggggggctggggcaaagtgggagcccaggggtgctgggatggctatattagggatgctccgggaggctcattccatgaatctgcctaacctggggctccgggccaggtcctcacagcaagcccagggccccggaagggggcaggcaaaaaaaagggaggggattatttggagaaaaagcccccctatttgtggggccctaagggctcaaaggggcctctttttttcccaggcccttccccacctggtttaccaatttccactttcccgggca

SEQ ID NO: 54683 - DNA, 493 bp, Homo Sapiens
  misc_feature (13)..(13): n is a, c, g, or t
tggccgggaccanagcaatccacgtaacaagcagtcaaccaatagatgatgaaatttatgaagaacttccagaagaagaagaggacagtgctccagctgaaagtggaagaacaaaggaagatgagtcaggatagtgtccatcacacctcaggggataagagcactgattatgctaatttttaccagggattgtgggattgtactggagctttttctgatgagttgtcatttaagcgtggtgatgtgatttacattcttagcaaggaatacaatagatatggctggtgggtaggagaaatgaagggagccattggcttggtgcctaaagcctacataatggagatgtatgatatttgagagtcctggaaaaggaaaattcttctgcttgtctgcaaatgctttggatttagaagcgtcatgaaagcacgagtgacagctcctaacctctccttgttttattaaacattacttatctttgactgttattttatgc

SEQ ID NO: 54684 - DNA, 605 bp, Homo Sapiens
ccgccgctccaccatttttttttttaagatggagtgcagggcaagactccatcttaaaaaagaaaacccaggagtctttggttaatgtagtgcaggactctgagctcccgggaggacccttccctcccagatgaactgtgatggaccagcccaaaggaggggagagagcacttgggccatagtggtggtggatctttctaacactgaattcccttgtctgcaggatgcagtgaaaggggattgccagtcagccctcctggccttgtgcagggctgaagacatgtgagacttccctgccccaccccacatgacatccgaggatctgagatttccgtgtttggctgaacctgggagaccagctgggcctccaagtaggataacccctcactgagcaccacattctctagcttcttgttgaggctggaactgtttctttaaaatcccttaattttcccatctcaaaattatatctgtacctgggtcatccagctccttcttgggtgtggggaaatgagttttctttgatagtttctgcctcactcatccctcctgtaccctggccagaacatctcactgatactcgaattcttttgcaaacttcgctg

SEQ ID NO: 54685 - DNA, 667 bp, Homo Sapiens
atggaaggaaagccaatgcgcaggtgtaccaacattcgaccaggagagactggaatggatgtaacaagccgctgcacccttggagaccccaacaaactgccagaaggggttccccaacctgcccgcatgccctatatctcagacaagcaccctcgacaaaccttggaagtgattaaccttctgagaaagcaccgggagctatgtgatgtggtgctagttgtgggcgccaagaagatatatgcccatcgagtcattttgtcagcctgtagtccctacttccgagctatgtttacaggagaattggcagagagccgtcagacagaagtagtgatccgagacattgacgagagggctatggaattactgattgactttgcgtatacctcccagataacagtagaagagggcaatgttcagactcttctgccagctgcttgcctcctccagctggcagaaatacaggaagcctgctgtgaattcttaaagagacaattagatccttctaactgcctgggcattcgggcttttgctgacacacattcatgtcgtgagttgctaaggatagcagacaagttcacccaacataactttcaagaggtgagttgcacttggtgttccatgcacccatttgttggagagcaatatgggttcacattctgctaaatac

SEQ ID NO: 54686 - DNA, 569 bp, Homo Sapiens
caggagacaagacagcgcagagagggctggttagccggaaaaggcctcgggcttggcaaatggaagaacttgagtgagagttcagtctgcagtcctgtgctcacagacatctgaaaagtgaatggccaagctggtctagtagatgaggctggactgaggaggggtaggcctgcatccacatagaggatccaggccaaggcactggctgtcagtggcagagtttggctgtgacctttgcccctaacacgaggaactcgtttgaagggggcagcgtagcatgtctgatttgccacctggatgaaggcagacatcaacatgggtcagcacgttgagttacgggagtgggaaattacatgaggcctgggcctctgcgttcccaagctgtgcgttctggaccagctactgaattattaatctcacttagcgaaagtgacggatgagcagtaagtaagtaagtgtggggatttaaacttgagggtttccctcctgactagcctctcttacaggaattgtgaaatattaaatgcaaatttacaactgcaaaaaaaaaaaaaaaaaaaaaaaaaaag

SEQ ID NO: 54687 - DNA, 488 bp, Homo Sapiens
gtatgagaaccacaacatctccattacaaatgccacagttgaagacagtggaacctactactgtacgggcaaagtgtggcagctggactattagtctgagcccctcaacattactgtaataaaagctccgcgtgagaagtactggctacaattttttatcccattgttggtggtgattctgtttgctgtggacacaggattatttatctcaactcagcagcaggtcacatttctcttgaagattaagagaaccaggaaaggcttcagacttctgaacccacatcctaagccaaaccccaaaaacaactgatataattactcaagaaatatttgcaacattagtttttttccagcatcagcaattgctactcaattgtcaaacacagcttgcaatatacatagaaacgtctgtgctcaaggatttatagaaatgcttcattaaactgagtgaaactagttaagtggcatgtaatagtaagtgctcaatt

SEQ ID NO: 54688 - DNA, 785 bp, Homo Sapiens
gatgaagacacagtcataggtggtgcggastgtggtccacctgctcctgctcctgactcactgctctttgctgttgcctgaggaccaagtctgtcaggaagctggctaggaagccttgcagcagccatggcttttaaacataccagaaaaacacccgtggagtcagaggtggcaattcaccgaattcatatcactctaacgagttgcaacgtaaaatccctggataaggtgtgtgctgacttgatctgaggagcaaaggaaaagaatcagtgaaaggaccagtttgaatgcctaccaagactttgagaatcactacaagaaaaacttacggtgaaggttctaaggcatgggatcgtttccagatgagaatccacaagcgactcattgacttgcacagtcctcagatagttaagcagattacttccatcagtattgagccaggagttgagatggaagtcaccattgcaaatgcttaagtcaactgttttcataaattgattaccagttgttaaaaaattttcaaaaaaccgcaaaatttcaagaaattcacaaattatgggagcagttttaagtcttctttggttcagaacacaggtttttgcctaacccctggcatgattgcccataagaacatacatgtacagttgaactggtggttagctatacgggaaatggtaagtagtgttgtcttcagtatcttaatttgtttctgcaactgtgcactcctcccttggtggcaccctatgggtgtaggaaaamcactgttattaaacaggtgaaaaata

SEQ ID NO: 54689 - DNA, 867 bp, Homo Sapiens
  misc_feature (792)..(792): n is a, c, g, or t
  misc_feature (840)..(843): n is a, c, g, or t
  misc_feature (845)..(846): n is a, c, g, or t
  misc_feature (849)..(850): n is a, c, g, or t
  misc_feature (859)..(860): n is a, c, g, or t
  misc_feature (863)..(863): n is a, c, g, or t
tccctcgggaaccccggggtcctcttggagggaagccctctggaggaggaaacgtccagcaccgagctggagactggcagtgtcccaatccgggttgtggaaaccagaacttcgcctggagaacagagtgcaaccagtgtaaggccccaaagcctgaaggcttcctcccgccaccctttccgcccccgggtggtgatcgtggcagaggtggccctggtggcatgcggggaggaagaggtggcctcatggatcgtggtggtcccggtggaatgttcagaggtggccgtggtggagacagaggtggcttccgtggtggccggggcatggaccgaggtggctttggtggaggaagacgaggtggccctggggggccccctggacctttgatggaacagatgggaggaagaagaggaggacgtggaggacctggaaaaatggataaaggcgagcaccgtcaggagcgcagagatcggccctactagatgcagagaccccgcagagctgcattgactaccagatttattttttaaaccagaaaatgttttaaatttataattccatatttataatgttggccacaacattatgattattccttgtctgtactttagtatttttcaccatttgtgaagaaacattaaaacaagttaaatggtagtgtgcggagtttttttttcttccttcttttaaaaatggttgtttaagactttaacaatgggaaccccttgtgagcatgctcagtatcattgtggagaaccaagagggcctcttaactgtaacattgttcatggntggtgattgttttttttttttttttaataaaattcccaaatgttaaannnnannaannataaaaaannaanaagg

SEQ ID NO: 54690 - DNA, 874 bp, Homo Sapiens
gagaaaaacaggataagagactgagccgctagcagcgcctggggaccagacagacgcatgtggcaaagctcaccatcttcactacaaacacgcctgagagtggcactggggaaacataactccatctacaccttggatttggactgattctccattttatcacctgaaggcttgggccagagctcaacagctactcaactggaggggtgagggggataaggtctgtagtatacagacaggaagatggtaggtttatgccttctgtggccagagtcttggactcatggaaatagaatgaatagaggggcattcacaaggcacaccagtgcaagcagatgacaaaaaggtgcagaaggcaatcttaaaacagaaaggtgcaggaggtaccttaactcacccctcagcaaatacctatgtcaacagtataagttaccatttactctataatctgcagtgatgcaataaccagcataataaaaaggcaatcacataaaaaagagtttagtcgtctaaacataagtaactttaaggtgaatgaaagatcttctttaggaataatagatgatggtaagttccactttggttattggaaggcaagtcattattactggtattagttaaaacacatatcaaatgcttgctcttcatcatatatatagttatgcatacatacaccacacacatacagtatattctttcctcaaaagggttaagatgtctaaaatagggacctagaagcttaacactatttaagtaaatacagtagaagctcacaaatagatttctttgcacaatgattttttgcaaaattttacagtaataataatcccaaggcaaatctctcctgaactgctttccattccataattgtagt

SEQ ID NO: 54691 - DNA, 655 bp, Homo Sapiens
ggggatggctctgtcaagctaactgactttggattctgtgcacagataaccccagagcagagcaaacggagcaccatggtaggaaccccatactggatggcaccagaggttgtgacacgaaaggcctatgggcccaaggttgacatctggtccctgggcatcatggccatcgaaatgattgaaggggagcctccatacctcaatgaaaaccctctgagagccttgtacctcattgccaccaatgggaccccagaacttcagaacccagagaagctgtcagctatcttccgggactttctgaaccgctgtctcgagatggatgtggagaagagaggttcagctaaagagctgctacagcatcaattcctgaagattgccaagcccctctccagcctcactccactgattgctgcagctaaggaggcaacaaagaacaatcactaaaaccacactcaccccagcctcattgtgccaagccttctgtgagataaatgcacatttcagaaattccaactcctgatgccctcttctccttgccttgcttctccatttcctgatctagcactcctcaagactttgatccttgaaaaccgtgtgtccgcattgaaagaactgcaactgatgactaatcgatgaggccattctaataagaatt

SEQ ID NO: 54692 - DNA, 554 bp, Homo Sapiens
gtagttgaagtctgtggatgcagctgttatgaagatggttaaacttgaaacaaacaattttaagaattatttggtctgaagatgttttactttaaataaatgtctattgtaatggctggagtttttgaattccaaaccttatactgaataactactgaatccctttactgttaaatttttttccaaactttcaagatatatttagttgtgtttaactgctacttggagctcagaagccactttatcagttttcctcactggttggatagcctatcagtttatggaaggatataacttccgtaagttacatccttatggaagctactgaataaaagaagggggtatgcaccccctagtttgccaagattgagaaatagcctcttcactggtatgcaaacagatttgattttgcatcctatcatttaaaaagaaattatgtctgcaccccaacataggcatacttaagtaatatacatactcctgtgctaacatgtatactagaaaacaaaaagatgttagaaaaataaaagtataaagacaaaaaaaaaaaaaag

SEQ ID NO: 54693 - DNA, 915 bp, Homo Sapiens
taggcagctactactagaagcttactcatcagtggccttctagctgaagcccatcctgcacacttactggatgctttggactcaacaggacatatgtggccttgaagggaagacaaaactggatgttctttcttgttggatagaacctttgtatttgttctttaaaaacattttttttaatgttggtaacttttgcttcctctacctgaacaaagagatgaataattccatgggccagtatgccagtttgaattctcagtctcctagcatcttgtgagttgcatattaagattactggaatggttaagtcatggttctgagaaagaagctgtacgttttctttatgtttttatgaccaaagcagtttcttgtcaatacacggggttcagtatgacacagaatcatggacttaacccgtcatgttctggtttgagatttagtgacaaatagaggtgggaagcttataatctaattttaggaggaccaaattcagtggatggcaactggaacattgattgtaaggccagtgaagttttcacccaactggaatttgatggaaaaaaggtttgtgtgtttaagacgcccaaggcattgcagaatccctctcagtggacagtatgcactcacctgaccactctctctaaaaatacccaagatatgaactaagaaattttaatgcaaatacattcattcctgaaaaacggggaaataaattactaattttttttctttttttaaatgaagaccgtgggcccccaaaacctgtaaaaattttttcgggatttttttaacctccaaccaaaattctcaatggtttgttgccccttgttcaaaaccattctaacctcgggcctcatccaatttccaaagggaaacttctattgttaaaaattatacttcaaagtcaattttttc

SEQ ID NO: 54694 - DNA, 615 bp, Homo Sapiens
  misc_feature (581)..(612): n is a, c, g, or t
  misc_feature (614)..(614): n is a, c, g, or t
gccagcctccaacacggggactctgccgtaactggaatcttcataggtcatattgaaatcttcaaggtgaccatgccccaccggggtgctggggcagtagtcatggcagactcccggcctgggcccccaggattctaggacccccaggcagccccttggactggtcccgggtgccttccaagcacagtctccatgctcccagattctcgaccttcccccggcccgggaggtgcagcctgcgtctgcctctgtcgtgtgtgctgatttgagtggcttagcttgccacagcgcaacctcttctgtccctttcagtcatttgctgtacttccctgtggcacgttaccatggaagccgctccagggtgggtcagggtgcaagctgctggtgaggtttggaagcatcaggctcacgggtgttcatgtgtgttcgtgcgtgtgtgtgcgtacgtgtatataactgaagtgtctgtacggaatgccctttgctagccatgggctggtcaccagattgttttgtaatgcccgccccttgcctcgatattgccagtttcttgtgcaataaacaatcagcagctgtggaannnnnnnnnnnnnnnnnnnnnnnnnnnnnnnnang

SEQ ID NO: 54695 - DNA, 697 bp, Homo Sapiens
gggcgtggagctggagcctaccgaccaggacttctaccagaagtttgccacaggcagtgtgcccatcccctggcagaacgagatggtggagaccgagtgcttccaagagctgaatgtctttgggctggatggctcagttcccccagacctggactggaagggccagccacctgcacctcctaaaaagggactgctgcagagactcttcagtcgccaaaggattgctgtggaaactgcagcgacagcgaggaagagctccccacccgcctctagcccccagcccgaggcccccaccagcagttggcggtagcagctactccgagcgccgtttacagttttgcacagtgatcttccccattgtccactcaagtcgtggcctggggaacacagacggagctgtccccagtgtcctccgtccctcagcccctggcctggctgagtttggcagggcctgggccatccctgggacaaaggtgcgtcccttcagctcttctccgtggagctcggggctttctgtatttatgtatttgtacgaatgtatatagcgaccagagcattcttaattcccgccgcagacctggcgcccccgccttggctcctgggggcagccagccctggctgggagagcgggagctggcagaggagccactgccaaactcaaggctcctctggcccagcttggatggctgagggtggt

SEQ ID NO: 54696 - DNA, 522 bp, Homo Sapiens
ttttttttttttttttttgaagtaatatattatggggataaaaggccacaggaaataagactgctgaatgtctgagagaaccagagttgttctcgtccaaggtagaaaggtacgaagatacaatactgttattcatttatcctgtacaatcatctgtgaagtggtggtgtcaggtgagaaggcgtccacaaaagaggggagaaaaggcgacgaatcaggacacagtgaacttgggaatgaagaggtagcaggagggtggagtgtcggctgcaaaggcagcagtagctgagctggttgcaggtgctgatagccttcaggggaggacctgcccaggtatgccttccagtgatgcccaccagagaatacattctctattagtttttaaagagtttttgtaaaatgattttgtacaagtaggatatgaattagcagtttacaagtttacatattaactaataataaatatgtctatcaaatacctctgtagtaaaatgtgaaaaaaaaaaaaaaaaaacctcgtgc

SEQ ID NO: 54697 - DNA, 347 bp, Homo Sapiens
gcggccgcctactactactactaaattcgcggccgcgtcgacggagctggccactggatactgaacaccctactccattctgcttatgaatcccatttgcctattgaccctgcagttagcatgctgtcaccctgaatcataatcgctcctttgcacctctaaaaagatgtcccttaccctcattctggagggctcctgagcctctgcgtaaggctgaacgtctcactgactgagctagtcttcttgttgctcgggtgcatttgaggatggatttggggagggatcaagtgaatcatccctagtcttccctcaataaataacttttaactccaaaaaaaaagtcgacg

SEQ ID NO: 54698 - DNA, 646 bp, Homo Sapiens
cactgtcccagtggtggtcattgatggcctttagtaaattggagctgcttaatcatattgatatctaatttcttttaaccacaatgaattgtccttaattaccaacagtgaagcactacaggaggcaactgtggcattgcttccttaaccagctcatggtgtgtgaatgttataaaattgtcactcagatatattttttaaatgtaatgttatataagatgatcatgtgatgtgtacaaactatggtgaaaagtgccagtggtagtaactgtgtaaagtttctaattcacaacattaattcctttaaaatacacagccttctgcctctgtatttggagttgtcagtacaactcatcaaagaaaactgcctaatataaaaatcatatatatggtaataatttccctcttttgtagtctgcacaagatccataaaagattgtatttttattactatttaaacaagtgattaaatttagtctgcacagtgagcaagggttcacatgcattcttttatactgctggattttgttgtgcatcatttaaaacattttgtatgtttcttcttatctgtgtatacagtatgttcttgaatgatgttcatttgtcagggagaactgtgagaaataaactatgtggatactgtctg

SEQ ID NO: 54699 - DNA, 578 bp, Homo Sapiens
tttgttctctagtatatcaaaataccaaaatattatctcatattttctccctctttctcttactcttaccaagttttcctggtggcttggcttccctgactaaagaattaagtctcatttttactttccatttctattttcttaccacttggttggctccctttgtctctgtacctttaccaacattaggatctcacctctttcttcctcccttaattcataagcaccactcctatcaaagtcccatctcttaaccctgggtatcaaacaaactgtgagttttccagaatctgtttcccagttttcccctcagctttcctggtctcccatccgaactgcttctttgtgcacctcttgttctttctcttggctcccagtcttgattcctgtgatcactcttgcatcactaattgcacaagtgatttcaggtgcaattctgattagcctgcgtccacacagtgatcgatgatcctatgtgcctagaaaggacactgtgtgctgctcatgacctgcaacaggaaaaaagccatttcttgttagcagtgtaagaaccttagagcaaaggagttgaccttctg

SEQ ID NO: 54700 - DNA, 631 bp, Homo Sapiens
cagactgggattaatgacagcatgattttcaatgactgtaaattgcgataaggaaatgtactgattgccaatacaccccaccctcattacatcatcaggacttgaagccaagggttaacccagcaagctacaaagagggtgtgtcacactgaaactcaatagttgagtttggctgttgttgcaggaaaatgattataactaaaagctctctgatagtgcagagacttaccagaagacacaaggaattgtactgaagagctattacaatccaaatattgccgtttcataaatgtaataagtaatactaattcacagagtattgtaaatggtggatgacaaaagaaaatctgctctgtggaaagaaagaactgtctctaccagggtcaagagcatgaacgcatcaatagaaagaactcggggaaacatcccatcaacaggactacacacttgtatatacattcttgagaacactgcaatgtgaaaatcacgtttgctatttataaacttgtccttagattaatgtgtctggacagattgtgggagtaagtgattcttctaagaattagatacttgtcactgcctatacctgcagctgaactgaatggtacttcgtatgttaatagttgttctg

SEQ ID NO: 54701 - DNA, 658 bp, Homo Sapiens
  misc_feature (600)..(600): n is a, c, g, or t
  misc_feature (602)..(602): n is a, c, g, or t
tccggaattcccgggatcagatgcagccaaggtctgtgttcagcacttggtctctgttgttacgtaaaataataagcatttaaaatagtttacagatatttttgaccagttccttttagagattctttcagagaagaaaccagatctgacctgtttattgttggcgcttgttgaaaacgagctttctttcccatgatagtgcttcgtttttgaagtgttgaagctgtgctccccttaaatcgtggcaggagagattaaggtaattacaacactcagttctatgtcttacaagcactttgtcttgtctctgcaagaaaattcgattccagtcatttcccataaaatacagacattttaccaacataatatgctttgattgatgcagcattatgctttgggcagtattacaaaatagctggcgagtgctttctgtatttaaatattgtaaaaagaaaataagttataactgttataaagcagaacttttgttgcattttttaaactgttgaagtcactgtgtatgtttgtttggtcaatgtttccgcagtatttattaaaacatactttttttttcttcaaataaaaaagtaaccatgtaananaaaaaaaaaaaaaaaaacaaaaacaaaacaacaaaaaaacacaccaaaacaaccgg

SEQ ID NO: 54702 - DNA, 553 bp, Homo Sapiens
gccgccgtgtgctggattctggaagattgcctgtggatcctgacaatgaggcttatgaaatgccttctgaggaagggtatcaagactacgaacctgaagcctaagaaatatctttgctcccagtttcttgagatctgctgacagatgttccatcctgtacaagtgctcagttccaatgtgcccagtcatgacatttctcaaagtttttacagtgtatctcgaagtcttccatcagcagtgattgaagtatctgtacctgcccccactcagcatttcggtgcttccctttcactgaagtgaatacatggtagcagggtctttgtgtgctgtggattttgtggcttcaatctacgatgttaaaacaaattaaaaacacctaagtgactaccacttatttctaaatcctcactatttttttgttgctgttgttcagaagttgttagtgatttgctatcatatattataagatttttaggtgtcttttaatgatactgtctaagaataatgacgtattgtgaaatttgttaatatatataatacttaaaaatatgtg

SEQ ID NO: 54703 - DNA, 912 bp, Homo Sapiens
gggtgaatacgaaaagatcagtctacctctactccattctagacaaagtattaatccttagtgaaagtaattaattaaattgccaacttggcattattattaaacttgataggaacgcaacattaaatttaaaaatgttttcccgtgggtaattttctattatatattttcatatgggcaaagggaaaaaatgataaatcctctgtaatcacaaaccccaatttcgttttgtttattcagcttctaaaatattgaacacccagacttttaattcaacctttaagaaccttatcatttatgtttcagtagatatcaaagtaatccatgtttgtgtcaaatgatcatagaaaataaatagaagagacagtgaagcaagtaaaaagaaaagcattgttttaatttgtttgcattaatttttttcatttgtcaaaatgcttcttttgttgccacagtaaagaacagtttttattgttttgtaagtaaaattacgtagctgatttcgtatgtcaagattaatttccataataaaaattattgtatgtttactgtgatcttaatgggcagggttaagaaagttatttaaaataaagttacctattctaccaaaaaaataacacaaataacaaaaaaacaacatgtcggacggctcggccagtcgactctagatcgagcaagataatgatggggcagaatcgagctcattggccatcgcctatgtagtcgataaaatcatgccggcgtttaacgtgggatggaaacccgggttacacttatccatgaacatcccttccaggggtatacaaaggcgcgtttgcttcaaattgacgctaggaatgatttgctattttgaatcgtaattgtaacgctttacaatggatgaaactattaaaacgatgggtgcgtgaacaatag

SEQ ID NO: 54704 - DNA, 684 bp, Homo Sapiens
cggttttcttcctgaatgctcattaggacttcttaaaaaacatgaaagtaatttggaagtaagtttatccaataaagcagtatttctacccttttagatttgataaatatttttattactaaagaatctccccagacattttctttttttttcacacatagatttaagtatcttgattgttagtagtctaaaaatgggaagaatgaaaaagcataactagatttttctatcttctgtggtcgcccgcccccccccaaaaaaataccatttatggttctctccgcaagtataaaagcattacatgcaaaaaaaagatctcagagaaaacaaaagtaaaagaaaagcagaaaatcacctgttatctactcccagaaataatcaatttcaacattttggtatatgtttttccaggcttctttgggttgatcccacctatgagatcagaatatgtatgcagttctttctttaacccttttttctcctatgtactgtgaacatttaaaaagtacttttaaatattctttgggaaacttagcttttagtaactacttggttgtatcataatttattaactaatgttttattggtaaacatttggttgcctcccatgactttgccattataattaacaactgtgactactaaaaaaaaaaacaaccaatcacaacagcaacaacacacaca

SEQ ID NO: 54705 - DNA, 529 bp, Homo Sapiens
ttttttttttttttttttcagtagagacggggttttgctatgttggccaggctggtctcaaactcctgacctcaagtgatccacctgcctcggcctcccaaagtgttaggataacaggtgtgagccaccgtgcccggctgaagatttttcttaattgcaataaatattcagcattttttctaatgaaaatgaattttgtttaccagtaaaagtatgcattttaaaagactttcagatttatgctttttacgtgaagctgctaaactaaaagtaaatggaagaaaccaagtctagtaggttttttctttttttttgtgggggtgggatgggggaggttagttacacttaaaatatcttctccagagactgtatgctcctatactagactgtaagctctttgagggcagtctgtcagatttatctttgtatcttccccagcgcctagtgtagtgccttgcacataataggcgcccaataaatattgatgaagaatgaaaaaaaaaaaaaaaaaaaagaccgcgcctcgtgc

SEQ ID NO: 54706 - DNA, 457 bp, Homo Sapiens
tccctggtgtctgctgcatggcatcctggatgcttagcatgcaagttccctccatcattgccaccttggtagagagggatggctccccaccctcagcgttggggattcacgctccagcctccttcttggttgtcatagtgatagggtagccttattgccccctcttcttataccctaaaaccttctacactagtgccatgggaaccaggtctgaaaaagtagagagaagtgaaagtagagtctgggaagtagctgcctataactgagactagacggaaaaggaatactcgtgtattttaagatatgaatgtgactcaagactcgaggccgatacgaggctgtgattctgcctttggatggatgttgctgtacacagatgctacagacttgtactaacacaccgtaatttggcatttgtttaacctcatttataaaagcttcaaaaaaacccaaacat

SEQ ID NO: 54707 - DNA, 899 bp, Homo Sapiens
aggtcagagtggagcagtgctaagaggctgttgcaggacaactagacgggcggggcctgctgcatctggatcatgtttctgtgctctgccccgcgctagggactcagggtctgggcttctgccaggtgaggagcagagagactgttcccttgggtggagaggtgtgggcatgagagccacccattgccaagcagcaagaatgttcgtgcttttttccagagaggggaaccccactggtttttgtggaaacaatggaaacttacagatgcctgcctgggatgatgaggcacattcagaacaaatgctttttttttttttgagaacagagtctcgctctgacgcccaggctggagtgcagtggcgcgatctcggtcactgcaaacttggcctcccgggttcaggtgattctcctacctcagcctcccgagtagctgggattacaccaccatgcccagcaaattttggtgtttttagtagagacggagtttcgccgtgtgggccaggctggtctcgaactcctgacctcgggtgatccatccgcctgggcctcccagagtgctgggattacaggcgggagccaccatgcctggcagaacaaatgccttttatagaccttttagaaccttcttcaaaatgtcttcctctatgtcaacatgtaacgtataattctttaaacataaactgattgccaaaaacacaacaagggcgcgggtcaaaagaatcccggggccaacttagcgtcccgcttttggtcaagggccctaaggagaccttataagaccgggcacggcgcgcttaacgccgccgggaacaggcctcgacttggaaggacactctgcggggcctctgggacgcccacgataagccggacaacatccgggtgtgcacacatctggcgg

SEQ ID NO: 54708 - DNA, 890 bp, Homo Sapiens
  misc_feature (699)..(699): n is a, c, g, or t
  misc_feature (717)..(717): n is a, c, g, or t
  misc_feature (735)..(737): n is a, c, g, or t
  misc_feature (740)..(740): n is a, c, g, or t
  misc_feature (743)..(746): n is a, c, g, or t
  misc_feature (752)..(752): n is a, c, g, or t
  misc_feature (786)..(786): n is a, c, g, or t
gaaaatgatgtctgttgttatagttcattgttttgcctactcagcagaagtgatgactcttaaaaattggctttgaccaaagttctcttgttttcagggaaagaacataaaagctttttgaactacagcctttttaaaagagggatgggaggatattacagtaagaaattaggctttctaaaagtatgaaacatccttcaactgggctctcttgttaataggacatcatatggtaatagactggtttgactatattgttagctgccacagtaagcaggtcattgtataggtaaatgcctgcacccataattttctagtaatagccacgaccaatttattaacagtcagggcctatccttgcctgtagttctcagtcactggatgcacaaaatcactgtgtaacattggctcacttggtgagcatagggttgactgataaaatgtttaattcccttgctagcttgtgagaagaatgagttgatgacatgctccataccagtggctagatggagtattaaggtggagcagaaaagaagtgagaacatcttgattcccctttcttttacttgatggtgtttatgaacatgccgtagtgcctttatggccagtttgagtcctgcctactttgacttttacgttcccattcctgtgttaccaccttcctcccgatttgttcacctattttgtgctttaaatctncataaaatacttactggnggaaaaaaaaaaacaccnnnaanaannnnaccccnacaaccaaacaacccaaccacaaacacaacaccnaaacacaaaacaaggcggccggccccctcctaaaatattccccccgggaggggccccaaaattttaacggggtacccccaggctttttctttggcaaccaaaac

SEQ ID NO: 54709 - DNA, 736 bp, Homo Sapiens
agtaaaactgctggattcttcttcctcaaatatttggggctaacacttcacagagggtcacagtccatgatctgaccaactaagcttttaaaaatcaactattaccacccagaaaacagtcctacgtgatcatgtggccagggcatgcccgagtcctgcaagggtggcgggtggctgaggtcacaccaccactggagtggatgggcagtgccccacatggacagccattccccaggctatgaagtgacataggcctcccccacggtgcctgtgtacggagcctgatgacttcactgggagccttctggaatcctgcagagggtcaaggagcagggatgttggatgcccacctgtcaagagttcagatcaaagttgcgctgagagcgtcacaattttggttcatccttgacgcgtttgtccaacagctcattggctccctttgtatgatatcgtggtcttctcacatggtgcccagtcaccaatatttataatgaggtctaactacagcagtagtttttcatatatatctctaaaacattttgttatattgaaaaaagtaatagaaatcaagatgtgttgatgaaataaaatgtgtatctgagtgagaaaacaagtatggtgaggtcactttaatgtttcacagcgatctcagatctaggcctcaggtagaatggaagctgttctgcattcactgattaacgttgctaaactcttggtgaggcacgagctaccagcc

SEQ ID NO: 54710 - DNA, 744 bp, Homo Sapiens
ggggcagtccattctctaatcctgacttggtgacagtatcatgtgtatttataaaacaaggctagccatatttaggacaactgaagaaaagctggaaaaaaaaacaagcaaacttgaacactgaagcaacctcaagcatctctttattttgatgatatattttgtgaggaaaatattcagatgatcaggaatgtatataactgaaatcaagaaaaagaacagtatgcatttaaaaagacagaattatgaaattatatgagtgcttagaatggggctaagggaagtgctgaaatagagcaaaggatggaagataatatagactaccacccactgtaaatgtttgcaagtggctgtgttttaaatgggattattacagttgatctctatgaatgtcagagccctaactttcaggctttgcattttgtatatgggaagaaatatgacaatcctaggtaattaaaccatagacccaaagcccttacgtttgatgcaatttatttttaaaataggccttgtttttcagcttcatctgcagttctatgtgaagattgataaatcagtttttacttgttttattaataaaacgtaattcggatatcttgagtggatggtttgtgatttagctgggtaaactatctttgtaacagataagttatctataaacaattaaaaaacttatattctacaaaaaaaaaaagaaaaaaaaaaaaaattgttggggcctgggctctgaaattttttaaa

SEQ ID NO: 54711 - DNA, 501 bp, Homo Sapiens
acgagccagaaccctaccaacgccgaagggctcaaggtcctggggaaccccaagagtgatgagatgaatgtgaaggtgctggactttgagcactttctgcccatgctgcagacagtggccaagaacaaggaccagggcacctatgaggattatgtcgaaggacttcgggtgtttgacaaggaaggaaatggcaccgtcatgggtgctgaaatccggcatgttcttgtcacactgggtgagaagatgacagaggaagaagtagagatgctggtggcagggcatgaggacagcaatggttgtatcaactatgaagagctcgtccgcatggtgctgaatggctgaggaccttcccagtctccccagagtccgtgcctttccctgtgtgaattttgtatctagcctaaagtttccctaggctttcttgtctcagcaactttcccatcttgtctctcttggatgatgtttgccgtcagcattcaccaaataaacttgctctctggg

SEQ ID NO: 54712 - DNA, 643 bp, Homo Sapiens
agctgtcccatcaaggaagacagcttcttgcaccgatacagctcagaccccacaggcgccttgactgaggacagcatagacgacaccttcctcccagtgcctgaatacataaaccagtccgttcccaaaaggcccgctggctctgtgcagaatcctgtctatcacaatcagcctctgaaccccgcgcccagcagagacccacactaccaggacccccacagcactgcagtgggcaaccccgagtatctcaacactgtccagcccacctgtgtcaacagcacattcgacagccctgcccactgggcccagaaaggcagccaccaaattagcctggacaaccctgactaccagcaggacttctttcccaaggaagccaagccaaatggcatctttaagggctccacagctgaaaatgcagaatacctaagggtcgcgccacaaagcagtgaatttattggagcatgaccacggaggatagtatgagccctaaaaatccagactctttcgatacccaggaccaagccacagcaggtcctccatcccaacagccatgcccgcattagctcttagacccacagactggttttgcaacgtttacaccgactagccaggaagtacttccacctcgggcacattttgggaa

SEQ ID NO: 54713 - DNA, 857 bp, Homo Sapiens
cagaggctgggcggggtgggaatggggcgcccgaggccggcctggggcgcagcgcaggaggcggctccggtggctgcggcggcagcgtgagcgcgaggaggcggaggctgcggcggggcggacggtcgcgcggcggcaggcacaggtgtaatggataggtaacagagaagacctcgtcccttcctagtcagggcatcagcatgactgagtgcttcctgccccccaccagcagccccagtgaacaccgcagggtggagcatggcagcgggcttacccggacccccagctctgaagagatcagccctactaagtttcctggattgtaccgcactggcgagccctcacctccccatgacatcctccatgagcctcctgatgtagtgtctgatgatgagaaagatcatgggaagaaaaaagggaaatttaagaaaaaggaaaagaggactgaaggctatgcagcctttcaggaagatagctctggagatgaggcagaaagtccttctaaaatgaagaggtccaagggaatccatgttttcaagaagcccagcttttctaaaaagaaggaaaaggattttaaaataaaagagaaacccaaagaagaaaagcataaagaagaaaagcacaaagaagaaaaacataaagagaagaagtcaaaagacttgacagcagctgatgttgttaaacagtggaaggaaaagaagaaaaagaaaaagccaattcaggagccagaggtgcctcagattgatgttccaaatctcaaacccatttttggaattcctttggctgatgcagtagagaggaccatgatgtatgatggcattcggctgccagccgttttccgtgaatgtatagattac

SEQ ID NO: 54714 - DNA, 623 bp, Homo Sapiens
  misc_feature (551)..(551): n is a, c, g, or t
tgcccctttggaattctgcactccagttacttaactttcccttcagaatacatgtggaaagaaagaaagaaatagcgatgactccacttttgcccctgtggcaccttgaacaaagcagttcttcccaaattatactttttttttttttaaataaggtgagcaggatgactggggagagagaaacatttgactttgactgcctcccccattctttgctgtgagctggaaagtgtgcagttggtcgtctttcttctcctttctttaggatagtaagagactcactcactgcacttctgctcagttggcttctgcatcgggatcacacagccatcagcaggactgcccagttggtgagcacactccattgaccacgtggcgccagcgcttcctcaatgcacatgattgagaggaaagaaagttctcttagatgttactgcttttgctcagactttgcaaaaaaaaaaatatatatatatatgtataaatatataattattaatcacttttgtccttgagaaagtcttgaatgaacagagaatttattccattgncatatttgattgtatagaggcacactgtttcatcgacagaagaaagcaaaaggctttgtgtaagttttggta

SEQ ID NO: 54715 - DNA, 954 bp, Homo Sapiens
  misc_feature (605)..(622): n is a, c, g, or t
  misc_feature (624)..(703): n is a, c, g, or t
gaagcgacgagccatggccgaccctgaggtgcagcagatcatgagtgacccagccatgcgccttatcctggaacagatgcagaaggacccccaggcactcagcgaacacttaaagaatcctgtaatagcacagaagatccagaagctgatggatgtgggtctgattgcaattcggtgatgacttgttcatccccccttcccttcgccctcatgtggaaagaggagctgggaccgcggcgagcagcacggagcggaagggagagcaggggagagaaggcctcatctctctatatttatacataaccccggggaagacacagagactcgtacctgcgctgtttgtgccgccgctgcctctgggccctcccagcacacgcatggtctcttcaccgctgccctcgagttccatgtctctttcccctgcccctagttgctgtctcggctgctctcccatagttggttttttttttatttggggcagtgggcatgttatggggaggggagggggttcttccagcctcaggtcccagctgtctcacgttgtttattctgcgtccccttctccaataaaacaagccagttgggcgtggttatatgttgcaaannnnnnnnnnnnnnnnnnannnnnnnnnnnnnnnnnnnnnnnnnnnnnnnnnnnnnnnnnnnnnnnnnnnnnnnnnnnnnnnnnnnnnnnnnnnnnnnnaagggggggccgtctcaaaaattcccccctcggggggcccaaattttttaccggcacccccttttttttttaaaaaggggggcccccctaagggggggcgcttttaataaaccagggcccgggggccccttttttttaacccgctgtggtgtggggaaaacacgccctctccgggaggatattcttgggaagagaaaccccttctttttgggggggggggggaaaaatatggggaaacaatcctctctcaa

SEQ ID NO: 54716 - DNA, 586 bp, Homo Sapiens
ctgcccccacctcaatgatatttctctgagaacaacttttgtaggactgtgtgtttctttagatacatttagtacaactgtaggtgacgagtagtcagttattgcttgctagctacacaccagggttgatccattttaaaacttttggcattttgtcctcatgggccataaatacagaaccttgtattttaattaaatttttttacaaaaggaggcacatgcacaatctccatgtaacaaacctttagcagtaggatgtattatacgacagttacttaatttctagagttcaggcctctgggatcaaccccagactgggccagaatgttagtgaaggttttattgtgcccggttggaggataacgttctttgggtactttttgtgggttgcaaatgaactcaattgccacaagttttaaactggtgtaaatcaagcttgacttaatgtgattgttactgttatatccagcctatactgctagcagctgctcatactgcagtcaattactggaagcggatatatttcctatgcaaaaactgtttaaacaataaaatgagctatgctacaaaaaaaaaaaaaaaaaaa

SEQ ID NO: 54717 - DNA, 432 bp, Homo Sapiens
ttatctggaaactgggtttgggtcaaccccaggagtatttgcagaaggcccagcacagtggggggtattggctgcagggcagggaaggcattgccgactagataaccgtgtgagcttggactgagcgttggtggttcttcccaaaggaaaggaatttcttcccggcctgccaggtctctgggccttcagcgcgggtcctggtgctgcggccacaccaccctggggtgctcattgacagagctgccataatgaacttgaaaggacgggaatcacgagggaagctggggctcccctgcccacaggagaggatccccgttcttcaagcttctctgctcagtgtctactaacgaccgacatttgctaatgtaaataatagtaaattattgagaattctaattcttttacacagtctgtttttaatctattttaatt

SEQ ID NO: 54718 - DNA, 620 bp, Homo Sapiens
ctttttcttctcatagcgaagtcaaagctctctctgaatgtactgtgtgatgatgcatcatgcatgaaccttcggtcagggatatcattggtgaagtgatttcaaaaagtattcaaaatttgatatgctgtttagtcactacagtgccctcaaagggcagaagttgcagccttttttatattgcctgccaaaatttgaagtattagaagaaagtgtgccatgagagaaaaacttaaggagttttgaaaagtaatgcaaataacaaaactgcaacactatttttaaaaagataaatatctgagttaaaattactgaatctttattttacacctaaaaaaatatgagaacaaggtacatgcattatgtgtcacattactgggcaaactgttcaagtatttttttttaaacctccctgtatagaaaaaaatcattaaggatgtaaaagccatgcttgcctatttgctgtatacatgtaatgaaattgtagataaagtgtagtgcattgaaacaaatgaacaaaaagtagatacttttactatacaagggtgctggtgcagaaaaaaatatatatatttttggaaatgtagcattttatactttcaagtgttataaaaaaaaaa

SEQ ID NO: 54719 - DNA, 583 bp, Homo Sapiens
agtccgagcgggagccgagccgggcggggcgagggcagctccgggaaggaacgtcccagggatggaagtgcttggatgcggtgctgctggctgcggatgtgcgcaaggagatgggatggagagcctgagttggcattcgtataaatgacctgcctggctcccaccatgagtgctgagcttaacgtgcctatcgacccctctgctcctgcctgccctgagcccggccataagggcatggattaccgggactgggtccgccgcagctacctggaactggtcacctctaaccaccactcggtacaggccctgtcgtggcggaagctctacctgagcagggccaagctgaaggcctccagcaggacctccgccctcctctccggctttgccatggtggccatggtggaggtgcagctggagacgcagtaccagtacccgcggccgctgctgattgccttcagcgcctgcaccacggtgctggtggccgtgcacctgttcgccctcctcatcagcacctgtatcctgcccaatgtggaggccgtgagcaacatccacaacctgaactccatcagcgagtccccgcatg

SEQ ID NO: 54720 - DNA, 904 bp, Homo Sapiens
ccaccacctgccatcggatggaggacaggcgcatcccactctatgcgaaccacaagaccctcctccagaaggcagccgctgagttcggggctcactactgactgtgccctcaggctgggcggctccagtccatagacgttccccccagaaaccagggcttctctctcctgagcctggccaggactcaggctgttcctgggccctgcacatgatggggtttggtggacccagtgcccctcacggctgccgcaagtctgctgcagatgacctcatgaactggaaggggtcaaggtgacccgggaggagagctcaagacagggcacaggctactcagagctgaggggcccctgggacccttggccatcaggcgaggggctgggcctgtgcagctgggcccttggccagagtccactcccttcctggctgtgtcaccccgagcagctcatccaccatggaggtcattggcctgaggcaagttccccggagagtcgggatcccctgtggccccctcaggcctatgtctgtgaggaaggggccctgccactctccccaagagggcctccatgtttcgaggtgcctcaacatggagccttgcctggcctgggctaggggcactgtctgaactcctgactgtcaggataaactccgtgggggtacaggagcccagacaaagcccaggcctgtcaagagacgcagagggcccctgccagggttggcccagggaccctgggacgaggcttgcagaagctctccctccctactccctgggagccacggtgctggccatgtggcccagggacggcatgagcaggaggcggggacgttggggcttcttggtttggtgtccacagctcacaggagcgtgaaccatgagggcctcaggaagggaacgtggtaaaaccca

SEQ ID NO: 54721 - DNA, 613 bp, Homo Sapiens
caggggccatcacgaccgtgtacattgaccagaccatggtgctggccacgtggaggacaagatggggccatctgcctgtgggatgtactgactggcagccgggtcagccatgtgtttgctcaccgtggggatgtcacctcccttacctgtaccacctcctgtgtcatcagcagtggcctggatgacctcatcagcatctgggaccgcagcacaggcatcaagttctactccattcagcaggacctgggctgtggtgcaagcttgggtgtcatctcagacaacctgctggtgactggcggccagggctgtgtctccttttgggacctaaactacggggacctgttacagacagtctacctggggaagaacagtgaggcccagcctgcccgccagatcctggtgctggacaacgctgccattgtctgcaactttggcagtgagctcagcctggtgtatgtgccctctgtgctggagaagctggactgagcgcagggcctccttgcccaggcaggaggctggggtgctgtgtgggggccaatgcactgaacctggacttgggggaaagagccgagtatcttccagccgctgcctcctgactgtaataatattaaac

SEQ ID NO: 54722 - DNA, 624 bp, Homo Sapiens
gtaaaggggggaaggtgttatgcggctgctccctccgtcccagaggtggcagtgattccataatgtggagactagtaactagatcctaaggcaaagaggtgtttctccttctggatgattcatcccaaagccttcccacccaggtgttctctgaaagcttagccttaagagaacacgcagagagtttccctagatatactcctgcctccaggtgctgggacacacctttgcaaaatgctgtgggaagcaggagctggggagctgtgttaagtcaaagtagaaaccctccagtgtttggtgttgtgtagagaataggacatagggtaaagaggccaagctgcctgtagttagtagagaagaatggatgtggttcttcttgtgtatttatttgtatcataaacacttggaacaacaaagaccataagcatcatttagcagttgtagccattttctagttaactcatgtaaacaagtaagagtaacataacagtattaccctttcactgttctcacaggacatgtacctaattatggtacttatttatgtagtcactgtatttctggatttttaaattaataaaaaagttaattttgaaaaaaaaaaaaaaaaaaaaaaaataaaca

SEQ ID NO: 54723 - DNA, 602 bp, Homo Sapiens
gatcctgccttctccagcaaccccttactgctgtataacttgcataagcctccctggtgactcttgcaggaaccactccattgccctccagctccccagccttctcagttataaacatgctggccagatctcttagcctgcaaagagaactttccccagtcaccatagaccattctccttcctgaaggcttggggcagaccattcgtttatttagagaagagctatacattcttctttctggtcccatcttaaacgtcttctgttgtgctgcaccccagatggtgtctcagatgctttggggaatctttaacagctgaatttgagtcagtcctcttaggctgcacctccagcctctgcagatcccccctcatttcccatggatggtgggaccccattattctctcatctcggcattcagggaacagtttccttagcggcccctggtcacatgtcatcgggctgggcaggaagcgtccctgggtgcgtgctccacttctccctctcaggaagcccagtttcatccttagtaccccccctcgtgcccgctgtcggctggttatagcacttccactgctactgtcagataggaagtgatcgaagc

SEQ ID NO: 54724 - DNA, 665 bp, Homo Sapiens
ccaggccatgggccccacacatctcaggccctgtgtgagggagcacactgagatggtgcaggagtgaatgggcatggcttggcctcgctacctcggggacctgttggagttctggcagcagggtgtctgcaggtgggacggcgttctgggcagagtcagaatggtcagaatgaaacagaacagccaactcacccacaggacagcttattttgaggcaaggttttggattttggaggaagcagccagatgaggcggtgagcctccagaaggtcagcctttggagcacgtaagatactgttacagggtccagaaatcgtgttcacatgggggctttgactcttcaaacagcttttgcagatcgtaaattgcatttgcctagtcgtgtgacctcaaaagaagtcagacatatttaatccagaaatagtttcgtttgagggagggcttgcaggtctgtaaatagcatttgctttcctggttagagattgggatgcagaaggagttttcagtattttttttaaaacactaatgatcattgaagagtatttatgtaaacatacaacgtataatgggtgggggatccgatcatggtgatgtacggggtgaattctcttgccgtgttgcaaatgtgtaaaataaagattatctggcagaaaaaaaaaaaaaaa

SEQ ID NO: 54725 - DNA, 654 bp, Homo Sapiens
ctaagttttaggggaaaaaatgcaatttattttcagactcccaaagtaagaattaacatatcatgctaagaaaatagtgactattttgaagtatgctacttccctttcagaaatatagaatacacgtttctgttattaaagtatttgattactaattcaaatcatatggcaattataattcttctaaaatgctatcatttgtaactgtatcccctgtattaaatctcattaaccacaggcagctgttacagaaagctgcattgtttcacattgagctgttacattagttcaggctaaatgttgggcgctccaaccacatccaagaataaatctggaaacacactgctgggatactgctgttagagcccttcttggccttgtattcccagaaatgagctccctttccttagcttagaagaatgtgattatatccaggacatcatgttcagaaaacttagtttactttcagcatagaatgcattactgttggaataattggcctctagctcttaaatgtctctgataacttattaatatctatctttataaaatagagtgcaactacttttgtgtaaaaatgtttgcctttaaatttagtatttcatatcagcacatcgatatatgtataaatgttccatgttaatgtgtaaaaga

SEQ ID NO: 54726 - DNA, 526 bp, Homo Sapiens
ttaacgtttatagttgaattgggccaaaatgtttcgaatttatagaaatagaaaagttgtaactttaaaagagaaaaaaaattacaaacacctgtttccaaaccttgacagaaaactactttgagtctacaaagaggaggcgacaagtccatcagcagaaagtcacctgtctacatagaccaaatggagcaccaaggccaagcggacagaggggccatgggttgtaggattgaggaacggaatctgccgactcacatgacagcccattctttctttctgggtgatctggggatcacgccttgcccaagtgtgagattacctttctgttccttgcagttcacctcactttccgtcctttgtagagcagtggtgtctccaatgaacttgtttcctggttttgcatcttgtgaaatgtttttttgtatttttgttgaaggttaaacatttgtataaattgtaaatatatttggtttattacagtaaaggctttagtaccaataaaaaaaaaaaaaaaaaaaaaacgcgg

SEQ ID NO: 54727 - DNA, 774 bp, Homo Sapiens
  misc_feature (744)..(744): n is a, c, g, or t
gaacctacttatctgggaaatgaaacatctgtttttgggccaacaggaaacaagactcttggtttagccataaaaagattttattaccccttcaaaccacatttgccaactaaagaatttctgttgagtctcttgcaaatttttgatgcagtgattgtgcacaaacagttctatttgttttataattttgaatattggtttttacctatgaaattcccttttattaaaataacatatgaagaaatccctttacctatcagaaacaaaacactctctggtttataaaacaccttaattctactgctcttttttctccaatcaccagcatctgtttttcagggggtgattttacttttgtgaattccttagcctttcttccttggtgcataaagttaaaatgcacatcagcagaattgctgcatattaacatctcaggactcttctcttgtaaagaagctgaaattcgtactatattggccaaattgagcgagttaggtgatcttggtttcaatttccgagcctttgttaatatggagaattatggttcatatcagttatgtaggacctttggacccagggtcctacagatagatatggtgtgcccagattttaaaaataccttcaaaaataaaaaatacattcagtgacattttcatggtgggagctcttctttctgatatggcagttaactttttcacttaagtgctttagtttagactaactttacaacttctataacttttnggaccaagtttagtatagtctgattacatt

SEQ ID NO: 54728 - DNA, 581 bp, Homo Sapiens
cggacgcgtgggcgaaaatgctactatgactcttcctggaatacacccacctaccttgaaccagattatggattggatatgtctacttctggatgcgaattttactgttgttgtaatgatgccagaagcaaagaggctactgataaatctttacaagcttgtaaaatctcagatatctgtttattctgagctcaacaagattgaagtaagttttcgggagctacagaaattaaatcaagaaaagaataatagaggattatattcaattgaagtgctggagctcttctgatattatcaattctccttcatagacattttataaagctcttttatgtgaactcttgcttcatccaggcaagaacggtgttttgtttgcgaccatctcagtgtcaagagaaacgtgtcagtgagtacctggaccatcacttaactgatgctccggggtaggactgcaggtttcacatgaacctgttctaggctgtggacattggtgtggagaggttctgcaattttttaaaaatatgtaactgggttgattttaagtaaaattatctgtgtattgaaaaaaaaacaaacaaaaa

SEQ ID NO: 54729 - DNA, 660 bp, Homo Sapiens
ttttttttttttttttttgccgttctagttctttttctttttcttgctttctttctttctccatttctctttgtttttcctgctccttctccagctctttctccttttcctgctgtctctctctgtctttttccctctccttctctcgctcctgttcttgttctttttcaagttctttctcacgctcccgttctttttctcgctccctttccctaatttcctctggagatggttgtttttccaggatgccaagcttctcatccaatcgtttcagtttctccgcacaagctgccttcctttgttcttccattcttcgctcttcctcttcacgccgtttacgagcacgttctactgctgcagaaatttctgattgttgtcttcgtctttgcttccatatttcatcttcatcagctacttgctgcttggagggaaaggggcctggtcttccaggtactgcctgtcgatctggaggtggatgctgctgtgcaagcaactttggaggtggtggcagatgtgaagatgttccacgttcctgattaaatgaaggtcctttcccatagggaacttttgctactgatggttgggcaggtatttgggaagatgatttagtgttggaaacttcatctgtttcttttttgttttcgcctcgttccgaattct

SEQ ID NO: 54730 - DNA, 625 bp, Homo Sapiens
tgatttctaaagtaagcctcagaatttccaaaccaattcatcccagctgtttctgggctggtttttaaagtagctgcaacagaatcatgaggctttccctttttatcaaatacgaaaaacattttttaaaattctgcacacccagtgatcatcttttgtgcgggaaagcaagatgatgatggatgattttattcatccttttagtaaagacacaaaacatttttctcaacatttgtacagttctgaaaaaaacctggtcaccaaaaatatcttctctgctaattcagcaattcttgggctccagttaggggagctggggcctcactttctcccagaattgtgggcttcactggaagtgaaggtgcaggaatgactggactgtccaccccagccctgcctgcctgtggttttggccagggagcaagccatgaggtgccctggcacatgcacaaattgatcctttgcgtgacagtcttgtatggaaaacagatgctgacagaattgtagactaccatgccacacaaaaaggctaaatatctactccaatgggtttccagttcagtttgaagtcaatcaaatttttgtatttttcggtgtctccttgattggttttgctagtaattct

SEQ ID NO: 54731 - DNA, 632 bp, Homo Sapiens
  misc_feature (575)..(575): n is a, c, g, or t
  misc_feature (578)..(601): n is a, c, g, or t
  misc_feature (603)..(606): n is a, c, g, or t
  misc_feature (608)..(614): n is a, c, g, or t
  misc_feature (617)..(624): n is a, c, g, or t
aaagtggactccaacgacagcctctacgggggagactccaagttcctggcagaaaacaacaagctgtgtgagacggtgatggctcagatcctagagcatctgaaaaccctggccaaggacgaggccctgaagcgccagagctcgttgggcctttccttctttaacagcatcttggcccatggggacctacgcaacaacaagctcaaccagctctccgtcaacctgtggcacctggcacagaggcacggctgtgcagacaccaggaccatggtgaaaacgctagaatacatcaagaagcaaagcaaacaaccagacatgactcatctgacggagctggccctcagactccctctgcaaacaaggacctgacccccgggcccatccccaggctcagggactctggtgccaaatccagaaagatctgctctgctgccctgaactcttacggcaatttaggtttctcatttttcttttctttttacatatgtacaaattgttttaagctttggcctctatccaggttattctgacaatgaagaaatgggagttgtcagagcattaaaatgcaatcttcnctnnnnnnnnnnnnnnnnnnnnnnnnannnnannnnnnnttnnnnnnnnaaaaaaag

SEQ ID NO: 54732 - DNA, 575 bp, Homo Sapiens
cggttggttaggggtcctcttagtcccaaggtccggatgtcactcatgtacttaataacacttcaccttctgtaatactaagtcctcagagctccatgctgttctgaaagggatggccacaagttctttcccagcctcttccattccctttcttttcatgcccatcccgatgaacctgcatcattccccgacactgccaagccaaccctggaaaaggagttcgctggccattggctagaatcagggtggagaagttccctgaaccttcctgtctcccagggacatgtatgcttccagggacaagcttaggtcatgaacatggtcagaacctttggacaagaggaaaaatactaagagatttgctttttctgggtgcggtggctcatgcctgtaatcccagcactttgggaggccgaggcaggtggatcatgaggtcaggagttcaaggcgagcctggccaacatggtgaaaccctgtctctactaaaagtacaaaaaattagccagtcatggtggcacacgcctgtaatctcagctactcaggaggctgaggcaggagaattgcttgaacctgtg

SEQ ID NO: 54733 - DNA, 638 bp, Homo Sapiens
agcggcggttcctgctccatgactggctgtctgcctgtattttcgggattctttgacatttggtggtactttattcttgctgggcatactttctctctaggagggagccttgtgagatccttcacaggcagtgcatgtgaagcatgctttgctgctatgaaaatgagcatcagagagtgtacatcatgttattttattattattatttgcttttcatgtagaactcagcagttgacatccaaatctagccagagcccttcactgccatgatagctggggcttcaccagtctgtctactgtggtgatctgtagacttctggttgtatttctatatttattttcagtatactgtgtgggatacttagtggtatgtctctttaagttttgattaatgtttcttaaatggaattattttgaatgtcacaaattgatcaagatattaaaatgtcggatttatctttccccatatccaagtaccaatgctgttgtaaacaacgtgtatagtgcctaaaattgtatgaaaatccttttaaccattttaacctagatgtttaacaaatctaatctcttattctaataaatatactatgaaataaaaaaaaaaggatgaaagcaaaaaaaaaaagaaatttcagggg

SEQ ID NO: 54734 - DNA, 689 bp, Homo Sapiens
  misc_feature (611)..(611): n is a, c, g, or t
gtaatgggcctcaaaagttttgcattgaaaaagttggcaaagacacttggttaccaagaagccatacatgttttaatcgcttggatctaccaccatataagagttatgaacaactaaaggaaaaacttctttttgcaatagaagagacagagggatttggacaagaatgaatgtggcttcttattttggaggagctcttgcatttaaataccccagccaagaaaaattgcacagatagtgtatataagctgttcattctgtacagtgaattttccgaacctctcaaagtatgttttccgttcttccacagaaatatgcaaaacagttcatccttttctactttatttattgttcccttgaaatgactgaccaggaaaaagatcatccttaaattttgaagcaagtgagagactttattaaaaatacatatatatctatataaacatatatgatagtggctctagttttatagagctccaagtgtattaaacatgacagccattcattcataaagatctggatttgctttaccttgttaatattatctaggggaaaaagtgcaaattgctccatgttcttctctcccttatgtaacatctcctgagggtgtntagttgcattggcctgttcagaaaggtattaagggcttaggccaatcttactttgagtatgttaacaaaaaaaaaaaa

SEQ ID NO: 54735 - DNA, 692 bp, Homo Sapiens
  misc_feature (684)..(684): n is a, c, g, or t
cagtcagtactcttattgattcacttaagaaaactcagcctgagaatgttgatggaaatacctgggcacaagtaattgccttatacccaactttagtagaatgcatcacctgttcttcttcagaagtctgttctgcacttaaagaggcactagttccttttaaggatttcatgcagccaccagcatccagagttcaaaatggagaatcttgaccggctacaatatatttgaaagcaggaagatagtctaaaaaatgtttgctcctaattgagtcttctgtgagaaggacatttcttactgcagataattcttggcagctgttgttggcctcctttaaattctacttacctgagttcagtaattcatattacaggcttgcacatcaacaaaggctcctgaatgaacagcagtgtaaggctttaataaattaaactgatgggagggataattaacactacagtatacatgctaccatatctccagttggtgatttaaagtgagcttatgtacagtttgtggtgtatgtgttaatgatgtactttttaaaaagaaagaagagatatttcaattcagtcagatttattagtctggtgtttttgcaccctttttcaagtacaaaatcgtactagaattttatgcaagatggtactgtaacattccatattatctataaccagcctttgntaacaaag

SEQ ID NO: 54736 - DNA, 581 bp, Homo Sapiens
ctcatcacttcccatgccccatctcgactcccatccccatctatctgtgccctgagcatggctctgcccccaggtcgtcttgcacaccttggcagccccctgtagttgacaggtaagctgtaggcatgtagagcaattgtcccaatgccacttgcttcctttccaagccgtcgaacagactgtgggatttgcagagtgtttcttccatgtctttgaccacagggttgttgctgcccaggctctagatcacatggcatcaggctggggcagaggcatagctattgtctcgggcatccttcccagggttgggtcttacacaaatagaaggctcttgctctgagttatgtgacatgcctcagccccatggactaagcaggggtctggtataaaaacactcctggaaacgcctttgccctgatccaaatgttagcacttgctagtgaacgtctacttatctcaagttctatgctaaaggcaatttatcttgatgtgatgataaaccaaacttattagcaagatatgcatatatatccataaattctctttactctgtctccatcacttgatgcacataagtgccc

SEQ ID NO: 54737 - DNA, 959 bp, Homo Sapiens
  misc_feature (674)..(674): n is a, c, g, or t
  misc_feature (751)..(751): n is a, c, g, or t
  misc_feature (834)..(834): n is a, c, g, or t
gacttacaagaaccggtggtcccagatcctgatgttagtatttatttaccagtcttgaagactatgaagagtgttgtggaaaaaatgaaaaacatcagcaatcaccttgttattgaagcaaacctagatggagaattgaatttgaaaatagaaactgaattagtatgtgttacaactcattttaaagatcttggaaatcctccattagcctctgaaagcacccatgaggacagaaacgtggaacacatggctgaagtgcacatagatattaggaagctcctacagtttcttgctggacaacaagtaaatcccacaaaggccttatgcaatattgtgaataacaagatggtgcattttgatctgcttcatgaagacgtgtcccttcagtatttcatccctgcgctgtcctagcaccctgtcgctggagttggcatgcagagactttgtcaggatgggagaggccgcaggtgttgtgttctgatcactggtctgtgccctcacagcaccgcacatcgacacactgtacttatttgtccctctctaacattttaactaaaagttgattcaacaacacacagttggataaacatatcacttcatgttgctcatgtctgttttgctttgtttttaagacactgaaaagaaaagctagaatttatttattcagactttanagaacaatttctcattgatgttgtgaaaatcgtcatgtatttagacttggtgtagtagccagaatttcgtaagctgntgcctgggagcttggtactttccctccaggcagaggctctagctcagcacggcctgtagcgcacagtcagtcttgcatttcantgtgtccaccccgctgctcctgcccctttggagcccagtgacagaaagaacagcctctgtcaccccgccgccactggccttggtactcccaacccctggggggggtcccacctggcacatttgga

SEQ ID NO: 54738 - DNA, 698 bp, Homo Sapiens
cgtccggtttctgcagcgggacttctcggagacgtacgagcggtaccacacggagagcctgcagaacatgagcaagcaggagctcatcaaggagtacctggaactggagaagtgcctctcgcgcatggaggacgagaacaaccggctgcggctggagagcaagcggctgggtggcgacgacgcgcgtgtgcgggagctggagctggagctggaccggctgcgcgccgagaacctccagctgctgaccgagaacgaactgcaccggcagcaggagcgagcgccgctttccaagtttggagactagactgaaacttttttgggggagggggcaaaggggactttttacagtgatggaatgtaacattatatacatgtgtatataagacagtggacctttttatgacacataatcagaagagaaatccccctggctttggttggtttcgtaaatttagctatatgtagcttgcgtgctttctcctgttcttttaattatgtgaaactgaagagttgcttttcttgttttcctttttagaagtttttttccttaatgtgaaagtaatttgaccaagttataatgcatttttgttttttaacaaatcccctccttaaacggagctataaggtggccaaatctgagaacaattaaattcattttagttataataaatttaatatttgtaaatgtaaaaaaaaaa

SEQ ID NO: 54739 - DNA, 578 bp, Homo Sapiens
ctttctttacatttcttatgtgttcacctctaatctgttttaggaagagagttggttattatgttgatcccataatataaatcatatcctttatattttagaatatctcaaatgtattccttttttgtatggtgggtttgcctagggacgtgtaactacaggcttttactaagccaaggaaaaagagaatttttcttttcatcttacaaattccagatatctacaaaagatgtgaaagcactaaaaataccatttttaagcagtactttacctgttttttctttagcaaaccaggttatgtggtgtaaaggtttgttatacgtgccacaatatagcatataaatattatgccatcattccttctcttgttaaaggtagaagaataaaattgtgatttttataacctgtgcttattactcaaatggtcttcaacatctttttaaacaacacatactttttgaatgttcagtttctattttgcttgagggattttgtacatatgtgccttgtgattgctgctgctttaaaggataaagtactctttgggggatgagtctgggttgttttgttttattttt

SEQ ID NO: 54740 - DNA, 904 bp, Homo Sapiens
  misc_feature (786)..(786): n is a, c, g, or t
  misc_feature (839)..(839): n is a, c, g, or t
tcattagcaagggggaaaaggccaaaggacaagggcctcttctcccattggttttcctgtgggcagaagggctgaggaagatggcccagcccgtgggggctgctgggtcaccagcagtgggtagggtgcaatctggtgtgtgttccagcagtgagacggtgttattgtgaaggtggcattcatctgcggagccaaaacccagccatcggggaagggtcagggcttctgtggaacttggaacgtgccaggaccacctgcaaaagccagggtgcgttgatcattctcagatcattgattggcctccacttgggtatgtgaattattcatgtcccagaagaccaaaaagtgctctggttctgagatgagtattttattcgtgttctgtttccgaaacacttagcaaagaaggtcacagtgatgtggagtcgccgcacccatctttgaagatagccagtgtccctggatgaggtgatgatttcccgtcccaaggactctgtgaagtttagagtacagtttgttggggtccaaaagacaccatctctaccccacccaaataaaaatgcactcatctctgtagaacatctgctgtcaaaggccagcctgtcgttagggcatggcttatgcttgacaaaccagtaacaactgtgggatggcgatggtgggatgtgtcgcaagcaattcactagacaatcttcacatgaatgtcggtagccagggtctctcccgagggatggctttagtcttgatgaatgtgaaccatgtcggaattgttaggtagaaacctgngctgggaggcctcggaccccaggcttcatcccctggcttccccagcctgcggncgcaagcaaaaccaaagcgcgagatgcaagctagcaccctttcatatccccatccccgttctcag

SEQ ID NO: 54741 - DNA, 765 bp, Homo Sapiens
gctggagatgtggtctctgggagtcactctgtacacgctggtctttgaggagaaccccttctgtgagctggaggagaccgtggaggctgccatacacccgccatacctggtgtccaaagaactcatgagccttgtgtctgggctgctgcagccagtccctgagagacgcaccaccttggagaagctggtgacagacccgtgggtaacacagcctgtgaatcttgctgactatacatgggaagaggtgtttcgagtaaacaagccagaaagtggagttctgtccgctgcgagcctggagatggggaacaggagcctgagtgatgtggcccaggctcaggagctttgtgggggccccgttccaggcgaggctcctaatggccaaggctgtttgcatcccggggatccccgtctgctgaccagctaaacaccaatttcttcctgcttttctccacttggtttggaaaatcacacagttttcaggctccatctgttttggagaaaatacattctgaagcatccccaattcacttctaaaaactcatgtgcaggtttgataaaacaccagaacagaagacagtgatgctgtattattttagatttattacatagatttggaattcacttttttttcatgacctagaaaaaaacattccagtgttcaaactgtgtatattattaaagggcttttaatttgtgaactttctgaagaagaaaggtggaaaaaaaaaatcggggggggataaaaggggggggggggggaaaaag

SEQ ID NO: 54742 - DNA, 602 bp, Homo Sapiens
  misc_feature (591)..(591): n is a, c, g, or t
agcatctgcactgaaatataatttaacagcaaaagtaaaaaaggattgaaagttgtaaattcctcatatcactacagtgacgattattctagaaatcgttgcttgtgtagcaaagaccaaataaatagatttcagacacaaccttgagcacagttgattttggacagctgctgtttattaggaaagggctccaggtggcaaaggtgcacacttcctcagacacaggtgagaagatgcagcaccttccacaggtgaatgggacggattcgaagtgagcaaagggattcacaaattatgtatttatttgttttcatagttaagtagctgaagctcagaggctttcagcaacagagatgaaagtgtggctttttagttttgtgaatggatgatcacaaagaaaaagcatttttaaaaagttggcaaacgctgaaacgcactgtggtatgaagcgcattgcatttccatagcactgaagtaccagtttccattcctgggctgagattgtttttcccgtggttgtattgttctgatttcacgtacaccagagtaactgatttttttttgtttgttttcttgtggagttaacaccanataaaaattgt

SEQ ID NO: 54743 - DNA, 850 bp, Homo Sapiens
gggcaactagttaccaaatgaattgtgccaccataactgattttaattttgcattatttatgattttaaaatatttgttgcccaggtgttatgaaagaataaagcttttaagtatagactaccttagcatgaagatgctcatgcctaagaatgaaaattgttgaggttatctcccattcaatcatgtagcaagaacttaaagaaattcactactgcagtttttatttttaaaaaacagtaattgagatattgaagacattacaatttagtttgtgtggtctttttttaaattgctgtatcgttcagtctcttgtggcaatagcactttgaagaatagagaatttaatatatggtgattgggatatgtagcattcaaaaaaagtgaattgccaagatactggtgtcatgtaaattcccactttacataaaaacccatcaggacagaatgatgctcaatattttaaaattctaaaaatagggtgggatttttcattgtctctactttataattatcaaaacttattttgtattgctactaccttaaactcgaaatacaatgtttatacttaaaaaaaacaaacgccgcaacaaaacaaaacactgtttgggccgccctcggcccctgaaaaaaagttttttaaaccacttgccgtttggggggccggggcccccattcgttatgtcgaaccgtgggccaacgcgtggttcccaagagaaacccgtggccagaaaagggccgtggtttttaccccaataaaaagcgccggcggaaccgcacgttttgaacccatacaaaggggcttctggagcaatcacgggatcttcacggagtccaggaagccaattaatg

SEQ ID NO: 54744 - DNA, 642 bp, Homo Sapiens
  misc_feature (642)..(642): n is a, c, g, or t
gcgtcaccgatctgctggtcgttcacgagcatcggggcacacctgtggggctcatcgtcagccacctgccctttggtcctactgcctacttcacgctgtgcaatgtggtcatgcggcatgacatcccagacctgggcaccatgtcggaggccaagccccacctcatcacacacggcttctcctcccgcctgggcaagcgggtctctgacatcctccgatacctatttcccgtgcccaaagatgacagccaccgggtcatcaccttcgcaaaccaggacgactacatatcattccggcaccatgtgtataagaagacagaccaccgcaacgtggagctcactgaggtcgggccccgctttgagctgaagctgtacatgatccgtctgggcacgctggagcaggaggccacagcagacgtggagtggcgctggcacccttacaccaataccgcacgcaagagagtcttcctgagcaccgagtgagcacactcaccactcagtcaggacatggacttggaactcaggatggggctgtcatagacagacccaccagtaggaactgtcacagaatggcctgctgaactgggatgtggaactgtggcgggtggagaggtctgaataaaccgtctgtgtcatggcaaan

SEQ ID NO: 54745 - DNA, 739 bp, Homo Sapiens
gacagccgcctccagaccagcactcggactgccctgcagtggccgcttgggcctccctggcggtcccgccctgccctaggctttaccttggaagcctgagaggcgccggctctcttgctcctccatcgatggacactgcattgcttctcatcggacacttgtggagcgcaggggcctggggtagcagcgctaaccctggaggcagcctttgggtgatggctttttcttcccttttcctcccgcgggcctgttttcaggtgttcctagcatttctgcctccaggcaggacggcaggggtgagcagctttgggagagacacctggcctttttctcctggagcctctccctcccggccctgggaagtgggcgcagccctgtgttcccccagcttggcagatgggctgcatgcggcgctcccttccttcccacgctcagcggccccggccagaccctggcagacttcacacctcattgctttaccccctggggcctggggaaatgtctgtactttgggaagtcacagaaatacatttttgtgcaaaaaaaaaaaaaaaaaaaaaaaaaaaaacacaacccacacacacaacaccccaggcgcacacaacaaaaacagcgatagccacgaacacaacgaataaaaagaaggacgccaccaagagctaccaaaaacaggacacgataccgcccacgatgaccaggagacaacacgggcggaaaaaacatcggcaagaaccccaac

SEQ ID NO: 54746 - DNA, 789 bp, Homo Sapiens
  misc_feature (763)..(763): n is a, c, g, or t
  misc_feature (780)..(780): n is a, c, g, or t
  misc_feature (787)..(787): n is a, c, g, or t
gcatgtgagatgagtgactgccggtgaatgtgtccacagttgagaggttggagcaggatgagggaatcctgtcaccatcaataatcacttgtggagcgccagctctgcccaaggcgccacctgggcggacagccaggagctctccatggccaggctgcctgtgtgcatgttccctgtctggtgcccctttgcccgcctcctgcaaacctcacagggtccccacacaacagtgccctccagaagcagcccctcggaggcagaggaaggaaaatggggatggctggggctctctccatcctccttttctccttgccttcgcatggctggccttcccctccaaaacctccattcccctgctgccagcccctttgccatagcctgattttggggaggaggaaggggcgatttgagggagaaggggagaaagcttatggctgggtctggtttcttcccttcccagagggtcttactgttccagggtggccccagggcaggcaggggccacactatgcctgcgccctggtaaaggtgacccctgccatttaccagcagcccttgcatgttcctgccccacaggaatagaatggagggagctccagaaactttccatcccaaaggcagtctccgtggttgaagcagactggatttttgctctgcccctgaccccttgtccctctttgagggaggggagctatgctaggactccaacctcagggactcgggtggcctgcgctagcttcttttgatactgaaaacttttaangtgggaagggtggcaangggatgngc

SEQ ID NO: 54747 - DNA, 652 bp, Homo Sapiens
  misc_feature (624)..(624): n is a, c, g, or t
tggcctgggacaccagtggggtttatcgaggggaccagaggggcctcaggctttcagatgaaatggctcctcctactcacccactttattcctctccatgtaattcaggacaagctgcaacttcccccagcttaacacaatgcccatacctcatacgatatgcgccctcccgttccatccctggccccctcaaacgagacttctcacaaggctgattacagatggtcaaacctggcttccaaggacagaattgcctctcggaagccagctgtggatctgagtccagagttggccacttgtgtgggtcctcacaagcaaagagagcactaaacttgacattgggggtccaccactccaactttgctttctgaaggttttggtgtacattgagccccagaaggaaaggagagtatctgtgagtgggggcctcccttgaccccagtacgaagtctatgccctgaatccccagagtagcccttcctggtgcccaactggcctggggacaaacagcgtccactacatctaggactgccggctaagtggacacacttcttgacctcctaccaggaactttggtaaaagctagctttggggaaggggtttgggtgtaaatatgagagggtnggagggagaccagctggtagcaataaac

SEQ ID NO: 54748 - DNA, 353 bp, Homo Sapiens
tgaacatttgaaagaatctgaagccgataatacaaagaaggcaaaggaaaagataccccttcacgtctttagtcccaaatacacaaaattacgtgactggcaccatgaagtttcagcacgtgctcttaacgtacagtgatttatgagccttgccccccaagcagccagcacataccttttcatttactttttttttttcaacttcatagcaaaatctgtattaaatttgccttatgaaaaaataaaactttttctatacttttctaacaatttcctattgttgtgagaaaaggaagatgaacatgttttgtgctagttggtagctcacaaatgtaaaaccaaaaaaaaaaaaa

SEQ ID NO: 54749 - DNA, 683 bp, Homo Sapiens
ctggcaacaaacctgaccacatgattaagcctgttgaagtcactgagtcagcataaataaagactgcacaggagaattacccctatacctgagcctcaaccttctgggggaaagggaactagataacatacttcttacttgtctgtacagtaccttgttgcagatgggtgatatataatggtaatagaatagcacagccagacttgcttcctgcatggtagggagagacacaaaagatgggaaactgcttttccacaaggaatctccgtagaattttgcggcgaccagatggtgcataggtctggaaggtctgatctcccttggtcttccatgggatggttagtgtggaggggagatatagattgtccggccgctttgtgattccatggattgattcagtcttctggatttttttttctttatattttgggtactggagcttttaaaaatgtttggtttcaggtatttttattcatgtgaagtgtatatgattctcttgagataaggttttaagctaaaatgttactccctgttttagtttctgaactctgacagattgacagggactttgctggtgtagtctttttataggttttataaaccacttgagcctatatcagtcgttttagtgtctgacctaatatttggagctatcagtgctttgttgatttagatgatgactc

SEQ ID NO: 54750 - DNA, 795 bp, Homo Sapiens
caagtgatctgcccgcctcagcctcccaaagtgctgggatgataggcgtgagccaccacacccggccaagcacaggcttttgaatggtctccctctccccagcccaggtacatgaggccaaggtgaactgtgcatcctgagaccttgtgtccctgagtctcctttctgagtgcaagctgcactgtgagctggctgtgggatactcacacattcccacattctcctttctgccacatctcgcccttctggacctgcactgggagaaattcaggacaggagtgaactcaaggccatgaactcactggatttccatttttaggcacccatagggatgtttttaggatgtaagtttctgaggagaaagctagctctagcatgaagcttttttggattggcttctccatcgtgttggggtaacattttttttccaatttttttttcccaaaacatcgtctcagctcatttatcaagtaggtaaaatgagccttttgtgtacacacagaggcacatgtgcacgcacacacaacttgtgaacacacatttctgttaaagaagttagaaaatgagagatgggttggggcttgaagtgcatcagaggtatgaatgttgtaaaactgtcaggagatgtaaaattcctttctgaagtgtctcttctgtgaaagggttcagagcagattttgcttactatgtagtgttgcccttaagtacagtggtgtaattttattcaagattgtgctcttctatcaaaagcctctggaaataaatgttccggggatcaaaaaaaaaaaaaaaaaa

SEQ ID NO: 54751 - DNA, 565 bp, Homo Sapiens
gtgagttttgcttttgactccaggaacaaaaaggtaaatcccacatcccagtttctcagaagtccctgtttattccaaatgccatccagatgtgtgcaatgtggcaaactgaagctgcacagtgttggtttccttgtattctgaggatgttaaagactttgttaaatggttatccaattgctctttcacaggtagcctattaaactattttaatatgtttttttaaacctcataaaaatctagcacactcttctcttgagcagttagcagacctaaagcaagcctgaattggctatgcagtacattgtattctgtttgggggaatttgttttagccattttctttaattaccagttttccagaacactcttagctatgttgacatgaggcagttccttccaggtgattctgttcttaagtattatataaactgtgccaatacagacaaagcataatcaatataatctgaattattgttatctttacctcctgagtaataagcatggtgtcagttttgtacatagcaaataaaataaatgaaatctgaaaaaaaaaaaaaaaaaaa

SEQ ID NO: 54752 - DNA, 595 bp, Homo Sapiens
cgtcttagcagtgatttttatccaatcttgtttccaaaaaccatgtctcccagggccttaaaagccatcatgtaaattaccagtaaagtgtaacatatgcaaacataacaaaatcacttccatagtgacgatactccaaccatatggatattagtcatagaagaactagaggttttatgatatttttttaagtcttttttttttttgtctaggtagtcagtctgcacttaaatatcaatcattttccttttttgcttcttcccttaaaatttatatgtatccagtacatttaattgagaagcgtatgttttttattatgctgtattttctttttattttttaattattgtttatattttcaattcaaaaatgtacaaaataaagttacattgctggtcttgtaagagctatacagttttcctaaatgtatacctgtaactgcagcagttcacctatttcaaaaatttggaattctgttcatttgttattcttaagaccacctcaaatttaaaggctaccttattgtacgtttaaagtgtattataacagtgtggtagttaataaaacactatttttttttaaaaaaaaaaaaaaa

SEQ ID NO: 54753 - DNA, 897 bp, Homo Sapiens
  misc_feature (763)..(763): n is a, c, g, or t
  misc_feature (890)..(890): n is a, c, g, or t
tagggcggaagagtatgaagtcacggcgcgccgaattcggcacgaggattggcgagatcccatggatgagtaaactgtttctcaggcacttgaggctttcagtgatatctttctcattaccagtgactaattttgccacagggtactaaaagaaactatgatgtggagaaaggactaacatctcctccaataaaccccaaatggttaatccaactgtcagatctggatcgttatctactgactatattttcccttattactgcttgcagtaattcaactggaaattaaaaaaaaaaaactagactccattgtgccttactaaatatgggaatgtctaacttaaatagctttgagatttcagctatgctagaggcttttattagaaagccatatttttttctgtaaaagttactaatatatctgtaacactattacagtattgctatttatattcattcagatataagatttgtacatattatcatcctataaagaaacggtatgacttaattttagaaagaaaattatattctgtttattatgacaaatgaaagagaaaatatatatttttaatggaaagtttgtagcatttttctaataggtactgccatatttttctgtgtggagtatttttataattttatctgtataagctgtaatatcattttatagaaaatgcattatttagtcaattgtttaatgttggaaaactatgaaatataattatctgaatatagagctctgagaattgatgtacctattnaaagatttatggtttatactatatatgacattataagtttcaaaataaaaaaaaaaaaaatggctatcgcgcgccctactagacgtaagtagtcctatgaggtatattgaaagaatagattcactcngtccttc

SEQ ID NO: 54754 - DNA, 894 bp, Homo Sapiens
atattttttatcataaaaatgatctttggctaaacaccccattttactaaagtcctcctgccaggtagttcccactgatggaaatgtttatggcaaataattttgccttctaggctgttgctctaacaaaataaaccttagacatatcacacctaaaatatgctgcagattttataattgattggttacttatttaagaagcaaaacacagcacctttacccttagtctcctcacataaatttcttactatacttttcataatgttgcatgcatatttcacctaccaaagctgtgctgttaatgccgtgaaagtttaacgtttgcgataaactgccgtaattttgatacatctgtgatttaggtcattaatttagataaactagctcattatttccatctttggaaaaggaaaaaaaaaaaaaacttctttaggcatttgcctaagtttctttaattagacttgtaggcactcttcacttaaatacctcagttcttcttttcttttgcatgcatttttcccctgtttggtgctatgtttatgtattatgcttgaaattttaattttttttttttttgcactgtaactataatacctcttaatttacctttttaaaagctgtgggtcagtcttgcactcccatcaacataccagtaaaagtttgctgcaatttgccccgttaattatgcttgaagtttaaaaaaagctgaacagaaggtgtcccaaatttcccagcacattaatcctaaacttgaaccttcctggaaaggctcatttattttgtaagtgaaatttttaataacgttccttcccggcttttatctggccccaccccccccccaaaaaaaaaagccccccgtgtgcaaagggcaccccaaaaaaaaaaaattttccc

SEQ ID NO: 54755 - DNA, 828 bp, Homo Sapiens
  misc_feature (612)..(612): n is a, c, g, or t
  misc_feature (778)..(778): n is a, c, g, or t
  misc_feature (813)..(813): n is a, c, g, or t
caggtgaggggagaatatcaatttaatttgaagaccaactgcaagaactcttaaggaatcttgtttgagaaaatgttgttatgtggtttgtatgctacttttggggggcagggctcatttcagcagcctaaatctcctccttggataatgttaatattattattattattaacaaaaaatatatatttttaaaaagttcccttaatctatgacatggtagcaatgatttccctttggtgtcttaatggcatgtcagataatttgtttttccagagaagagagctcaaagaggaattgggaaaaataaattgaactctggaatcttctctctcaagtcctaaaatgaacaaacagatatgattgtgtttgagggaaatatgtccctagcaggaaaagaattcaaagaggttcaaagaatatgtcacttactcctacttgctgtaggaataaccttgctgataagaaaaaaagggacaatattggagaaactacctcttgtttaattgatctgtccaactctgagatcacttggtaactggtttcatgtgtatccaaaaatcagcatttggatttaagctttctgaatttggtagtttaagaaacagatttagnttttcagtggttttaactcatgtgaaataatgattttccaccagctctgatgcaaagagatataattttaatgaacgatttatccagcagtgtgttccaggggttgcctctccttatctacggggattactttgtacatgcagataagttttcgcaaacctatttncattttcttttgtagcaaataaaactttaaaccanaaaaaaaaaaaaaaa

SEQ ID NO: 54756 - DNA, 692 bp, Homo Sapiens
  misc_feature (655)..(655): n is a, c, g, or t
  misc_feature (664)..(664): n is a, c, g, or t
  misc_feature (668)..(691): n is a, c, g, or t
ggcatgcgttgcacctgcccggcccggtggctgcgcctccctcctccacctgaccaacgcgacattcctcccctcacgcctggcccggtcccttccagggcaactcccagggatgtggtgacatgcagggttcaagtgttcttggttccaggcacctcccggctcacggggagctcagaggtccatgccgaggagaccaggcaggacctcccgaggctgcgccccggccggcccatgcgttttgtgatcccaagtgactctgtgggaagggtggggacgaggcgtcgggagggtatacagggagcccctcccgtgcatggctgcccccccgttcattttctccaccacagccgcttgcacgtatagatactgtggtcccctttcttttaatatataaattatgtatggtgaagtggagtgtattgtgtaggtcccgtatttaatgcctctgactgcctttgaagcgcagccctctgtggcccgcagccccctgagcctggctgttgtgtggtatttatgctctctttgtctgcctgtttctaaggaaatgcatgtgtgccctgagccgtgatgatcctcccatccgtgttgtgagcacaggcatttgtgtctggtctgtcctccctgttgattggtctggcatttccggtattanaatgataanatannnnnnnnnnnnnnnnnnnnnnnna

SEQ ID NO: 54757 - DNA, 556 bp, Homo Sapiens
tctggaattgcagcccacataaacataaaggaggatgtccctggtctgttccatccccacggatggtgttgctgctgggcaacagtgttggcttcttttaagtaccccctttcctcctcacccacctccaaactgactagcactcagagggacttatgataaaggttcagctccaggggtagtacctgagtgtgtgccatgccccttcagaccagctgcttccatcagaattccagggtcacagccccaacagaagcagcagtgcctctgtaggaggggtgctgggctctggccttctcatgcagagaggtccgggacagggtcagtatcgtgggcatgtgtatagcttcccaagttcttttacagtccctgctgggactccctgacttactttggttggttcctagtgctacttgttttacaaactacactttgtagaattgattagattaccttgtttatttaatgtgagtttgtgcctttttgtctcaatcttccaatacaggtatattgagaaaaaaagcagtctaataaaatcctagacggaaaaaaaaaa

SEQ ID NO: 54758 - DNA, 927 bp, Homo Sapiens
  misc_feature (711)..(713): n is a, c, g, or t
  misc_feature (715)..(732): n is a, c, g, or t
  misc_feature (737)..(738): n is a, c, g, or t
  misc_feature (751)..(752): n is a, c, g, or t
tgagttcttgcctcctccttttggggacacccaaaacactgcttgtgagaaggaagatggaaggtaagttctgtcgttctttccccaatccccaggaatggacaagaagccaacttagaaagaagggtctcacgtggctggcctggctcctccgtagacccctgttcttttcaacctctgcccacccgtgcatgtcatcacaaacatttgctcttaagttacaagagaccacatccacccagggattagggttcaagtagcagctgctaacccttgcaccagcccttgtgggactcccaacacaagacaaagctcaggatgctggtgatgctaggaagatgtccctcccctcactgccccacattctcccagtggctctaccagcctcacccatcaaaccagtgaatttctcaatcttgcctcacagtgactgcagcgccaagcggcatccaccaagcatcaagttggagaaaagggaacccaagcagtagagagcgatattggagtcttttgttcattcaaatcttggatttttttttttccctaagagattctctttttagggggaatgggaaacggacacctcataaagggttcaaagatcatcaatttttctgactttttaaatcattatcattattatttttaattaaaaaaatgcctgtatgcctttttttggtcggattgtaaataaatataccattgtccctnnncnnnnnnnnnnnnnnnnnnccccnnccccccccccccnnttaaaagggccggccggctctagaagtatcccctcgaggggggccaaaggcttaccccgtacccaacgcttttcttgtaacaaaagggggtcccctaataagggaagtccgtaattaataagcctagaggaacttggggccggtcgtttttttaacaaccgcgccgtggaactgg

SEQ ID NO: 54759 - DNA, 798 bp, Homo Sapiens
agcgggataatatgcattcctagttttcagccaagtcggggatgttagtgattgtaccagcccaaagcacttggataatcagggcccttcttccttttataatcaatcatcaacatcagaaaaagctacttgttttatttatattcccttccaaatccgctctggaacatgcagtaactgcaccaaacttattttagtaacaaatatcattggcaactttggaatatatttgatattccattaggatttttctaaaaggggaaataaactatatatatatgtatcttacccccaattcttccaacagaatttctataggaagccatggatgatggcataagtttgccacatattacatgattttaaataatcctcaaaatacccaaggaactcttaaagagttttggtatgagtatactactttggtttaattttagcttcatggatgttctgcatggaaggatttttgttttccacattttcccattgctagcagagtgaaatccaagagaccaaacatttgcaagcattgtatttgagcacttttgtaaaaaacaaagaaaaagaaaaaaaagaaaatatatataatactaaaaaaaagtatctagaaggctacctcagaatgagactctctaacctacatcagaaccagagaagaatgtgcactatgtgggtctgttatcattattttcttttagtctgtatcttttggagatttatccaagtgccagattactcagtgctataattttctttagttaaacaaagggggtcagacaagacatcgcatcatccaga

SEQ ID NO: 54760 - DNA, 677 bp, Homo Sapiens
ggacgagggtttgggaatctggtgaataaagattcattttcaagctgaataaccatacttattttattttaagttgccattttggggaataattgcagtatgtgtagagactctcttgggatgcacttatatttttatttaatgactacttgttttctagttttgcccacaacgtctgaaaccactaagacattcaggagcatgttgagcttctggtttggaaacagcaagacccaccatttatgacaaggacagccatgaggttaatacttggagtttaactgccttccctttgaactagttaaaatctgtaagaataaggaagttgttgaaggcttaaaatctgggttctgaaaaagtagtttcagtttataggatacacatttactcactgagctccagttccaatactaaattagacagtatcatatagacggaaaatgaaatgctagaactgccgttctttggatcgccactctatgggggtctgtcttttaactactctcctggttatgttggccttacaccactgccatttgatttaaaacgctgcagacactttatctgcaaatgtgttccagttgttatcagctacctactacgcagcttcagcgccagtgtgaatttatttttttttaggtgccattaccgtctcctctgttcagattttgacattc

SEQ ID NO: 54761 - DNA, 620 bp, Homo Sapiens
actagtattggattgaatgaatagtcttccattttggaaacgttcatccactctcatatttattttttggtgcctgcatgtttgaagactgaagcaggctaaaagctcttgatgaaatttgagggtgctgaagatgttcccactaatttccagccatcacctttggtggggtgggcttcggaggacagtctgtctgaacctgccagtgctgaccctgcagcactttcagcatatgcacatcaaagttggagaccgcgctgaacttaggagggccttcacacagactgatgtggctaccttctcagaattaacaggggatgtcaatcctttgcatttgaatgaagactttgcaaaacacaccaagtttggaaatacaattgtacatggagttttgatcaacggacttatctcagctctcctaggaactaaaatgccagggccaggctgtgtatttctttcccaggaaattagctttccagcccctttatatattggagaagttgttttagcttctgcagaagtgaaaaagctgaagcggttcattgctattattgcagtgtcatgttctgtaatagaaagtaaaaagactgttatggaaggctgggttaaagttatggttc

SEQ ID NO: 54762 - DNA, 718 bp, Homo Sapiens
caaaactacgacatcagagaccgtacaagatttattaggcagcttattgttccgaatgaaaagagtggagctttaagtaaatatgccaaaaaaatattcctagcacaaaagcctgcaccactgcttgagtctccttttaaagatagagatcatttccagcttggcaccttatctcatactctcaacattaaagctactgggtacctggaattatctaattggccagaggtggcgcccgacccatcagttcgaaatgtagaagtaatagagttggcaaaagaatggaccccagcaggaaaagcaaagcaagagaattctgctaagaagttttattctgaatctgaggaagaggaggactcttctgatagtagcagtgacagtgagagtgaatctggaagtgaaagtggagaacaaggcgaaagtggggaggaaggagacagcaatgaggacagcagtgaggactcctccagtgagcaggacagtgagagtggacgggagtcaggcctagaaaacaaaagaacagccaagaggaactcaaaagccaaaggaaaaagtgattctgaagatggggagaaggaaaatgaaaaatctaaaacttcagattcttcaaatgacgaatctagttcaatagaagacagttcttccgattctgaatcagagtcagaacctgaaagtgaatctgaatcccagaagagtcctagggcaacaaaaaaaaaag

SEQ ID NO: 54763 - DNA, 629 bp, Homo Sapiens
  misc_feature (26)..(26): n is a, c, g, or t
  misc_feature (102)..(102): n is a, c, g, or t
aaccctcagtggggaaaaatactgancaatgacacagttttcatctgtgatagtcatggatgcttttattttccttggggtgctgaaattgagctgaaaaanaaaggctctttgaatatagttttaatttctctctacagttttttttgtttggtttgtgggctgttggaattgtaatttttaattgccttctaaaaaatggaaatttaacaatgtctgatctcagctgaacaaattagatgtttcagttgctcttgggtcaactggcttacagatttacatgtgcacacacacacaaatttcttatcacattttcgacttcttcacttgacctaactgattatgcgaaatacccaagattcatgctactgtaccacagatttgttttcacagcaataaatcttcagttctttgtttatgattccacttaaccaaaggcctgcagaagtgatttattatttgggtatttggagataatacatttgatggttttttggaaaacctttttcactccatactcagatatgcttcattgtcaaatgcatatttagattagattattgaattgtaatgtttatctgctgctttttttaaataaaatttgactgaaaatgaaaaaaaaaaaaaaa

SEQ ID NO: 54764 - DNA, 538 bp, Homo Sapiens
cctagatctaaacctagatactagcattttgtgggattgtctagaatttggggaagatttgggttcctaagatgcacaagcgttttacaccagtggtgattaactcaactaaaacccactgtaggaagttagcttccccagacagctaatgccgagatcttctaccagcgtagagttgacagaagcaggccagcgaggaggtgtgggacataatagcctgagtgcttgggttaccatggagactggagtgtgtgaggccacagcctgtgctaaagagccatggagccctcccctggccatgtctggggacagatagaacctgttgggggaaatattccctcaccccagggttctttctgcagagcaagggttgcctttgtcctatccctgagcttgctcaacaagagaaacaaggtttcttaagtgttttggttaaagttttcattcttatttgactatgtatatgtaattgtaaagaaacgatcctatgcattgtctttcttttatattcttgtaatattctgaaattaaaattgtt

SEQ ID NO: 54765 - DNA, 600 bp, Homo Sapiens
tgaaaaattgcctggcctacttggcaactttcctggcccttttgaagaggaaatgaagggtattgccgctgttactgatatacctttaggtaaagttcacttagaagctttaaaaaaaaaagtaattaaattcttttacaagtttccattgaggtgtgatatacatacagcacaggtgctgtatgtcttagatatacagcacaggtgctgtatgtcttagatatacagcacaggtgcacaggtcttagatatacagctcagtgaagcttcagaaatgcatgcatgcatgtagccatgactcagatcaagatacggaagagcccagcactccacgatgctccatcatgcccctttgcagaaaatactgcctcctccagtaaacactattctgatgtcactatagataagttttgcctcttcgtgaactttgtataaatagaactgaacaatatgaactgtcctgtgtgatttcttgtatttcattatgggtggtgtgctattgtatcaacagggtatttgggtggttttcagatttgtgatattaacaataaaggaattataaatattgtagtacaaaaaaaaaaaaaaaaaaaggacgcg

SEQ ID NO: 54766 - DNA, 919 bp, Homo Sapiens
  misc_feature (745)..(745): n is a, c, g, or t
gccgacctgaggacatggcttctgaacctgtcttttgggagtggtatggaaggtggagcgttcaccagtgacctggaaggcccagcaccaccctccttcccactcttctcatcttgacagagcctgccccagcgctgacgtgtcaggaaaacacccagggaactaggaaggcacttctgcctgaggggcagcctgccttgcccactcctgctctgctcgcctcggatcagctgagccttctgagctggcctctcactgcctccccaaggccccctgcctgccctgtcaggaggcagaaggaagcaggtgtgagggcagtgcaaggagggagcacaacccccagctcccgctccgggctccgacttgtgcacaggcagagcccagaccctggaggaaatcctacctttgaattcaagaacatttggggaatttggaaatctctttgcccccaaacccccattctgtcctacctttaatcaggtcctgctcagcagtgagagcagatgaggtgaaaaggccaagaggtttggctcctgcccactgatagcccctctccccgcagtgtttgtgtgtcaagtggcaaagctgttcttcctggtgaccctgattatatccagtaacacatagactgtgcgcataggcctgctttgtctcctctatcctgggcttttgttttgctttttagttttgcttttagtttttctgtcccttttatttaacgcaccgactagacacacaaagcagntgaatttttatatatatatctgtatattgcacaattataaactcattttgcttgtggctccacacacacaaaaaaagacctgttaaaattatacctgttgcttaattacaatatttctgataaccatagcataggacaagggaaaaataaaaaaaaaaaaaaaaaaaaaaaaag

SEQ ID NO: 54767 - DNA, 896 bp, Homo Sapiens
  misc_feature (865)..(865): n is a, c, g, or t
agaagtttttgcagtggatgttgacactggaatgaacgctgaactaaagtatactatagtgagtggaaacaataaaggcttattccggattgatccagtaacaggtaacattactctggaagaaaaaccagcacctactgatgtgggattgcatcgtttggtggtcaacataagtgacctggggtaccctaagtctttgcacacgcttgtgcttgtattcctttatgttaacgacactgctggaaatgcctcctatatctatgacttgatccgcaggactatggagaccccgttggacaggaacataggggatagtagccaaccctatcaaaatgaggactatctaaccatcatgattgccatcatcgccggtgccatggtggtcattgttgtgatcttcgtcaccgttctggtgcgctgtcgccatgcatcaaggttcaaagcagctcagaggagcaagcaaggtgccgaatggatgtccccaaaccaggagaacaagcaaaacaagaaaaagaaaagaaagaaaaggaagtctcccaaaagctctcttttgaactttgttactatcgaagagtccaaacccgatgatgcagttcatgaacctatcaatgggacaataagcctgccggctgaactggaggagcaaagtataggaagatttgactggggcccggcacctccaacaacattcaagcctaacagtcctgacctggccaagcactacaaatctgcttctccacagcctgcttttcatctccaaccaagacactcccattttccggtgaaaaaacacccccctgattcaggaaactccctttcggaacaacacctttgtcttgcgcggttacgcggcccccacactccnaaccgtacttttccccccaccccctcaactc

SEQ ID NO: 54768 - DNA, 541 bp, Homo Sapiens
cgcgtccgaaaaaatctgctctcaagaaagaaaagaaataatggaatttttctcttcaaaggtccttaggtgtaaattgatgccatcgtaggcaaggtgcaggcaggatttgaaggcaaaagtcaattcagctcttgagaaaaggtgtctttccagcctgaatttttcagattgactagaccaagcagaatctctcaacctgatcttagtatttcctagaaagcacttgacattgtgtgaggtctcacctgaaggaacttggtggtgacatttgggagggtggagggaggcagtgtccttcctgacagcacttgcctccatggatcttctgtacacagaactcttatctaggatgtggttctgttcatgctgctttctgcgatgtgcgtgtctgttagaataggctctctacccagctagaacaccttccagacacttgctggacagctatcttccacatacttcccagtttacatttggtcttaatgatcttgaatagatcctctcttcattttactcagccaggttttgtactgatgta

SEQ ID NO: 54769 - DNA, 766 bp, Homo Sapiens
  misc_feature (682)..(682): n is a, c, g, or t
ggcaacacggtggagcacaggtgccagtgctgccaggagctgcggacctcgctgaggaatgtgaccctgcactgcaccgacggctccagccgggccttcagctacaccgaggtggaagagtgcggctgcatgggccggcgctgccctgcgccgggcgacacccagcactcggaggaggcggaacccgagcccagccaggaggcagagagtgggagctgggagagaggcgtcccagtgtcccccatgcactgaccagcactgccgccctcctgacctccaaggagaacctcccatatgtcctctgagctcggcttccaaggccagtggaacttgtgcccctgtccaggcggctgcagctttgaacacactgtccacgcccgctttcttgtggagggtgtgggctatgggtcacctgctgcctggaggaggggcccttacccaccccgcctgcagccacctctcaggaccagccccggggctggccgagctcctctggccatgcatccagcctgctgttctggggacgtgagcatcacctgagggtctcaggaatgacgcttggacatggtgatcagctgcctggtggctgcaggaggaagaacctcactcctacctcagccctcagcctgcgctcccctcctcagtacacggccaatctgttgcattaatacacttgagcatnttgcaaaagaaaaaacagatgagcgtgaacgagatagtgcaggggatcagggaggaacgcgagtgcaaacgtaagagaaacaaa

SEQ ID NO: 54770 - DNA, 510 bp, Homo Sapiens
gcacgagggtgtgtcggctcgagctccgggcagaggcatttgggcccgaggcccccgctgtgactccccgagactccgcagtgccctccactgcggagtccccgcgcttgccggcaaaaactttattcttggcaaacttctctttctcttcccctcctcctcggcccccatcttctgctcctcctccttctctagcagattaaatgagcctcgagaagaaaaaccgaagcgaaagggaagaaaataagaagatctaaaacggacatctccagcgtgggtggctcctttttctttttctttttttcccacccttcaggaagtggacgtttcgttatcttctgatccttgcaccttcttttggggcaaacggggcccttctgcccagatcccctctcttttctcggaaaacaaactactaagtcggcatccggggtaactacagtggagagggtttccgcggagacgcgccgccggaccctcctctgcactttggggaggcgtgctccctcc

SEQ ID NO: 54771 - DNA, 1021 bp, Homo Sapiens
tttctcatgctaggactactattcctaaatggcttcaaagaggagtcatggatccactggacaaggttctgtcagttcttatcaaaaagctcggtactgcactacaggatgaaaaggaaaagaaaggcaaagacaaagaagaacactaaaaaagtaatttgatctgtgaacaaattatgattgtgtctgttttattacactggagtgtttttttagtataataatttgaaatataactttaaaataattctaaatttgtggctataattaaaagtttgtaagttaacctgttctagttccatcattctgtgtacagtgaagtattgcatgataatgtaaattttgtgaaaaactagattaaaatatataactgcttgttatggtttataattatataatgtgcaatacaattcctgcatctttaaaatgtctgcagaataactgtgaatttttttgttattggattggccgtaacttttagaaaaaaatcttgttgatgataatgtgattttggggaggtccttaattggctttttcttttttaaatgggagacttatataaatacctgtttgtatatagccttgagtaattgctgaaatgattgtatacccactaaaaatatttggtaactattataattaaaagtcacaggtaatgggtttaaaaaaaaaaaaaaaataaggggcgatgcggcgcctgtgtatatttgagttccccactagcacattctacataagacggtttggctttacttagacaccaacagcctgcgttgatccaggattgacgcaatataaccgccaagcccaacacggggggccacgccacgacgtcgccattacgaaacaacaaagggacaccgaacactcctcaagtcaacgcgcgcctgctttgcagcggcaggcgacgataagcgacctctcaccactcttctccacaccctctctccgagaacaccgaacccccccaaacactccagacacaccacgggcaaagtccgacaagagtcgccataccgat

SEQ ID NO: 54772 - DNA, 876 bp, Homo Sapiens
cgtagaaacccacttcacattcaagaacctccacttcaggctgttgacgtcggaggccagcgatctgaacgcaagaagtggatccatgcttcgaggacgtcacggccatcattttctgtgtcgcgctcagcggctatgaccaggtgctccacgaagacgaaaccacgaaccgcatgcacgagtctctcatgctcttcgactccatctgtaacaacaagttcttcatcgatacctccatcattctcttcctcaacaagaaagatctctttggcgagaagatcaagaagtcaccttgaccatctgctttcctgaatacacaggccccaatacctatgaagacgcagccgcctacatccaagcacaattgaaagcaaaaaccgtcacccaacaaagaaatatattgtcacatgacttgtgccacagacacgaataacatccaggtggtgttcgacgccgtcaccgacatcatcattgccaacaacctccggggctgcggcttgtactgacctcttgtcctgtatagcaacctatttgactgcttcacggactctttgctgttgacgttgatctcctggtagcatgacctttggcctttgtaagacacacagccctttctgtatcaagcccctgtctaacctacgaaccccagaggtgacctgacggctgtgtatttctggtagaatgctggtagaatccgggtttaaaaggtgagtctttcacctttagaatttgagaagggaaaacagggaccaattctccatgtggctggtgcttaaaaaaggaaacccccatttcacccatattcttttctggaaacaaactatcacttgggcgagctgccccgtccctcgggggcaccccgtggccccggggggc

SEQ ID NO: 54773 - DNA, 1048 bp, Homo Sapiens
tcatccagcagcctcccctcccaagcaaagcttctaaaactgggggtcggtgctcaagggaaggatttgctatgacctcatagaaccttgtccagtgtggccacttaccctatccttaccctccttatcctcaaagtttgggctgatgtaagactagaggctggccctcccagataacagagaaaagggagccccaaatgcaaccagcctcttgttctattcttgcctgcaaaagaacagaggtttctcaaatgcctcagtccctgagagccatttcttcccctacatcgtctcactttgcttcctattgactgctggtagaaggagatttggggtaggggctagacctccttttatttgaagggggcaagggctgagatgtggtccccaaggggccagaaattcccaagttggtcacaggtggcttagaagtgtgtgttatggttttacggatttccttgaagcctctctccttctctgcctacaaagaccctatactctcagtctccccaacccacccccaaggagctgtgggaggctttgtgttatctgtgaaactccaaaacaggggtgttgcggagaagggagagttcaaggcaaacgcaaggactggacttaactccctaggtgccacagtcagatgccggacacggatttatatataaatatatatatataaatatattatacccactcatcacgggcattctttgttgtaaccatttcctgtgtttaataaatggcattatcttcctggggaaaaagagaaaaaaaagctccgaggcatcctatggcgggtgggggagaaaagaaggaattgaaattggcccatgggcaataagctgttttcctggacccaaccttttcttggtaaaaaaggggaaagaattttgcccgggctcccctaaagggggggcgccatttaattttcggaaaaagccaagggtgaacctgggatttaaagagattcgcgtgtgccactacccccggggaaatcttaaccctggccctataggggggcggggccttttgtttttttgggggcaca

SEQ ID NO: 54774 - DNA, 698 bp, Homo Sapiens
cgaggggtcttatccctcattgacactttgaaacagaaacgccctgtcaccgaaatgccatagctgcacatgcaaaaggactcggctatttacctgaagattgactagctacactaaagaaaatgaactccgccatccgaccttccatccagttgctgatgctttgtcttcagagaatttacccttaaccaagcagtgttagacaagcatgttctctcgtcttgccaccatcatgtgatatgaaaagaagcatgaataattttttttgctgtaagttacatcatgcgcagtggaaggtctttttcttattgtaaatattgtgaacattacttaacttcacacacacacagagaagagtgtggccccacccctcctagtgaactaacgctgcgtccttggaatgaatgatgcgtgagttagtttcactgtcttcttggctggacctgtcacaagcaacctttaagtcctacagcactttgccctgttttcaacattggagtaggcactgcatagcagataccattgaattgctgtaaaaataggatggcgagtttgtgttttaatttttcataaaattgaacctgttggttgacaaaattggctgttggcatcagtatagaaaccaactggcagctttccctgacaagctctttgacacatggacaccatttcatgtctacagctgtttggggggatgt

SEQ ID NO: 54775 - DNA, 646 bp, Homo Sapiens
  misc_feature (513)..(513): n is a, c, g, or t
  misc_feature (545)..(545): n is a, c, g, or t
cggaacgaggtgaatgcagaaagacttttagccagagcacatatctcattcagcaccagagaattcattcaggagagaagccttttggatgtaatgattgtggaaaatccttcagatatcgctctgctctcaacaaacatcagagactgcatcctggcatatgacaattctaggaacatcataaatttaggggagatatttactttagtttgtccttttgttaagtactgaagaatcagagtggatttagaaactgccttgaaatcttttaaattttcactatcatgttatggaatggaaagtacattgggctgaactaatccaattgttattaagccactctgtgacattagaaaactctactgttttaagctttagtttcctttatggaatgaaggatttggagtagattatttcaaaggtagtttggagttttataatcagttttgtatatttacaatattttcttgaatgggtttactatacatcagcattttgctgtgttgcatctanaatgtgtatgtttatgcatgttttgccaatanaatttgtgcttcagtaactagatcggggatctagtatgctcctggtctaatgcatttacattgtttaggtaactggttcctaataaaaagaattataaaat

SEQ ID NO: 54776 - DNA, 852 bp, Homo Sapiens
cattatttccccaatttcacaacaggattcacattgttaatttataaatctagacttggagaattaaggactgagaaatgaccatatcttaaactatctacgacaaagtgaacttaaaaggacatgcccactgaattcaggtcctttgagtaaaaaaaaaaatcttctgctgcacattttgtttaagtgttactgtttctgcctgttaatgctgggaacacaaatagtgcaatttgtgcaattggagaatcttgccttttttcttggctccccccaaaaatacaaaccaacagaaacttgttatgcactcatcaaaatgtactaatgggtactctgaactcattaacattgacatctgcaacaggaggcaacagggaaaaaatctcatcttcttttccagtagaaaatagtttgtgaaatgatgagggcattttatctgcttgctgtgaccagcgtgtgtacacataaaccttaacaagactacaagtatattccagaaggaaatcattttagttatgaactaaataataaaaattagaacttcaaatgcgatggtcttgactattagaccagatttagtagctccatatctaagatttttctacctgcccctcttcagtacagggatggctggctgctcaacacactcctcctccccttttttcctttctttaagctgtgtacagtgaaaattgtctttactgtatttttgttctctggtaatgtaataagcatgatggtgccttctattaatacatcattccagtcttgctggtaattttgtacagtatagtgtatgaattgctgtgctgcaaagccaaacagctgcaaaatgttgaaaaatcatcgaaa

SEQ ID NO: 54777 - DNA, 859 bp, Homo Sapiens
agccatggcgacggtggcaggtggcacagtgtatcagcctgtcacggtcgtcactccccaaggccaagtggtcacacagacattgtcgcctgggacaattaggatccagaactcccagcttcagttacagttaaaccaagatctcagcatcttgcatcaagatgatggttcatctaagaacaagaggggcgtcctgccaaagcatgccacgaacgtgatgcggtcctggctcttccagcacatcgggcatccctacccaacagaggatgagaaaaaacagattgctgctcagacaaatttgacactactccaagtcaacaactggttcatcaatgccagaagacgaattcttcagccaatgttggattcaagttgttcagagacccccaaaacaaagaaaaaaactgctcagaaccggccagttcagaggttttggcctgattctattgcatcaggagtcgcacagccaccgccgagcgagctcaccatgtcggaaggagctgttgtcaccatcaccacgcccgtgaacatgaacgtggacagccttcagtctctgtcctcggacggggccaccctggcggtgcagcaggtcatgatggcagggcagagcgaggacgagtctgtggacagcacagaggaggatgcgggtgccctggcccctgcccacatcagcggggctggtcttggagaacagtgactccctgcagtaggggcaggagcagacgcacctgactttttggagtttgcacagcaaacattttacacaggtttatttctaatatggtttatatggagaatatagaaggagggcactttttggattttcataggaaaccttaaagcgcggtctttggccggc

SEQ ID NO: 54778 - DNA, 564 bp, Homo Sapiens
atgccgcccaaaggaaaaagtggttctggaaaagcggggaaagggggagcagcctctgggagtgacagtgctgacaagaaggctcaaggtcccaaaggtggtggcaatgcagtaaaggtcagacacattctatgtgaaaaacatggcaaaatcatggaagccatggaaaagttaaagtctgggatgagattcaatgaagtggccgcacagtatagtgaagataaagccaggcaagggggtgacttgggttggatgaccagagggtccatggtgggaccatttcaagaagcagcatttgccttgcctgtaagtgggatggataagcctgtgtttacagacccaccggttaagacaaaatttggatatcatattattatggtcgaaggaagaaaatacccaactttcttgtacaaagttggcattataagaaagcattgcttatcaatttgttgcaacgaacaggtcactatcagtcaaaataaaatcattatttgccatccagctgatatcccctatagtgagtcgtattacatggtcatagctgtttcctggcagctctggccc

SEQ ID NO: 54779 - DNA, 626 bp, Homo Sapiens
gagaagataaaatggtcaggttgttggggaaaaaaaagtgccaggctctctagagaaaaatgtgaagagatgctccaggccaatgagaagaattagacaagaaatacacagatgtgccagacttctgagaagcacctgccagcaacagcttccttctttgagcttagtccatccctcatgaaaaatgactgaccactgctgggcagcaggagggatgatgaccaactaattcccaaaccccagtctcattggtaccagccttggggaaccacctacacttgagccacaattggttttgaagtgcatttacaagtttctggcatcactaccactactgattaaacaagaataagagaacattttatcatcatctgctttattcacataaatgaagttgtgatgaataaatctgcttttatgcagacacaaggaattaagtggcttcgtcattgtccttctacctcaaagataatttattccaaaagctaagataaatggaagactcttgaacttgtgaactgatgtgaaatgcagaatctcttttgagtctttgctgtttggaagattgaaaaatattgttcagcatgggtgaccaccagaaagtaatcttaagccatctagatgtc

SEQ ID NO: 54780 - DNA, 501 bp, Homo Sapiens
tgcacggcgctccatctggcctgccgcaaggggaatgtggttctggcgcagctcctgatctggtacggggtggacgtcatggcccgagatgcccacgggaacacagcgctgacctacgcccggcaggcctccagccaggagtgcatcaacgtgcttctgcagtacggctgccccgacgagtgtgtgtagtatctgttttatttgactgcagtctccttggtgcaaaaacaaaatgggaaaaataaggataactcagaatttcaaaaggaaatcacaaattcagctaatattagcattttcagtacttttcgtaaactaagtaaatacacaaaatgttgatttttctgaccataagacgtattttatgtccttttgccaaggtggatttgttagtctcaggccctcctggccacattgcccaagtcacacaggcttctgtattatgtatttagataaaatgtgtgaaaacatatttgaaataaagttcataaatatgcattg

SEQ ID NO: 54781 - DNA, 810 bp, Homo Sapiens
agcgtctgagcagctgcattggtgctgtcacttttttaaggctttctgtccagacttcaacactggtttcttttcagagtttcgaaggattaatgacttcctcagcgcccttgctggcgggctgagggtgacagtcacgtccgtttcttctgtattagaaggctgcggtgattcaattagattgtcccactgctgagacctgtagggcagcttctaacatgcttttttcaaggggagaggagtagtgacaagtcgtgtgtcggaattggatttgagaacactctgaatgacccctggaggccgagggggcaggcttcgggcgtgaactgaactccagacccctctttgtgttgggcagtgtcatcttgcttacaaactgtaagacacatttttttgtgtgtttgtttttgttgttgttcttttgcagcactcacgcctctgacagtcttttgggaaagagtaacacccacatacagaatttgtcacatccagagtagcactgttccttaatactggcataatgcttccaggaagtttttcttttttatatttaaaatgttacttttctgtatgatgtgcatgcaagtttaccgtaacttttcttaaactttttagtgccgtttctagtatattcctgtaaatgtcagttactgaaaatgagtccaacgtaagtagtttagcttgtttattgcaatgctggctcaacacaacagaataaaatggtagcaaagtactctttgatgttctgggtaatcaatgcaccccttctcctggggcatttgttttgtttcatataaaaagcaaaaaaaa

SEQ ID NO: 54782 - DNA, 695 bp, Homo Sapiens
ctctagcgaggtgacagcgtagaaccagaattgaaatgtgcaaatgagtagtgaatgctacactcattttcaactctttaacatgaaactgttcaatcttaacacattgttactttaatatatgtataaagaagtattactgtttgtaaagctgctgtttgcttaaaaaaaaaaaacacccttgtcatgtattttctgtatgttgggccaacaggttagaacatcaactcatttaaaaatttttatctttttttgatttaaaaaaattctgtgaaataatttatttacagacatcttcctcctccctcatcccttccaacctttacatacatcacagaatcaaccaaactgtttgcctaatctgaaatctgaatcctaatgagaaaaatttaaattttgttggcacatcacaccttgaaagtatttgtattattttataatttaatttctaaatataccacataagtttataatttaatgtcttaattgtaatgctctaataaaaaactagcaaaattagtgtgagttataacatgaagggattttcatcttttgctgtatgaaggataattgttatatcacatttggggggtaataacagcttttttgcactatgtaaatactagtggggattcttctgtactaataaaatgattattgaaatgaaaaaaaaaaaaaaaactctccaccgtttg

SEQ ID NO: 54783 - DNA, 768 bp, Homo Sapiens
gggaaaagagcccagggacttaacgtgctgcctgttgtactctgtcccctcatgactttttagacacagggactaggacatcgaccaccctctgcccctcctgcagtcagaacccgagtagtgcaagaacggccacccggttttgccagcgttcagcgtctgcccatggacccataaggcacattagcgttgggggtctcttttcagcagcctcacagacattcccgtcctttctggttggtgttgactgtgtttcagcatcactctaccctcccatgtccttagcattgctgtgcgtgtttccaggcacttaggacacccttccccacgttgccatcttactgacagttcaaatgactctccttttttgttcgttagtaacaatcttcatttgacaccttaatacatttctgactgttcttaaaacagtggggatgcctatattttccttgagtttttgtgactgactttggctatatatacctttctggggttttgtttgttttttatttttattttgattaccgagggtatttggggtggggttgttttttgagatgtgtaattcttttatggagtttttaaaaagaattttccatattgttttttctaacttggcttccttaaaacgtttaagtatttttaaaaaatatgtaaatatttttgggacccagagggttgttgaatttaataggtaggaagatcaaaggctcaatttttatttcccggaaattttttttaaaaactggtttcccccgtaaaaaaaaa

SEQ ID NO: 54784 - DNA, 644 bp, Homo Sapiens
ccggaacatttaataaaatgaggggaaatggatttataaacttgttttttttctaggtgaccctgtttaataggctttcacagactggggaatgctcaagatgtgatgggcctggtggtacaggtgtgacatttgttaccacccatttctcccaccccaccctgcttttttgtttgtttgttttttcatcccccagcacactataatatagtgaactggaaaagtcccttccagaaacagcttggccagctttgtgaacctttgacatctgaaaacaaccaaggatccatctgggcttctcttccccagctttttgcctgatgccattttattgacagacaatggactttgaagtcagcctttgcctttgagaaagttcaagaactatggttggtcacgtctatctacaacctaatcctactctttggtagtctctgcagcagccacagccttagcagagctggggttcctgtcttctgcacacgattgactttcttgatgggtaattttttttaagattataccaacagtggatcagctgggttttggccaggaagttgtctttgtggactctgcctgcatggcttagtagtagaaggaaatttttttttggttttgttttttataattcagtttaatcaata

SEQ ID NO: 54785 - DNA, 714 bp, Homo Sapiens
gctgttccctaatacaaaacacggacatatttttactcgtagcactcaatttagtaacttctagatgctaccgttgacctgagttaaattcatttagtcgtgtacgtaaaaactctccttttagtgtgttattttcttggccttcccttttaaaggttaaagtttctaacctaagaattaagtacgcgttcaggaagctgttgtctaggccttccccttgtgaatctgggttcattccaatacggcaagtaagagttggaaactttgagaacacagactataaaggcagcagcccgaacactgtcagactctaattggcgaccctgggaaacagttgccctgctattctttaaagaaagacgtttattctgatgataaaaacagttagccagactgtttttaaagcacctggcgggaagcagaaggttggatccaagcccttgttcagatttggtgcctgataagacaggggtttctctttttgtgacctttattattcattatttcgttaactgttgtaaccagttagctgttgtgtttaagatagaaaggaacaagactaaaattgtaaatactttgtaaacatcagcatttgtacttgaatagtaggattttaaaggggcattgatagcatagcaagacaagaggcaacataaagtgaccttttgataagagcacagacgacgcgaacagaaagagcaacgcagaaagaat

SEQ ID NO: 54786 - DNA, 582 bp, Homo Sapiens
  misc_feature (22)..(22): n is a, c, g, or t
aaaaaattaaagagcgttcaanaataaattcttctggtgaaagtggtgatgaatcagatgaatttttgcaatctagaaaagggacagaaaaaaaatcagaaaaacaagccaggtcctaacatagaaagtgggaatgaagatgatgacgcctccttcaaaattaagacagtggcccaaaagaaggcagaaaagaaggagcgcgagagaaaaaagcgagatgaagaaaaagcgaaactgcggaagctgaaagaaaaagaagagttagaaacaggtaaaaaggatcagagtaaacaaaaggaatctcaaaggaaatttgaagaagaaactgtaaaatccaaagtgactgttgatactggagtaattcctgcctctgaagagaaagcagagactcccacagctgcagaagatgacaatgaaggagacaaaaagaagaaagataagaagaaaaagaaaggagaaaaggaagaaaaagagaaagagaagaaaaaaggacctagcaaagccactgttaaagctatgcaagaagctctggctaagcttaaagaggaagaagaaagacagaagagagaagaggaagaacgt

SEQ ID NO: 54787 - DNA, 724 bp, Homo Sapiens
aaggatacgacctgaaaataggactttctttggccccccgacgaggatcactaccagatcagaaagatctgagattaggatccatagatctgaattgggatctgaaacccgcttccagtagtaatcccatggatggcatggacaataggacagttgggggaagtatgagacaccctcctgaacagacaaatggtgtgcataccccacctcacgtggccagtgcccttgcaggggccgtctccccaggtgccctgcgtcggagtctggaagccatcaaagcgatgtcctccaaaggcccctcggcctctgcagcactaagtcctcctcttgggtcttctccaggctctcctgggagccagagtttgagcagtggagaaacagtgcccatccctcgcccagggcctgcccaaggagatggacattccttacctcccattgctcgccgcctgggccaccaccctccacagtccctaaatgttggcaaacccctataccagagtatgaactgcaagcccatgcagatgtacgtgctggacattaaagacaccaaggagaaggggcgggtcaaatggaaagtatttaatagcagttctgtggttggacctcctgaaaccagcctgcataccgtggtacaaggcaggggtgaactcatcatatttggaggactcatggacaagaaacagaatgtgaagtactatccaaaaacaaacgccttgtactttgt

SEQ ID NO: 54788 - DNA, 709 bp, Homo Sapiens
gaagcgcaaagaacgctctttggatgtgtcctgagccacacaaatgtggaaagctcatgaagctaggaaatcaccccatccgcagggtcagcgtccacccggactaccgtcaggatggagtcctacaattttagggggacatcgccctgctggagctggaaaatagtgtcaccctgggtcccaacctcctccccatctgcctccctgacaacgataccttctacgacctgggcttgatgggctatgtcagtggcttcggggtcatggaggagaagattgctcatgacctcaggtttgtccgtctgcccgtagctaatccacaggcctgtgagaactggctccggggaaagaataggatggatgtgttctctcaaaacatgttctgtgctggacacccatctctaaagcaggacgcctgccagggggatagtgggggcgtttttgcagtaagggacccgaacactgatcgctgggtggccacgggcatcgtgtcctggggcatcgggtgcagcaggggctatggcttctacaccaaagtgctcaactacgtggactggatcaagaaagagatggaggaggaggactgagcccagaattcactaggttcgaatccagagagcagtgtggaaaaaaaaaaacaaaaaacaactgaccagttgttgataaccactaagagtctctattaaaattactgatgcagaaaaaaaaa

SEQ ID NO: 54789 - DNA, 596 bp, Homo Sapiens
agcagaggcctggagagaggacacaaggagggtgcgtggtgccctcacccctgcccagagcgagggggcaaggactctgcctccagggcatctggggttttcccctccctcacacaacacactcccattctctttaggtttgcaccagtggtgtgagcagttggactcagtttggacaagggggaaagggggacttccctgggaaggtccagctaaaagtggcaacatttgcccccagaattgggggcctgggaacactggacctgctccttctcccctctccttccccgtttttgtgcttctggtttgtttctttaattaatttaacaagtgctgcagtttgccctcccattcccatctatcccccaagtcctttgcaatttcttccctgccctacataggggcggtgggtgtgggatcccttcactggccccctcgggaggcctgggttggactcagggtctcctccagctgggggctggaccgcagcacctatctgagcagttagagcgtctttcttttcagattgtgtacagtagattatttattttgttattttggaataaaatttattttatggcttaggaaaaaaaaaa

SEQ ID NO: 54790 - DNA, 680 bp, Homo Sapiens
cgccaagctctaatacgactcactatagggaaagctggtacgcctgcaggtaccggtccggaattcccgggtcgacccacgcgtccgagcaaaagtatttgctggaattattggtagatggcagtcccactcctacacctgctttgtcagatacagctgggttccctggctgactctgtaccttacttacactacttacttaatagaaacacaaacttggaaattgtgccagtggtccagctggagcacaacgtttggtgaatatgctgtttcctcagttcagagaggtagcaactaggtaaactccttataaaaagcaaatacctggatttacaaaagtgaaagtagttgttcacaaaagaattcgccatggaattctttcagttaccaagctctcctggtaatgtttgtggttatatcatttacacaaaacttttcaggaacttctgtgttgtttaagcaagatgtatctgtactgatgtctcagtgaatcagtctgtttattaagcacttatcagggcttccacacacttatttattttgccctagttaatcctgttgtttgctgccattggcatgaaatggccaactgtggctgttacagttctttcattcaattataacttgtaaaccagtgactcctaatctttttcaagttaagacaccttaccattgcttat

SEQ ID NO: 54791 - DNA, 646 bp, Homo Sapiens
ccacgcgtccgcggacgcgtggggtttttatgagacacatcttttatgccatgtatagatcctcccctgctatttttggtttatttttattgttataaatgctttctttctttgactcctcttctgcctgcctttggggataggtttttttgtttgtttatttgcttcctctgttttgttttaagcatcattttcttatgtgaggtggggaagggaaaggtatgagggaaagagagtctgagaattaaaatattttagtataagcaattggctgtgatgctcaaatccattgcatcctcttattgaatttgccaatttgtaatttttgcataataaagaaccaaaggtgtaatgttttgttgagaggtggtttagggattttggccctaaccaatacattgaatgtatgatgactatttgggaggacacatttatgtacccagaggcccccactaataagtggtactatggttacttccttgtgtacatttctcttaaaagtgatattatatctgtttgtatgagaaacccagtaaccaataaaatgaccgcatattcctgactaaacgtagtaaggaaaatgcacactttgtttttacttttccgtttcattctaaaggtagttaagatgaaatttatatgaaag

SEQ ID NO: 54792 - DNA, 620 bp, Homo Sapiens
ccccgcgtccgcgcagtgcccctccccccgacccagccccaaggttgatcccacgggaacaggcttccaccccagcacttgcgcacctgggagggagctgccatccgggctccattacctgttgctgaaggcgggtgctaggctggctgggtgtcaaggagcaggctccaggccaaggtcctggcccagccacggccattgcaagggctcagcctggcaggctttgtgggggacgccgccctctctgccgcaggctgggtgcacggccgggcaccacagtgggactcaggcccgggaaggtcatgttctcgaccagagctttgctcccagtccaggcgcctcattcggaggcctcttgactgggaccacagagatgttttctccgctctgacttgtggctcaggactactttctgggtcgtgctcctgccccactgtgcctgggcccataaacaacaggagccttttgttccgctgacctgcccatcccagcagacccacctccccgcctggtgccttccatggagggaaatgggacaggggccgtcatctcccctctgcctcctgctttgctgttgccgagcacgagtaaagcttttgttcttacttcaaaaaaaaaaa

SEQ ID NO: 54793 - DNA, 589 bp, Homo Sapiens
  misc_feature (500)..(500): n is a, c, g, or t
  misc_feature (509)..(509): n is a, c, g, or t
  misc_feature (551)..(551): n is a, c, g, or t
  misc_feature (554)..(558): n is a, c, g, or t
  misc_feature (561)..(563): n is a, c, g, or t
  misc_feature (565)..(567): n is a, c, g, or t
  misc_feature (569)..(571): n is a, c, g, or t
  misc_feature (573)..(576): n is a, c, g, or t
  misc_feature (578)..(581): n is a, c, g, or t
ggcacattagtaatctgatttgctgacagtcctgccctgcctgctcctcgttttcccacatgtcctgcgtccctcccccactggagtgatttcagtgaatcagacaaggaaggatgtgtaggatcactactgcattgcaataccctgttatcctcagcaacaaaacccacatttcatacatcctttgtgtactcaggataaagactgatgtttactctctgggcactgttgtaagataggttttgtcagagcataatcattgtctgcaaagtgtttggtgcgaggaagattattgctaattttgtgaaataaagagtctagccctctccttttaatgaacttaactctcgctggcatctgtagtatcattgggagcttaggcgcacatggaaatgagagcccggcgcatggattttaatgtttttctaacaactgtggagatttgagggaatgtgtggtgaatgtaaaatacctagtttacttgccagtctcttgtgtanattacagtnaaacaaagtaaatgaaatttaaacaaaaaataaatttgatcnccnnnnnaannnannnannnannnnannnnacatgtcg

SEQ ID NO: 54794 - DNA, 777 bp, Homo Sapiens
actgagtgcatagcacagctcagtcctgagcagcaggccgccattcaggagctcctgaactctgcgtgaagggccttaatgtcacccaccagaaaactaactccaaataaacgcttaccctttcctttaggtttctttgttttgtttttgagcaaaagagatcggtagtgttgtgtgtaggccattcttctggagagccacaagcaggaagagcagcgctgtgttgcagaatggagtttccatggatttctaccagaccactgaaggagttcctggaagccctgcggtagctagcactgaagactatttttctattggtataacccgcccacctgaaggggaaagggaaatcaaattaatttttctcgttagacataaggaaatttaaggaaaaacagctttaagaacagttactcagcgtagatgtgtgttcacacaaattgctctgcattcagtgttcattgtgaattgggagtgtgagtctttctgtagggtagaaagaagcctcctacccagcaaaccagtagacccaaaagttgaaaaaaactgatgacagacaacaagcatgaagatggcatatttgatgtcactttggttctttttcccagaaggcttatacagtgactcagtcgggaagctttccagcttccagcccttgaatgtgaagtgtcattggcatgtctggcagtagtctctcattcactcctcaataaacaacattgaatacaaaagaggcttgtgtaaaaactcagtactgtctggcttggattcatttca

SEQ ID NO: 54795 - DNA, 495 bp, Homo Sapiens
ctgtgaccactgcagttctctcatgcccacaggcactggcctgtgaccttcgcaggggtcccggcccctcccaccactctagcctttctcaggctgcaccaaagattccatcatcagggccaactgagagtgagggagtctcacccaccgcttaccccagccctcccctgggagcagagagagaaaccctcttcatggaccagactctgcacccggtgagtgaggacagtcccagctgagtcccatcgatgttgaatctcatgccactgcaagtgccattcaccactgcgtcctgggctttacgagaccatgcaagacgggggttagtgaggaaggaggatttggggtgggggtggggtgattgaatatttgtataaaaagcaaaaagaaaaaaaaaatgtttgtttactgattggggaggggcaatatttatttgttgtaaatagcaaatgctagacttgaatattatattaaaatcctgtttctactataaaa

SEQ ID NO: 54796 - DNA, 1181 bp, Homo Sapiens
  misc_feature (1037)..(1037): n is a, c, g, or t
  misc_feature (1181)..(1181): n is a, c, g, or t
cttcccctccagcctgggcaacagagcgagaccctgtctccaaaaaaaaaaaaaagcaatgtttatattataaaagagtgtcctaacagtccccgggctagagaggactaaggaaaacagagagagtgttacgcaggagcaagcctttcatttccttggtgggggaggggggcggttgccctggagagggccggggtcggggaggttggggggtgtcagccaaaacgtggaggtgtccctctgcacgcagccctcgcccggcgtggcgctgacactgtattcttatgttgtttgaaaatgctatttatattgtaaagaagcgggcgggtgcccctgctgcccttgtcccttgggggtcacacccatcccctggtgggctcctgggcggcctgcgcagatgggccacagaagggcaggccggagctgcacactctccccacgaaggtatctctgggtcttactctgtgcaaagacgcggcaaaacccagtgccctggtttttccccccccggagatgaggggatacgctggattttttgccctatgcgccctggcccctaggttcgtaatggaattaacgggccatggatagcctgcagcgaaaggcgacggagtcgttgcggggaggggggggggtcgctttgaagaagagtggcgtcggggggggcggcggcgttgtgcctcccccgggccggttggtgccgggccgaaccgcgctccgggtctaggcgggggccgcaagtcgcggcccgcggggggcgcgctgggcgcggcgcccgtgctccgccgggttcgccggacaccctgggacgcagaccgggcggggtgtaggggcaggtgtcggctggcggggcgacgcggttatcggggcgggcggggtggagagcagaggtgcttgctcgcccagcggcggtgggcgatcgcgcctggcggggcactgcgggggcgggacgggcagcttcactcgccctcggcggtcgcgacgagcaggtagcgctgggtgaagagacggacgtggccccgacaagggagggtccnacccgggggaggcggtgccccgcatatgagtcgcttgtgaggctggggggctgtttatgcaggcagagggacatcggcccctcctagcaacgcagtcggctccggtcaatggggcgctaaggcgtgggcgtggcgcgcacagtn

SEQ ID NO: 54797 - DNA, 402 bp, Homo Sapiens
gcgtccggttggggggtgtcagccaaaacgtggaggtgtccctctgcacgcagccctcgcccggcgtggcgctgacactgtattcttatgttgtttgaaaatgctatttatattgtaaagaagcgggcgggtgcccctgctgcccttgtcccttgggggtcacacccatcccctggtgggctcctgggcggcctgcgcagatgggccacagaagggcaggccggagctgcacactctccccacgaaggtatctctgtgtcttactctgtgcaaagacgcggcaaaacccagtgccctggtttttccccacccgagatgaaggatacgctgtattttttgcctaatgtccctgcctctaggttcataatgaattaaaggttcatgaacgctgcaaaaaaaaaa

SEQ ID NO: 54798 - DNA, 786 bp, Homo Sapiens
tcaaagaggagagttcgttgtctccctggatgatggttggatccgttttgtagctgcttcccatcaggtggctgaactggtaaaggagcttcgttgtgaacttgatcagcttctccaggataaaattaaaaacccaagcattgatctgtgtacgtgtcctcgaggatcccggatcatcagcacaattgtgaaacttgtcaccacacaataaaaagcagttttagagagttcttgctactcacctgcttctagctcacctgggaaataacagcagaacctctacctcgaactaaagacctattggggctggccctggtggaggagcccagggcatgaagcccaaggcagctgaggcagtgtatatacccttagggccatttctaacaaagccttggccactcccagcacaatttggagtgtcaagggtgagagcctaaaacccagcttgcctgtttttgtctctgttattgttctggagtgaattaagttcacctgataactcaaaagtgaatgtataatacaattctgttttaatctgtgtattctttttctcctactttttactggggtgagaggggcatgaagagaaatacgccttttttttttttcttttcctgttgccaaggctcgactgagagaagtwagaacagagaaggggaaaaaaaacccaaaattatgtkaacaagcaaaattaaaatttcattttaggctattggctactgagtaaacttgacttgtgaggggtttttatttttactcattaaaagtmaacttaaaaaaattgaa

SEQ ID NO: 54799 - DNA, 686 bp, Homo Sapiens
ctgggaggagggtggaaggcaacctcggggaaactgggaaaggcggcctggacttcgggaacaccgcgtacctgcgggggcacagccccacccgagcgaacgggctccaaaggggaggtcccgcggtgcgcaccgcgcagagctcagggggtggtgcgcccggcccttctgcggcgcacagcccagcccaggaacgcgggcggtgcggactcagcgggccgggtgcaggcgcggagctgggcctctgcgcccggcccgacctccgtctataaatagagcagccagttgcagggctccattctgctttccaactgcctgactgcttgttcgtctcactggtgtgagctccagcatcccctttgctcgaaatggaccccaactgctcttgcgccactggtggctcctgcacgtgcgccggctcctgcaagtgcaaagagtgcaaatgcacctcctgcaagaagagctgctgttcctgctgccccgtgggctgtgccaagtgtgcccagggctgcgtctgcaaaggggcatcggacgaagtgcagctgctgtgcctgatgtgggaacagctcttctcccagatgtaaatagaacaactggacaactggattttcttacaaatacaacactgagccatttgctgcattctttgatactagatatgtgactgacaataaaaacaatttcga

SEQ ID NO: 54800 - DNA, 636 bp, Homo Sapiens
ggaaagcggaaggatgtagagctgttcatgggaattccattcaccacacatgccagctggatgcaaagaaatttgccagtcactggaagttactgtggctactataaaactatgtaccactctcagaatattcttaggctttttttttttcaagttatagatttgcttaaagtgaggttttttggtgtgtgcttttttgttgtcttttgacccttccagtttccagacaaacttgtcttaaaaagtgcatcattggattgaccatggtttttcatgaaattttatgagatttctgccttaacaaaatgcatatattccttatcttaaagcctgtcattacttaggatgcacttataggatctgaaaagctcactttaaactcatactacattcgttacgagtattttacgttaacataattgaaaagtacaaggtccaagctggctttcaaattatgtctaaacagaaatgggacaaatagacttgaaaatagaagggatttattccacccctgcaagggtagagtcaggtgagagtcccttggtgagtcatttgtacatcagtgtcatttcttcttaacctctgaagaagatgggcatcagaaataaagacaaagcactatcaaaaaaaaaaaaa

SEQ ID NO: 54801 - DNA, 741 bp, Homo Sapiens
tgactaagccagggtagggagggacctcctgcctactccagcccctaccctgcacccacatcccataccctcttctccctacccatcccattccccacaggccctacattaacaaggttaagctcaacccctttcccccagcacctcagaatgtgccctccctctccccctcataaccccacctaacataaggacaagtcaatttgtcagtagcttcttctggcttgaaaccccctccctggattttatagcccacttaccatgcataacagacaagtcccatattttgtcagtagatgcctttttttttccggcttaagccttaagtgccaaatcacaagagaaaaagcagtaacagtttacagaagcaacttagtgccttgtaatctaactttgtcactgtgactacattacctcttcagcgccagagggcacccgtgggcctcccggagcctctgcccatggcggggtggagacccggaaccagcagccccctccactggcgacacaactgcaccttccctcatttcagtctcccgcacacttattcctcctcccctcttcccggtggcacctctccacctgtacccgcccccgcccccccaccccggccccttggaagagttgttgccagaccagggttttgggggaaacctgtcttgacattcaaaacctttttcttcccgatctgaacccctgttgactaatcttgcctgggtttgtgtaggtctgcaggaagga

SEQ ID NO: 54802 - DNA, 612 bp, Homo Sapiens
  misc_feature (589)..(589): n is a, c, g, or t
gatgttgtgagcttgtcctactccatacgtgtttatcctgctatgcagttttacattgtgtgttcacatctattccaaggagccttgctagaaacaacactggcggttcctgcaggccaggcaggcattggcccatgctgtgtcccataggagccaatgaaagaacgtagcttggtctgctagccagccgtggggtggcgcaggccaggcagcctctgcaccagagtccagcacctgcccattccccagtcacacaatcatactcttctttcatagagattttattaccacctagaccaccctagttttcctctctgttagtgtcctgagctcttttgcaacaaaatgtaggtacagaccaatccctgtcccttccccaatcaggagctccacaccatgagttgtttggttttccagaagctgccagtgggttcccgtgaattgcgttaagatatcgatgattttttttattgtttttcttcttgtttttttaaataatatatttaaaggcagtatcttttgtactgtgaatttgcagtagaagatgcagaatgcactttttttttacttctgttggtgtgtattgtanatagtgtgtgtgcttcttgtgat

SEQ ID NO: 54803 - DNA, 336 bp, Homo Sapiens
cgtccggtttggtcattttttcatgtttattagccatctgtattttttaatttcttctttatgtccaattttgtgggtgggaggaggatttagtctcttcctgatttcgaagagctcatttactatttcgggaaataagatttggattgtcaaccattatagctattttttacacacttttcaactttgtttttgttataagaatgtgtatgattgttacatgtccaagtataaccatgttcgcttttatggcttctgagtttcatgtcatttttggaaagatatatatattgagtccataaaacccttcacctatgttaaattctaaaaaaaaaa

SEQ ID NO: 54804 - DNA, 821 bp, Homo Sapiens
  misc_feature (757)..(757): n is a, c, g, or t
  misc_feature (817)..(817): n is a, c, g, or t
caggagcctcagtagaggatataatattacacaagatgctcaaaatggtggaattgctcagtgctcccataaatatacatttataattttcatttgccacatggtaaactgaaaaatacagactatattaaaaagaaactgcatgattttttttcaaaaattcaaagcatatttaaataatatataaattaaatgccctcctctcttccaattctgtccctatagttttcctctattaagtgaactacatgcattcttttagtggatagatgcacacaaacacacaagccattatggggaaggatccacgtgtgtggccatattgtaacacatttttctgcaaatcacctctttcatttaacagcccttattcaatggcctttttctttttcagtagtacatacacatctgtgtcatttgttgaatgacgacatgaatgttttgtagataaaatataattaaatgttttaagcatttctcactcatagatatttatgttagcaccaaatttctgtgcaatgaacctccctatatatcagtaattttgcatttgtctataatatcataataaattacttatcagttgaattactgggattaagtatgtgcacactttatatttatattttgaaaattattgcaagattgccttcaaaaatgtggttaacaactttatcttcaaatggcaatgaatgagattgccagctttcctacagcctcacagacaatggattttataaatatttaacatttttgncaatggggatcacccaaactattggcttaaattggatctcttttggtttttgagtttggncatt

SEQ ID NO: 54805 - DNA, 657 bp, Homo Sapiens
  misc_feature (219)..(219): n is a, c, g, or t
  misc_feature (630)..(630): n is a, c, g, or t
gcacgaggtggacacagactattctgaggcacagagcggggacttaagatgggaaagagaaagcatcggagccattcattcggagaaaacgttttgatcaaaatggagacttttgtagtcgtttcaaaagagcacctgagtcatgtgtattcccggccttctttataaatgacccggtcaagttggtttcaaagttcgacaggcttgtctgtttactanctgcgtggccttggacgggtggctgacatctgtaaagaatcctcctgtgatgaaactgaggaatcgggtggccgggcaagctgggaagagcaaagccagagctgcgctgcctcaatacccacaaaagaccattcccagtatacataagcacaggatgtttttctcaagagggatgtatttatcacttggacatctgtttataatataaacagacatgtgactgggaacatcttgctgccaaaagaatcctaggcagtggctcattgtatgtgaggttgaaccacgtgaaattgccaatattaggctggcttttatctacaaagaaggagtttcatggggttcagcctaacagttatggaaactacagtccttataaaccattggcatggtaataacagatcttaagtatanaattttgtaattgggcctttactctct

SEQ ID NO: 54806 - DNA, 555 bp, Homo Sapiens
tgtccctggtgagaagcaaggctagctctgccttccacatgcttctcaggatgccaagaggcctaggaacccagaaacccccttggaggagctgtgtatgcgggggtgccaggaagggcatagctcctgcccccaggcctaggcatgctgcttgctcggccatccccacttcctcctctaccccaacacatgcaggctaggccttgccctggaacgtggaggccctgcccggggctggggcctagtccagcagccaccaaagtctggcagactttctgcatttgagaaacatgacaaagggccccgcagcccttctgcacccagcacagcctgcccagcccagccctgcccccgggcactgcacagcctgtctgggggccagaccaccccattgtccatccttgttgtccgtgagtccttggcctccaccaagcacgtgtggccattgtgtgcctgccttagtgactccgtggttttgtgaggagcagagtgtgtatgatttttgcctcagaaactatactcttctgtgtaacagaccaataaacaatatttgtc

SEQ ID NO: 54807 - DNA, 783 bp, Homo Sapiens
gaaactccatcaggaagtgctcccctgggcagaggcgcccactgggtgctgtgggctcaggagggggcggggcaggagctggtgccaaccgggaaccagagccccacagccatacagcccattggtgacaaggtcctgagaacacagtggccaggtgtccccaggctcctggcccctccgacgacctcaactctgcccagcccggtccctggccatcagcgacgctgtccgccccccgtcagatcccatgtgtgccatgtttatcatcagtgttttgtatttttgtactgagtatcggagcactttacagaagctgactgtacattcctgttctgttgtgaagagaacattcccagaccctggcaccctcctgagccggcgtgtgccggtccagccctccaagatgccacaattccttggatgggggagaagttcaaggaatttctgctcggccacgcggtgggaaccccgcgtccccgccatgtggcagaggggtctcagtcgtgctaggcatcgggcagcagcgccgacagcccttccctcgccagtgcccctcggcactcctgggttggagcccgattttatttgtaaagttgacagtcgagcaaatgttcctattttcgtgggatctgccacgtctttgtcagttgtggtcatgatcttagtcacctgctaattatttttaccatgattacaacatttcctcactgcgggatatttctgacccggtttaaaacttaagactgattctagcataaacgtgtcggaggaaaaaaaaaaagg

SEQ ID NO: 54808 - DNA, 638 bp, Homo Sapiens
  misc_feature (636)..(636): n is a, c, g, or t
atggcgccgcccccagccccgctcctggcgccgaggcccggggagacccggcctggttgcaggaagcccgggactgtgagcttcgcggacgtggccgtgtacttctccccggaggagtggggctgtctgcggcccgcgcagagggctctgtaccgggacgtgatgcaggagacctacggccacctgggcgcgctcggattcccaggccccaaaccagccctcatctcttggatggaacaggagagtgaggcttggagccccgccgcccaggatcctgagaagggggaaagactgggaggagctcggagaggagatgtcccaaacaggaaggaagaggaaccggaggaagtcccaagagccaaagggcctagaaaggctcctgtgaaggagagtcctgaagtgctggtggaacgcaaccctgacccagctattagcgtggccccggcacgggcacagccacccaaaaatgctgcctgggacccgaccacaggagcacagcccccggcacccatacccagcatggatgctcaggccggccagcggcgccacgtgtgcacggactgcggccgccgcttcacctacccctcactgctggtcagccacaggcgcatgcactcgggggagcggcctttcccnct

SEQ ID NO: 54809 - DNA, 778 bp, Homo Sapiens
atgtaacgtagcttgccccgtcaaaaattcaattaaaattcatggccagcaatcctgttccccctcagcatcctgatttaattttcctgttgcttttgcttgcttctccatttaatagttactgaactttatgcatgttgatctatattgattttcactgcagttgaatgaacaaattatttcagtgtgacagccatgactcaagttccaattagtctgaaaagggtactttggaattgtcccatattaatcagagatggcaaaagaaaaagttctcatattaccaggttgattttgtgtctcatttcaaattttaatttaaaattatggttttcatttttgtttaccttaaagtgatgcttaaaagtggcatgtaattaggacacttaggtttgttgaaagcattttcgacatttgtataaaagaatttgtgataaatatatccaggtgctcaccaaagaaacatgtattaacaacttaaattagatttttctaactgatagttttcactcatttataatcagtaggagagactgtctagatgttggggcagctctatgatttaagtctgtaacatgttataactgaatttagtaccctagttttgttaagctattaggattttctaatagaacttactccccctgcctccccagccttatgtttcttttaatgacttctggatcctgagctccctttgcagtctgaaaaaggtattgcagtcagaactgtgtactgatgataaaagcctctggtagcaataaaaagttgtccttaa

SEQ ID NO: 54810 - DNA, 586 bp, Homo Sapiens
  misc_feature (543)..(543): n is a, c, g, or t
  misc_feature (552)..(577): n is a, c, g, or t
  misc_feature (579)..(579): n is a, c, g, or t
ttttaagaaacgtcaatgtatatccttttataactctaccactttggggcaagctattccagcactggttttgaatgctgtatgcaaccagtctgaataccacatacgctgcactgttcttagagggtttccatacttaccaccgatctacaagggttgatccctgtttttaccatcaatcatcaccctgtggtgcaacacttgaaagacccggctagaggcactatggacttcaggatccactagacagttttcagtttgcttggaggtagctgggtaatcaaaaatgtttagtcattgattcaatgtgaacgattacggtctttatgaccaagagtctgaaaatctttttgttatgctgtttagtattcgtttgatattgttacttttcacctgttgagcccaaattcaggattggttcagtggcagcaatgaagttgccatttaaatttgttcatagcctacatcaccaaggtctctgtgtcgaacctgtggccactctatatgcactttgtttactcttttatacaataaatatactanagacttttnnnnnnnnnnnnnnnnnnnnnnnnnnanaaaaaag

SEQ ID NO: 54811 - DNA, 548 bp, Homo Sapiens
ctatgctaggtgtctttaaaaaattaaggtgacaaagcacatgggactgtgtagagcttggttatcggccggcccggtggcttggcaggcagtgctgtgcgctgctcatggagaagacctgggcttagcaatctccttagttcttgctacacaggatggtgactggaactaaggctacacagagggtcgcacttggactctgagggttgggtgtggaagggggaaaaggggatggagacctgctccccagctcttcctgtcagccggtttacatgggaacagggttaacatctgtgttaggggaggtcaccttaccctttttcataggggaagagtgtcacactcctggctatctcagggggaatggggaaaagaatctttcaagggcaaagaactcgtgggaggatgtctgttgtatgtaatactcacaatggcttttggttagtgttgaaggtgggaagagcatttgtaggtccagaagagtgaaagagagggaggggtgcagcaacatgtgcacaggcacgcacatgtgtgcacgcacacataca

SEQ ID NO: 54812 - DNA, 929 bp, Homo Sapiens
  misc_feature (627)..(627): n is a, c, g, or t
gctggtattcccactagagtaattaatcataaactgtataaaaatcgtgtagaatttgacagtgcaattgacctagtccttgaagagttctccatagacatagtctgtcttgcaggattcatgagaattctttctggcccctttgtccaaaagtggaatggaaaaatgctcaatatccacccatccttgctcccttcttttaagggttcaaatgcccatgagcaagccctggaaaccggagtcacagttactgggtgcactgtacactttgtagctgaagatgtggatgctggacagattattttgcaagaagctgttcccgtgaagaggggtgatactgtcgcaactctttctgaaagagtaaaattagcagaacataaaatatttcctgcagcccttcagctggtggccagtggaactgtacagcttggagaaaatggcaagatctgttgggttaaagaggaatgaagccttttaattcagaaatggggccagtttagaaagaattatttgctgtttgcatggtggttttttatcatggacttggcccaaaagaaaaactgctaaaagacaaaaaagacctcacccttacttcatctatttttttaataaatagagactcactanaaaaaaagcagcgccccctctagaagtttctgaggaacaggtcgcccggctcatggagatgggattttccgaaggtgatgctttggaagccctgagagctttcaacaatgaccctcatgtcgccaccaacttcctgctgcagcactgatagtcccaggccaacactgggaacggaccggcagccgaatgggacagtgcggggtccccaccatcagaacagcccgggggacgaacatcccctggtggctgaatgtcctgggggaaaaaaggaaaggtttcaacgggcaccccgggccctaaac

SEQ ID NO: 54813 - DNA, 912 bp, Homo Sapiens
  misc_feature (842)..(842): n is a, c, g, or t
  misc_feature (845)..(884): n is a, c, g, or t
tactagagaaaaactttaaaaatgtaaaacatggagcagattttttacttgttacccatgtcttattgtgcatcagataatttatatgggagtgaaaccctacaaatgttaagaatgtggcataacctttaactattttcaagccttacacaatagcagagaatataaactgaaaaaatccatacaaatattaaaaatgtggcaaattattttaaactgtgctcaacccttactcaagataatccatactagagaaacactatagatgtaaaaatgtgaaaagttttattcaaaatatcaaacttatgagtcacctaggggttcatagaaaaaggaagtttgcagatgcaataaatgtgaggaagtatttaataaaaaatgaagtctaaatgtgtcagagaatttatgtgagaaaggactaaagcacagacactttcagcctttatactaaataagagtattttttgtacagaataatctaaaggcaaaataattagataatttatttgcttatatgttttaaagtagcaagaacattgatgttttgacaggtatatttcatagatacttcatttgtatttacagtatttgaggtttttggaaagcaaatattatttatataattcagctttcaaatctgttgctgcttttccttaatccgtggtgttcatgtgaaaaatatgtgttctgtttttttttctgcatcagaacaatgtgaggtcattctacgttaatatcattaatatcagcattttttcatgggaagtttaatgccaaatgtaaaacacatgaaaatttttaaaaatatgggctcttgtgtttgaataaagtagtaatgcacngtnnnnnnnnnnnnnnnnnnnnnnnnnnnnnnnnnnnnnnnnaaaagggcgggccgctctagaggaatcc

SEQ ID NO: 54814 - DNA, 650 bp, Homo Sapiens
agttttgagtaatactttgttcatattaccccccttttgttttttgtttctggcccctctaccaatagggcagtagcctcctgccctggatgggtataaggtgggcttggtccaacaggttcccagagggtacatactcctttctggggagagaatgctccctaccatatagttgacagtggttaggaactctccctttccctacctaccttccttttaatagcagaattcctatttttcccttgattatgtgtattgatcaccctgcaatcctattatgtatctgagtgtgtgtgtgtgtgtatgtgtgtgttatgggggaaggggggggttctttaaaatttctgtggtttgtggctttttcttccatacattagttcccaccatcgcatgcccagggaccactgcctggcattatcgcatgctgggatcatcgggggagggtagtgaagctcaccactgtcctttgttttggagatttttatttttgcataagtagtccatcctatacagatagctgattaactgtattcccctttcccctatggctgctggtgtaaataaactgcatctccccattgggaaacagtaataaaattttaagccctggaatgactggaggatcccaaaaacaaaaaagaatgcaaaag

SEQ ID NO: 54815 - DNA, 1054 bp, Homo Sapiens
tgctagacatgccataggagtggcgtgcacatctctctctcttccagcaggaggagcccgtgagcacgcacagctgccctgtctgctcacccgaagcaccgggctcacctggacctcccaggaaagggagaagagcctcagaaactgctctgtgtttagaaggaatatttttaagagtccagctttttcatttccacaatttcctatatccagatttgttttgacaatgtagtttggaagaactaagattctaatctctgaagaaccttatagggccttctaaaacataagagtttcctttgttgcttcaaatatttgaacattatgttaaagatcaagtattaattttagttgtactctagaaagctaaagtgccacattcggggctatttttatgattcagcaatcttttctaaattgtgtagcatgtgtatgagactatttatacccaaggatatgaaggaacataagtgactacaaggctctaataagccacggtggcaggaggttcaagcggttctgttcactaaatttttctcctgtaagctttgaatggaaacttctgtatcacatgatgtgtttcacttatgctgttgtgtatatacctaatatttctatttttgattttattttaatacacctcgtccaataacatctcaagctttttatttgcatttacattttcagctgtggtcagtgtaaaaattggtcatcagctgggggcggggtggttagaagtgattcaacagagctacatgctttaaacttgcccaagttctacctccttcctttgaacatttcagattggagaaccaaggagttgattgcctgaacacctgaacatccgtttatgggggccagatagaatttgttttcaaataggcttaamaggcatcattaaaatttcattctgtgtgttttgtttaggcttgaggggcttagaagatggggrwaaaaattcyacttttttccwaaatttaactttgttcccatgkgattttttaaatrkccytccaaaaaamtccmaaattattggtcccagtgccmggtcaga

SEQ ID NO: 54816 - DNA, 547 bp, Homo Sapiens
ctaaacgtcaggcctggacttaaaagattttttaaaacctccataagtagtccaggggcggtggctcacgcctgtaatcccaaaatgttcagattacaggcatgaggcagcatgccaatcctgtttttgcattttagtaacacaaattgtaatgttaactttttaaattatgaaagcatctaaaatataaaattatttgtaaccccactgtccttttgggcttctataaatgaatatacatctaaaatgtgggggtttagcttaattgattgttttccatagaaactaggttttatgggaagatggttggatagacttgtttcacttaaaggtctgatttgtgtaggacaaacccacatatgtaatcgtgccagtctgttctctgcatgacataattttccagcaatagctgtgtggtttttgtaatcctatcatctagtcagttcaagatcttgcaacactgtgtgattctttgctccgtagttcagtcttgttgaacatgacacaggtgtgtactttcctgttcttgcatctagtttcattctaa

SEQ ID NO: 54817 - DNA, 775 bp, Homo Sapiens
  misc_feature (654)..(654): n is a, c, g, or t
ggggagcctctcaagattttttttgtcagaggctccaaatagaaaataagaaaaggttttcttcattcatggctagagctagatttaactcagtttctaggcacctcagaccaatcatcaactaccattctattccatgtttgcacctgtgcattttctgtttgcccccattcactttgtcaggaaaccttggcctctgctaaggtgtatttggtccttgagaagtgggagcaccctacagggacactatcactcatgctggtggcattgtttacagctagaaagctgcactggtgctaatgccccttggggaaatggggctgtgaggaggaggattataacttaggcctagcctcttttaacagcctctgaaatttatcttttcttctatggggtctataaatgtatcttataataaaaaggaaggacaggaggaagacaggcaaatgtacttctcacccagtcttctacacagatggaatctctttggggctaagagaaaggttttattctatattgcttacctgatctcatgttaggcctaagaggctttctccaggaggattagcttggagttctctatactcaggtacctcttttcaggttttctaaccctgacacggactgtgcatactttcccctcatccatgctgngcctgggttaatttaatttttccctggctaaaaatcctggcctgaaattatgtatggaaaaattaattctaaggtttttttttaattaaaaaattaatttttctcgaacatccgcaaaaaa

SEQ ID NO: 54818 - DNA, 518 bp, Homo Sapiens
cacgagggcctcttgcaggtcttacttcagctcttgcctgtgacccacacagcttctgggctctgcctctgctctaagaagtgctgtgggggtagagaaccaggaaggacatgctgttgggaatgtacacctgggcagaggtggccctgttaagatgtgactgtagccacagccagggatgggatccctgggtctctggaatctgaaacctcaacaaataccagtcttgacccctagcagcagagataagaataaaggggttggtttgctattaagtcagatgggggctctctccttgtcatgctgtccctgtgggtaacagacagggattgaccatcttactgttgtacaggtagctggtggtgttggattatcccattgaagctgggacagctgttcctttctcatagtgataacttgggtctgttgtcctctaaggaacgtgaaacatacacttcttaagctgaaccacgtaaacttgaaattctgcgcactgggagaaatgtgtcctgtgtttc

SEQ ID NO: 54819 - DNA, 782 bp, Homo Sapiens
aacaaatgacagtaacccttccccggaaagaaatagaacaatcatggagcctaggagcagagagatgaggaggagttcattgcttcccagcttgtgttatatggctacagcaagtcttcagctgctgcaatgaggaaatgggcatctggaagacaaacagcaactctcagcttgcttcaagaaccagcagataagagatggttaagctgttcttcaccctttcagatgtgacctcttttggactaagcagcaatctgttctcttgctcaaataataaagtgactgaatcagggaggaacaaggttcttgttaaattatttgattgtgtagttgaagtaattataatttatatcaaaacgtttgtcaaagaaacgatgtcaaatatacacttcttgatctcccttctgtttgcggggatcttactatttgatgggtcactgtccccattcttactgatacttttgtcagatatcaccctgtccttaaatcatgatcacttaaatcagggttcagcaaactttttctgtaaagggccagacgggaacatatttcgggctttgcaggccatgcggcctctgtcacatctactcaactctgctgttgacatgcaaaagcagcaatagacaatatgcgtgtaaatgagtgtggctgtaatccaagaaaactttatttacaaaagcaggtggagggctgggtttggactgcaggtggtagcttgcaatcagtgactctaatcgtgatacacgttgataaattacaaataaatgtgtcagaagtataaa

SEQ ID NO: 54820 - DNA, 1059 bp, Homo Sapiens
caagcccctcttttcagagtgggcagagggttgcctatggtgggcactaggaatgaggtcccctgcctcgatgcgggtcctaggagaaaaagtcctacttttctgggtccccaggtgcagcacctcccggagactgtttctcccatggcctcctgagtgatgggccctgcctccctgtgcctcatcctcaggctggttggagcagagggtgggcaggagccccagcacagactggggggtgctcacagcagggccaccttgatgcaggctggaatgttatccctggggtgtgcttggaccccacctgctttctttctctcctgcccctcccctactctcactgtaatttatggaccctgcccgcctgcgtgttgtgtgtatgtcctgtgccttttctcactattgtttgggtgtgggagggggtggtttttcactgaaaaggggggtacacctatagctttcttgatgttcaatcaatcagtcactgtgtcccagacatattcaataaacacagattggctacctacgccaaatatatccatcatagaacctacacacctatatacatcaaatcaatattcactcctacacataagtgagggggctcgcccgccctcaaagatcattcccgcgtgcgggccacatttttccggcgcttcccgagtttttttacacaacgagggccccctcatagttgtgcccagcgctacttctccacacgtcggcctcgtgggccctcgtgtcattagacgagcgcgcgccatgcgtgcacaaccgtggtccaccgagcggcgcttctgtgttgagtcagcgcgccacctcactcacccgtcgtgcgtcggatccaccacttgtgcgttggcgcacacagtgcgtaccctcggcagctgagttgttccacgcgcccctcgcgagcgctgcactgtaacaactcgcacaaagcgtcagatagacggcggagagcaacaccctcgaacacttcgcagtcagtcctacgtcgaaacatgctgcgcaccacggcgctttcctatgttaacgagaagagttctttaccccggg

SEQ ID NO: 54821 - DNA, 869 bp, Homo Sapiens
aggacatcagtgaagcagcagtgaaaccaggggctctgcaggtcacttgggacggacgccaccagacttgtctccaaaaatcaccacctttaatactccccggcctgcacacacccacagtctcactgggctccaccctcacttactgcccgccgtgatggccttgaggctgcctgcccgcgccaggatgtttggcacaaagagcagccccgaagcccgctcaatgctctcgatgggcaccaggaagcgctccagtgggatggcctcatccacaggtgcgttgggcatcacgtaggtgcggagctcaatttgcccacctgctgcctccaggatcagcaccttgaagaagtgtgtgggcactgccacgtggttcttgccgatgacctggtactttacgtaggatttcccatcagcctctgtcctgtgggcagacccaggcacacgtgggcagggggcctggatgaacccaaagccacctcttccaggcagccttccctgatctgtcctctaacttctgtcaacctgcaggaccacgccctcactgtgagacttctgtagcctgcctggctcctccttgaggctggaactctctccagggtggttaactctttccctctgttttccttatgcccaacactgggtcaggcagagtgggcgacaataaacgctgctaggagaatcgagccttctgaatattcacattcgtctgaggggagacttaacgactgtccatctctccccacagaggtgagcaacaagtgggcaaagaccatgacaggtgacatcccagcaccagcacaggtgccaggaacaccgggacgggggctcccccctcagccagagtcttcctccccttccaaccagggccc

SEQ ID NO: 54822 - DNA, 633 bp, Homo Sapiens
  misc_feature (23)..(23): n is a, c, g, or t
tcatgtgctttgaagaagctttnagagccaatgtgtcttccacgggtctcttttttgctacaagtaaatcagccccatgtgttctcttaaactgagaattgcacctgggcaattcctgttttctaaggtggtctctgctgctatttaacaacccagagtaggcctctgtgaggcttcagtggcctcagaaaccagagggtccagatagggggcctgcttgggccctctgctgccaactgctcaaacctgctttagctccagccacttgtggcaaacaacctcgtttccttacaaattccagcatgtgactttggtgccgttacttgtgaaaaatctattctgttgtctttgatgtgtccaagaaaattcgtgtagtttacgtaaaaatatctgactcacaagaaagccaactgtatgtcttgtgatgggacagttcataatgtagttgctagaccactttacaaattgttcttgtcaccagatgtgttcagacattgctgtgcaattgttggggagggtagggggaaaggcgagaggagatacttattggtctttttgtttaataccttccccaagaggggacagtctggccaacttgctccagtaatgcaataaagacattgcaaaaaaaaa

SEQ ID NO: 54823 - DNA, 632 bp, Homo Sapiens
tcccgacccacgcgtccgcggacgcgtgggtgtcgatggtctgggagaaatgtgtggcctctgggaagatggacgagaatgagttcgtcgcggtgaccagtacaaatgctgccaaaatcttcaatttttacccaaggaaggggcgagtggctgtgggctctgacgctgacctggtcatatggaaccccaaggccaccaagatcatctctgccaagacccacaatctgaacgtggagtacaacatcttcgagggagtggagtgccggggagcgcctgccgtggtcataagtcagggccgagtggcgctggaggacgggaagatgtttgtcaccccgggggcgggccgcttcgtccctcggaaaacattcccggactttgtctacaagaggatcaaagctcgcaacaggctggcggagatccacggtgtgccccgtgggctgtatgacgggcccgtccacgaggtgatggtgcctgccaagccagggagtggcgctccggcccgcgcgtcctgcccaggcaagatctccgtgcctcctgtgcgcaacctacatcagtcggggttcagcctatctgggtctcaggctgatgaccacatcgcccgacgcacagcacagaagatcatggcaccacct

SEQ ID NO: 54824 - DNA, 648 bp, Homo Sapiens
cccacgcgtccgctaaaataaaagaaatgattgacttgagggtctctgtttggtaagaatacatcattagcttaaataagcagcagaaggttagttttaattatgtagcttctgttaatattaagtgttttttgtctgttttacctcaatttgaacagataagtttgcctgcatgctggacatgcctcagaaccatgaatagcccgtactagatcttgggaacatggatcttagagtcactttggaataagttcttatataaatacccccagccttttgagaacggggcttgttaaaggacgcgtatgtagggcccgtacctactggcagttgggttcagggaaatgggattgacttggccttcaggctcctttggtcataattttaaaatatgggagtagaaaacaacaaagaatggaatggactcttaaaacaatgaaagagcatttatcgtttgtcccttgaatgtagaatttgtttttgatttcataattctgctggtaaatgtgacagttaaaatggtgcattatgtatatatattataatttagaaataccattttataattttactattccagggtgacataatgcatttaaatttgggatttgggtggagtattatgtttaactggagttgtcaagtatg

SEQ ID NO: 54825 - DNA, 833 bp, Homo Sapiens
tctatctctgcataaccacgttccaacacagcagtagtggcctacagtctgtgtcatctttgggtcacagcagtgccacttctgcatctttgccttttatgccatttgtgatgggtggtgcaccatcatcccctcatgtagactccagcaccatgcttcatcaccaccaccaccacccccacccccaccatcaccaccatcaccatccaggcttgagagcccctggctacccctcttcaccagtgactaccgcctctggtactaccttgcggttgccaccactgcaacctgaggaggatgacgatgaggatgaagaagatgatgatgacttatctcagggctatgatagctcagaaagggacttctcactcattgatgatcctatgatgccagctaactcagactccagtgaagatgctgatgactgaagccccagcatgggccccattgcttgggcggctgctgtattttcatttactctggcccttggactatggaaacgtgggaggggcaggggagatgtggggaagtccaggactccaggaggtgaaaaggaaaaaaaaaaaaaaaatgtacctgattgctcccaattatgagaggattgggtgggcaggggaactcctaaaatatacatgaccactttctcatttctggggaaggaaaggagactagagcagctggtgtgctcacccctccctagtcaccctctttaaccccagacatgtagcgctggccctacctcttggcaaacctgttcctgcccaactgtgtaacagcgggaggtcaggactgttccctttttcccctgggtttataaattaagttatcccttt

SEQ ID NO: 54826 - DNA, 561 bp, Homo Sapiens
ggaaaatactttctttatattattaacatctcccaagattactttttaagttcattattatgttacattcaaagttgattgtaaattattctaaataagtaaatataaggaggcaagaataaacaaagactttattaaagaagagtgcgtgcattgtagatttaggtatcttttaaagtagatactattcaggatggctctatgaagaggaggaggtccagatttggctcctgaaaaaggaaagaagagaattttacccctatttgcaatggagaaatacagtattctttggtttggttggatttgcaaatcctatttcctatcaaaggaaatatctctagtggatatttttagaatatagacaatttctaggtattaactaataagatatggaaaagatagctttgctttttttaatcagaagaacataaaataaattacaatatgaatgattgtgagacatcagagaaatattttacttagtgacgtaaactactgtgcactgctgctattcctaggaagctgtgttttgggcaatacatggaagctaaatatatgacc

SEQ ID NO: 54827 - DNA, 870 bp, Homo Sapiens
ctcacccttaacctgcttcactccagtctgttctggctgtttattaccttgttgcaaaacagggccgaagcaaggattaccttgacaaccctagcttctccttagccatcttccttgacagtgtgatctgtttagtgagatttagcatgtgtgaataaagtatatgcaggaggaaattgctttgtcttcccaatcggtagaaattcgggaccataaaaattgtgttttaccatgtggcctacaaccttaacactgctttcttaagaagtcttcacccatctacatgctaacaactcactcagcctggatttatctttactggggaagccaaacaagcaatagaggacctttacctgtgttagaaatgagttggagccaaggaacactgaagaaatagtatcttaacagttactgagtccattgtatgtgcttggctctgctctgagtgatttatatgtattaagatttttcctcacaggtcagatatatactgttactaacttcattttatagacaggttaagcttcctgaaggccacaggtcccagtaaattgtggagccagaacccaaacccaagaagttttggcttcagcaaatgcatcagacagcccctgtccattaatagggcacaggtaggaagatgcacaaggatgtgggaactatagagaaccaatctgatgccttggcttaacaaagagtggacatggcaagccttcctcttcggggaagaaagcccagaactgagcagatggcctccctttatgagttcatgtcctcccgccttcagctggaggtaccatatggggatgctacctggcctttctgctggaggtaccatatggaaatgctgcctgtctgtctgctggagga

SEQ ID NO: 54828 - DNA, 895 bp, Homo Sapiens
acctctctttagaacagaaaaccgaagagctagaaggtcaaattaagaaactagaagctgatagtcttgaagttaaagcaagcaaggagcaggctttgcaagatctacaacagcaaagacagctgaacacagatttagagctcagagccacagaattgagtaaacaacttgaaatggagaaggaaatagtatccagtacaagattggatctacagaaaaaatctgaagcccttgaaagtatcaagcaaaagcttaccaagcaaagaggaagaaaaacaaatcctgaaacaagattttgaaactttaagtcaagaaacaaagattcagcatgaggaattgaataacagaattcaaacaacagtaacagaactacaaaaagtgaaaatgggagaaagaagctttaatgacagagctttctacagtaaaggacaaactatcaaaagtttctgattctttgaaaaactctaaaagtgaatttgaaaaggagaatcagaaaggaaaagccgctatattagacttggaaaaaacttgcaaagaattaaagcatcaacttcaagtgcagatggaaaacacacttaaggaacagaaggaactgaaaaagtcacttgaaaaagagaaggaggcttctcatcagttgaaattggaactcaaattcaatgcaggaacacttatacaggccagaatactttaaaacaaatgaaaagaagagcaaaattcaggggaacataatgagctaaagcatcaagtgaaagaagaaaaaccatggaggattccaaggagagttaaaatgcggtttaaggagaaagaggtgggaataattacaggaggtgaaaaaagggccagaatgtgggagaagggaaattcggttaaaactttgaaaagcggaattttaagc

SEQ ID NO: 54829 - DNA, 880 bp, Homo Sapiens
  misc_feature (11)..(12): n is a, c, g, or t
  misc_feature (751)..(880): n is a, c, g, or t
aggcttggtannccggtccggaattcccgcggatagacaacactcatctacagagaatatacactgttcttccctggataactgagaaacaagagaccattctctgtctaactgtgataaaaacaagctcaggactttattctatagagcaaacttgctgtggagggccatgctctccttggacccagttaactgcaaacgtgcattggagccctatttgctgccgctgccattctagtgacctttccacagagctgcgccttcctcacgtgtgtgaaaggttttccccttcagccctcaggtagatggaagctgcatctgcccacgatggcagtgcagtcatcatcttcaggatgtttcttcaggacttcctcagctgacaaggaattttggtccctgcctaggaccgggtcatctgcagaggacagagagatggtaagcagctgtatgaatgctgattttaaaaccaggtcatgggagaagagcctggagattctttcctgaacactgactgcacttaccagtctgattttatcgtcaaacaccaagccaggctagcatgctcatggcaatctgtttggggctgttttgttgtggcactagccaaacataaaggggcttaagtcagcctgcatacagaggatcggggagagaaggggcctgtgttctcagcctcctgagtacttaccagagtttaatttttttaaaaaaaatctgcactaaaatccccaaacgaatcacatatcagtgnnnnnnnnnnnnnnnnnnnnnnnnnnnnnnnnnnnnnnnnnnnnnnnnnnnnnnnnnnnnnnnnnnnnnnnnnnnnnnnnnnnnnnnnnnnnnnnnnnnnnnnnnnnnnnnnnnnnnnnnnnnnnnnnnn

SEQ ID NO: 54830 - DNA, 583 bp, Homo Sapiens
  misc_feature (572)..(572): n is a, c, g, or t
gagttttctgcgcttccttctccctctctccagacgtcgtggtcgttcggtcctatgtcgcgccgggccctccggaggctgaggggggaacagcgcggccaggagcccctcgggcccggcgccttgcatttcgatctccgtgatgacgatgacgcggaagaagaagggcccaagcgggagcttggtgtccggcgtcccgggggcgcagggaaggagggcgtccgagtcaacaaccgcttcgagctgataaacattgacgatcttgaggatgaccctgtggtgaacggggagaggtctggctgtgcgctcacagacgctgtggcaccagggaacaaaggaaggggtcagcgtggaaacacagagagcaagacggatggagatgacaccgagacagtgccctcagagcagtctcatgcaagtggcaaactccggaagaagaaaaaaaaacagaaaaacaagaaaagcagcacgggagaagcatcggaaaacggactagaagatatcgatcgcatcctagagaggattgaggacagcactgggttgaaccgtcccggcccagctcccctgagctncaggaagcacg

SEQ ID NO: 54831 - DNA, 811 bp, Homo Sapiens
ggtaggaaggttggatttggcgtgacttgcttgagcaagagtcctggggagagattttgaggtttaatttaacggtatatccagagctaacagtgactcaactcgtctagttctgcaagtcagatgtacacttagagtctctctgtgaagggtttgggtctgagctgtatagtatgtcaaactgccagtaagccagcccctcaccctctgatagatattcctttaatgcaccagacttcatgtttgataaatgattaatggttgaaattgtttctcttcttttgtgttttcccagttaatagatggtcactgtttccacaatgttttatactttcagctttttgtaacttaactataattacttaattttatttttttaaagcttgttgtggtctaatgagaagtatttttcagtgcataatgtttttctgagcttctgtaaatgccatcccaatgtggtttgggttttgttgaacagaaacccaaataaatttccaaatgtttaagcaagaccaaccacctttccatccaccaaaccttgtcgggcccgcctcggcccctccaaaaactttctagacccatttcgttttggccgcgcgggccccattaggtaacctggaccttggcccttacctgttttcctagggagatccctggccttggccaaagggctttggatttctcccccactaaaaaaacgcccgggcggcaaaccgaggggtttcctgaacaattccccaaaaggggttttcgaagggccctttccggggcacttaccccaacgggaaatccaaatccgacctctaattat

SEQ ID NO: 54832 - DNA, 440 bp, Homo Sapiens
  misc_feature (4)..(4): n is a, c, g, or t
gttnaatgcacaggccctcagtaatagaggaacatgaagagagatcttagagcacacagtagaatgtgagagcctgggtgtctgagaccgggagggcccagcagtgaggggcaggctcttctggtcaccaggctgttcagtggactcagttcttcatcttgtaatgtcgatggctttgccacaccaggccaagcccatgccataccttgtcaagactgtcaaagtggttgtggttaggtcaaactggttttggttctgatggttaggaagaaacaggtcagccctcagatcacctggcccgggacagctgaccccctagaaccctggctctgccattagctaggacctaagactctgcccacattttggtctgttctctcccattacacataggtttgtctcagcatgcaagagtttttccttttaaaaaaaaaaaaaaa

SEQ ID NO: 54833 - DNA, 641 bp, Homo Sapiens
tcttctttgtcttatttctgccttcatctcccacttctcacccaactctgccactgttcaggagcagttgactaaacttttatccttcctttaacttaatctttttatccttctgtttttagttcttacagtggtaatcacatcagtttggcaatctaagatgtctttatcaagggtcagcccttttctatttggagctgaatcttttctttcatgtagaaatctacatgtatatacaagaaatgtatttttatctgcaggataatattgtttcaaataattttattaagagttaactttttaggtattttcccttttaatgtggttttgaaatgttaattgcatttttacacatgatgcattcagtggacactcttttttcctaattataactcatctctgaatgcattgtgccaatcaagagtaagataggattcagtgcgcaaaatttgcttttgatgcttattaagagtaaacccatgaatttgaatttttatattatgcttggtacttggaattgatatataccttattaaagcttgaaaacatttagcatttgaatagtaagtttcatcacaaatcatgtcttttgcctcttttgttacccaggttcgatcaaggggactggatgcccaagtgat

SEQ ID NO: 54834 - DNA, 567 bp, Homo Sapiens
aggaaagttgagagccaagggtaggagagttgcccaaaagacttcccctactactttagggtactgaaaactcaaaggatcagctacagctttatctaagtatttactaaatgctacatgagggtgtccctgtccagctttctggcacatgagtcctgtgtggagagttacctcctcttccagggactgtgctgttgggaactttgggcaagtcacttacctctttgtgcctcaatttctgtataatatttctaagctacctcactgaggtggtatgaagattcactaatgtatgtagcgtgtttgtcaatcctccagtgaaaagcactatctagatcacattttggatcacattagccaaatgcagtaaatggccaaattagatgtgtgctgaagacaatcagtcactgggtctatattaaacagcaaccagagcaacaaatggcgaacaatttctattttcaagtttctttgcatatttttttggtgcaaaaccatttataaacttttttttctaacactagtgtctacagcagcatttaaaaaaattatgttaccttttctgta

SEQ ID NO: 54835 - DNA, 668 bp, Homo Sapiens
  misc_feature (531)..(531): n is a, c, g, or t
  misc_feature (557)..(557): n is a, c, g, or t
  misc_feature (579)..(579): n is a, c, g, or t
gcagccatgctaaaagagtgaagaattttgatctttagagacactagttttggccaacttaagattttacgttaatttttacatagtatttgacactcatgcaaaataatgtgaaaacatctagatttagtagtttattctgcgccttttgttaaaactgaagattttggaaaatggttgtcactgctcttccagcctatgaatatttttgtgaaatggaaccatggatttatgtctggatcatccatacagaaccaacaattttattcaaaaacaatgtgttcatcaaagtaattgctcacattgtgcagtactatgttgtacagaccacgtgaaagggaatgctggtctagctggcgtggtatgtttataggcgaatttcagcagaaggaagccaaaatagttttttccttttgaaagttttttaaaaattatttcatgggtcttttttttaattaatatgtgtgcattgttacaatgtatgttggatgtcttttgaccctaaatgctttttttgttatcagagattgngtactatttttatttttaataaatgnatcttccctttccttggtttanatttactttgctcttcgttaatcttattcctgatgatctaaaacattagtcatcaacattacatgtttcatgcttcagatattttactg

SEQ ID NO: 54836 - DNA, 790 bp, Homo Sapiens
tcagatatgtgtgtatttttttaaaaacgatttgaaaaaatatgatgttcctttgtcgtgggaacaagccaggttgcagacgcagaaggagctacagctgagagagggacgtttggcaataaagccttttcatccttctgcaaacaattttcccataccattgcttcacatgcaccgtaactggaagaggagcacagagtgtgctcaagaggggaggattcccagcacagaggatctgatgcgaggagcttctgctgaggagctcttggcgcagtgtttgtcgagcagtctgctgctggagaaagaagagaacaagaggtttgaagatcagcttcagcaatggttgtctgaagactcaggagcatttacggatttaacttcccttcccctctatcttcctcagactctagtgtctctttctcacactattgaacctgtgatgaaaacatctgtaactactagcccacagagtgacatgatgagggagcaactgcagctgtcagaggcgacaggaacgtgtctaggcgaacgactaaagcacctggaaaggctgatccggagttcaagggaagaggaagttgcctctgagctccatctctctgcgctgctagacatggtggacatttgagcagcctgacctgtggggagggggtctctcccgaagagtttctgtttttactcaaaataatgttattctcagatgcttggatgcactgttgggaaatgtgattaattttaatcatgcagataaaccattttaaatgtcaaaaaaaaaaaaaaaaaaactcca

SEQ ID NO: 54837 - DNA, 624 bp, Homo Sapiens
  misc_feature (1)..(1): n is a, c, g, or t
  misc_feature (12)..(12): n is a, c, g, or t
  misc_feature (20)..(20): n is a, c, g, or t
  misc_feature (58)..(58): n is a, c, g, or t
nttggccctcgnggcccagnaattcggcatgaggcggggtttcaccatgttagccggnatggtctcaatctcctgacctcatgatccgcccgtcttggcctcccaaagtgctgggattacaggcatgagcaactgcgcccagccaaattctacttcttaaaaatcacaaaaactagtttaaattgatgacttgttcgtatgttcaaaatgtaacaacaaaaaaagctaacaccagtcatttatattaactttttttttttaaatcaaaaattgttaatgttagaaacatactatgaagtgcctttatctgcttagacctaaggaagattttaaagttgggttgcacaggaaatgatgatgcttcaatttcttaatagttaaaaagtgctaaatactacttgaaattattgtttacagattagtgacaagagctggggttaggatccggttggactctgacatcggatgccctcaaacatacagaacttccaaactcaagtccagccataagctattttgccaacatgtcagagtaatctgtatttttgtatgtgatttctacttttatagacttgttttaaaacaataaaacacatttttataaaaatgaaaaaaaaaaaaaaa

SEQ ID NO: 54838 - DNA, 634 bp, Homo Sapiens
tgtagtatactgtcacttctggattgataagctgaggaagaaagttaagtttcttttttacataagtcagaaaaacttacagctggtgttcctagtttcctggttgacctcagcagatgaagtgaacagatagtgttaattcagattgaagaaattatctgaatcttggtttgtgtagatttacaatctacatgcaatattaactaaatcagatagcttttacagtttcacatgtgtacataggttccctcccggtcccttccatatccattagttattgaactttctaaactggcattgaaacattacaacaatgttttgttgcaccaattttataaacttaagcagtgcaatacgtgttacttttctgaggcaaaccaaaggtaaatttctcaaggttcttgctgccttctttagcagcatttgatggaagatcttttatacatttgtaatagataaaaataaaccagattgcaaatccttttttaaaatcctaaaccatgtaccaagtttttggtccaaattatgtaggataagttaaacttaaattgcattctattaaccaatatgagtgtatttctgtaagcatagttatgttgaaataaagttttaaaaaccaaaaaaaaaaaaaaag

SEQ ID NO: 54839 - DNA, 594 bp, Homo Sapiens
gcgtccgtgtctttcaagaacctcggccccagtgatggctgatctcactcccactgtctcgtagaattacactccttcctggggatccctcttcctgcagccttgtccttggggagtacagggaagtacctgcagtgaccctgcccccatgaccttggccaggcaggatgattccagagcccgtactgtggggatcctcactgaccagcccagccccatccgcaagccaggctgggcctgggcataacttcgctgggctctcccaagaccatcagcagtgcatccagccccctggggcctgggctgctgctggttcttcatcagtcccttggtctctagcctcggccagggctgctctgctctccgccctcctttgtgtatcaagtgtcgctcacagccccattcactggggagcctttcggatctatttggtctttctcatgtcccccactggtctgtaccccagggagcgggtgcttgtactgtgtgaatccagtgttcacattcacacttaatgacttccttggcaccaatcatgtatttcaccgtttgcactttttgtatttcaataaaaatgttgatgcaaaaaaaaaa

SEQ ID NO: 54840 - DNA, 624 bp, Homo Sapiens
agatactcacatgagttcttgaagaatagtcataactagattaagatctgtgttttagtttaatagtttgaagtgcctgtttgggataatgataggtaatttagatgaatttaggggaaaaaaaagttatctgcagatatgttgagggcccatctctccccccacacccccacagagctaactgggttacagtgttttatccgaaagtttccaattccactgtcttgtgttttcatgttgaaaatacttttgcatttttcctttgagtgccaatttcttactagtactatttcttaatgtaacatgtttacctggaatgtattttaactatttttgtatagtgtaaactgaaacatgcacattttgtacattgtgctttcttttgtgggacatatgcagtgtgatccagttgttttccatcatttggttgcgctgacctaggaatgttggtcatatcaaacattaaaaatgaccactcttttaattgaaattaacttttaaatgtttataggagtatgtgctgtgaagtgatctaaaatttgtaatatttttgtcatgaactgtactactcctaattattgtaatgtaataaaaatagttacagtgaaaaaaaaaaaaaaaaag

SEQ ID NO: 54841 - DNA, 681 bp, Homo Sapiens
ttaattttcgtggtggtgcttttgggcctttctggcttgggtggtggtaaagtcatgattttgcagttgataacactgacttataactctgtttatcaatgtctcctatattcaaagcccctgcagtggtatttgtgtctcgttgcaaatttctttcagcggaaagcttgcacaactttcgttgtgtctcagaattctaaccttgttatttaagacaagctgctctacccatttaggatataactttgtaaagaaagtgtaaaccaaatgattcaatgtatgatgaagtttatgtgtaaatccttggtaatgctagaattctgggagcccagaagggttgaaagagaaatgaaacttgcgtgagtcccattattttacgcatgtatgtgcagatacgttctacccacacgtgtgcgtgcacatggctgtgtgcgtgcaccaaagatggactgctttccatgtgtccttttgactttctacacgtgtcactgcggtgcagtctcttagcagacttcaggcccaaactgtattcttcactcaggcaaaattgaaaagtggaataattctaaattacttctaggttatacttttacctccctgaaattgtagttgtcacttggagggcaaaatatttattgaaataaaattttctgttaaaaattcaaaaaaaaaaaaaaaaag

SEQ ID NO: 54842 - DNA, 662 bp, Homo Sapiens
  misc_feature (625)..(625): n is a, c, g, or t
gtcatgtctcacacgctcatctatatcccctcctactttgacttcgtgcgtcttcgaaattacttcaagaaggaggaattgaattttacccacatctgcgagtacacgcagaagtctggtgtctccagggccagacacttcttccttcaaggagagaaacagtttctacttttcacagagcgcttccatttctacaaaaggtatacaataaaaggcatcaggaacctgattttctatgaactgccgacatatccacacttttacagtgaaatctgtaatatgctgagagccaccaacagaggagaagaggccacgtggacctgcactgttctctactccaaatatgatgcccagaggttagctgccgtggttggtgtggagcgggcggcacagatgctacagtccaacaagaatgtccacctcttcattactggagaaaaatgaaattttgttgggcaggaagtggtatttggcatgatacataatgtttgattctatgccatttggacccaattctgattacttacagaagaaggactgatacaaagaaagtgcatgaggcaatgtcagtattatctgacatccttcttttcaggtcatgtgtcccttgaaaagttaaatgtanacccagattttgggtaaatcccatctttcagaagtga

SEQ ID NO: 54843 - DNA, 606 bp, Homo Sapiens
attagatgtgccaataaccaagtttattcagtaaacaacttgtacttgtttcatctggttttattactctcacccataaacagtaatgactctctgaccctctggaaatatgtaatgcttccaatcttgctttgtgtatctcatttaatttgttataaggtagtactgattttagcatattaatgcgatttcttccttgttgtttgctttggtctgtgttcaatccagagagcttaaattgtcattattttgggaagaaaacctgtatttttgttagtttacaatattatgaaatttcacttcaggagaaactgctgggcttcctgtggctttgttttcttagttactttttccgtgccgtgtattttttaattgatttttcttcttttacttgaaaagaaagtgttttattttcaaatctggtccatatttacattctagttcagagccaagccttaaactgtacagaatttccactgtaattaaaactatttagtgttagttataaatagccttcaaaaagagagattctccattacacgatcacctgcatcacagcccatggtgaatgtatgtttctgcatagcgaaataaaaatggcaaatg

SEQ ID NO: 54844 - DNA, 854 bp, Homo Sapiens
  misc_feature (735)..(735): n is a, c, g, or t
  misc_feature (817)..(818): n is a, c, g, or t
  misc_feature (831)..(831): n is a, c, g, or t
tcagcacaacaggctggcgccaatggcattacagagaaagcaatctgtgtggctagtgggcagattaccatgcaagccccaggagaaatggaggagctttgtagccacctccctgtcagccagtattaacatgtccccttccccctgccccgccgtagattcaggacattcgcccctgtgtgccaccaaaccaggactttccccttccccttggcttggcatccctggctctctcctggtacccagcaagacgtctgttccagggcagtgtagcatctttcaagctccgttactatggcgatggccatgatgttacaatcccacttgcctgaataatcaagtgggaaggggaagcagagggaaatggggccatgtgaatgcagctgctctgttctccctaccctgaggaaaaaccaaagggaagcaacaggaacttctgcaactggtttttatcggaaagatcatcctgcctgcagatgctgttgaaggggcacaagaaattggagctggagaagattgatgaaagtgcaggtgtgtaaggaaatagaacagtctgctgggagtcagacctggaattctgattccaaactctttattactttgggaagtcactcagcctccccgtagccatctccagggtgacggaacccagtgtattacctgctggaaccaaggaaactaacaatgtaggttactagtgaataccccaatggtttctccaattatgcccatgcncaccaaaacataaaacaaaattctctaacactgcaaagagtgagccatgcctgtttacactgtaaagaatgtaacatgtggnnggacacacagggngcagatggggatgggtttagttt

SEQ ID NO: 54845 - DNA, 891 bp, Homo Sapiens
aagctggaccggtccggattcccgggatgcctgacagacaccactattaaaaaaaaaaaaaatccccaaaatgattccaatagacaacaaagttgaggaaccactggcacatcccaagctaagatacaaggttaaatggcctttttaagtatgtcatactggatctttaaataaagcaaggcttttgttacactttgtcatgttattaaaagcagacctttgggctgtttaaccgtgtaacaaaaatgccacgtgaaaaataaaaatttttattgtatagcaattctctataaatagtagataatctaagtccttattttctgatggctcttgttccactattaacattgtttttaatttttaaaatcctatcagcagcctcctaattagcagtgttaggaatttgccttatgttttccatctcatctcctgaacctgttattctgagaactcataaataaaattcagccaagattaatcaatcaatcaatcaatcagtagacgtcagagataagcaacttttttttccatttatttgaaataatatacaagaatatagtgtgcaaaatttaggggcaacatcatgaagaagtgtgatgaactgaaatcaattttacagctgtgattcctaaccagaaacaccacttggtaagtaacatgaaaagccatgattgtagctcagagcaaaagcagctgtattgccaatgtatttgctctaattttagacagttggaggaaaattaaagtgcaagtgttgcactgcagtaagtgcaaagtctgcccccaccataaagattatgatgacaaaatatatttaagatacatggcctgaggagatacaggaacaccgaagtttaaaaaatacaatggtggttgaactgtttggttaaa

SEQ ID NO: 54846 - DNA, 735 bp, Homo Sapiens
cccctggccaaggtcatccatgacaactttggtatcgtggaaggactcatgaccacagtccatgccatcactgccacccagaagactgtggatggcccctccgggaaactgtggcgtgatggccgcggggctctccagaacatcatccctgcctctactggcgctgccaaggctgtgggcaaggtcatccctgagctgaacgggaagctcactggcatggccttccgtgtccccactgccaacgtgtcagtggtggacctgacctgccgtctagaaaaacctgccaaatatgatgacatcaagaaggtggtgaagcaggcgtcggagggccccctcaagggcatcctgggctacactgagcaccaggtggtctcctctgacttcaacagcgacacccactcctccacctttgacgctggggctggcattgccctcaacgaccactttgtcaagctcatttcctggtatgacaacgaatttggctacagcaacagggtggtggacctcatggcccacatggcctccaaggagtaagacccctggaccaccagccccagcaagagcacaagaggaagagagagaccctcactgctggggagtccctgccacactcagtcccccaccacactgaatctcccctcctcacagttgccatgtagaccccttgaagaggggaggggcctagggagccgcaccttgtcatgtaccatcaataaagtaccctgtgctcaacca

SEQ ID NO: 54847 - DNA, 598 bp, Homo Sapiens
cgtcgacccacgcgtccgcccacgcgtccgcccacgcgtccggttagacgcgagcgccgcccttttgaattgatttgaggagcagtaaaatgaaagctatatctattctaaaccttatttagacattggtaccagttacccaggtgaaaatatggagtaactttgttttgtatggtaaggtttaggaatggtggatgaagggtatctctatataaataaagtgctcaacaatgtgcaatgattgtaaatttagtaagatattacagccatttcatgaatgctttaccattcaacatagtatctattacaaaacacctttcttgtatccatatacttcaggtgttgctgttaacatttactatgatatttattttaaccaaaatgttactcacattaaatgtttattctttaaaatgaatgtattatgtttttaacccacaaatgcatacttaccctgtgcctcatatttcaatagtactgtaatatggacatcttttgtgaaatacttttattttgttatgctttaaatatacatacaaaaagatttctgttattagctttgaaaattgtataatatcctaatataaacaaaaatata

SEQ ID NO: 54848 - DNA, 473 bp, Homo Sapiens
cttattggtgacttatggaaataaagcatcaatattggatgtatttaattcctagtttgttttccattctggaataaaaaggtatttgctgataaaaggcataacgagacatagtgctgctaccactgaataagtgatactttggaaagatgcatgccagtggatgccagaggaccaggctaatgacttgtgtgtgctgatgtgtttccatttgtatttaatgtgtgtagaccctcctctgttcatcaatcaaaaagcatttcctaggcagctcctcgcctgtcagtgtgcatatggaaacagggacatctccatcattactggcttagttttgctttcctttgacacagtaaggcaaaggccaagctttcaaaagagtaaaggatactttcacaatttcccttcatatggatatgattccagtcaaaaataaaatgcacaccaaaatgtaaaaaaaaaaaaaaaaaacgcgg

SEQ ID NO: 54849 - DNA, 679 bp, Homo Sapiens
ccgtcgaccccgcgtccgcaatcagcaaacatcatcatttcaccccaaaattttgtcacagaaaaggcgtatcaaatgaaaaataatttcagagatctttctttcaagatattttttcctgataaaatacattgtcttgaagtaaatacattgtcaaaacctaattgcaattctgttaaatctaagtaatttttagacagtgtttcaccgtattatttaggatgtgaaatgccatttctttcactgattacaccatatacaggaaacaggtaaaacagtgaaaactttattgtgctggttgatgccaacttggttgaaaagctctctgcagaagaagtgatctagactgacagaagtgttgctaattacaagttgtgttctcatgacgtaattagaaagtaacttctcaaagtacaacttttatgaaaaaaataagctgttaaaaaaaggaaatcgtaggttaatttaattgggaaaatgggcaattgacagagaccattttcctaacacatatatgtgctagtactttaactttttaaaattttacttctacgttttgtaatataaaaatttctattttaagtttagaatgttatacgtaccgaaagtatgcagccaaatcgatcagatcaaaccattttacctggagtttggtactggtttttacttctctgaatct

SEQ ID NO: 54850 - DNA, 632 bp, Homo Sapiens
  misc_feature (623)..(623): n is a, c, g, or t
tctgctgtgaagaacctgcagcagctagcccaagatgcggacctggccttgctgcaggttttccagcttgcagctcatctggtgtactggggcaaggccatcatcatctacccgctgtgtgagaacaacgtctacatgctgtctcccaatgccagcgtatgtctgtactccccgctggccgagcagttctcccaccagttcccatctcatgacctgccgtccgttcttgccaagttctccttgccggtctccttgtcagaatttaggaatcccctggcccccgctgtgcaggagacccagctcatccagatggtggtgtggatgctgcagcgccggcttctcatccagctgcacacctatgtctgcctgatggcctcacccagcgaggaggagccccgtccgcgagaggacgacgtccccttcactgcccgggtcggcggtcgcagcctcagcacgcccaacgccctcagctttggctccccaaccagcagcgatgacatgaccctcaccagccccagcatggacaactccagcgcagagctacttcccagcggggactcgccactgaaccagaggatgacggagaacctgctggccagcctgtcggagcatgaacgcgcagncattctcag

SEQ ID NO: 54851 - DNA, 454 bp, Homo Sapiens
tttttttttttttttttttttgcagatgggaacatatttaataaccaaggttctaagcaaagttctgaaaagaaaactttttgttgtaaatatgctagcatagacaagttccttgtgttttccaacaggtttgcttcaaaatcaatccttacagcttcaagaacaggaaaaactcttaacaaagaaaggtcagcaaatttattaccacaaattctaagatattgctcttctcttacctgcctagaggcagcgggatggactacatgacctcctggagtcccagccagttctgggagtctgttaagtccgggatgtgtgggagctttttaaggactgatcattggctctgaggacacttcaactagttagccttctatcttgaggtatataaactgtgaaaaagggtttctattctctctgaaagcacatgtctgtgttgaacatttcaataaat

SEQ ID NO: 54852 - DNA, 891 bp, Homo Sapiens
  misc_feature (649)..(649): n is a, c, g, or t
  misc_feature (680)..(680): n is a, c, g, or t
  misc_feature (686)..(686): n is a, c, g, or t
  misc_feature (692)..(692): n is a, c, g, or t
  misc_feature (801)..(801): n is a, c, g, or t
  misc_feature (803)..(803): n is a, c, g, or t
  misc_feature (805)..(806): n is a, c, g, or t
  misc_feature (877)..(877): n is a, c, g, or t
ctcctccttacccccgtctgacgctggagtgctacagtgtggctgggacccacttctctcctctgtagatacccacccctgtgttgatcacttgcaggcccgggttctgtgtgccatgtgtatgccctagagcccttgctcacgtttccccacagccttcatgaagtctgtgttcctcagatgccccacagacatcacaagcaaggcacatccaaaccccagaccactatccaggagcctgcaccctctttctgttggctccacctccagcctccgagacccacccacttccctgcatttgctgagaccatcattttccacctagacaatgcccccacgcttgccctacagcccttccaaaaacgattttttccaacctaaatcagacctagaaagctttttcacatagcccagtcttcctccttgtgctgggttctgtctcattatcacctcatcagggaagtctgtacagatagaatccctacccctgcatttgtcgcctccgtctgcctctttggtcagtttcaggtccctgtagttcacactgtgtccccagggatgaagtgggtcccggcacggtgggcattctgtcatgaatgaatggtccccttgtgtatgcagggttcgcgctgcagctaggcagcatctncgcaggtccaggtagtgtaagccctcacctncacgtnccctgngacctcggcatggctggcctttctggccagatccaatcaccctcccgcgaaggtggctttgcgcatgcgcttctgctccccagcgatctgaggagtgaaacaggacccncngnnacgagattcctgccggggtgtggggcccctgctctgatcaccaccccgctggcgctcccccaggggcccgnagccgggggccgcc

SEQ ID NO: 54853 - DNA, 483 bp, Homo Sapiens
  misc_feature (1)..(1): n is a, c, g, or t
  misc_feature (188)..(188): n is a, c, g, or t
ngaaaacctagattaaataaaatcaaagttgagaagaatcatcaaaagactgtttctcggtgtgaatcaagtgttgaaaaatggttggtgtattttgtcagtaattgtacataacttttggcacatgacatagaaatggctatgtaaactataattattttgctaagagactgtatgcaagccttggncggactttacagacgtccagagcaaagccccttctttgtacctatttttttattacaaatatactaattggttctttctattttcagaggttattgtatgaaattgtctattgatagtacttttatgactgtaaatactctggctttctccgtgtgaattctcacattagactttaattcgagcgcgtgtgaactgaacgctgatcagtattttttatcaacacctgagaactgttacaccttttattttgtcttttaggaaatccctggtctttccattttttcatggaaattt

SEQ ID NO: 54854 - DNA, 513 bp, Homo Sapiens
ggcctgatcaccaggctgcaggctcgctgccgtggatacttagttcgacaggaattccgatccaggatgaatttcctgaagaaacaaatccctgccatcacctgcattcagtcacagtggagaggatacaagcagaagaaggcatatcaagatcggttagcttacctgcgctcccacaaagatgaagttgtaaagattcagtccctggcaaggatgcaccaagctcgaaagcgctatcgagatcgcctgcagtacttccgggaccatataaatgacattatcaaaatccaggcttttattcgggcaaacaaagctcgggatgactacaagactctcatcaatgctgaggatcctcctatggttgtggtccgaaaatttgtccacctgctggaccaaagtgaccaggattttcaggaggagcttgaccttatgaagatgcgggaagaggttatcaccctcattcgttctaaccagcagctggagaatgacctcaatctcatggatatcaaaatg

SEQ ID NO: 54855 - DNA, 675 bp, Homo Sapiens
ggagaattaagagggttctcatggaggggataggaagtaggtttaaagcctaccagtgtaacctaccagtacaactgtgaatcctaggcgaggcaaaaatgcacttccactgaaacgaagcatttctgaccgctttttcttggttatgagtcttaatttcgaatataagatgataggtaagcgcagctttcttggataatctgaattcccaagtgccaggagtaggatttcattataaaattaatagctaatcttattctatctcctgaagatttaattgctattgttacccattcgaaatcagctgtactgtgtgaacgaaataaagacaataatacgaacccctctctggctgcacggtcgcttatggcagttccacacagtagttggcgcccaatggggggtccctgagacttgcatgtaaaactagtctagatgtcttctttttttgtaagttttatttttgtaattgtgcatgtaaagcatcattgaatcaatggatctgttgaagaactcagctgctggaaaccatgcaaaatgttttgaattgcccttaaaatatggaaaatgttttctgaatgctttatattctttctgctgtaattaaaaatgaagaaattacaaaaaaaaaaaaaaaaaaaaaaaaacatgcggccgctcgcctcaaaacttcta

SEQ ID NO: 54856 - DNA, 690 bp, Homo Sapiens
cacaccatattactagcatatacattgcagtgctccaatcatgctaacagataatagatttttctttaagaattttatcaaatatttcactatttggggaaattttagaggaggggaagcctgtattcaggatgatagagggagcagagacttactgtctctcttccacattataaatgaactgcctttccaggtccaacatgctgtcaggttgcttcagctcggtgtgaatgtaagtgtggggatcaaacacacacacctatacacatacatattaatatgcagaggattttaaataattgcaaatgtcttgtggctgttttatttctacaaaattctgtaagatgtataccagaaaacataataaagataagctcagttcttcattgggaaaaaatatttttaaagaaaatttagaagtttttgctgaattaaagtatcttcaattttaattactggatttggaagttgaaatgccatccttcaatatcactggtctcaaattcattgatagaattttttcttaaactaataagtggggtaagtataatctcctaaattggtacccactggctgctcctaaactggtttccagtcatgtcctccagtatgtgatttttataaattaaaggtaatattgtatattaaagttcaaataaagatgttctttaagtgataaaaaaaaaaaaa

SEQ ID NO: 54857 - DNA, 697 bp, Homo Sapiens
  misc_feature (648)..(648): n is a, c, g, or t
gaatgatgtttaaacacaaaaataaattttttttcatttccagaaacactatttatttatggtttttttttttaattttttctttttgggggtgaaattggcagatgcctgaggtcatagctgtgtcctgggtcactgtggctggtgaggacctcaaggaccccatcaagtgtacacagcagcagcaaaatcaagggatgaccctcctctggggccccctgtcctcagcacattccaggcagctgtgccctgacccacagggacccgtggggatgggaggaggtccaggcctgtgttgccagagctggcagtgtgagctgtaggcagggacggggagggactgtcgctgtgatcagagtgggttaagctgaccaggaacacccatttaacccctttttctttttgctttcatttttataaaggaaaagaggacctgtcagataggcagccccatgctacgtgattctttatgttgtgttgttttgttttgtaaattgtataatttttaaatatctgagttttaaaaaaagaaaaaagtacaaaaaaatcttgttatggccttaagaaggggttagtgcatctttcaggggtcactctgccatggggataaaatagctgtttcacaaacagttttatttaaaaaaacanaaaacaaaaaaaatcaaaaaatcaaaaaaataataaacttcattttaac

SEQ ID NO: 54858 - DNA, 1014 bp, Homo Sapiens
  misc_feature (829)..(829): n is a, c, g, or t
  misc_feature (837)..(838): n is a, c, g, or t
ctggccagaagataccaacttttgtttccaacctgagcaagtggtcgatcctatccagactgatccctttaagatgtaccatgatgatgacctggcagatttggtctttccctccagtgcgacagctgatacttcaatatttgcaggacaaaatgatcccttgaaagacagttacggtatgtctccctgcaacacagctgttgtacctcaggggtggtctgtggaagccttaaactctccacactcagagtcctttgtttccccagaggctgttgcagaacctcctcagccaacggcagttcccttagagctagccaaggagatagaaatggcatcagaagagaggccaccagcacaagcattggaaataatgatgggactgaagactactgacatggcaccatctaaagaaacagagatggccctcgccaaggacatggcactagctacaaaaaccgaggtggcattggctaaagatatggaatcacccaccaaattagatgtgacactggccaaggacatgcagccatccatggaatcagatatggccctagtcaaggacatggaactacccacagaaaaagaagtggccctggttaaggatgtcagatggcccacagaaacagatgtatcttcagccaagaatgtggtactgcccacagaaacagaggtagccccagccaaggatgtgacactgttgaaagaaacagagagggcatctcctataaaaatggacttagccccttcccaggacatgggacccaccctaagaaaaccagaaagaaaccgagagggcatctcctataaaaatggacttggctcctttcanggacatgnngacacccaagaaaaccagatagtcccagccaaggattgggtattactctcagaaataaaggtgcaccggctaatgacattatatcctaccccgaaatatcttctgcttgaaaaagtggccttttgtcctccgaaaacagaaggtaagccttggcccaggggaacatgaacactgtc

SEQ ID NO: 54859 - DNA, 906 bp, Homo Sapiens
  misc_feature (881)..(881): n is a, c, g, or t
aagacgcggcctccacgctagtgacgggctctgagtatgagacgatgctgacggagatcatgtccatgggctatgagcgagagcgggtcgtggccgccctgagagccagctacaacaacccccaccgagccgtggagtatctgctcacgggaattcctgggagccccgagccggaacacggttctgtccaggagagccaggtatcggagcagccggccacggaagcagcaggagagaaccccctggagttcctgcgggaccagccccagttccagaacatgcggcaggtgattcagcagaaccctgcgctgctgcccgccctgctccagcagctgggccaggagaaccctcagcttttacagcaaatcagccggcaccaggagcagttcatccagatgctgaacgagccccctggggagctggcggacatctcagatgtggagggggaggtgggcgccataggagaggaggccccgcagatgaactacatccaggtgacgccgcaggagaaagaagctatagagaggttgaaggccctgggcttcccagagagcctggtcatccaggcctatttcgcgtgtgaaaaaaatgagaacttggctgccaacttcctcctgagtcagaactttgatgacgagtgatgccaggaagccaggccaccgaagcccccaccctacccttattccatgaaagttttataaaagaaaaaatatatatatattcatgtttatttaagaaatggaaaaaaaatcaaaaatcttaaaaaaacaagcaaacagtccagcttcctgttcctcctaaagtggcccctgttcccatctcccgggaccagacagcctgtcccccccggtccttcctcccccagcccagccctggctcanaagaaagctggccagggactggggc

SEQ ID NO: 54860 - DNA, 553 bp, Homo Sapiens
acgcgtccgagagaaaaccaacagcagcttacgcaaacagaaccttgacctccttgaacagttgcaggtggcaaatggtaggatccaaagccttgaggccaccattgagaagctcctgagcagtgagagcaagctgaagcaggccatgcttaccttagaactggagcggtcggccctgctgcagacggtggaggagctgcggcggcggagcgcagagcccagcgaccgggagcctgagtgcacgcagcccgagcccacgggcgactgacagctctgcaggagagattgcaacaccatcccacactgtccaggccttaactgagagggacagaagacgctggaaggagagaaggaagcgggaagtgtgcttctcagggaggaaaccggcttgccagcaagtagattcttacgaactccaacttgcaattcagggggcatgtcccagtgttttttttgttgtttttagatactaaatcgtcccttctccagtcctgattactgtacacagtagctttagatggcgtggacgtgaataaatgcaacttatgttttc

SEQ ID NO: 54861 - DNA, 589 bp, Homo Sapiens
ggaggagcagcgggaagagcggaagaagaccatggagctgaccacccgctgaccagtgtcaggcaggggccagcccctcagcccctgagccaagggggaaaagaagaaaaagtacctaacacaagcttcctttttgcacaaccggtcctcttggctgaggaggaggagctggtcaccctggctgcacagttagagaggggagaaggaacccatgatgggactcctggggtaggggccaggggctggggtctgctggggacaggtctctctgggacagacctcagagattgtgaatgcagtgccaagctcacaggctgcaagggccaggccagaaaagggtgggcctgcagcctgcaccccccaccttccccaacccttcctcaagagctgaagggatcccagcccctaggtgggcagaggcagaccctccccagagctccttaggaagaagacagactggttcattgaatgccgccttatttatttctggtgaggatgcatgcgtggggctgctggtgtttagagtgggggctacccaataaatcactgatactcaaaaaaaaaaaaaaaaaaaaaatcgctaatcggg

SEQ ID NO: 54862 - DNA, 684 bp, Homo Sapiens
aattcgggagtctgttcccttttagtgccacgcgttgaatagttccacatactttcagaagagctcagcagggccctgcctggtctcccgagcatcatgagtaacgtgtctgctcagactctgctgacaccaaagtattttaaacaaataaaaggtcttggggaattctgtttggctacctgggcacgccagtctgcaccatgtgtccctgcggcgcatgagtgactggcgtatttagcccgtcacatttcattcgctgaaggaaaggcaagagagttgaaacatttttcttacttaaaaaaaatgatctttgtgaagaacatagtgagttcgtttgtcttcagtcaacagcggctgaaactgaccactgagaaatgggtgtgggcactgacagttctcccccattatttggccaggaattgagcttggcttggcaaagttccttttaccctgttctgttcatctaaatgcagacatatttaaatcatattcaactagttactaatgacctcaagttgtattccctggcaaaatggactttctcaaaataggactgcacgcttggtgtactttaaatgttaatgtttaatttaaacactttttatttaagaggattaaaggccctaatgtcttattttccttaaaacaaaaaatcatacacagtacaactaaaaaaaaaagggc

SEQ ID NO: 54863 - DNA, 740 bp, Homo Sapiens
ggaactttttaactattcattgactaaaaatgaacattaatgttaaagacttaagactttaacctgctggcagtcccaaatgaaattatgcaactttgatatcatattccttgatttaaattggcttttgtgattgagtgaaactttataaagcatatggtcagttatttaattaaaaaggcaaaacctgaaccaccttctgcacttaaagaagtctaacagtacaaatacactatctatcttagatagatatatttttttttatttttaaatattgtactatttatggtggtggggctttcttactaatacacaaataaatttaatcatttcaaaggcattctatttggtttagaagttgattcccaggagtgccatatttcagctactgtatttcctttttcttgtaatgtaagcagctcagataccatgtgctatcatttttgtatcaagttttttgcacaggatgtgaccactgtcagatcactgttcttttctttctttttgtgattgaaaagcctatactacaatttgaagtaaatttttgtttttcttagtaagtgtaaatggttgctttatttttattttaaaaaggtatgtctttggtttggcagaattcatgcagggctatcaagtggtgttctagggtaacagtgtccataattaacgcttaatcataggagtcaaaaacattttaaagactgaattgggggttggaaagtttattaaataaatttaac

SEQ ID NO: 54864 - DNA, 582 bp, Homo Sapiens
aaggtcagttgattccagtgctaaaagggaaaaacctgtggtccgcccagaagagattcctccagtgcctgagaaccgatttttactgagaagagatatgcctgttgttactgcagaacctgaaccgaagattcctgatgttgcacccattgtaagtgatcagaaaccatctgtatcaaagtctggacggaagattaaaggaaggggcacaattcgctatcacacacctccaagatcaagatcctgttctgagtcagatgatgatgacagcagtgaaactcctcctcactggaaagaggaaatgcagagattaagagcatatagaccacctagtggagaaaaatggagtaaaggagataagttaagtgacccctgttcaagccgatgggatgaaagaagcttgtctcagagatccagatcatggtcctataatggatattattcagaccttagtacagcgagacactctggccaccataaaaaacgcagaaaagaaaaaaaggttaagcataaaaagaaagggaaaaagcagaaacactgcagaagacacaaacaaacaaagaagagaaggattcttatacc

SEQ ID NO: 54865 - DNA, 439 bp, Homo Sapiens
  misc_feature (407)..(407): n is a, c, g, or t
aaatagaaagaaaaaaacatttggcttatttttcactgtagctagtcttttatacaataatcttgtaagaaaatttcttgaattctaaatattactctttctagatttttgaaatcaaaaagttttcagtaaaaagtttcttactttattttattatattaggtagtaaaaaatgtagggttatttaccataacctgttcattaatatcagaaatttacaatagcattttaagaccatagtaggattctagcataccgtgtagtacctatggagtattgtaagagctaattgttggagatgaattgcttctcatcttgttctccagtttccattgttggtttattgcagatttgtatcctgtgtcaaattcaaggtattattgataaaccttttcaaccagcagcangaagttcaaatttttttctgtcactgtaacag

SEQ ID NO: 54866 - DNA, 733 bp, Homo Sapiens
  misc_feature (631)..(634): n is a, c, g, or t
  misc_feature (636)..(639): n is a, c, g, or t
  misc_feature (650)..(657): n is a, c, g, or t
ggcaacagtatttgccttaagatttcatatatatatattttttgcattgactgctgagagctcctgtttactaagcaagcttttgtgtttattatcctcatttttactgaacattgttagttttggggtaatggaaacccactttttcattgtaatgactttgggggcttttgttagtaagggtgggtggggtgatgggttgcagacggaggtcaggtcttcctctttcctgagactggatctgttcaaacagcaaacgcccacagatggcccagaggtggtggtagtcagggtgtgtgggtgtttttagggttctttagtgttgtttctttcacccaggggtggtggtcccagccagtttggtgctgacggtgagaggaaattagaatctgtttgcaaattgtccgacccaccccctcaacatgaggggcttccattttctgtgttttgtaagggaactgtttccttcatgccgccatgttcctgatattagttctgatttctttttaacaaatgttatcatgattaaagaaaattccagcactttaatggccaattaactgaagaatgtaagaaaaattgatggctgtaacaagccaaataaagctggtttattaacccttggaaaaannnncnnnnccccaaacaannnnnnnnccctttgtccgggccccccctccggggcccctcccaaaaaaagctttttcctaaaaccctttttcggttttgtggg

SEQ ID NO: 54867 - DNA, 599 bp, Homo Sapiens
tataagcaaattgagcttgggtgatttttatggagacaataattagacaatactgtataattagttttacttaatagattatcatcttgtgagaagagatgtttaaacgtggtaaatcacttcatattacaaaacagttttacacttaatatgttaacattgggtgcaataatttagtagcattagctttagttacaaatataactggatctttctgctgacaacttaggttgtatgagttatgcttaaaagctttaaatctgatgtttcctgtacctgccacactatgttagaatgtgtccttcaaacatatcctcctgcaacttctcaaactgtactaaattgatatttcttgaagtctaactctgtgctaacagatctccattttaaatagaatacggttttaatttttgataagctgctgaattttaaagagagttttttggggccaccaaatattttggatcatgcagagaatatatattgtactgtagtaattttgtatttacatttgtatgatgtgacataatagatgtgaatgttaatcactgcttgactatgttaataaagttgtttaactataaaaaaaaaaaaaaaag

SEQ ID NO: 54868 - DNA, 492 bp, Homo Sapiens
atgagtgatggctatataacatgctgtttggttagatttacagtgtgtttttatgttgcagtttagtttgaaacaacacttaagcacactatttctgttagtgtatatagttttcaaactaacaagcctgcgagtccttgttagtgtagtgactgcctctttaggagtatggggccctagggtgtccatatatttttaccccatgggtcattctagtctaaggactactagtagaaccctcaaaaggtaattgctattatagggacttacttattggagactggtaatataataaaatattgaaggagtggccatggtcttagcaggttttagaatgaccttttaactccagtaactacttccttggtattggtatccttgatagagggaatataacatctggcagtaatctcattcaggttatactacctgactaaatttaatcatactttcatgtatttgtttcctcagttggacctaagttactgtatt

SEQ ID NO: 54869 - DNA, 998 bp, Homo Sapiens
tccggaattcccgggatctcgtctcgtggcccctctgctcactgcgccgctatggccgggatgccacacgctttaccttcgaggctggccggatgtgtgatgctggggaaggactctataccttccagacacaagagggggagcagatttaccagcgcgtccacagtgccaccctggccatcgcagagcagcacaagcgggtcctgctggaaatggagaagaacgtgaggctgctgaacaagggcacggaacattactcgtatccctgcacacccacgaccatgctgccgcgcagtgcctactggcaccacatcactggttcccagaacatcgccgaagcctccagctatgctgtgaggggtatggggcagcccaggccagctcggaaacagacctcctcaacagattcatcctgctaaagccaaagcccagccagggggacagcagtgaggccaagaccccatcccagtgaccacagtgctggcgagcaccgatgactgctgggggctgcctgctgcggggctggctgcagtgtaccgtggacagcctcagggggctgtcggccaagagcctggagaaagggagcaagctgccccctccttgcccccaaggatgaggctggactgaggcaaagggctggccacaccacctgagcatgtgtgaggggttggagctaccgtgggactatatactgttaatgattttaatatatatggcttatgacatactctgtatcaatgagatcccctcaccctcaccccatccttccccaccaatacacacaaattttttaatcccatgaccaggccacggtcaaggctgtttttgagtatgagtgcagtcgtgtccatcctccatggcacagccctcctgctgccaggacctgcttgaactaccagggccacaggagggggataatcagagcttgaggctggcactctgactgctggcttttcccaammagcccaagggcsggaamagaggkgggttctcagttc

SEQ ID NO: 54870 - DNA, 684 bp, Homo Sapiens
  misc_feature (657)..(657): n is a, c, g, or t
tgggattatagatgtgagccactgcacccagcccttcctctccctttctctttggggttcccttcacaaacaggtgaggcagctttttcaagggcattccaagcacaaaagaccttgttgtacctaaatactataagggacctgtcattgaggacgaaccatcacagcaagaggaattatctcgtgccgcatcttcgcataactgacaggatccctggcaaggatgtctcaatgcagaaagttggctaagtgaactgcagtatctaccctggacctaaaagaacttgctaatgttttcaagactacaattcagaggctgtctgatttaatctttgcatttacaaaaacacccttttacgtacattaaatgtggaataaaactaaaaaaaaaaaaaaaaaacgcgggcggccgcaagcttattccctttagtgagggttaattttagcttggcactggccgtcgttttacaacgtcgtgactgggaaaaccctggcgttacccaacttaatcgccttgcagcacatccccctttcgccagctggcgtaatagcgaagaggcccgcaccgatcgcccttcccaacagttgcgcagcctgaatggcgaatgggacgcgccctgtagcggcgcattaagcgcggcgggtgtggtggttacncgcagcgtgaccgctacacttgccagc

SEQ ID NO: 54871 - DNA, 569 bp, Homo Sapiens
ggatccctgatcatcaccagaccctgggattggctatgggaaagcatgccacagccactcgccttcctacccccgcccgccatccccagttgcagggggatctggggactaccagagactctgggaaatggacaaggtggggggccccgagctctttctctcctgcagtcccgtagctggggcctccttccttctcagggtctccccagcccagtccccttgctcccatcccactcggtgctgttgggtaggggccctgccaggaactgaccagctcagcgaggagccataatgtgcatatgtgcacaagcagggttgggggaggggggtgtgaggggttgtgcccaggtgttgccccctatctcctggggagggtgaggcagggcagggacagtctccagggtcagtccctggatgggtggttacctccccttcctccaccctaagccctggggccctgaaatggggtgggagggcaggggtgggagccctcctagtgggtttggggggttgggttcctgaatgcaccataatcgctgtatgaaatattaaaaagtctaaagtgaaaa

SEQ ID NO: 54872 - DNA, 611 bp, Homo Sapiens
  misc_feature (490)..(490): n is a, c, g, or t
  misc_feature (590)..(590): n is a, c, g, or t
tatcaacatttttaaattaaatgttttacattcacaagtggtggggagtcttgtcattaaggtgtgtgtaatttagagtccagttggttttcttctgactgcacttgttctcatagtagtaaaatgctatgcgcatttataccttgcataagtcctcattctaccacatgttaaccctctagctgataatgcaaacactaactgggggattttatttataagggctctagaaaaaacgagttattcacaccagcatcatcttaactaacattctgaactagttagtgcagcttttcattgtgttgtgtggttggtctcataactaggttgagtttttctcctctgctgaggaaacagtaccgaagttctttttcttgtggcatttgtattataaaaacttggtgtgggggaggagcacaaaactccagcccactgaacctctgccaattaagatggtgttgggttaggttacatctggttactgtcctgngaaaatcatttttatagagatggccttccaagtggttttaaaatttactgaagtttttaggtcaattatgtatgttgactaaatttacaaataaacttgnttatccaaaaaaaaaaaaaaa

SEQ ID NO: 54873 - DNA, 500 bp, Homo Sapiens
ataataaggcctgctgtgtaagctgacagtatttgtagctgatagggggttgggaggaaagtgtctactaggagggtggggtgagattctgtgttgatgtaggaggccgagaaggcccttaactcaaagtagcttatttatccaaaatgttctggatgcatcatctccaaccaaggaccccttatttatcatgcctttgttctcttttccctcagatgtatatttctttaaaaataattttcctaataacaaaacttatttctaaaacagcttaaaaattcaaagaaaaaccccaaacactgacattacctacacttccactacccaaagacaaaatgtgcccactgtgtgcttttgagtgtattttcttttagtttgttttttgttgggtgcatatttatgataataacaatgatggacttcaattgtactcactgttctattgttggttttaattagcagcaagttgtgatcactttcccaggtgaataaatcatttc

SEQ ID NO: 54874 - DNA, 1120 bp, Homo Sapiens
  misc_feature (11)..(11): n is a, c, g, or t
  misc_feature (727)..(727): n is a, c, g, or t
  misc_feature (885)..(888): n is a, c, g, or t
  misc_feature (890)..(910): n is a, c, g, or t
  misc_feature (912)..(915): n is a, c, g, or t
  misc_feature (917)..(931): n is a, c, g, or t
  misc_feature (933)..(948): n is a, c, g, or t
ggtaccgggtnctcggaattcccgggataaaaaaaatcccaatagtccatgaaggctttgatctcttgggaagttcttcatagatgctgtcacatttcttaaagcaaccttttaatatgcagataataccccccaacttttttagagacagcctgtctcttaaaaaaaaaattaatttggtagtgagagcttgtgtcactgccactctgttttatccctgaaattaaaggataacataaggaggacttgggcctttctgacatcatcctgaagagacaggactttgcgtttttcctctgggacctacagtgatgagaatttaatgattatctcctccactataatcctctttagggtgattttttaaatcaaaacccagtgaatctcattactcctaagaaacgaaagattccttcaaagccttttcaggcacatggtttcaacaaagcctggctttgacattccttgtcctgaggagcactttccaggcatagttacagcttccccactgtatttacaagccagaattgtgcaactcttctggatcattaataaagtagcaagatcctcaaaaaacccaaaaacaccattctctaatagtcatgacaaatggcttcagtatggcttgttttttattttccagatggctttttctcttattttttgaagccccagtctttgattttacagggtactttcaaaacatcatgatgctgccaaatgtacnttttgtaaacttaaacattatgattccctgtattatttttcagtgagagctacagtgtgataatttcagagtctatttaaataaaaatggtgaagtttgaaattacaccatctgggccaatttaccaaccaattaaaaagatttatttttttatgaannnngnnnnnnnnnnnnnnnnnnnnnannnngnnnnnnnnnnnnnnnannnnnnnnnnnnnnnnaaaaagggcggccccgctcaaaaaataaccccctccaaggggccccaaatttaaccggtaccccaatttttttttgtaaaaaaagggggcccccaaaaagggggggccccattttaaaaacttagggccctgtgggcctctttttttaaaaacccctcctgaaaaatgggaa

SEQ ID NO: 54875 - DNA, 612 bp, Homo Sapiens
  misc_feature (584)..(584): n is a, c, g, or t
attttacactggtttagaattccaacacctacagtggaaagactgtttattgtagtaatgcatggctgaagcataaaagggagagagaatttctttatatacacaaacatacatgaatatgcatatctatatgcatagatgtacctatcctgcacccaaaaaggtgcctggtattggcactaaaatcatgtagttatactgggcagcaataataattgggcatgaggctgattactcaatggtgagggtaggtatatgtagatagatgtgcatgtatgtgtttgtatatataattttataagtttcacgcataaattaatacatgcctgtgtgcatacatatgtatgggatatatttgtatatatatgtacaggtaataaacatccccaaggtttgtggctggccatacacataggcatcagtttaacaaccatcagacctcagctgtacaataacaggtgttttgtttaattaaaattatactgttctgcagcatttagacatttgtcacatttcattagctttgacaaccatactgtaacattaaacctagcattccacaagagaataaatataagattganactgtaaaaaaaaaaaaaaaaaaatggc

SEQ ID NO: 54876 - DNA, 598 bp, Homo Sapiens
  misc_feature (570)..(571): n is a, c, g, or t
ctcagaagtgaaagaacgacgaattgttctcattagggaacgaaaagcaaagagattgttctgaagaccgtgctctaagggcatttgaaagactgccaggtagtgcgagcctgagatggtctggaggattctctctagccgtgactccgctgctctgaaggtcaactgagaagtcttgtgggacagagacttgagttaggaagccctcagtcacttgccttccacggtggccagccctgctgccatcattggctgaagcaccaccaggattcacggcacccaactgcttcagggtacttcgtagactctgcctcactacatgtcgaaagagttatttgagttctcttctgtttttttttaatttgttgttgttgttactgttttgatacctcggaaacacctccgttgacagttgttttggataggttgggtgtaccccatggctgcctctgaaggcagtgtctattttgagaggatggcttacctcttctttgtgaaaatactatctcatttcctggaaataaaatgtaaaacctgtcagttgctcaaaaaaaaaaaaaaaaaattttnnaaaaaaaaaaaaaaaaaaaaaaaaaaa

SEQ ID NO: 54877 - DNA, 1120 bp, Homo Sapiens
  misc_feature (1077)..(1077): n is a, c, g, or t
gaattctcgggatcagatctgccattttcgtgtgtactatggtgtgtgtgtgtatgtgtgtggtgtgtgtgtgttttaagtttagccttttgtttttgttttttggttggcagtaaccgattttaatgactagcttttaaaaatacagtacaaagactttgtaaatgtgattcagggcccccagcacccctgtgtctgcagagtgccttcaaaactcagctgttccagccggtgccaacctgtgaacttcccaccatatcccagaatctgctattccccaaaccacttcccagtttcctttcagtaatctttctgaaggagccaggacaatagggcctgttgtttagtgaatttctttattattttcagcctttaaaatgtaatttccatctcttgcaatgaatttgtttcccttttttttgcttcattttgtttaaattttcaggtatttagctcccctttcatattatttttaaattttttaattacctgttgtagggtgttcctccagaagcaaagagcaaaattttactgttgtgatgtaccaattctaactaattgtaatttttaatttcatgcgtttaatcattgtctcttcattttaagacttttaatacaaatgtcatttttaaagaaacccccccccctcattatactccacaacacaataatataataacccacaaacaaaacaattacaaagggggggcgcctctaagaatatcccctcggagggggccaaaactaaaccggaacccactttttctttaaacaaaggggcccccctaatcaggaaccgccatcacataagatctggggcctgggcgccacgtgttttatcaccccccttgaacacggggaaaaatatgaattactcgggcgaatacttatgacgagaggcaccactttacttttctgtttagttggtaaacaagcatttggcgtccactcttcacatcaaccaaagtaatttccaccggtcctacacgcgacccattaaccacaatacctctaaatgtcggcacaattagggtatttaccacttttctctcaccctatcttacgctctatcactancataaaaaccactgcctatcatagttaggctccgccactcttg

SEQ ID NO: 54878 - DNA, 968 bp, Homo Sapiens
  misc_feature (572)..(572): n is a, c, g, or t
ggctacgcgggcggcgccgggggcgcggggggcgccgcgacggtcgccttcgctgccgaacctgtgcccttcccgccgccgccacccccaggcgcgttggggccgccgcgcctggctgcgctcaaggacgagccacagacggtgcccgacgtgccgagcttcggcgagagcccgccgttgtcgcccatcgacatggacacgcaggagcgcatcaaggcggagcgcaagcggctgcgcaaccgcatcgccgcctccaagtgccgcaagcgcaagctggagcgcatctcgcgcctggaagagaaagtgaagaccctcaagagtcagaacacggagctggcgtccacggcgagcctgctgcgcgagcaggtggcgcagctcaagcagaaagtcctcagccacgtcaacagcggctgccagctgctgccccagcaccaggtgcccgcgtactgagtccgcgcgcggggcgcatgcgcggccaccctccccaaggggcgggctcgcgggggggtgtcgtgggcgccccggacttagagagggtgcggccctgggggagcccccctccccgagtgtgnccaggaactcagagagggcgcggccccgggggattcccccccgagggtgcccaggactcggaaggggcgccccggactcgacaagctggaccccctgtccggggggggcgagcgcttgaacccccggcctcgcggctgctctttcccccgggcggcgtccccgtgttggacaaacccgcgcgtctcggctgcccttgtacaccgggccgggaagggggctcgaagggggcgcaaggctcagaccctgcttttcgtttactttaacttgagtattattattttggacaaaggaacactgaggtgttgaattgtgccaataatgtttactcaatcggaaaaacattatgttgcgtgtattagttgacatgatgtggtttacacgaatggataagaaac

SEQ ID NO: 54879 - DNA, 947 bp, Homo Sapiens
  misc_feature (663)..(772): n is a, c, g, or t
tatagtaaaaggcaaagtgttgaagatactacggtgtggtagtagttgaaaattattgccgtcattatttacatacttaagacatattagcaagttgatccaaaatgggaggccttatagatgtgcttgggggaaaatgaaggggagaaagtagccatacaggagttcaaagaattccatgcccttcagattagcccaattaccagaaacatcatgaaagatattttaaaaactaattatttactacagtgtatttcacttgtcttgtgtgtctgaacacacagaagctaattagcaagtttttaagaagtatttaaaaatcttactaggattgacattttttctgaattctgtataaatagcttatagtgagaagtactgtgctcaaattttacatttttttcctttgcaaattctgtaatttcactcaacgattaagtctaccaaagaacacactgcatgtaaaagatgtattacaatctcaaagccagtaaaagaaatcttgcttcactgttcacctgctacaagtaagagtttggtgctggtagaaacatttgactctgatgtctattttattctacataagagccatatgtaatgtactgtaacaaaggagcttcttgtccccttggtcttttaattaaaagaaatccaactgaaaannnnnnnnnnnnnnnnnnnnnnnnnnnnnnnnnnnnnnnnnnnnnnnnnnnnnnnnnnnnnnnnnnnnnnnnnnnnnnnnnnnnnnnnnnnnnnnnnnnnnnnnnnnnnnaaaaaagggggccccccccaaaaaatccccccggggggcccaaggtttacccggaccccaattttttgggaaaaaagggggcccctaaagggggggccgtatttaaaacaagggccccgggcccccggttttaaaaagcgtggggcgggggaaaacgcggcacttttgggaccta

SEQ ID NO: 54880 - DNA, 561 bp, Homo Sapiens
tggccctaggcggcctgaaatagaagggcaaggagttggtgcacacctacaagggctgcatcaggtcccaggactgctactccggcgttatatccaccaccatgggccccaaggaccacatggtaaccagctccttctgctgccagagcgacggctgcaacagtgcctttttgtctgttcccttgaccaatcttactgagaatggcctgatgtgccccgcctgcactgcgagcttcagggacaaatgcatggggcccatgacccactgtactggaaaggaaaaccactgcgtctccttatctggacacgtgcaggctggtattttcaaacccagatttgctatgcggggctgtgctacagagagtatgtgctttaccaagcctggtgctgaagtacccacaggcaccaatgtcctcttcctccatcatatagagtgcactcactccccctgaaaagctatctgaacagaggaagataatgtagtgtgaagtccccatttgtcctcagcctgtaactccccgtgtgcctataaagaagttaatagagaaaaaaaaaaaaaaa

SEQ ID NO: 54881 - DNA, 607 bp, Homo Sapiens
  misc_feature (579)..(581): n is a, c, g, or t
ggtccggaatttccgggatgccagtgatgatcagccagagaagcctcactttgactctcgcagtgtgatatttgagctggattcatgcaatggcagtgggaaagtttgccttgtctacaaaagtgggaaaccagcattagcagaagacactgagatctggttcctggacagagcgttatactggcattttctcacagacacctttactgcctattaccgcctgctcatcacccacctgggcctgccccagtggcaatatgccttcaccagctatggcattagcccacaggccaagataacttataatatcaaaatgaatagaagaaaatgtgttcactggaaactggctgttgagcccctccaatgggagctgaggagctgtgtctctgcaggcatggggactggccacaagcaaagagtcagcagcatgaagccccggagctgtagcgtgtgcagcaggcgccaatccaacagcatgggaacaacagtgtcgcaatcattcctcagttatggcaagaatgtgctatttttcactgttaggtgttgcttctgagaactacaaataaaactctccaaccnnnaaaaaaaaaaaaaaaaaaaaaaaaag

SEQ ID NO: 54882 - DNA, 763 bp, Homo Sapiens
  misc_feature (737)..(741): n is a, c, g, or t
  misc_feature (743)..(743): n is a, c, g, or t
  misc_feature (745)..(756): n is a, c, g, or t
tgctgtcagccctggggttgctaaggaagctgcttcagggagttgggggttagttgcccgctctcaacaggaatgcctcctctactttgtcagagatgctgaacaaatatcaaactctgtggcagtcatgctggcctcctaagaataacctgtgagtcagagttgatgcacattatttttgtttttattttatttttttaaggaactgctccaagggttcattatagaacaggagtgtgtacggaggacttaggtccccacatagagtggccgttctgtggcggctccaaccaattccatccctcctttcctgcggacacacacctggcccctggcccctgccctgtgtgtctggaggaggggcactggggaggctgtggagcagagagaagaggccggatacattgaggatggcacctggcaagccaggcttccttctcaaaggccagactgctttctcagtgttacttactaaagctctctttttatactgttaaaaagatatataaagttcgtataaacaggcttgagaccactttgatgtaaaagctgtcatagtagtttttctcacagtggcacaattcatttgattgatggaatattcagtgacgccatgtatgccctatcgcttttttctcatccatctttatgctataactcatactgatttaagaaatgatttctccttttggcaaagcgaccccattcaatatggttataataaaagactaatgtcnnnnnanannnnnnnnnnnnaaaaaaa

SEQ ID NO: 54883 - DNA, 479 bp, Homo Sapiens
gacgttagaagacactctgggctgtagcagttgtagagtagcttcggctctggtctggcttctctctgggatttagttaaaagtttcccttcttttgtcaagcgttcttttctttctttttcttttggctttttcctttctcttttttcttgttccaatcgttcctcttctttacgcttggcttctaattcttcaagccgttttatacgttcttcctcttctctcttctgtctttcttcttcctctttaagcttagccagagcttcttgcatagctttaacagtggctttgctaggtccttttttcttctctttctctttttcttccttttctcctttctttttcttcttatctttcttcttttttgtctccttcattgtcatcttctgcagctgtgggagtctctgctttctcttcagaggcaggaattactccagtatcaacagtcactttggatcctacagtttcttctccaaatt

SEQ ID NO: 54884 - DNA, 663 bp, Homo Sapiens
ctgccacctggtgaccaccttgagtacagaagtgaaagtggggagagtattttattcaagtcacagcagaactggaaaaaaactcttctgttttaccaacttcttgtgtttcagaaacatattctgttcaaaacttttgaagccctttcggtgtctagtctgcagatgtttttgtatgtgtgcacctctgaccatgtgtgtacatatgtgtcttgctggaaaggacatattcgctgtccccgtgctgctgggagggccgcctcacagcctcacggttcccagccccagcacagtggaggcaggcgtggctgcattcccctcacgctaccctcccagcggcttgtagccgtcactggccagacctccagggtgcggaatcaaataggaagcatgcagagactcggcagcttttcctctgatgtgtaagttatttggaacgcgtgctgtgtcccgcgatgtccctgatgtactgtgcaggcgcggtgcctccgtctcgtcgcacagctgcgcgcccttgtgtgaccctccccataaaggcactttacagcttcatgtttcatccactgtcacttttttttaactgctgatgtaaatggaattttaaaagcagagttctttattgtatggatgacgtttgaataaatatcagcaactcctgcaaaa

SEQ ID NO: 54885 - DNA, 652 bp, Homo Sapiens
  misc_feature (613)..(614): n is a, c, g, or t
  misc_feature (619)..(619): n is a, c, g, or t
acctgacaaggttcggagtgatgggggcggccaaggtgacactgggtccaggagctccctggggccctggcctaccactcactggcctcgctccccctgtccccgaatctcagccaccgtgtcactctgtgacctgtcccatggatcctgaaactgcatcttggccctgttgcctgggctgacaggagcattttttttttttccagtaaacaaaacctgaaagcaagcaacaaaacatacactttgtcagagaagaaaaaaatgccttaactataaaaagcggagaaatggaaacatatcactcaagggggatgctgtggaaacctggcttattcttctaaagccaccagcaaattgtgcctaagcgaaatattttttttaaggaaaataaaaacattagttacaagattttttttttcttaatgtagatgaaaattagcaaggatgctgcctttggtctctggtttttttaagctttttttgcatatgttttgtaagcaacaaatttttttgtataaaagtcccgtgtctctcgctatttctgctgctgttcctagactgagcattgcatttcttgatcaaccagatgattaaacgttgtattaaaaagaannaaacnacagataagaaagagataataataaaaagggcg

SEQ ID NO: 54886 - DNA, 562 bp, Homo Sapiens
gcgctgaacctgtacacagacatcatcaacatcttcctgtacatcctcaccatcattggccgcgccaaggagtagccgagctccagctcgctgtgcccgctcaggtggcacggctggcctggaccctgcccctggcacggcagtgccagctgtacttcccctctctcttgtccccaggcacagcctagggaaaaggatgcctctctccaaccctcctgtatgtacactgcagatacttccatttggacccgctgtggccacagcatggcccctttagtcctcccgcccccgccaaggggcaccaaggccacgtttccgtgccacctcctgtctactcattgttgcatgagccctgtctgccagcccaccccagggactgggggcagcaccaggtcccggggagagggattgagccaagaggtgagggtgcacgtcttccctcctgtcccagctccccagcctggcgtagagcacccctcccctcccccccacccccctggagtgctgccctctggggacatgcggagtgggggtcttatccctgtgctgagccctgagggca

SEQ ID NO: 54887 - DNA, 521 bp, Homo Sapiens
ggcgccgtgtgctggattccaggcttctggcaattgtagatttagtttgactctccccaaagtgcatgagacacatgctaaaattacaaattaaaattttgggtcagactttgccataatgatagactcaatttagctctctgaactagttggtaattttttttttttaattcccactttggctgtgtacatcaaatgaaatgagaagtgtgtatgctgaccaaaccacaagaaactttctttaagttgtgttaaagaggaaagacctagaatccaagcgtgttacatgaaaattgtaacagagcagctgcttccacctttcaaatatagatgttggaaccacagcagaagttatagagcgacaacttatatacacacctagaatgtaagttaaacaaaataccggcttccaaagaccccttttctccagccatattacatcaggctagaagtaattaatgttgatttatttcatctacaagcagttggtccctaagtgaaaggctctgcttgaaaaaaaa

SEQ ID NO: 54888 - DNA, 778 bp, Homo Sapiens
cgcttcagcccgggacatgcccttcagatggcttattctcagtaaagctttatgtagactgtgacactgtatatgtgtgactcgtacaactttgacgtgtttctgaagtggtttaatcgtatttgttattagcttcttgtggaaatgcaatttttatactaaaaacattgcttatttgcaatgcaatatgttataaatttgttgtttatattactggtattagtcttagcctaatgaacctaattatttttctttctgtattctttgcttcctcaaatagcatctgcagcaattggaatgagaaatccagatatgtgtttcaagtagtacattgcctgaatcacaaatcacttgatcacagtattgtatataatccctgatcctatttgtttcattttattgtaaattcccatttgcatcaaaacctaatgatagtgattggtaagtaaaaacaaatggtgtattgcttttcatacaagtgttttcacaaaagccatttgcctaggcagcaaaaaatattaattgggttacaaacaacagatttttccctttccgtgttcccaacggaaaacaacaacagaagagaagaaaaacgaagaaccacagagaagcaacgcacatgacaatagagagcaaatctgtgaacaccaagcgaaaggacaggagcagcaatgaaggcgacagcagaaaaaagcaaagaagggcggcggccatgacggagagacacaagcgcagcacgtacgagcacagggaggggccagggacgaggccgcagagc

SEQ ID NO: 54889 - DNA, 499 bp, Homo Sapiens
gtggctttggcaacagatcccaatatcctgagcctgagtggtaaggtgctgccatcctgtgaccttgctcgacgctatggccttcgggatgtggacggccgccccgtccaagactatttgtctttgagctctgttctctcacacgtgtccggcctgggctggctggcctcctacctgccctccttcctccgtgtgcccaagtggattattgccctctacactagcaagttctaaccctcctggtctgacactacgtctctgcttgtcttctcatttggacttggtggttcgtcctgtctcagtgaaacagcagcctttcttgtttacccatacccttgatatgaagagaagccctctgctgtgtgtccgtggtgagttctggggtgcgcctaggtcccttctttgtgccttggttttccttgtccttctttttactttttgccttagtattgaaaaatgctcttggagctaataaaagtctcatttctctttcaaaaaa

SEQ ID NO: 54890 - DNA, 747 bp, Homo Sapiens
gaatcatttgttcaaagctgttggcctctgcaaaggaaataccagttctgggcaatcagtgttaccgttcaccagttgccattgagggtttcagagagcctttttctaggcctacatgcttgtgaacaagtccctgtaattgttgtttgtatgtataattcaaagcaccaaaataagaaaagatgtagatttatttcatcatattatacagaccgaactgttgtataaatttatttactgctagtcttaagaactgctttctttcgtttgtttgtttcaatattttccttctctctcaatttttggttgaataaactagattacattcagttggcctaaggtggttgtgctcggagggtttcttgtttcttttccattttgtttttggatgatatttattaaatagcttctaagagtccggcggcatctgtcttgtccctattcctgcagcctgtgctgagggtagcagtgtatgagctaccagcgtgcatgtcagcgaccctggcccgacaggccacgtcctgcaatcggcccggctgcctcttcgccctgtcgtgttctgtgttagtgatcactgcctttaatacagtctgtcggaataatatttataagcataataataaagtgaaaatattttagaactacaaaatgacatcgtatcacgtggtggccgagctcttctagaatctggtagctcttggctaatttcagacaaaggagttaaaagaaaccactttacaaccgact

SEQ ID NO: 54891 - DNA, 479 bp, Homo Sapiens
aagaggtatttttcatcaattctccccttctctgctcttctccctttctaataccataaggcagttcttcgtgacttttacagaaacatatgtacacgtccttacagagtttaggagagcctgtgggctttttgccttagtctgctagaaagactggcctgctgctctctgctttatccagaggtctgcctctgggacttcagccctgtagctgtagagaccagaagaccaaccctctttgagacccagatgctactttcccttgcgtccccctctctttgctctcccaatgagccaaccttttgcacttccactagaatgccaggcaggctgggccccaaaggctcctttttcaaaacctctggaagccgcggttgaatgtgccatgaccctctccctctctggatggcaccatcattgaagctggcgtcatcggagtctcttgttctgttggcgtgctacctggaagatccttctgt

SEQ ID NO: 54892 - DNA, 506 bp, Homo Sapiens
cagcccggccggctccccaccctcagagcccaactgcctcctggagctgcagacgtgaggcccgccctacgctccccttgctgagtcccctgccaagcgcttggagcccccccaggacactctgcaccccctcaccccggtcctcctcattagggtgcagggcctaggtctcttccaggtgggggaggggggagagtcaggaataaggggatccccagaagtgcagagctgagcaggcttgggcctgtcatggctggccggaagtgtccccagctccctacagacgctgtagccatcactgcctctccagggaccctcctctcctgcccaggacagacccagccagaaccactgctaggatgggccacacccaggggtctggcctccagggacctagagaatgggagggagaacggggccccaggagacccggccgccaccccacccgctacccttgggtgccacagggctgtgctgttgccaacagtaaacctgctcttactgtc

SEQ ID NO: 54893 - DNA, 962 bp, Homo Sapiens
  misc_feature (785)..(785): n is a, c, g, or t
  misc_feature (919)..(919): n is a, c, g, or t
  misc_feature (922)..(924): n is a, c, g, or t
cggaagtgtttgttggaaaaagtggaagtcatcaccggggaggaggcggagagcaatgtgttacagatgcagtgcaagctgtttgtctttgacaagacctcacagtcctgggtggagagaggccgggggctgctcagactcaatgacatggcgtccaccgatgacggcacactacagtcccgactagtgatgcggacccaggggagcctgcgactgatcctcaacaccaagctgtgggcccagatgcagatcgacaaggccagcgagaagagcattcgcatcacagccatggacaccgaggaccagggcgtgaaggtcttcctgatctcggccagctccaaggacacaggtcagttgtatgcagccctgcaccaccgcatcctggccctgcgcagccgcgtggagcaggagcaggaggccaagatgcccgcgcctgagcctggggcagccccatccaacgaggaggacgacagcgacgatgacgatgtcctggctccttcaggggccaccgcagctggtgctggtgacgaaggggacgggcagacgaccgggagcacatagcggccgggagcccggctgcacaccaggctgctgctttgtccgtctatccacccgcccacccgcccccaccccaccggcagcgtccaggtgcggggccgggaaccacacaccccactgggccggccacagtctggacccgcacgtcctgttcaaaagcagactcgggaactgcctgaatgtggtttgggacacgagacctcatcatattgatgagcgaacaaacnagaacattttctccctcccctcctttgaatgaaatggcacattaagacttgtcacgggcttctcactgggactgggagactcgttccttcaccccgcgtgtcgccagcctctggggtcagccagagcccctggnttnnntcgcaaccaaaccttttcaaaccgtgtgtggggccctg

SEQ ID NO: 54894 - DNA, 644 bp, Homo Sapiens
ggccgcctcatgggccccaagggagtggccgtagaccggaatggacatatcattgtggtcgacaacaagtcttgctgcgtctttaccttccagcccaatggcaaactggttggccgttttgggggccgtggggccactgaccgccactttgcagggccccattttgtggctgtgaacaacaagaatgaaattgtagtaacggacttccataaccattcagtgaaggtgtacagtgccgatggagagttcctcttcaagtttggctcccatggcgagggcaatgggcagttcaatgcccccacaggagtagctgtggactccaatggaaacatcattgtggctgactggggcaacagccgcatccaggtattcgacagctctggctccttcctgtcctatatcaacacatctgcagaaccactgtatggtccacagggcctggcactgacctcggatggccatgtggtggtggctgatgctggcaaccactgctttaaagcctatcgctacctccagtagctgtacagaggccctgcctggcttgtggagggacagacattggggtgattggacaagagggtctggctgggaggtgggccagacctggcagcactgaatgtgggctgtgggcatgggtgcacccg

SEQ ID NO: 54895 - DNA, 595 bp, Homo Sapiens
  misc_feature (569)..(569): n is a, c, g, or t
  misc_feature (586)..(586): n is a, c, g, or t
  misc_feature (593)..(593): n is a, c, g, or t
ggcaacagccgcatccaggtattcgacagctctggctccttcctgtcctatatcaacacatctgcagaaccactgtatggtccacagggcctggcactgacctcggatggccatgtggtggtggctgatgctggcaaccactgctttaaagcctatcgctacctccagtagctgtacagaggccctgcctggcttgtggagggacagacattggggtgattggacaagagggtctggctgggaggtgggccagacctggcagcactgaatgtgggctgtgggcatgggtgcacccggtgccctccctctcctacccccacccccacggttgcactttatttattcggttcttgctttggtgactgggtgagcctggactgtggtcccaaggatgtgtgcagagcttcaccctacccttcttacacacctccccacccctgtcagtctgctccccatcccccaacctggggccaaaacagcctaccccaaggacaggagtccctctagttgtctccctaccaccctattcacactgacagagacagcaataccccaccccccatattaantaaatgtcttcaacaangaaaaantc

SEQ ID NO: 54896 - DNA, 857 bp, Homo Sapiens
  misc_feature (837)..(837): n is a, c, g, or t
tctcccagacggaggagaagctcctacagaagccgtgcaaagaactcttttctgcctgtgcacagtctgtccacgagtacctgaggggagaaccattccacgaatatctggacagcatgttttttgaccgctttctccagtggaagtggttggaaaggcaaccggtgaccaaaaacactttcaggcagtatcgagtgctaggaaaagggggcttcggggaggtctgtgcctgccaggttcgggccacgggtaaaatgtatgcctgcaagcgcttggagaagaagaggatcaaaaagaggaaaggggagtccatggccctcaatgagaagcagatcctcgagaaggtcaacagtcagtttgtggtcaacctggcctatgcctacgagaccaaggatgcactgtgcttggtcctgaccatcatgaatgggggtgacctgaagttccacatctacaacatgggcaaccctggcttcgaggaggagcgggccttgttttatgcggcagagatcctctgcggcttagaagacctccaccgtgagaacaccgtctaccgagatctgaaacctgaaaacatcctgttagatgattatggccacattaggatctcagacctgggcttggctgtgaagatccccgagggagacctgatccgcggccgggtgggcactgttggctacatggctccagaggtcctgaacaaccagaggtacggcctgagccccgactactggggccttggctgcctcatctatgaaaatggatcgaggccagtcgccgtttcgcgggcgcaagggagaagtgaaacccggaaggaggtggaaccgccgggtctggganaaacggaggaggggtactcc

SEQ ID NO: 54897 - DNA, 610 bp, Homo Sapiens
ccggtatttctgcagcagatagaatattaaaatcaggttgtgtgtacacactgcactatgaggtaccttggtgtcctggtgtgaatagacaagaagctgtactatatgttgctctctcagtggcaacaatgaagtttttgcaattctagaacttggatttttttttaacaaaagtcccaaaacaccaaaaatgtaaacaagataagagattaatattgtagtgatgtaatttaattaaagttatattttgggttaattttaacaactgaagtcttattgttgaaacttattttcaacaaaactgtgcagttaaatttgtatacgtattcacatactgaaagatgaaccgttaaaatagcacttaattttgtgtttcttcaatatgtcttgatatactttgtgcaattaatattacacatgtaagttgtatggcagtttacagaactcaatgacttgtcatgaggttttcatatgagctacacattgtgtacattgattgttttttatttttacataaatccattctgtcattttcaactttatatataaatctccaatgttatgggaaacaatagattgacacataatttttaaaaattatatttgtaaa

SEQ ID NO: 54898 - DNA, 1102 bp, Homo Sapiens
attcccgggataagtgagtggccgtgagcgcgtcctcctcatctctgtctccctgtgggaaactctacaaacaaggcaatggcaatggaaccactcctgatgaccacgagggtcagacgcgggacagaggcccctcaggcctgagattgtgccggccgccccctgccctcctcaccctgccctgctcctcttctctgctccctccccccatattcgcaggtctgcacaacccccggacctgttcacacccgcatggggacagctgtctgtgggctgcagagcaggcactgctcagtctgccccacgccaagggcccttgactcacacccaggtggcccacccaagatgcctgatgcgctatgtcctgttccttctagattcttctgatgtagagcgactggaaagattcttcgactcagaagatgaagactttgaaatcctgtccctttgaaaatcctggggtcgggggtggcacctgtgagagcctggggctcctggtgccgctgcgtttcatccatcccgcccgctcgcctgccgagggctgcgccccgtgctgcctccccccagagggccacccgctgtgctcgtggactgaggctgcgctgcccgggaggccttactgcttggtgtcagactgcccagctcagagtgcccgtcagggcctgtgcatccgcacgcggagccgtctgttaggagcttccagagtgttctctcgacactgccagccccgtgttagcacctgggcctcagtcccacttgctcccagcggccggatctgggggttggttttgaaataaaggtcgggtttgaagtggtccctaaaccgcatcatcctcgacaagaaccggccccggtcgcgataacgcccggaagaggcgccccgcccttaaagatttccctccaggggggccgagcttttcgcgggcccccgttctcttggcacaaaagtagcccccatggcgccatcctcatattaaacgcagagacctggcgccgtctttacttacaaacggcccgacgcggtgcacaacccgtctcgctctgcatacatttttacgacggacaacactatgtcgttgtggggggggcaaacaaaagcggc

SEQ ID NO: 54899 - DNA, 872 bp, Homo Sapiens
ctggaccggtccggattcccgggattataaaccaaagactggggacaaatgtgtgttgaattttaagccatgtggcctttttggtaggaattaccttagttgaaggctacattcaagataaaagcaaaaagaagctctgtgccctctatgggaagtggactgaatgtttatacagtgttgaccctgccacgtttgacgcttacaaaaaaaatgataagaaaaatacagaagagaagaagaacagcaaacagatgagcacctctgaggagttggatgaaatgccagtgccggattctgaaagtgtattcattatccctggaagcgttcttctatggcgaatagccccacggcctccaaattctgcccagatgtataattttactagttttgcaatggttttgaatgaagtagacaaagacatggagagtgtgattcccaagacagactgcaggttacggcctgacatcagagccatggaaaatggagagatagatcaagctagtgaagaaaaaaaacgacttgaggaaaaacaaagagcagcccgcaaaaacaggtccaagtcagaagaggactggaagacgaggtggttccatcaaggtcctaatccctacaatggagcacaggactggatttactctggcagctactgggacagaaattacttcaatttgcctgacatttattaaaatgcatacaagtcagggtgtttggctaatctacaaataagtcttaaacctatgttttttaaatttttttttcccttgggtttctacttatctttttaaaaaaaaaatgaaaaaaacactcatgagaataacttgcattttcaccccaacaaaagcaggggtataaagggcgaatatttgggtgat

SEQ ID NO: 54900 - DNA, 735 bp, Homo Sapiens
ggagggggccctggggaccctggtaatgctttagtcaaagggatatctctcttgtatcagaggctgcgtcttttagtaacaggagtcctcgtcagaattgcgtgtctgttgtctctaaaagaatgggtgaaccaatcggcctttgtgaatttattcagtgccttctctgtaccaagcactgggtaaggcacttttgtggagcattagacagtaaccctcaaggagctagagaaccggatgggagacatgagcggtaattaactcacttgttccccagagtttctatttgttttgattttctttttctgtgacttattttcctattttctttcctccatgtaattttcactatggcccaactaatataaacacctggaaattacaaggaaaaaaaattcttcctctaataactttccaaatttgtggaatatttatttgtaatagcagttatcagttatgcttatatagcattaaaaattctcctcctttgactacacacacaaccacagtgtggttctaatcatggagatatcagtaatttttagtaactgaattttgaggacatttctctgtttagcatgtatgcaaactgatatgtaatctgaggttccaaagtcaatttttttcttttttttttgagatggagtcttactctgtcacccaggctggagtgcagtagcacgatcttggcttactgcaacctctacctcctaggttcaagcaattgtcctgtct

SEQ ID NO: 54901 - DNA, 655 bp, Homo Sapiens
ataagaccatttattagtaggtgtgctgtgtgtgaggcgcctgccatggtgatggccgtgcacagccagaccattcagatcccaccgtgccccagcgggtggtcctcgctgtggatcggctactcttttgtgatgcacaccagcgctggtgcagaaggctctggccaagccctggcgtcccccggctcctgcctggaggagtttagaagtgcgccattcatcgagtgtcacggccgtgggacctgcaattactacgcaaacgcttacagcttttggctcgccaccatagagaggagcgagatgttcaagaagcctacgccgtccaccttgaaggcaggggagctgcgcacgcacgtcagccgctgccaagtctgtatgagaagaacataatgaagcctgactcagctaatgtcacaacatggtgctacttcttcttctttttgttaacagcaacgaaccctagaaatatatcctgtgtacctcactgtccaatatgaaaaccgtaaagtgccttataggaatttgcgtaactaacacaccctgcttcattgacctctacttgctgaaggagaaaaagacagcgataagcttttcatagtggcataccaaatggcacttttgatgaaataaaatatcaatattttctgcaatccaa

SEQ ID NO: 54902 - DNA, 730 bp, Homo Sapiens
  misc_feature (6)..(6): n is a, c, g, or t
  misc_feature (13)..(13): n is a, c, g, or t
ttttgncacctantggtccggcattcccgggtcgacccacgcgtccgctcataccaccctggctgctgacgttatgagacctcgaaggaatgatcctcccttagctgtcctgacacaggacaatatgacagtggatgatatagaaaacatgattaatgaaaccagctacaatggatttcctgtcataatgtcaaaagaatctcagagattagtgggatttgccctcagaagagacctgacaattgcaatagaaagtgccaggaaaaaacaagaaggtatcgttggcagttctcgggtgtgttttgcacagcacaccccatctcttccagcagaaagtcctcggccattgaagcttcgaagcattcttgacatgagcccttttacagtgacagaccacaccccaatggagatcgtggtggatattttccgaaagctgggactgaggcagtgccttgtaactcacaatgggcgcctccttggcattataacaaaaaaagatatcctccggcatatggcccagacggcaaaccaagaccccgcttcaataatgttcaactgaatctcacagatgaggagagagaagaaacggaagaggaagtttatttgttgaatagcacaactctttaacctgagggagtcatctacttttttttcctcctttacaaaaaaagaaagggaaatataaaaagcccgggtttttgcaacatggtttgcaaataatgctggtgga

SEQ ID NO: 54903 - DNA, 802 bp, Homo Sapiens
ggagagagggcaccaccaaaagtgaggtcttctacccagggagacggtagtacacgggcctggtgaggcaacagctgtggagtgggggccaaacacatggattggtggagtacggccggggcgtcaatcccatccaccctggccttcgcgctggccgacactgtcttcagtcacccaggacttcctcaccctcttctatactcttcgctcctatgctcggggcctccggcttgagctcaccacctacctctttggccaggacccttgaccagccaggcctgaaggaagacctgcggatggacaggagcgggcaggcccgcacatatccacttgctggagcccatgtttacagacagggacatacaccatgcagatcctgagttcctgctgtatgagcagggatatccatgcttatgtatccaaacacagagacccatgggaacaaatgagacacatatagatactgagacctgtgtgtacagtaggaccatgcactcacacccatctggagagggagcccccggtataccaagggagccagttgtgttcagacacacacatcacagcttgactcactaactgaggcctttccatagctccacagcttcccacctcctccccaccaaaccggggttctagagttaaggatggcgggaggggtattatactggctcagtctgactcctcaaccagcagcaatttgaggggatgagggggacagaggagctgctttttggaggccccttcacctgcagtatgatgcccttccccttctccctgttctcaccatatgcttatccca

SEQ ID NO: 54904 - DNA, 567 bp, Homo Sapiens
  misc_feature (567)..(567): n is a, c, g, or t
ggggaaaattacttaaaacgtgaatacatcatcacagtagaatttattatgagagcatgtagtatgtatctgtagccctaacacatgggatgaacgttttactgctacacccagatttgtgttgaacgaaaacattgtggtttggaaaggagaattcaacaattaatagttgaaattgtgaggttaatgtttaaaaagctttacacctgtttacaatttggggacaaaaaggcaggcttcatttttcatatgtttgatgaaaactggctcaagatgtttgtaaatagaatcaagagcaaaactgcacaaacttgcacattggaaagtgcaacaagttcccgtgattgcagtaaaaatatttactattctaaaaaaatgagaattgaagacttagccagtcagataagttttttcatgaacccgttgtggaaattattggaattaactgagccaaagtgattatgcattcttcatctattttagttagcactttgtatcgttatatacagtttacaatacatgtataacttgtagctataaacattttgtgccattaaagctctcacn

SEQ ID NO: 54905 - DNA, 520 bp, Homo Sapiens
  misc_feature (3)..(3): n is a, c, g, or t
ttnctaccccaccccctcagcctcagcagcagcaggtgaaacaaccttgccagcctccaccccaggaaccatgcatccccaaaaccaaggagccctgccaccccaaggtgcctgagccctgccaccccaaagtgcctgagccctgccagcccaagattccagagccctgccagcccaaggtgcctgagccctgcccttcaacggtcactccagcaccagcccagcagaagaccaagcagaagtaatgtggtccacagccatgcccttgaggagctggccactggatactgaacaccctactccattctgcttatgaatcccatttgcctattgaccctgcagttagcatgctgtcaccctgaatcataatcgctcctttgcacctctaaaaagatgtcccttaccctcattctggagggctcctgagcctctgcataaggctgaacgtctcactgactgagctagtcttcttgttgctcggcttgcatttgaggatggatttggggagggatcaagtgaa

SEQ ID NO: 54906 - DNA, 591 bp, Homo Sapiens
  misc_feature (579)..(579): n is a, c, g, or t
taaatattttatggttttatttatttactgtgttctcatgctgtgtttttcttttctctgtctctccctcctgctcgtgtctgcccagggctgattgttgtgacattggccgtatgctggatgcccaaccagattcggaggatcatggctgcggccaaacccaagcacgactggacgaggtcctacttccgggcgtacatgatcctcctccccttctcggagacgtttttctacctcagctcggtcatcaacccgctcctgtacacggtgtcctcgcagcagtttcggcgggtgttcgtgcaggtgctgtgctgccgcctgtcgctgcagcacgccaaccacgagaagcgcctgcgcgtacatgcgcactccaccaccgacagcgcccgctttgtgcagcgcccgttgctcttcgcgtcccggcgccagtcctctgcaaggagaactgagaagattttcttaagcacttttcagagcgaggccgagccccagtctaagtcccagtcattgagtctcgagtcactagagcccaactcaggcgcgaaaccagccaattctgctgcagagaatggttttcangagcatgaagta

SEQ ID NO: 54907 - DNA, 905 bp, Homo Sapiens
tcgttttttagtcatgaagcaatccttgctacggatcttaaaaagcatttgattttctcgcagaattcaatgccaaggcaaatgatgtaaatagtaatggcatagaatggagtaatgaaaatgatcgcctcttggtatgccaggtgtgcatcaaactggcagatataaatggcccagcaaaagttcgagacttgcatttgaaatggacagaaggcattgtcaatgaattttatgagcagggagatgaagaagcaaatcttggtctgcccatcagtccattcatggatcgcttcttctcctcaactagcaaaactccaagaatcttttatcacccacatagtgggtcccctgtgtaactcctatgatgctgctggtttgctaccaggtcagtggttagaagcagaagaggataatgatactgaaagtggtgatgatgaagacggtgaagaattagatacagaagatgaagaaatggaaaacaatctaaatccaaaaccaccaagaaggaaaagcagacggcgaatattttgtcagctaatgcaccacctcactgaaaaccacaagatatggaaggaaatcgtagaggaagaagaaaaatgtaaagctgatgggaataaactgcaggtggagaattcctccttacctcaagcagatgagattcaggtaattgaagaggcagatgaagaggaatagcgacagtatgagtaaaagaaacagtcatattgaagaagcccagagggttgtgcccaggagcagaaatcaatgcctagtgttcaccgggtgaattcttcaatgaacattcccatgtggacaggccttaatatgtgagaggatcctggctctggtggacatttcccactcctatgacttgcaaaggaatagaacatatgttaaccaaataccat

SEQ ID NO: 54908 - DNA, 629 bp, Homo Sapiens
ctggatgaggtgtaccttattgactcgggtgctcaatacaaggatggcaccacagatgtgacgcggacaatgcattttgggacccctacagcctacgagaaggaatgcttcacatatgtcctcaagggccacatagctgtgagtgcagccgttttcccgactggaaccaaaggtcaccttcttgactcctttgcccgttcagctttatgggattcaggcctagattacttgcacgggactggacatggtgttgggtcttttttgaatgtccatgagggtccttgcggcatcagttacaaaacattctctgatgagcccttggaggcaggcatgattgtcactgatgagcccgggtactatgaagatggggcttttggaattcgcattgagaatgttgtccttgtggttcctgtgaagaccaagtataattttaataaccggggaagcctgacctttgaacctctaacattggttccaattcagaccaaaatgatagatgtggattctcttacagacaaagagtgcgactggctcaacaattaccacctgacctgcagggatgtgattgggaaggaattgcagaaacagggccgccaggaagctctcgagtggctcatcagagagacgca

SEQ ID NO: 54909 - DNA, 633 bp, Homo Sapiens
tgggctggtctttcattcactgtccagcttgccaatgcaacggccacagtaaatgcatcaatcagagcatctgtgagaagtgtgagaacctgaccacaggcaagcactgcgagacctgcatatctggcttctacggtgatcccaccaatggagggaaatgtcagccatgcaagtgcaatgggcacgcgtctctgtgcaacaccaacacgggcaagtgcttctgcaccaccaagggcgtcaagggggacgagtgccagctatgtgaggtagaaaatcgataccaaggaaaccctctcagaggaacatgttattatactcttcttattgactatcagttcacctttagtctatcccaggaagatgatcgctattacacagctatcaattttgtggctactcctgacgaacaaaacagggatttggacatgttcatcaatgcctccaagaatttcaacctcaacatcacctgggctgccagtttctcagctggaacccaggctggagaagagatgcctgttgtttcaaaaaccaacattaaggagtacaaagatagtttctctaatgagaagtttgattttcgcaacacccaaatatcactttctttgtttatgtcagtaatttcacctggcccat

SEQ ID NO: 54910 - DNA, 652 bp, Homo Sapiens
tgtaagttcattatgtaagatccttttttttttcataatatgtattcttggctgctatgcgtggtttttcaggaaatttaattatcttactgagatgtgaaagcaaaactagtaacagaacttacatcttatttcatgctttcttaaacccgtgcatattctggtgaaacatgtaaaatactttaagtaaaattgaacatttttatttgaatttttgctgaactgataaaggtgtttatatttttgtttgtttgtttgtttaattcatgtttgttgggactgaggtttaggaagtttgttactggttaaaaacctcaaatgaaatgcgaaagaatttgaatttttcctgcatatgtcaactttggacagctttcaagaaaaatgagaaaagtttcaacttctggcggttaaaatattaatgcagaatttactaagattttattcatttgcattagcaaatattcatgcagcagcagttgactgaaaatttattcttatgagacgtatagtattcatttttacatgcatgattgtacattatgtatagacgacaatgtttttaatttataaatttcattctttgttaattgcatgggttgttctgcagcttattgtgaataccttggttctgttcaatagaaacattttgtat

SEQ ID NO: 54911 - DNA, 1013 bp, Homo Sapiens; identical to SEQ ID NO: 2349
  misc_feature (765)..(765): n is a, c, g, or t

SEQ ID NO: 54912 - DNA, 868 bp, Homo Sapiens
gtcgtccgggagccgcgaccgcatgatcctgcagagggacatccgcaccccgccactgcagtcggagcggcggctgcagggccaccggcaggaggtgtgcgggctcaagtggtccacagaccaccagctcctcgcctcggggggcaacgacaacaagctgctggtctggaatcactcgagcctgagccccgtgcagcagtacacggagcacctggcggccgtgaaggccatcgcctggtccccacatcagcacgggctgctggcctcggggggcggcacagctgaccgctgtatccgcttctggaacacgctgacaggacaaccactgcagtgtatcgacacgggctcccaagtgtgcaatctggcctggtccaagcacgccaacgagctggtgagcacgcacggctactcacagaaccagatccttgtctggaagtacccctccctgacccaggtggccaagctgaccgggcactcctaccgcgtgctgtacctggcaatgtcccctgatggggaggccatcgtcactggtgctggagacgagaccctgaggttctggaacgtctttagcaaaacccgttcgacaaaggagtctgtgtctgtgctcaacctcttcaccaggatccggtaaacctgccaggcaggaccgtgccacaccagctgtccagagtcggaggaccccagctcctcagcttgcatggactctgccttcccagcgcttgtcccccgaggaaagcggctgggcgggcggggagctgggcctggaggatcctggagtctcattaaatgcctgatttgtgaccatgtccaccagtatctggggtggggcacgtggtccggggaccctcagcagcaagggctctgtctc

SEQ ID NO: 54913 - DNA, 499 bp, Homo Sapiens
atatcgaattcggcacgaggccgcctccgccgcgcgcctcctccgccgccgcggactccggcagctttatcgccagagtccctgaactctcgctttctttttaatcccctgcatcggatcaccggcgtgccccaccatgtcagacgcagccgtagacaccagctccgaaatcaccaccaaggacttaaaggagaagaaggaagttgtggaagaggcagaaaatggaagagacgcccctgctaacgggaatgctaatgaggaaaatggggagcaggaggctgacaatgaggtagacgaagaagaggaagaaggtggggaggaagaggaggaggaagaagaaggtgatggtgaggaagaggatggagatgaagatgaggaagctgagtcagctacgggcaagcgggcagctgaagatgatgaggatgacgatgtcgataccaagaagcagaagaccgacgaggatgactagacagcaaaaaaggaaaagttaaactaaaaa

SEQ ID NO: 54914 - DNA, 766 bp, Homo Sapiens
gcagggatgcttattggattactcttggcagggcagcatacatcctcaactactagtgcttggatgggcttctttttggccagagacaaaacacttcaaaaaaaatgttatttagaacagaaaacagtctgtggagagaatctgcctcctttaacttatgaccagctcaaggatctaaatttacttgatcgctgtataaaagaaacattaagacttagacctcctataatgatcatgatgagaatggccagaactcctcagactgtggcagggtataccattcctccaggacatcaggtgtgtgtttctcccactgtcaatcaaagacttaaagactcatgggtagaacgcctggactttaatcctgatcgctacttacaggataacccagcatcaggggaaaagtttgcctatgtgccatttggagctgggcgtcatcgttgtattggggaaaattttgcctatgttcaaattaagacaatttggtccactatgcttcgtttatatgaatttgatctcattgatggatactttcccactgtgaattatacaactatgattcacacccctgaaaacccagttatccgttacaaacgaagatcaaaatgacaccaggttgcaagggaacgaatatatgtgattatcactgtaaggccacaaaggcattcgaagagaatgaaggtgtacaaaacaatcttgtagtttactgtttttttaagtgtgtaattctaaaagccagttatgatttaggatttgttactgaatg

SEQ ID NO: 54915 - DNA, 787 bp, Homo Sapiens
  misc_feature (646)..(646): n is a, c, g, or t
  misc_feature (726)..(726): n is a, c, g, or t
  misc_feature (743)..(743): n is a, c, g, or t
  misc_feature (776)..(776): n is a, c, g, or t
agagagaagtaaatgattttactttattaaaaacaaaagaaccaaatgttataaatatttgctgaagtttatacattttaatctgcattaaggtaatggttagttggtcaatgctgcctctgcctcagtctgcagcgagaacattgtgttttcatttggtaaatacagttgagcatctacggtgtgccaggtgctgtattaggtgctaaggatgcaggggtgaacaaaacaggcccctgcctccatgcaattctcattctctgggtggcacagttttatgcaagttatcacatgtgaaagaatttatagtttttattatgcaagttttcaaataaatccaattgctgttatcttttgtttttcatggaatatctcgcatctcagaacacagtttgggaatcatattttatttagtgttttcagatgctatctattatatctaagatatttcacatttagccattcgttttataaaaaactccaggcaaactcagctggacttttcttgctttaataacagctttattgagatacaattcacatatcacgaaattctttttaaaaattttacagttcaggccgggcgcggtggctcatgcctgtaatcccaacactttgggaggctgaggctggcgggtcacctgangtcaggagttcgagaccagcttggccagcatggcaaaatcccgtctccactaaaaataaaaaaattagccaggccgtggnggcggatgcctataatncccagctacttggggaagctgaggcgggagaantgcttgaatcc

SEQ ID NO: 54916 - DNA, 539 bp, Homo Sapiens
cagcctcccaagtagctgggaccacaggcgcccactacttgtttgggtttttttttggagatggagtctcgctctgtcacccaggctggagtacagtggcatgatcttggctcactgcaacccccacctccccggttcaagtgattctcctgcctcagcctcccgaatagctgggattacaggcgtccaccatcacaccaggctaatttttgtatttttagtagagatggagtttcaccatgttggccaggatggtctcgatcttctgacctcatgatctgctgcctcggcctcccagagttctgggaccacaggcatgagccactgcacctggccaaatgtgtatatatttatgcaatatataacatgttttgatacaggcatataatatgtattagtcacatcaggataaagtatctattaccttcagcatttatcctttgtattacaagccaattctacacttcattattttaatgtacaattaaattgttattgactacagggccattttaattataaaaattatatagaagtat

SEQ ID NO: 54917 - DNA, 584 bp, Homo Sapiens
aacacacccctagtggtcctaaatctcagcgagcagtaccccacaatggagctgcagggaattgtgccggaggttctgaagaagatcgtaacaacttatgacatgatgattcagtccctcaaggcgttgattgaaaatgcagatgctgtatatgaaaagatcgtacattgtcagaaggcagccatggaattccatgaacacttgcacagcataggcaccaaggaaggtttgaaggaaagaaaactacaaaaagcagtggagagctttacctggaatattaccatcttaaagggacaagcagatcttttgaaatatgctaagaatgagacattggagaacctgaaacaaatccattttgctgctgtttcatgtggactgaataaaccaggcaccgaaaatgctgatgtccagaagccacgccggagcttggaagtcatacccgaaaaagcaaacgatgaaactggagaatgaggaaacttacaataaaccattatggagtttataactctaggaccaattgtagtcagatgggacatttgctttgcactcactaatgagaataatattcgggattttaaagcaca

SEQ ID NO: 54918 - DNA, 720 bp, Homo Sapiens
agcgcctgttcagggagctgatgggggatcacgtctcctccaccaaggccacagtctgggagggttccaatagaaactttagtgtctggctaggagcgtccgtggtggctcacctttctacctaccagtctgagtggatgtcccgagaggagtatggtgagcatatgaggatgtgaccctactggctcactcctgagaatgggctcctgttagatgggcacgggcggattaattttagcaaaatgttctgggtgggggtagaatgaggtggggtggggtgagctggctttggaattctaggggcatgagggtattttttaggttctaaggttttatcttgttgcaagagtgggacctacccaagggggaagacaagatgtcatccttggaaatcctgcaggggacagtttttccagggtggcctatcattggggtatgagtggctgactgccatctccatgcctgagagccactgatttttcattggcatttcccctggtttgtctcattcttcttggttgagtaggttttaactggggtagcactcctgctaggagtcccaattatttttgactaggggatgggggacagttgacatttctggtcctacaggccctttctggccagggaggcattgctgcaggtgagcctgggatgcccttgccacccgtggttggatcttgttttatatctgcaaataaatagcttgtttggaagcaa

SEQ ID NO: 54919 - DNA, 857 bp, Homo Sapiens
  misc_feature (743)..(743): n is a, c, g, or t
  misc_feature (755)..(755): n is a, c, g, or t
  misc_feature (769)..(770): n is a, c, g, or t
tgcccctgagtgaggtgattacatccatgggtggtctggatggtgagctgggtgaggggggccggagcttatctcttgggcagaggcagctgttgtgtttggccagggctctcctcacagatgccaagatcctgtgtatcgatgaggccacagcaagtgtggaccagaagacagaccagctgctccagcagaccatctgcaaacgctttgccaacaagacagtgctgaccattgcccataggctcaacacgatcctgaactcagaccgggtgctggtgctacaagcggggagagtggtagagctggactccccggccaccctgcgcaaccagccccactccctgttccagcagctgctgcagagcagccagcagggagtccctgcctcactcggaggtccctgagcccaatcccacaccctgcagagttctcccctctctctgatccaggccgggcctatacagaggtgctggctgcttgtttacattctcctctggggctctacctctccacacttccccagaagggaaaagggcaccctggattactctttggaaatcactccttggtgggcagcatcctgaggcttccccagaaccaggcctctgctctggccctcttgcatctggaacgccaggtgggtttttctggcataggagcccacttgcattttcatagttttatttgataaaattccatcttacaattctgtgtattaaaaaaataatatttctgggaaaaanaaaaaaaaaaanaagttagagggggnngagagggggtttttttttggggtggttgttggccgctgagcaagagaagcgaagcatgcaccttcccctgcacaggtacacaatatg

SEQ ID NO: 54920 - DNA, 951 bp, Homo Sapiens
tacatttggaaataggaaagctggtgtatccattgaggacctttaggcctaagagcccagtctgagaaccctggaattgaggagtgggagaaaggaaaggaccaggggcttgagacatgaccaggaagccaaccaccccattatttgagagcttgcggtctcagaggctcagaggattagggtctgtggcttcaaggccataccatggagcggaagggacctcagaacctacctgtctagccccttgctttgtagatggaaaaactgagtccaagagagggtgtcagccagctggggagtggggaggattggagcagggccaggcctgacacactgctttcttgttctctctctttctctcccctctccctcttcctcatcttcttcccctctctccacagtttacttcagcacttaaatccccgaggagtctgccctgcctagagaagggcctctcccccaaccctcagccgttcctccacctctcagccatatctttcagccccccctcccctggatccgtgtgtgtgtgtgtccgtgtgtgtgtccccctgtaaatagccagctgttatttatacatatataagtattatatatatttggtctgtttgtagttttattactagatgatttttccggttgtccttaacaccccttcctgaggttcccttcacccctctctcttgccttccttccctttccctttcttcctgactagccccaagtcccttcatttgcatctgctatgcaatagtccctctcctttccttcttcttccctcagatctaggtgatcttcctccccagcctgtgctttcctttcctctttcctcctcactctccccgttatggtccctctgtcccgcctcaaaagaagacaagacaaaaaaaggcggggcatcaaaatattcccaaggggccaataagggaccggatttttggaaaggggcaa

SEQ ID NO: 54921 - DNA, 1055 bp, Homo Sapiens
gaagaagggaagagtcgccatgtggatttccagtgtgttcgaagcaaatccctcacgaatctggtagctgctggagatgatgtcttggaggaccaggagatattaatgcatcacccaccccaagtggatgaacttgaccggctaaatgccccactttctcagatggcttctaacgactttcaggattagggccagctgtgggtctactccttgttggagcccatctcacctgggatgcctgcagccagccctccctcgtgatttgtctcaccttgagtaggagacatgcttctcccctaaccttttcctttctgccataattaacatatgtccttttcagtaagtccatgcctctggcaggggatgaagaagtactcactggtaattagctaccatctttgcagcagccctggtaacttgaaaaatttgggtctggtgctgttcattgagtctttgtgtaactgcaaaagcaggaaaggaagtcaagactcctgttgcctcgtgcttagcaaagcagtccttatcctttatactctgttcttgggttttgtttttgtcttgttttataccaggcaaattgcttagtagcaaagggaccaaactgaaaaggtgacaatctctaacttctaaaagcagacaccaatcggatgctcattagaggttaatgaagatgccattcttggtggcctctgcacccaaattgcatctggaaagaactagggtctcattcagaatgtccaaaaggaaattcttaagagcttaaattcagatttgtgtctcattaatgcagtgaacaattcaaaaccacacagattccttggcaggaaggataatgggataaacagtgttgatgagacctttttagcttcaaggtttcggagtctaaacaaatggatgattcatttgggatgaaamcmmmatgcaagtagagggacyctcccaatcaggccagtkgggtatcctggctkgaaactggkgtgaacaaaggcttaaactctggrgcrsmmatgctgtggwwtgtcargrgmcttaawwggtttaagsttccagagagg

SEQ ID NO: 54922 - DNA, 738 bp, Homo Sapiens
agaaagaggattgcccggaagttcctcataaggcccaagagctcccagctcccactcccagcagcaggcactgcgagcaagactggccgccggattccagcgaggaggggctcccgcggccccgctccccctgctctgatgggagaagagacgccgcggccagagtcctgcaggcccagtggaaggtgtacaagcacaagaaaaaaaaggctgttctggatgaggcggctgtggtgcttcaggcagctttcaggggacatctcacgcggacaaagctcttagcaagcaaagcacatggctcagagccacccagccgtgccaggcctcccagaccagagctctcctgtgccccgcgttccgagccccatcgcccaggccacgggcagccctgtgcaggaggaggccatcgtcatcatccagtccgctctgcgggcacacctggcccgggccaggcacagtgctaccgggtaaaagaaccaccaccgcagcttctaccaggaggagatcggcttcagccacacacggggacgcctcctccccacccttcctcgcagctcttcctgacccctctccctcagggccacaggccttggcacctctacctggggatgacgtcaactccgatgattccgacgatattgtcattgcaccgtctctgcccacgaagaactttccagtttaggtccccgtcactgtctccacgccgtgatggcagcgctgccgaggacataggaacca

SEQ ID NO: 54923 - DNA, 856 bp, Homo Sapiens
  misc_feature (31)..(31): n is a, c, g, or t
  misc_feature (34)..(34): n is a, c, g, or t
  misc_feature (737)..(737): n is a, c, g, or t
  misc_feature (787)..(787): n is a, c, g, or t
  misc_feature (797)..(797): n is a, c, g, or t
cagtattcagcaggctttcctatgcacaggnagnaagcagtggattttggtttggaatcaagacgtgatcagagttccagcgtggcagaagaacaaattggcccatattgcccagagaagagcttttcagagaaaggtacagacaagaagctagaaagagtggaaggagcagcagtcttgcaaggaagcagggcagagacacagcccatggcccctcactgccctgctggaagggctgatggagctccccgcagcgtggttcctgcctgggtgacagaggctcctgtggccactttagaagtgcggtttactcctcatgccgagatggaccttgggcagctcagttcacaagatgttggtcaggcgtcatttaaatattttcagtcagcagaggaagcaaagcgtgccattgaggctgtgctgtcagcggatcctcggtctgtgtaccgccggaagctttgccaggaccgccttttctactttactgtagacatagcgcatgtcacttgctggtttggtgatggctttgcagaggtgctgaggatcaagccggcttctgagcctgttcatatgactggccctgtggggtccttggtgtctctagggtcttaaggagcctccctcatgtctttaaggtagcatcattgatctttggatgtggcttttggattttctgaacaagctaatgttgtgtcgagaagcaacactttgtgatctcatggctttgattgatttgngctgttcaaaatgtttatttgaaaaacgtatacattaataaacttaacanagagatatanaatacagagaaatcaccaaatgcttttttgatctgttgatattaaagaatcaaaaggtg

SEQ ID NO: 54924 - DNA, 763 bp, Homo Sapiens
  misc_feature (10)..(11): n is a, c, g, or t
  misc_feature (23)..(23): n is a, c, g, or t
  misc_feature (28)..(28): n is a, c, g, or t
cccattgaannccaatttgtcgngaacngcgccattgtgttgttacccggcaattcggccattatggccggggtgccctaacactctcgagacctgctgggttaattaaaagctatttcttacccaaacgtaaccattgcttcctccacccatttcctgagtcaaatgggaaagctgttgggtgaagcctggctggctgggcaagtttgactgtgttctgaataagcaccttcactatgggctaagagatcccttggtgtgggggtgatcttacagtagtcagagcagatggacagtccttttcacccttgcttaatagccagagctgtttcatgcctggggcacacacaattctaatgctggactttttcctgggtcatgctgcaacactgatgtcagagcatgtttttaaatgttctgtggcaggggcagtgattattctgggtgtggataatgtaagaagttacagcagagctccattctaaggcacttggctctcagttttctcagagtgaacatgcctcgtagcttgggtcctatggcaggagtgcaataggacatggatatgcatcacctgttctataaaactggttgctggctgcgcgcggtggctcaactcgtataatcccaacactttgggaggccaaggcaggcagatctcttgagatcaggagttggagaccagccttgccaacatagtgaaaccccgcttctactaaaaatcacaaaaacacatatatctatcctccccccccttgtcggc

SEQ ID NO: 54925 - DNA, 737 bp, Homo Sapiens
  misc_feature (677)..(677): n is a, c, g, or t
ggggagaaaaaaatagcttctattgatgagttttatcatctcaattgaatctttcctttccctgatgaagacagctggtggccgagtgcggcaaagaagccagaaggaaccagaatcccagtgccctacacccaccaccagacacactcacacccacacacgttctcagacacacacaagagtgcttgccggttataccaaaccctactattactgcctgcagaaatcaatttaaaaaaataataataacaataaacaattttaaaaaggacaaaaaaattaatgattgagaaaagaggcatttttttctgacatttggtcctgcttgaaacaacaaaagaagaagaaaaacccaccatcaccaccgattcctttgcttcttttttccttttttcctaccttgtttgaaaaccgtgggcttgggactgtgaattattgcatgacattcaaaaagaaaaaaaaaataaaaaaaagttgaatcaaaaaaaaaaaaaaaaaaggacgcggccgcaagcttattccctttagtgagggttaattttagcttggcactggccgtcgttttacaacgtcgtgactgggaaaaccctggcgttacccaacttaatcgccttgcagcacatccccctttcgccagctggcgtaatagcgaagaggcccgcaccgatcgcccttcncaacagttgcgcagcctgaatggcgaatgggacgcgccctgtagcggcgcattaagcgcg

SEQ ID NO: 54926 - DNA, 1055 bp, Homo Sapiens
tcaactccaagggattggaattgaggaagactgttactacagttgagactcagaacttggaaggcctgcatcatgatggccaattctgccataagccctgtcctccaggtgaaaggaaagctagggactgcacagtcaatggggatgaaccagactgcgtgccctgccaagaagggaaggagtacacagacaaagcccatttttcttccaaatgcagaagatgtagattgtgtgatgaaggacatgatgtgaacatggaatcatcaaggaatgcacactcaccagcaacaccaagtgcaaagaggaaggatccagatctaacttggggtggctttgtcttcttcttttgccaattccactaattgtttgggtgaagagaaaggaagtacagaaaacatgcagaaagcacagaaaggaaaaccaaggttctcatgaatctccaactttaaatcctgaaacagtggcaataaatttatctgatgttgacttgagtaaatatatcaccactattgctggagtcatgacactaagtcaagttaaaggctttgttcgaaagaatggtgtcaatgaagccaaaatagatgagatcaagaatgacaatgtccaagacacagcagaacagaaagttcaactgcttcgtaattggcatcaacttcatggaaagaaagaagcgtatgacacattgattaaagatctcaaaaaagccaatctttgtactcttgcagagaaaattcagactatcatcctcaaggacattactagtgactcagaaaattcaaactccagaaatgaaatccaaagcttgggtctagagtgaaaaacaacaaatttccgttctgagtatatgccaattagtgtttgaaaaagattcttaatagcttggctggtaacacccggccttgcgttttttaccccgggcacctttttatcactttattaaccccccgataaacccacgttatttcgcagcatttttaatagattccacgcattccttacttgcaaaggacgccctaacttcccatttttgcgcacaaatgccccctcctttaagt

SEQ ID NO: 54927 - DNA, 712 bp, Homo Sapiens
ccgggaattcggccttatggccgggggtgtgggagccgtggagggaactttcccagtccccgaggcggatccggtgttgcatccttggagcgagctgagagctcgagaacctgctaaggccatcaaacctattgatcggaagtcagtccatcagatttgctctgggccggtggtaccgagtctaagcactgcggtgaaggagttagtagaaaacagtctggatgctggtgccactaatattgatctaaagcttaaggactatggagtggatctcattgaagtttcaggcaatggatgtggggtagaagaagaaaacttcgaaggcttaactctgaaacatcacacatctaagattcaagagtttgccgacctacctcaggttgaaacttttggctttcggggggaagctctgagctcactttgtgcactgagtgatgtcaccatttctacctgccatgtatcggcgaaggttgggactcgactggtgtttgatcactatgggaaaatcatccagaaaaccccctacccccaccccagagggatgacagtcagcgtgaagcagttattttctacgctacctgtgcaccataaagaatttcaaaggaatattaagaagaaacgtgcctgcttccccttcgccttctgccgtgattgtcagtttcctgaggcctccccagccatgcttcctgtacagcctgcagaactgactcct

SEQ ID NO: 54928 - DNA, 900 bp, Homo Sapiens
ctggaccggtccggattcttccgattgcgctgtgtttactcgagaatgtctgagccactacctaagagtatttaacttcctctggagggcgaagcggatggaatacatcctcactgacatacggaagggacacatgtgcaatgcaaagctcctgagaaacatgccagagttctccggggtgctgcaccagtgtcacattttggcctctgagatggtccatttcattcatcagatgcagtattacatcacatttgaggtgcttgaatgttcttgggatgagctttggaacaaagtccagcaggcccaggatttggatcacatcattgctgcacacgaggtgttcttagacaccatcatctcccgctgcctgctggacagtgactccagggcacttttaaatcaacttagagctgtgtttgatcaaattattgaacttcagaatgctcaagatgcaatatacagagctgctctggaagaattgcagagacgattacagtttgaagagaaaaagaaacagcgtgaaattgagggccagtggggagtgacggcagcagaggaagaggaggaaaataagaggattggagaatttaaagaatctataccaaaaatgtgctcacagttgcgaatattgacccatttctaccagggtatcgtgcaacattttttggtgttactgacgaccacctctgacgagaagtcttcggtttcttagcttcaggctggactttcaacgagcattaccaagcccgggagcccaggctcccgtgtgtccctgggtaccaggggggcggcgcaacttcccacacgtggaagcttcccgggtcctccccaagggaacctgccgggtgaaggtttcgtttggcactgcctagaacaccaaaatttcccatttgtacattc

SEQ ID NO: 54929 - DNA, 595 bp, Homo Sapiens
agggcctgttggtgacaccgagctccccccaccccaagctctgctggagccaatctgcggggctctgccgggtgcacggctgacctggcttcggggacgccggccctccccttgggtgtcacagcagctgggcccacagacaggaaatgacctgacctcaaaccagatgtggaggtgcacgagaggcgcaggaacgggcagtggctgacagctgggaaggccctgagcgtcactgctgctgggcggaagggcctgtggacagcccacccaggcggcggggtcttggtgggtccagtggtaatggtgcccctcccctccattccctgtgggtgcagcccacaggctggcgaggaggtgcctctgccctaccctcgggtctggcgagggagggggcagggtgcatccactgtgacagcccctctgggcccacaactccctgaccctggaagctgagcctgctttcctgaccctccgccccaccccctcctccccagaacactcagagggacggtcaacatcagagcacattaaacgctggtgaaaccaaaaaaaaaaaaaaaaaaacactaacgtgcgggcgcaagcttattccctt

SEQ ID NO: 54930 - DNA, 599 bp, Homo Sapiens
ttaaaggatttgaaactctcgtagaaaaggagtggataagctttggacacaggtttgcactgcgagtgggccatggtaatgacaaccatgcggatgctgaccgatctcccatatttctgcagtttgttgattgtgtttggcaaatgacaaggcagtttccttcagcattcgagtttaatgagctattcttgattacaattttggatcacctttatagctgtctttttgggacctttttgtgcaactgtgaacagcagcgattcaaagaggatgtatatacaaagacgatatctttatggtcgtatatcaatagccagctagacgagttttctaatcccttctttgtgaattatgaaaaccacgtgttatatcctgttgctagtctgagtcatttggaattgtgggtaaattattatgtacgatggaatccacggatgagacctcagatgcccattcaccagaatctcaaggagctgctggccgtcagggcggagctgcagaagcgtgtggagggtctacagcgggaggtggccacgcgcgccgtctcatcctcatctgagcggggctcctcgccctcccactccgccacctccgtccac

SEQ ID NO: 54931 - DNA, 449 bp, Homo Sapiens
ggctccttgggatgaagagggtagagtgggctgctggtgtcgcatcaagatttggcaggatcggcttcctcaggggcacagacctctcccacccacaagaactcctcccacccaacttccccttagagtgctgtgagatgagagtgggtaaatcagggacagggccatggggtagggtgagaagggcaggggtgtcctgatgcaaaggtggggagaagggatcctaatcccttcctctcccattcaccctgtgtaacaggaccccaaggacctgcctccccggaagtgccttaacctagagggtcggggaggaggttgtgtcactgactcaggctgctccttctctagtttcccctctcatctgaccttagtttgctgccatcagtctagtggtttcgtggtttcgtctatttattaaaaaatatttgagaacaaaaaaaaaaaaaaag

SEQ ID NO: 54932 - DNA, 793 bp, Homo Sapiens
gaatcccgggatcatctatataaaacattaaaaaggaccaggcacggtggctcacgcctgtaatcccaacactttgggaggccgaggcgggcagatgagttgaggtcaggagttcgagaccagcctggccaacacaatgaaaccccgtctctactacaaatacaaaaacttagctgggcatggtggcgggcgcctgtagtcccagctactcgagaggctgaggcaggagaatggcatgaacccaggaggcggagcttgcagtgagccgagattgcgccactgcactccatcctgggcaacggagcaagactccatctccaaaaaaaaaaaaaaaaaaaatcccacaaagaaaagctcaggctcagagccttcacgatagaatttttctaagcagttaaggaagaattaacaccaatccttcacagactctttccaagaatacagcaggtgggaactcttcccattcatacggaaacgggaggccgcaccccttaggaatgcacacgtggggtcctcaagaggttacatgcaaactaaccccagcagcacacagagaaggcgcataagccgcgaccaggaggggttgctcccgagtccgtggcaggaaccagaggccacatgtggctgctcgtatttaagttaattaaaatggaacgttggccgggcgtggtggctcacacctgtaatcccagcactttgggaggcggaggcgggcagatcacttgatgtcaggagttccaagaccagcctggccaacacagtgaaaccccgtctctactaaaaatacaaaaaa

SEQ ID NO: 54933 - DNA, 708 bp, Homo Sapiens
  misc_feature (557)..(557): n is a, c, g, or t
  misc_feature (569)..(569): n is a, c, g, or t
cgtatacctttttttttttttttttctgtgtgaaacaactcttattgtgatgttacttgttattgtttaaatgtacagaaacaaagggtaaaaatgtgttaatataccttgttccatggtgttgttcttttggggggaggggacgctactcaacacttaatagaatcacaacgctgttgggccagtagtatttattgctttagagattgcttgtcgtacctgtatgtcgtccctttttaaatatgttttcctttttcttgaaactgtataaagtttttttcccccttagcataagcatcttatatataacaactcatttgtacaaggtttttaagtttatatataaaatgtgtatatatatttttgtttcccctttttgacttttttttttctgtatgaaacccagatgtcaccaaatggacattaatagttgcattaaggatcagtagcattaacaaaagttgctttaaaagccattatgtaaaacaagacttgaaaatgagtgagggaattttagcgacactgtctgagcagcagtgggaaccatcttcgtttcncctttgaactcncagtgggatgccctaccctgcgcccttaagacccggactgaccgtgtacaaactttacgtgccaaaattctcagtgaatttagctttctccctctttttgatgctgtaatttttgttcatcatgttttgctgtgatgta

SEQ ID NO: 54934 - DNA, 908 bp, Homo Sapiens
aagaattctgtgttttaaacccatccaaagcacagcccagtggtgggccacctccccaccctgaagttctgcgttacatataacctttcaggcacaaacaagaagggtgtgggatagggtggaggaggctagagatttgtctgcaagggctttaccatccactaaaagctgtgtgcaggacagaagcatctttctctcctcactttttgcacgtgttgagtatcattttgctgtgtgcccagtggatgtagcgaggatgcagaatctccaagcagcttagagtcagaaggctgcttgtcttcctttctgattcttcatgtagttcttcctgtgtttcttagcattctcagtcatcttggattttactctgctgtttattcccatatatgcagatcagattaccagagtccttggagactcttttcagaatatgaaagactttggtagcaaagaagtgaatctctagggcgagttgagtttgagcatagtcacctctaaaatgagatggcctctgcggacacatgaaagggtacttcagcttaccaaaatccagaacttaataggttgaaagctaaccatatctgaaagtagactttcctttatacaattattttttttcagactattattacttttaattgaatgggaaagcgtaacactaagtatgcagtctattatgaaatcatgttgacaactaagtttcttttcaaaatttttgaggccgagcacttctgtaatcctagcactttgggaggctaaggtgggcggatcacctgaagtcaggagttcgagaccagcctggccaacatggtgaaactccgtctctactaaaaataccaaaattagcccgggcatggtagcatgcgcccgtaatcccagttacttggggaagctgaagccaggagaat

SEQ ID NO: 54935 - DNA, 764 bp, Homo Sapiens
  misc_feature (689)..(689): n is a, c, g, or t
tgaagttccattcaaagatgtttgaaaagctgggtatcactaccattaaagttaacattcgtaatgccaattccctgggaggaggcttccattgctggacctgcgatgtccggcgccgaggcaccttacagtcctacttggactgaacaggcctgatggagcttgtggctggcctcagatacacctaagaagcttaggggcaaggttcattctcctgctttaaaaagtgcatgaactgtagtgctttaaacaatcatctccttaacaggggtcgtaagcctggtttgcttctattacttttctttgacataaagaaaataacttctgctaggtattactctctactcctaaagttatttactatttggcttcaagtataaaattttggtgaatgtgtaccaagaaaaaattagtcacctgagtaacttggccactaataattaaccatctacctctgtttttaattttctttccaaaaggcagcttgaaatgttggtcctaatcttaattttttttcctcttctatagacttgagaatgtttttctctaaatgagagaaagacttagaatgtacacagatccaaaatagaatcagattatctctttttttctaaaggagagaaagacttagaacatacacagatcctaagtagaaccaggtaattgtctctttttctaataaggaattngggtaatttttaattttttggtttttaaaaaataacctagactatgcaaaacatcaaagtgaattttccatgaat

SEQ ID NO: 54936 - DNA, 655 bp, Homo Sapiens
catcgtacacatgtgagctcccacacgtacacacagatgcacatggacacaccccaaacacgcacaggctcctacacacatgcacacacgtgtacaccacaaacgagctcccagacatgtaaacacatgtctcccacacgtgagctcccacacatgtacacatgcacatgtacgcaccacaaacacatgcgcaggctcctgcaggcgtgaatacacacatgcacacacatatacacacacgtgccacaaacaagtgcacactgtcctggtgtcctgcactgcatcctgcctccttgctgaggggcccctgtgagaggcctctggatgggcatgggaagatgggctccctggcccccagcccatgcctccctgggatgaagagtccccctcctggcagaatgtctgggctttgcagagcaggccccgggggtgaagtcgcagcttcacttacaccagctgctctgtgagcaaggcttggtgccctggacaaggcccttcccctttagggaggtccagcctcgcaagctgaaacctcccctcggctcagccctataccaggcggccacagcaggactggccacacccacgccgcacctcatccgtgcacgcgtcggagcacggccagccttccgccacgagccagctgggaagggcc

SEQ ID NO: 54937 - DNA, 810 bp, Homo Sapiens
acttgtcattccatgcccctctcctagtggtcatggtttcatatgggcatacaactgctactgaagttatatagccttgaaaactcagtgcaggttgcccttaattttccccaaacccctccatcggcaagtctagttgccctttagcacctaaagatctgcaccccaaaccaatgtcaccataaagagggcacgaagaagagtgggtgtgatcccaacggggtatgtaactgaagaagcccagtgtgagcttctcatctttacatatacctctaacccccggtactcattgaatcattgatgaggtatctcaattgagattgcaaggacttgataccatttgaaatggaaaaattttgaacgggctttaacatgtcttaagacatatggatggggccggccacagtggctcacgcctgtcatcccagaactctggaaggctgaggcaggcggatcacctgagatcaggagcttcgaggccagcctggccacgatggcaaaaaccccgactctactaaaactacgaaattagccaggcgtggcggcgtacgcctgtaatcccagctactcgggagcgcaggaagaactccgctcgagcctgggacgcacgaggctgcggcgagccaagatcgtgtcactgcactccagctgggtgaccagaccccactcaaccaaacccccccctaccaccgacgaaccactaccggtcgcccccaccgcccccgacacgggagggccacacccgtccgacccccgctctgcacacgggacaccgcggcccactcggccgacatccgaccagaacctagc

SEQ ID NO: 54938 - DNA, 623 bp, Homo Sapiens
ccctgcactccacctggggacggcccctcatcacctgaagtcctctgctgtgttgactggaccctcagttcccacactgctaattactatgaaagctgctctggcctcgtcttctagcttgtgcctagttgaaagtctcacctttacaggatcatttgtaatgctggtgtacatgcagggaactcacaagctgtgtcaggtatgcaggacaaggaatgtctgctctggggggcacaggccaactatatggagggagggtcccaaattagcaaacccttcatttaaagcaaacccttgtcaagcctaccagagcagctgatacgtgtgcataacagtgaggcattgtgtcctggatcgtctgggagcccagtgtcaagtctgctggaatgcaggaagtagaacagaatcgccacaggactgttctggggccagcttcccttaactctgtagcctggcagtctgacccaaagttgccctcacccaaaggttctggctcttccctccctcacttttactttcccttcccccataagttggaggataaaatgggtatcaatgctaatatttccagggagaacatgaaaccagagggttctttctttctctgtaatctgctatgaaag

SEQ ID NO: 54939 - DNA, 720 bp, Homo Sapiens
  misc_feature (529)..(529): n is a, c, g, or t
  misc_feature (630)..(630): n is a, c, g, or t
  misc_feature (713)..(713): n is a, c, g, or t
  misc_feature (715)..(715): n is a, c, g, or t
ttcttgctataaattgaaaaaaaaaaaaaaaaaagatatatcttctcaaattcctgagaagcagtaactttaattgaataatagtgccctctttgaaagtgttaaccttttggattagaaaactagtagatatttaaacagtgccagaatatttttctgaagaattgtaatttcttacctaagtctttggagatagagttatttgctagagatgtaataagggccttctttttctttactcttatttagaaaagaaaagcattggcactttgatcttgaaattaagaattttcttttctttgggtagtaatatttactggaatgtcagaattttgccactgaatgccttctttcaatagcaaatgctttgaaagggttgtaaaatgttggcgtaaattagccaggtgtggtagctcacacctgtaatcccagcactttgggaggctgaggcaggcggagcacttgaggtcaggagtttgagaccagcctggccaacatggcaaaaccccatctctactaaaaatacaanaaaaaaaagaacttagccaggcatggtggcacacaccttgcagtcccaagttactccggagagctgagccaggagaattgcttgaacctggggaagcagangtttgccatgaagccgagattgtaccactgcactctaaccctgggtgacaagagcaaggactccgtctctaaaaaaaggaaanancaaat

SEQ ID NO: 54940 - DNA, 833 bp, Homo Sapiens
gccagccttgggattcccaagtgtttgtattcagtgatcaggactgaacacacaggactcaccatggaattggggctgagctgggttttccttgttgctattttagaaggtgtccagtgtgaggtgcagctggtggagtctgggggaggcttggtacagcctggggggtccctgggactctcctgtgcagcctctggattcaccctcagtacctacgacatgcactgggtccgccaagctacaggaaagggtctggagtgggtctcagttattggtattggtggtgacacatattatgcagactccgtgaagggccgattcaccatctccagagaaaatgccaagaactccttgtatcttcaaatgaacagcctgagagccggggacacggctgtgtattactgtgcaagaaaactgcgtggttattatgcttttgatatctggggccaagggacaatggtcaccgtctctttagcttccaccaagggcccatcggtcttccccctggcgccctgctccaggagcacctctgggggcacagcggccctgggctgcctggtcaaggactacttccccgaaccggtgacggtgtcgtggaactcaggcgccctgaccagcggcgtgcacaccttcccggctgtcctacagtcctcaggactctactccctcagcagcgtggtgaccgtgccctccagcagcttgggcacccagacctaacactgcaacgtgaatcacaagcccagcaacaccaaggtggacaagagaagtgagctcaaaaccccacttggtgacacaactcacacatgcccacggtgccagagcccaaatcttgg

SEQ ID NO: 54941 - DNA, 465 bp, Homo Sapiens
  misc_feature (450)..(450): n is a, c, g, or t
  misc_feature (452)..(452): n is a, c, g, or t
  misc_feature (457)..(457): n is a, c, g, or t
  misc_feature (459)..(460): n is a, c, g, or t
  misc_feature (464)..(464): n is a, c, g, or t
agatcgaatttcactctgtgacccaggctggaatgcactggcacgaattcagctccctgcagcatggacctcccaggttcaagtgatcttcccacctaagactactgagtagctaggaccacaggtgtgtcccaccatgcctggctaatgattttttttttttttttgctagacacagggtctcaacatgttgcccaggctggtcttgaactcctgggctcaagcgatcctcccacctcagcctcccaaagtgctgttataagcatgtgccacccaccactctggccttgatactcttttggtaaaaaatatactagtattagcattctgtggccaggaatggtggctcacatccatctgtaatcccagcattttgggacgccaaggccggaggattgcttgagcccaggagtttgagaccagtttggagaatatggcacactgtttctncnaaaantnnattnt

SEQ ID NO: 54942 - DNA, 578 bp, Homo Sapiens
agcttgatatcgaattcgtatcggccattatggccgggggagctacaacaggcaggcaggggcagcaagatggtgttgcagacccaggtcttcatttctctgttgctctggatctctggtgcctacggggacatcgtgatgacccagtctccagactccctggctgtgtctctgggcgagagggccaccatcaactgcaagtccagccagagtgttttatacagctccaacaataagaactacttagcttggtaccagcagaaaccaggacagcctcctaagctgctcatttactgggcatctacccgggaatccggggtccctgaccgattcagtggcagcgggtctgggacagatttcactctcaccatcagcagcctgcaggctgaagatgtggcagtttattactgtcagcaatattatagtaatcctcggacgttcggcctagggaccaaggtggaaatcaaacgaactgtggctgcaccatctgtcttcatcttcccgccatctgatgagcagttgaaatctggaactgcctctgttgtgtgcctgctgaataacttctatcccagagaggc

SEQ ID NO: 54943 - DNA, 646 bp, Homo Sapiens
ggcggttactttgctgctcctcccgctcgctatgtcaacgtccactagctgcccgattcccgggggccgggaccagctgcccgactgctacagcaccacgccggggggcacgctatacgccactacccccggaggcaccaggatcatctacgaccgaaagttcctgctggagtgcaagaactcacccattgcccggacacccccctgctgcctccctcagattcccggggtcacaactcctccaacagcccctctctccaagctggaggagctgaaggagcaggagacagaggaagagatacccgatgacgcacaatttgaaatggacatctaatccagtgcagatgacctggcatgtggagttacagagggatccctcatgccactgctgccaccacctcttcctggggcatccaaaggccagctggcctcatctaatctggaagggagtgacttgttagttccaggcctcctttagttctgaggcagctagaccagggataggagtgggcaacttgccaagcccttaactctacttcctcttcagtctgtggtactcctcctaaccctaaaccctctatgctcaggggctggaactggggaatggagtaagtcaccttctgactgcttagtaaacattcaaaga

SEQ ID NO: 54944 - DNA, 787 bp, Homo Sapiens
cctagatgtacatccagacaacaactcttactgtctccatgagtttaagtgcttcagtatctctgggcatgctctatatgcccaaggtttatattataatttttcatccagaacagaatgttcaaaaacgcaagaggagcttcaaggctgtggtgacagctgccaccatgcaaagcaaactgatccaaaaaggaaatgacagaccaaatggcgaggtgaaaagtgaactctgtgagagtcttgaaaccaacacttcctctaccaagacaacatatatcagttacagcaatcattcaatctgaaacagggaaatggcacaatctgaagagatgtggtatatgatcttaaatgatgaacatgagaccgcaaaaattcactcctggagatctccgtagactacaatcaatcaaatcaatagtcagtcttgtaaggaacaaaaattagccatgagccaaaagtatcaataaacggggagtgaagaaacccgttttatacaataaaaccaatgagtgtcaagctaaagtattgcttattcatgagcagttaaaacaaatcacaaaaggaaaactaatgttagctcgtgaaaaaaaatgctgttgaaataaataatgtctgatgttattcttgtatttttctgtgattgtgagaactcccgttcctgtcccacattgtttaacttgtataaaacaatgagtctgtttcttgtaatggctgaccagattgaagccctgggttgtgctaaaaataatgccatgattgatgcatggcattttttatacaaataatt

SEQ ID NO: 54945 - DNA, 508 bp, Homo Sapiens
ggcacagtctctgaggcctcctatgagctgacacagccaccctcggtgtcagtgtccccaggacaaacggccaggatcacctgctctggagatgcattgccaaaaaaatatgcttattggtaccagcagaagtcaggccaggcccctgtgctggtcatctatgaggacagcaaacgaccctccgggatccctgagagattctctggctccagctcagggacaatggccaccttgactatcagtggggcccaggtggaggatgaagctgacttctactgttactcaacagacaccagtggtaatcatagaggggtcttcggaactgggaccaaggtcaccgtcctaggtcagcccaaggccaaccccactgtcactctgttcccgccctcctctgaggagctccaagccaacaaggccacactagtgtgtctgatcagtgacttctacccgggagctgtgacagtggcctggaaggcagatggcagccccgtcaaggcgggagtggaga

SEQ ID NO: 54946 - DNA, 582 bp, Homo Sapiens
ggcggaaagtttcgggggagagcggttgggggcgcggaaggaggtgtgtgccctcttcctgattctggagaaaaatgccggtccggaagcaagatacccagagagcattgcaccttttggaggaatatcgttcaaaactaagccaaactgaagacagacagctcagaagttccatagaacgggttattaacatatttcagagcaacctctttcaggctttaatagatattcaagaattttatgaagtgaccttactggataatccaaaatgtatagatcgttcaaagccgtctgaaccaattcaacctgtgaatacttgggagatttccagccttccaagctctactgtgacttcagagacactgccaagcagccttagccctagtgtagagaaatacaggtatcaggatgaagatacacctcctcaagagcatatttccccacaaatcacaaatgaagtgataggtccagaattggttcatgtctcagagaagaacttatcagagattgagaatgtccatggatttgtttctcattctcatatttcaccaataaaggcaaatcctcccccagtactggtca

SEQ ID NO: 54947 - DNA, 581 bp, Homo Sapiens
ggaggagaggatcattgtgaagcagctggaggaagacctgtatgacggccaggtgctgcagaagctcttggaaaaactggcagggtgcaagctgaatgtggctgaggtgacacagtccgaaatagggcagaaacagaagctgcagacggtgctggaagcagtacatgacctgctgcggccccgaggctgggcgctccggtggagcgtggactcaattcacgggaagaacctggtggccatcctccacctgctggtctctctggccatgcacttcagggcccccatccgccttcctgagcatgtaacggtgcaggtggtggtcgtgcggaaacgggaaggcctgctgcattccagccacatctcggaggagctgaccacaactacagagatgatgatgggccggttcgagcgggatgccttcgacacgctgttcgaccacgccccggataagctcagcgtggtgaagaagtctctcatcacttttgtgaacaagcacctgaacaagctgaatttggaggtgacggaactggagacccagtttgcagatggcgtgtacctggttctgctcatgggccttctgg

SEQ ID NO: 54948 - DNA, 567 bp, Homo Sapiens
ggcagaggggccgggagggagtcggctgaggtggcggcggaggcgaagtggcggcggaggcgaaggggcggcgggacccgggcctggcccgtatgtgtccttggcggcctagactaggccgtcgctgtatggtctatcagccacagtctctgcatgtttccaagagcaacaggaaatgaacacattgcaggggccagtgtcattcaaagatgtggctgtggatttcacccaggaggagtggcggcaactggaccctgatgagaagatagcatacggggatgtgatgttggagaactacagccatctagtttctgtggggtatgattatcaccaagccaaacatcatcatggagtggaggtgaaggaagtggagcacggagaggagccgtggataatggaaggtgaatttccatgtcaacatagtccagtacagaacctgctaaggccatcaaacctattgatcggaagtcagtccatcagatttgctctgggccagtggtactgagtctaagcactgcagtgaaggagttagtagaaaacagtctggatgctggtgccactaatatt

SEQ ID NO: 54949 - DNA, 923 bp, Homo Sapiens
  misc_feature (488)..(488): n is a, c, g, or t
  misc_feature (496)..(498): n is a, c, g, or t
  misc_feature (512)..(513): n is a, c, g, or t
  misc_feature (515)..(616): n is a, c, g, or t
  misc_feature (618)..(705): n is a, c, g, or t
  misc_feature (707)..(712): n is a, c, g, or t
  misc_feature (714)..(728): n is a, c, g, or t
  misc_feature (730)..(730): n is a, c, g, or t
  misc_feature (732)..(732): n is a, c, g, or t
  misc_feature (734)..(737): n is a, c, g, or t
  misc_feature (739)..(743): n is a, c, g, or t
  misc_feature (745)..(747): n is a, c, g, or t
  misc_feature (749)..(755): n is a, c, g, or t
  misc_feature (757)..(758): n is a, c, g, or t
  misc_feature (760)..(764): n is a, c, g, or t
  misc_feature (767)..(773): n is a, c, g, or t
  misc_feature (775)..(775): n is a, c, g, or t
  misc_feature (777)..(780): n is a, c, g, or t
  misc_feature (784)..(786): n is a, c, g, or t
  misc_feature (790)..(791): n is a, c, g, or t
  misc_feature (795)..(795): n is a, c, g, or t
  misc_feature (798)..(798): n is a, c, g, or t
  misc_feature (800)..(801): n is a, c, g, or t
  misc_feature (803)..(807): n is a, c, g, or t
  misc_feature (809)..(809): n is a, c, g, or t
  misc_feature (813)..(814): n is a, c, g, or t
  misc_feature (826)..(829): n is a, c, g, or t
  misc_feature (831)..(835): n is a, c, g, or t
  misc_feature (837)..(844): n is a, c, g, or t
  misc_feature (846)..(847): n is a, c, g, or t
  misc_feature (853)..(854): n is a, c, g, or t
  misc_feature (856)..(856): n is a, c, g, or t
  misc_feature (858)..(861): n is a, c, g, or t
  misc_feature (867)..(867): n is a, c, g, or t
  misc_feature (873)..(874): n is a, c, g, or t
  misc_feature (878)..(878): n is a, c, g, or t
  misc_feature (882)..(883): n is a, c, g, or t
  misc_feature (886)..(890): n is a, c, g, or t
  misc_feature (895)..(896): n is a, c, g, or t
  misc_feature (900)..(903): n is a, c, g, or t
  misc_feature (905)..(905): n is a, c, g, or t
  misc_feature (907)..(907): n is a, c, g, or t
ggacgcgtgggctggagagaagccctacaaatgcgaaacctgcggagccagatttgtacaggtggcccacctccgtgcccatgtgcttatccacactggtgagaagccctatccctgtgaaatctgtggcacccgtttccggcaccttcagactctgaagagccacctgcgaatccacacaggagagaaaccttaccattgtgagaagtgtaacctgcatttccgtcacaaaagccagctgcgacttcacttgcgccagaagcatggcgccatcaccaacaccaaggtgcaataccgcgtgtcagccactgacctgcctccggagctccccaaagcctgctgaagcatggagtgttgatgctttcgtctccagccccttctcagaatctacccaaaggatactgtaacactttacaatgttcatcccatgatgtagtgcctctttcatccactagtgcaaatcatagctgggggttgggggtggtggngggtcggnnngcctgggggactgnnannnnnnnnnnnnnnnnnnnnnnnnnnnnnnnnnnnnnnnnnnnnnnnnnnnnnnnnnnnnnnnnnnnnnnnnnnnnnnnnnnnnnnnnnnnnnnnnnnnnnnannnnnnnnnnnnnnnnnnnnnnnnnnnnnnnnnnnnnnnnnnnnnnnnnnnnnnnnnnnnnnnnnnnnnnnnnnnnnnnnnnnnnnnnannnnnnannnnnnnnnnnnnnnananannnnannnnnannnannnnnnnannannnnnaannnnnnnanannnnaaannnaaannaaanaanannannnnnanaaannaaaaaaaaaaannnnannnnnannnnnnnnannaaaaannanannnnaaaaanaaaaannaaanaaannaannnnnaaaannaaannnnananaaaaaaaaaaagggaa

SEQ ID NO: 54950 - DNA, 819 bp, Homo Sapiens
ccacgatgcagctgacaccattgaaactgacactgccactgctgacaccactgttgccaacaacgtaccccccgccgccaccagcctcattgacctatggcctggcaacggggaaggggcctccacactccagggtgagcccagggcccccacgccaccctcgggtactgaggtcaccctggcagaggtgcccctgctggatgaggtggctccggagccactgctgccagcaggcgaaggctgtgccacccttctcaactttgatgagctgcctgagccgccagccaccttctgtgacccagaggaagtggaaggggagcccctggctgccccccagaccccaactctgccctcagcccttgaggagctggagcaagagcaggagccggagccccacctgctaaccaatggcgagaccacccagaaggaggggacccaggccagtgaggggtacttcagtcaatcacaggaggaggagtttgcccaatcggaagagctctgtgccaaggctccgcctcctgtgttctacaacaagcctccagagatcgacatcacatgctgggatgcagacccagttccagaagaggaggagggcttcgagggtggtgattagcggtggcgccagccctaggctacccttgccaaggccgcccacctgcatcagcctctggccagacggcccgccgtgcctgcattcgcagcagctccgcctggcacccactccggattccggccctggctggggacttggccgcttccctcccacagggcctgacttttacagcttttctctttttttaaaaagttgataggagactt

SEQ ID NO: 54951 - DNA, 540 bp, Homo Sapiens
agagaaggcacagcagccgtcagagtccatgagaggtgaaaccacacagcagggatgtccaatatcagaactattaatatcaataaaagtataaccttcccaggtctatgcccaagagaattgaaaacatccatccacacaatacctgtgctcccgcgttcatagcagcattactcaaaagtcaaacggtagcaacaacccaaatgtccatccacagatgaattaagacatgaagtgtgttctgtccatacaatggaatattatttggccataaaaaggaaggaaattctgacgcatgccacagcctgagtgaatcctacaaatattacgctaagtgaaagaagccaatcacgagtttatgtgaaatgtccagaataggcaaatctgtgtatcagagacaaagcacattggtggttgccaggtactggaggaagagagaagaggcatgacagctaacagggacgggctttctttggaagatgatgaaattgtggaatgatggttgcacaactttgtgaatatactagaaaccaatgaatt

SEQ ID NO: 54952 - DNA, 679 bp, Homo Sapiens
ctctacagatcctgctcacactaaaatatgaaccacaaacacacagagaaacaacctgttcaccactcctgggtgcatgattgagggtgaagcatccaccagcacttcaaggggtccatagtatttttttttttgctgcctcaaagtccccaaagccttcgagcagaagtggcagtagatggttgccaatcagccaatgcagactttcactgggacaacaagaaagcagatcttctgggttttgatggaacttggcagtggggacattcagctgatgcattatataccccgtcagagcacacttgtatcttttaccttccctttgccccatgcccccaaactgcttaggtcttctctgtccctttactgctgctgcacagagatgatataaaagaggctctttggctatttgcattttgcttcctcttcttttccagattacagtatgaagctttattttctttgtacaagcttaaaatttcaacatcatcatccgccaaagttgttcctcccttttcggaggatctagggggaaagaggagcattcatcacaagtttcctagagagaggagacaaatcggtgtgccattgacaacatgagccagggtaaaggcaccctttggaattactgatttcaaagattaataaagtaattctatttttaaaaaaaaaaaaaaaa

SEQ ID NO: 54953 - DNA, 764 bp, Homo Sapiens
  misc_feature (739)..(739): n is a, c, g, or t
gagaattgcttgaacccggagatggaggttgcagttaagctgagatcacaccactgcactccagcctgggcagcagagcaagactccatctcaaaaaaaaaaaaaaatccagccacgtagagatttgggaaaagagtatttccaatagagtgaacagatttcaaatatgcgtgcattagagaatgattttttcaattctcccccaagaaaaactgttcggtttggtggaactgtgacagaagtcttgctgaagtacaaaaagggtgaaacaaatgactttgagttgttgaagaaccagctgttagatccagacataaaggatgaccagatcatcaactggctgctagaattccgttcttctgtcatgtacttgacaaaagactttgagcaacttatcagtattatattgagattgccttggttgaatagaagtcaaacagtagtggaagagtatttggcttttcttggtaatcttgtatcagcatagactgttttcctcagaccgtgtctcagcatgattgcttcccattttgtgcctccccgagtgatcattaaggaaggcgatgtagatgtttcagattctgatgatgaagatgataatcttcctgcaaattttgacacatatcacagagccttgcaaataatagcaagatatgtaccatcatgagtatacttttccttattttgaatgtttaattctcaagaaaattgtaatcaattagtaaaaattataaaatgntaatagtattaaaaaaaaaaaaaaa

SEQ ID NO: 54954 - DNA, 1044 bp, Homo Sapiens
  misc_feature (786)..(786): n is a, c, g, or t
ttcgtgttcatcacgcccttcctgaccaagagtgggagcagcatcatggtggaggtggccactgggccctcggactcagccacccgtgagaagctgcccatggtcctgaaggtgcccaggctgaactcctcacctctggccctgtgtgaccggcccttctccctcctgggtttcggagacattttggtgccagggctgctggtggcctactgccacaggtttgacatccaggtacagtcctccagggtatacttcgtggcctgcaccatcgcctatggcgttggcctccttgtgacattcgtggcactggccctgatgcagcgtggccagcccgctctcctctacctggtgccctgcacgctggtgacgagctgcgctgtggcgctctggcgccgggagctgggcgtgttctggacgggcagcggctttgcgaaagtcctacctccatctccgtgggccccagcaccagccgacggcccgcagcctcccaaagactctgccacgccactctccccgcagccgcccagcgaagaaccagccacatccccctggcctgctgagcagtccccaaaatcacgcacgtccgaggagatgggggctggagccccatgcgggagcctgggagcccagctgaatccgagggccgggaccaggcccagccgtccccggtaacccagcctggcgcctcggcctaggggaggggtgagacgctcgctgccgtgcccgccacaccaagatgttggggctgcctggcgcccactggagamagaaagamagamgcctgtnccccgggaccgaggcctgtgccgtccccacccgccccaacatggtgctcatccttgccgagacccctgcagtkcgtgcccgcgcccagcccagctgccccggctgcacgcctgctgctcccagctcgcccggstgccamaagctctctgcgggtcawtctccccgcagarggaagggtycgtctcscagscctkcccggctytctkcaaamcyyaaacgtygtttbmttattaaaagggtgggtggatttkgcscggc

SEQ ID NO: 54955 - DNA, 500 bp, Homo Sapiens
tgaaaaatgaccccttcatcatcaggctctgcgttctaccaaattgtatgtaaaaagacacatctgttttgtggtaggattttttcacatttttgggtactatgagctgcattgatggaagacagcaggcaatatgtggtgacagttaactcacagacataaacatgcaaaatactttgctgtctctggggatattgccatttttcttactgtgagcaacagcaccaacaccaagttaacaggatgcaacatgtgtatgactctaaaagccctaagtagttggtaacttcctgggccttcaatcatagcaatttgatgagggaaggaaggggagaggatttgttgggtaatcaagacattcccgtatatgtctgatttcatggaactgctctattttgtttgtgtgtattgtatatgtatatgtgtatgtgtgcgtgtatgtgtgtgtctgtagcttcagtttttaagtgtaaggactaaataaactaactgaaatttta

SEQ ID NO: 54956 - DNA, 669 bp, Homo Sapiens
  misc_feature (610)..(610): n is a, c, g, or t
  misc_feature (617)..(617): n is a, c, g, or t
cggtggcggccgctctagaactagtggatcccccgggctgcaggttgatgataacattgatatctttgctgacttaactgtaaaaccaaaagaaaagtccaaaaagaaagtggaagccaagtctatatttgatgatgatatggatgacatcttctcctctggtatccaggctaagacaaccaaaccaaaaagccgatctgcacaggccgcacctgaaccaagatttgaacacaaggtgtccaacatctttgatgatcccctgaatgcctttggaggccagtagagcacacagggtatccacatgttaccctgcagctacattgttgagttagtgatgatgttgtatatgctgatggtcttaactggattacaaaaagcaaatactagaacagctagctcatcgttcacccaatgtacttggtatttttctgcactggtttaatcatgcttaatactacaaaacaaaaataaatatttcacagtggttggtttgttttgtttttaaaccacagtttgatttagttagccttgctggggccataatatgcttcagggtgtgtatgccacctgaccagaagtctttgttatatggatgggaaccctaacttanggcctgngcaggggaaagagaaagaaggtgagagattatacttcatgagtctttagcat

SEQ ID NO: 54957 - DNA, 391 bp, Homo Sapiens
ttctgttttccattaaatacaagtgcatggggacaggactttatgcatttgtttactgctgtatcttaggctcaaagttggcactcaataaatattggttaaataagtgaattacagcaggttggattattaggtaatatggttcgcagtgtgggactcctgaactccaagatgtctttgaaagtagccatttttttttaatttctaatggtttagtcagactacggattacttaataacagggactatagttcattcatggatatatccccagaatcaggaacagtttctagaatacgcttgagtgctcaatagacatagctattatagttaattgaaatggaattggcaatgtgggaaataagaaatcacatttttggccaggcgcagt

SEQ ID NO: 54958 - DNA, 491 bp, Homo Sapiens
  misc_feature (268)..(268): n is a, c, g, or t
gctcagttcaccttctcacaatgaggctccctgctcagctcctggggctgctaatgctctgggtctctggatccagtggggatattgtgatgactcagtctccactctccctgcccgtcacccctggagagccggcctccatctcctgcaggtctagtcagagcctcgtgcatgataatggatacaactatttggattggtacctgcagaagccagggcagtctccacagctcctgatctatttgggttctaatcgggcctccggggnccccgacaggttcagtggcagtggatcaggcacagattttacactgaaaatcagcagagtggaggctgaggatgttggggtttattactgcatgcaagctctacaaactcctcagacttttggccaggggaccaagctggagatcaaacgaactgtggctgcaccatctgtcttcatcttcccgccatctgatgagcaggtgaaatctggaactgcccctgtt

SEQ ID NO: 54959 - DNA, 775 bp, Homo Sapiens
gtcggacctattcctgctagtgcaggcctccaggtgacctcactcggacggaagaatcttcccgaggctgggctgttccctctcctgcccggactgtggcctcgccggggagagcgggcgggggagctcgcgccgaggactggaccatctgtacagaccagcgggagtgcgcgcgcccgcctcgcacagggccggggcctggaccaaaccacatgaactggactgagagggggaagaagcggggaggaagaaatcccgccccaaacgtccgctttccttttctctactttgtaatttattgatcagtttctgttgggagacgggtgtcctttacccgcgggaagggggcggggcttccctcccgggccgcatgcggggagaggctgctccctcccctttttcctgcccagtcgcggggcccaagtcttccttcttcgtccgaaaggaggggaggggggactcgctgctacaagcctcgccccctgtgccactcagctccgccccgccgcgtccggtcgccggtcccccgggtcatctgcgggcgggttccccctctccctcccccgtgtctcgtgtccccggggctcaccgccccccgtgctgtggccgtgtccgtgccccgggggtagggggcgcagaatggggcttccccttctcctctgggctccggggtttgcatgggagaatcctctttccacgatgccgctggcgacgttggcgtgggggccaggggacggtgagggagccctcgtccccgagtctcggtcgggctccc

SEQ ID NO: 54960 - DNA, 745 bp, Homo Sapiens
ttttactgcaatcacagcaaccaaccccatttggcttataaagactcggttacagcttgatgcaaggaaccgcggggaaaggcgaatgggtgcttttgaatgtgttcgtaaagtgtatcagacagatggactaaaaggattttataggggcatgtctgcttcatatgctggtatatcagagactgttatccattttgttatttatgaaagtataaaacaaaaactactggaatataagactgcttctacaatggaaaatgatgaagagtctgtgaaagaagcatcagattttgtgggaatgatgctagctgctgccacctcaaaaacttgtgccacaactatagcatatccacatgaagttgtaagaacaagactacgtgaagagggaacaaaatacagatctttttttcagactctatctttgcttgttcaagaagaaggttatgggtctctttatcgtggtctgacaactcatctagtgagacagattccaaacacagccattatgatggccacctatgaattggtggtttacctactcaatggatagcagcacgaggactgctgtactgcaaaaaaagaagaccaaaagattacagtggaccatgggatacagaagccagcatggcagacagaagaaaaatagtttgggaacatgtaactattctaagtggaaagttttgttgtaggaattatagtaatcacaccacattacttggcctttcggtaatgtgaaaaaaaaaaa

SEQ ID NO: 54961 - DNA, 671 bp, Homo Sapiens
ggtttcggtctaagtaccacccagatgaggtggggaagcgtcggcaggaggcccggggggccctgcaaaaccgactgagggtcttcctgtccctcatggagactggctggtttgataaccttctcctggacatagacaaagctgatgccattgtcaagatgctggatgcagccgtgattaagatggaaggaggcacggagaatgatctccgcatcctggagcaggaggaggaggaggagcaggcaggaaagcctggggagcccagcaagaaagaagaaggacgggctggagcaggcctaggggacggggagcgcaaaaccaacgacaaggatgagaagaaggaagacggcaagcaggctgagaatgacagttctaatgatgacaaaacaaagaagtcggagggtgatggggacaaggaagagaagaaagaagactccgagaaggaagccaaaaagagtagcaagaagcggaaccggaagcacagtggtgacgacagctttgacgagggcagcgtgtcagagtctgagtcggagtcagagagcggccaggctgaggaggagaaggaggaggccgaagaagcgctcaaggagaaggagaagcccaaggaagaagaatgggagaagcccaaggacgccgcggggccggagtgcaagccgcggccgctgcataag

SEQ ID NO: 54962 - DNA, 653 bp, Homo Sapiens
  misc_feature (616)..(616): n is a, c, g, or t
caacgatggtcctcagactcatataagtggtaggaagggagggaggccggctgtctaatcaaagacccggctacggggacaataaaattgcgaaggaagcgaggacaaagagaggccggatcaaaccaacccctccgccaactggctgcacgctcgctcttcccggaaaaagcgctgtccctacaccaaataccagacgctggagctagagaaggagtttctgttcaatatgtacctcaccagggaccgtaggcacgaagtggccagactcctcaatctgagtgagagacaagtcaaaatctggtttcagaaccggcggatgaaaatgaagaaaatgaataaggagcagggcaaagagtaaagattaaagattacccccagtcctccctagctcttccccatctcactcttagttatgtgacgactgcaaagccagtgctgtctgggatgtattcaagtgaatggggaagggagtctctcttccaagtcctttatctgcacctagaacctccctcctttcctttgcccttacctgtctctctcttctctctaggtgtcaggagaaagtttcgttgatttagaagatagaaatagttggttctaagaatgtgatggncacaagtaagagagacccagtcagctcctatatgcct

SEQ ID NO: 54963 - DNA, 424 bp, Homo Sapiens
gtcgaattaggggcactgtaaccagggtttgggttttgaagtagtgggtgttcgactttagagttgttttcctggaagcgctgatactggacttagtggaggagaacgacggtatcaatgtgtttctggatgactgcctggacaagggagttcagcttttgggagactgactgggctatgaagtgtacctttctactctgcagaggctggaaaggcaaaaatgatggctaaggcttccttgcaggagaggctgcccctccagaactagactcttccttggctttaagatgtgaagtcgagcagctggaaggacagacacctcatctgaccactgttctatggaccaaaggcaggatgagcatgccgctgatacagaagcctgagggaacacactccccactacgtccttctccaacacagcaga

SEQ ID NO: 54964 - DNA, 589 bp, Homo Sapiens
gcacgagcggacgtcaaggatctggccgccctcagggtgcaactgcgggagcagcacctctactaccaggaccagctgctgccggtcagcaggatcatcgtgcacccacagttctacaccgcccagatcggagcggacatcgccctgctggagctggaggagccggtgaacgtctccagccacgtccacacggtcaccctgccccctgcctcagagaccttccccccggggatgccgtgctgggtcactggctggggcgatgtggacaatgatgagcgcctcccaccgccatttcctctgaagcaggtgaaggtccccataatggaaaaccacatttgtgacgcaaaataccaccttggcgcctacacgggagacgacgtccgcatcgtccgtgacgacatgctgtgtgccgggaacacccggagggactcatgccagggcgactccggagggcccctggtgtgcaaggtgaatggcacctggctgcaggcgggcgtggtcagctggggcgagggctgtgcccagcccaaccggcctggcatctacacccgtgtcacctactacttggactggatccaccactatgtcc

SEQ ID NO: 54965 - DNA, 740 bp, Homo Sapiens
gggcagaagtctctctcagtcaggacacagcatggacatgagggtccctgctcagctcctgggactcctgctgctctggctcccagataccagatgtgacatccagatgacccagtctccatcctccctgtctgcatctgtaggagacagagtcaccatcacttgccgggcgagtcagggcattagcaattatttagcctggtatcagcagagaccagggaaagttcctaagctcctgatctatgctgcatccactttgcaatcaggggtcccatctcggttcagtggcagtggatctgggacagatttcactctcaccatcagcagcctgcagcctgaagatgttgcaacttattactgtcaaaagtataacagtgcccctccggtcaccttcggccaagggacacgactggagattaaacgaactgtggctgcaccatctgtcttcatcttcccgccatctgatgagcagttgaaatctggaactgcctctgttgtgtgcctgctgaataacttctatcccagagaggccaaagtacagtggaaggtggataacgccctccaatcgggtaactcccaggagagtgtcacagagcaggacagcaaggacagcacctacagcctcagcagcaccctgacgctgagcaaagcagactacgagaaacacaaagtctacgcctgcgaaagtcacccaatcagggcctggagctcgccccggtcacaaaaggagctttcaacac

SEQ ID NO: 54966 - DNA, 903 bp, Homo Sapiens
catggcagtgggaccaagcgtggtcccgaggaagggccagagcctggtagagactagggaagggaggtctcctctagactgactcacattgccttgagcttttcagttaagttgctgtaagcacctgggctgaggaggcagttttgttccttcctgcgttatagcggggccttgtctcttcctctgcaggacacagatctggaggacgtggactggggtaggaaaccaccctgagggtgttagtacctagtggtgaaatggatgaggtaatttctaaggtgtgttgcccgtggatctgggcacaatcattggaattccttggagccactgggattcatggctttgtatccaactgcatccaggcctgaggctgctgacgtttgacaccaggccagtagagagtgcccttttgtatcttaagccaagaagtgaggcctgggggttggggaggggggaaggggtgggagccaatactgagtgcctgcagcatctactactctgtcttcactattcagaacttgtaactaaagtatttcaagaaactgattttaaatgcaaattaaagggcagatattctcaaacagggacaaacaacagcaacatgaaaagcccgacgacacaacagaagtgccagaagacaagacaaaacaggcacaaccagagctacgaagagcagcgacacgcacgagacggaccagaacaacgacacaaacaaccagacaaggagggggggggggccagtataacccaccgggaaggcaacaacaacagcaacagacctgtaaaagagtcgccccaatgacggatataaacaacagaggcggaataccacaacaggatagaaaaccctgcagtagagacgaccacgggggataaagaaccacaagaacacgcgaaacaatg

SEQ ID NO: 54967 - DNA, 932 bp, Homo Sapiens
  misc_feature (608)..(608): n is a, c, g, or t
  misc_feature (814)..(814): n is a, c, g, or t
tgacttccagaaacaccctcaccaacacacgtggaaataatgttttaccaggtatctgggcatcccttggttcactcaagttgacacaaaattaaccatcacagaaggagactggccttactctgaaattaggaaactaaagaagtgaccagaatggagactaggtagagacaactagttctctaccaaacatgtacagttattcgttggtatctgaaggggattggttccaggaactctcagggataccaaaatctgcaggtgctcaagtcatttatataaaatattacagtatttgcatataacctttgcacatcttccatatactttaaatcatctctacattacttataataatgaatgtagtgtaaatgctatgaaaatagttactacactattgtttatttgtatttttattgaattgttttggggtggggggcagctgtatctttcttagtaatagaacccctggttttagctgggcacatgactgccctcaataaagattaaagtaccccagccttccttgagattgtggccatgtgactgaactttagacagtgagatataagcagatatcttctgtggcagtgttagggaactattanagacagtaagaacattgccctttgccttctttttcctttcttcatttttctgcctggaatgcaaatgtgatggctaacaccctagcagccattttagattatgaagatgagagtccctccccaggaaggggtggacctgaaagctgaattctagatgtggaatgacaataaccagcccttggactacctaccttgtaagcctgggngttggggggggtgttggtttggcccgagaggggggaggggatttggaggggattccccccaggttaccaccaagggcatccttacccgggggaattggggaaaaggtttaatggtttc

SEQ ID NO: 54968 - DNA, 567 bp, Homo Sapiens
gatgaagaagtgatgtgtttaaatggaaactggacggaaccacctcaatgcaaagattctacgggaaaatgtgggccccctccacctattgacaatggggacattacttcattcccgttgtcagtatatgctccagcttcatcagttgagtaccaatgccagaacttgtatcaacttgagggtaacaagcgaataacatgtagaaatggacaatggtcagaaccaccaaaatgcttacatccgtgtgtaatatcccgagaaattatggaaaattataacatagcattaaggtggacagccaaacagaagctttatttgagaacaggtgaatcagctgaatttgtgtgtaaacgtggatatcgtctttcatcacgttctcacacattgcgtacaacatgttgggatgggaaactggagtatccaacttgtgcaaaaagatagaatcaatcataaaatgcacacctttattcagaactttagtattaaatcagttcttaatttaatttttaagtattgttttactcctttttattcatacgtaaaattttggattaatttgtgaaaatg

SEQ ID NO: 54969 - DNA, 800 bp, Homo Sapiens
ctgtcctgaaacctggagcctggagcagaaagtgaaaccctggtgctccagacaaagatcttagtcgggactagccggccaaggatgaagcctcacttcagaaacacagtggagcgaatgtatcgagacacattctcctacaacttttataatagacccatcctttctcgtcggaataccgtctggctgtgctacgaagtgaaaacaaagggtccctcaaggccccgtttggacgcaaagatctttcgaggccaggtgtattcccagcctgagcaccacgcagaaatgtgcttcctctcttggttctgtggcaaccagctgcctgcttacaagtgtttccagatcacctggtttgtatcctggaccccctgcccggactgtgtggcgaagctggccgaattcctggctgagcaccccaatgtcaccctgaccatctccgccgcccgcctctactactactgggaaagagattaccgaagggcgctctgcaggctgagtcaggcaggggcccgcgtgaagattatggacgatgaagaatttgcatactgctgggaaaactttgtgtacagtgaaggtcagccattcatgccttggtacaaattcgatgacaattatgcattcctgcaccgcacgctaaaggagattctcagaaacccgatggaggcaatgtatccacacatattctacttccactttaaaaacctacgcaaagcctatggtcggaacgaaagctggctgtgcttcaccatggaagttgtaaagcaccactcacctgtctcctggaagaggggcgtcttccg

SEQ ID NO: 54970 - DNA, 462 bp, Homo Sapiens
tggactgtgacaagaccgccacaccctggtgcacattcagctgagctggatggacagtgaggaagcctgtacctacaggccatattgctcaggctcaggacaaggcctcaggtcgtgggcccagctctgacaggatgtggagtggccaggaccaagacagcaagctacgcaattgcagccacccggccgccaaggaggcttgggctgggccaggacacgtggggtgcctgggacgctgcttgccatgcacagtgatcagagagaggctggggtgtgtcctgtccgggaccccccctgccttcctgctcaccctactctgacctccttcacgtgcccaggcctgtgggtagtggggagggctgaacaggacaacctctcatcacccccacttttgttccttcctgctgggctgcctcgtgcagagacacagtgtaggggccatgcagctggcgtaggtggcag

SEQ ID NO: 54971 - DNA, 1022 bp, Homo Sapiens
ggcaaaagaaagaatgaaaaagcaggctcaaaacggaaaaagtcatatacttcaaagaaatcctctaaacagtcccggaaatctccaggagatgaagatgacaaagactgcaaagaagaggaaaacaaaagcagctctgagggtggagatgcgggcaacgacacaagaaacacaacttcagacttgcagaaaaccagtgaagggacctaactaccataatgaatgctgcatattaagagaaaccacaagaaggttatatgtttggttgtctaatattcttggatttgatatgaaccaacacatagtccttgttgtcattgacagaaccccagtttgtatgtacattattcatattcctctctgttgtgtttcggggggaaaagacattttagccttttttaaaagttactgatttaatttcatgttatttggttgcatgaagttgcccttaaccactaaggattatcaagatttttgcgcagacttatacatgtctaggatccttttatcaaggcagttatgatcatcgttttcctgccttgaccccaccatcatcaaacactcagttaaatataaattaacattttttagatgaccactcaacataatgctgaagaatggaatttcctctctgtgacagaacccaggaattaattcctaaatacataacgttggtatattgaagacgaaattaaaattgtccttcagttttgaggccatgtgtaaagtttaaccatattgtaaaatatctattccgtattagaaatagctagttgacagcttatacttctcaaaattcatattgttatgtacacaaactaagtttctatatgtgaagttagtgagtctttttgtgttactccaaaataaaggcaatgatttattttttcccagtgccaatacaattttgagctaagcactcaaggtggatactttacatttaaarctgggatcagmamagcctawgggaaacaraaaaagcwtgacttttaawgtgactttaaaaaactgtttcttttgga

SEQ ID NO: 54972 - DNA, 854 bp, Homo Sapiens
  misc_feature (747)..(747): n is a, c, g, or t
ctgccacaagagatttagcagcaccagcaatctcaagacccacctgcgactccattctggagagaaaccataccaatgcaaggtgtgccctgccaagttcacccagtttgtgcacctgaaactgcacaagcgtctgcacacccgggagcggccccacaagtgctcccagtgccacaagaactacatccatctctgtagcctcaaggttcacctgaaagggaactgcgctgcggccccggcgcctgggctgcccttggaagatctgacccgaatcaatgaagaaatcgagaagtttgacatcagtgacaatgctgaccggctcgaggacgtggaggatgacatcagtgtgatctctgtagtggagaaggaaattctggccgtggtcagaaaagagaaagaagaaactggcctgaaagtgtctttgcaaagaaacatggggaatggactcctctcctcagggtgcagcctttatgagtcatcagatctacccctcatgaagttgcctcccagcaacccactacctctggtacctgtaaaggtcaaacaagaaacagttgaaccaatggatccttaagattttcagaaaacacttatttcgtttcttaagttatgacttggtgagtcagggtgcctgtaggaagtggcttgtacataatcccagctctgcaaagctctctcgacagcaaatggtttcccctcacctctggaattaccagaaggaactccaaagttactgaaatctcaggncatgaacaaggcaaaggccatatatatatatatatatatatctgtatacatattatatataccttatgtacacctgtgtctatatatgtgccctgtgtatgtgatat

SEQ ID NO: 54973 - DNA, 708 bp, Homo Sapiens
cgtccgctgttcagagcagtgtgcagaatgtaatgctcttttgtaagaaacgttttatgatttttaaaataaatttagtgaacctatttttggtggtcattttttttttaagacagtcattttaaaatggtggctgaatttcccaacccacccccaaactaaacactaagtttaattttcagctcctctgttggacatataagtgcatctcttgttggacataggcaaaataacttggcaaacttagttctggtgatttcttgatggtttggaagtctattgctgggaagaaattccatcatacatattcatgcttataataagctggggattttttgtttgtttttgcaaatgcttgcccctacttttcaacaattttctatgttagttgtgaagaactaaggtggggagcagtactacaagttgagtaatggtatgagtatataccagaattctgattggcagcaagttttattaatcagaataacacttggttatggaagtgactaatgctgaaaaaattgattatttttattagataatttctcacctatagacttaaactgtcaatttgctctagtgtcttattagttaaactttgtaaaatatatatatacttgtttttccattgtatgcaaattgaaagaaaaagatgtaccatttctctgttgtatgttggattatgtaggaaatgtttgtgtacaattc

SEQ ID NO: 54974 - DNA, 803 bp, Homo Sapiens
gctgaccgctgggccccagctcagaagggctatagctggtcccagaggcctggcctggccttccttcccttctcccatccctggcctggggcctctgggaccagctttctctcctggacaccgaggattggaaataagggcctggagctgagtagtagccagtctgctgtgaccacaggctcaggtccgaccctgctgcttggccacagcagtggctgggcaagtgggaaccactatctcttgggagcccccaaaagctgggaaatgctggaggaaccaggcctttcccgcttttgcctggctgcagggttcggctccgcccctgccccccagccctcgtgtgtccacaccgcagtgcctctgcccctcgggggactggacacacatcctgccagaggcgctacgaagctttgcccagatgaagccaggtgggctccgcgttcactcccactctcccgaggggtgctggcctccccagggtttgccttcttacggatttagacgaggttcgaggctcacctatcagggcagctctcaggattgtcattttcctctttgcctgtgggtttaactttggtattgtttaatcacaagtttgatacaaaatgttggatcgtactcttggagatgcccattctactttgaacttagcttttactaaattcgcatctggaagctcagcaaagtgcacaagccttactttggttaccgtggaaaccactgacagccctccccgatgtggtgcgctcaataaaatgctggaattcaaaaccaaacaaacaacaacaaacgagcaaacaaag

SEQ ID NO: 54975 - DNA, 516 bp, Homo Sapiens
aacttcaagaagtaagagctaagttctaagttcatgtttgtaaattaatacttcatttggtgctggtctattttgattttggggggtaatcagcattattcttcagaaggggacctgttttcttcaagggaagaaacactcttattcccaaactacagaataatgtgttaaacatgctaaatagttctatcaggaaaacaaatcactgtatttatctccgcaggctatttgttcagagaggccttttgtttaaatataaatgtttaaatataaatgtttgtctggattggctataacatgtctttcagcattaggcttttaagaaacacagggttttgtattctttactaaagatatcagagctcttaatgttgcttagatgagggtgactgtcaagtacaagcaagactgggaccttagaaatcattgtagaaacacagttttgaaagaaaaataccatgtctctaagccaactttaattgcttaaaagacatttttatttagttgaaaaatcta

SEQ ID NO: 54976 - DNA, 557 bp, Homo Sapiens
cgcgtccgtgtccctgtaaatgcgatagctaagtacacactaagtgagcatttgttcctgactctcaaagaggatggtttggagttctcttacgtttcctggtatttcccaagtctcttgggttggttggaaggctgtggctggtctcagtttggttactcaatgcccaggaggggctgagcaccagccatatcttttgctttggttcacatgatgatacctgcttttctcaggcctgctagaggcatccaacgccctggtttgtaaatagcaacctaaaggcgtattttggcactggtctggggacattccccatctctcatcccttttcccccttcacagatggtggtgggcttcgctctacaaagaggactctgatgttactcttgagcttatgagccagagagctgaaaaccgcaggcttgttgtgttaagttacaaggaaaatggatttggtaattaaaattagaagaaacacaccttcaaacttcaacttctttaaaagaaaaaaaaaactgtcctatcttgttctgtaaaatattagaacgctttgtttt

SEQ ID NO: 54977 - DNA, 793 bp, Homo Sapiens
ccgagtgaagtcgataaacaacccagacatgcgagtgcagatcctcaaagattacgtcaggcagcacttccctgccactcctctgctcgattatgcactggaagtagagaagattaccacctcgaagaagccaaatcttatcctgaatgtagatggtctcatcggagtcgcatttgtagacatgcttagaaactgtgggtcctttactcgggaggaagctgatgaatatattgacattggagccctcaatggcatctttgtgctgggaaggagtatggggttcattggacactatcttgatcagaagaggctgaagcaggggctgtatcgtcatccgtgggatgatatttcatatgttcttccggaacacatgagcatgtaacagagccaggaaccctactgcagtaaactgaagacaagaactcttcccccaagaaaaagtgtacagacagctggcagtggagcctgctttatttagcaggggcctggaatgtaaacagccactggggtacaggcaccgaagaccaacatccacaggctaacaccccttcagtccacacaaagaagcttcatattttttttataagcatagaaataaaaaccaagccaatatttgtgactttgctctgctacctgctgtatttattatatggaagcatctaagtactgtcaggatggggtcttcctcattgtagggcgttaggatgttgctttctttttccattagttaaacatttttttctcctttggaggaagggaatgaaacatttatggccctcagatactatacatt

SEQ ID NO: 54978 - DNA, 589 bp, Homo Sapiens
aaggatgcactatggatgctatcaaagtatactgtgatttctctactggcgaaacctgtatccgggcccaacctgaaaacatcccagccaagaactggtataggagctccaaggacaagaaacacgtctggctaggagaaactatcaatgctggcagccagtttgaatataatgtagaaggagtgacttccaaggaaatggctacccaacttgccttcatgcgcctgctggccaactatgcctctcagaacatcacctaccactgcaagaacagcattgcatacatggatgaggagactggcaacctgaaaaaggctgtcattctacagggctctaatgatgttgaacttgttgctgagggcaacagcaggttcacttacactgttcttgtagatggctgctctaaaaagacaaatgaatggggaaagacaatcattgaatacaaaacaaataagccatcacgcctgcccttccttgatattgcacctttggacatcggtggtgctgaccaggaattctttgtggacattggcccagtctgtttcaaataaatgaactcaatctaaattaaaaaaaaaaaaaaaaaaaa

SEQ ID NO: 54979 - DNA, 713 bp, Homo Sapiens
acgcgtccggaggggctgaggctggaaatagattgtacagacaagcaagggttgagtggtggttcccacacgaagtcatctcttaaacatcattagcaatagcagttcccttccaaggcctcccctcactcccgaaacacttacgtcccatgcaggcccaatgcaaaaaaacacatttgagcttttttcccgcagggccatgaagtccccttaagttcccatatctaagatggttgactgaccctctccccttatgtacagaagaggaaactgattctcagagaggggaagtggcttgcccgagtgtttgttaggaggttactgaatgacaaactgttcctaagaccccatctcatgctggccagagggccagcctcctcattcctgcttgctcttagaaaatctttcactgatcattttttgtcactggaataacttcaaggttattatgctttcattccaaatggatctgtcctcagctctggacccaattccccttacttcattttggcaaacactaagtcaaatagtgaaatgcctgtcactacatagaacctattacctggggcaaatacgaacagattgagtttccttcatcttgtgtaaatatgatgaaacagagacctggtaacttggtgacactgttaaaccctttttgggataaagccaaatgtaaatgaaaacattaaacagataaattgtggtgttgagac

SEQ ID NO: 54980 - DNA, 627 bp, Homo Sapiens
aaagtgtaaaaactatttggaagttgcccctgacaagctattatacatctctggtaaatcctgctgaatgtaagggatattcagagcttttcatacctcatcatgatgttatttaagcagccaacttatgtgacctgatttaaacttttaaaaaatccacttcattcaaactagaaagagtcaaagacaaaggacatttatcagccaagagtgtgacgcattcttcgcatctagtctgtagtagtgtctgtgctctgggatggataccgtctgatgtctgtttgttattgatggcgcagccactgcaaaactagtcaactcccatctataactgttactttttctagtgctgctttgtgctgagagaacattttagtttactgcacttgacctgtaaaagactgattctttgtaattttagggataaattaggtggttaatttaaagaagaaatttcaatgttgcctttacatcacattaaaatataacttctttcagaaggataatagaagcactgattcatagtaaaaatcttgtttttagctttgacttttttgtggctgttttttaaaattgtaaattactagtaacatgtcatttctataggatgttttaaattatgtacct

SEQ ID NO: 54981 - DNA, 619 bp, Homo Sapiens
cctcctccccctcctaaacgaagagcatcaccatctccaccaccaaagcggcgggtctcccattctccacctcccaaacaaagaagctccccagtcaccaagagacgttcaccttcattatcatccaagcataggaaagggtcttccccaagccgctctacccgggaggcccgatcaccacaaccaaacaaacggcattcgccctcaccacggcctcgagctcctcagacctcctcaagtcctccacccgttcgaagaggagcgtcgtcatcaccccaaagaaggcagtccccgtctccaagtactaggcccattaggagagtctccaggactccggaacctaaaaagataaaaaaggctgcttccccaagcccacagtctgtaagaagggtctcatcctcccgatctgtctccgggtctcctgagccagcagctaaaaagcccccagcacctccatcccccgtccagtctcagtcaccgtctacaaactggtcaccagctgtaccggtcaaaaaggccaaaagcccaacaccgagcccatcaccgccaagaaattcagatcaggaaggaggtggaaagaaaaagaagaaaaagaaggacaagaaacacaaaaaggata

SEQ ID NO: 54982 - DNA, 441 bp, Homo Sapiens
tttttcttcaataaagttgcataaaccaatgagttagctgcttggattaatcagtatgggaaacaatcttttgtaaatgcaaagctgttttttgtatatactgttgggatttgcttcattgtttgacatcaaatgatgatgtaaagttcgaaagagtgaatattttgccatgttcagttaaagtgcacagtctgttacaggttgacacattgcttgacctgatttatgcagaattaataagctatttggatagtgtagctttaatgtgctgcacatgatactggcagccctagagttcatagatggacttttgggacccagcagttttgaaatgtgtttatggagtttaagaaatttattttccaggtgcagcccctgtctaactgaaatttctcttcaccttgtacacttgacagctgaaaaaaaaaaaaaaaaaatggc

SEQ ID NO: 54983 - DNA, 561 bp, Homo Sapiens
gttacgttaaaaaccaaaaaactacatattttattatagaaaaagtattttttctccaccagacaaatggaaaaaaagaggaaagattaactatttgcaccgaaatgtcttgttttgttgcgacataggaaaataaccaagcacaaagttatattccatcctttttactgatttttttttcttctatctgttccatctgctgtattcatttctccaatctcatgtccattttggtgtgggagtcggggtagggggtactcttgtcaaaaggcacattggtgcatgtgtgtttgctagctcacttgtccatgaaaatattttatgatattaaagaaaatcttttgaaatggctgttttttaaggaagagaatttatgtggcttctcatttttaaatcccctcagaggtgtgactagtctctttatcagcacacacttaaaaaatttttaatattgtctattaaaaataggacaaacttggagagtatggacaactttgatattgcttggcacagatggtattaaaaaaaccacactcctaaaaaaaaaaaaaaaaaacgcgg

SEQ ID NO: 54984 - DNA, 637 bp, Homo Sapiens
gacagatggggttatgcatttgcaataatttccttctgatttctctgtggaacgtgttcggtcccgagtgaggactgtgtgtctttttaccctgaagttagttgcatattcagaggtaaagttgtgtgctatcttggcagcatcttagagatggagacattaacaagctaatggtaattagaatcatttgaatttatttttttctaatatgtgaaacacagatttcaagtgttttatcttttttttttaaatttaaatgggaatataacacagttttcccttccatattcctctcttgagtttatgcacatctctataaatcattagttttctattttattacataaaattcttttagaaaatgcaaatagtgaactttgtgaatggatttttccatactcatctacaattcctccattttaaatgactacttttattttttaatttaaaaaatctacttcagtatcatgagtaggtcttacatcagtgatgggttctttttgtagtgagacatacaaatctgatgttaatgtttgctcttagaagtcatactccatggtcttcaaagaccaaaaaatgaggttttgcttttgtaatcaggaaaaaaaaaaattaatgaaccttaaaaaaaaaaaaa

SEQ ID NO: 54985 - DNA, 774 bp, Homo Sapiens
  misc_feature (679)..(679): n is a, c, g, or t
ctttaagattgctatattttgggttattttcttgacaggagaaaaagatctaaagatcttttattttcatcttttttggttttcttggcatgactaagaagcttaaatgttgataaaatatgactagttttgaatttacaccaagaacttctcaataaaagaaaatcatgaatgctccacaatttcaacataccacaagagaagttaatttcttaacattgtgttctatgattatttgtaagaccttcaccaagttctgatatcttttaaagacatagttcaaaattgcttttgaaaatctgtattcttgaaaatatccttgttgtgtattaggtttttaaataccagctaaaggattacctcactgagtcatcagtaccctcctattcagctccccaagatgatgtgtttttgcttaccctaagagaggttttcttcttatttttagataattcaagtgcttagataaattatgttttctttaagtgtttatggtaaactcttttaaagaaaatttaatatgttatagctgaatctttttggtaactttaaatctttatcatagactctgtacatatgttcaaattagctgcttgcctgatgtgtgtatcatcggtgggatgacagaacaaacatatttatgatcatgaataatgtgctttgtaaaaagatttcaagntattaggaagcatactctggtttttaatcatgtataatattccatgatacttttatagaaacaattctggcttcaggaaagtctagaagcaatat

SEQ ID NO: 54986 - DNA, 922 bp, Homo Sapiens
  misc_feature (842)..(842): n is a, c, g, or t
tcgcgagcggcgcccttttttttttttttttttttggcatttcagactttgatcagtgttaagtgcacttgtattgctttttaatctgttaattttttaaagacccaagcagtcattttgagttatatctataaaaattataaaaggatttttgaaagtataaacaaattgtcagtgaaataaatgagattttggaataaagtgagaatgggagaagggatatgttgtgagcatataccttcacagttcttaatacctgttttgtaatcatgatattcagtcaaggcattatggtttttaatcttgaaacttagagaaccctttgaatatttgcttttactggtgtacagtatgagtggaatatgaactgtacacataattatcatgttgatataaatcataatttcaactagatcaagacatgttaaccttttataaatttaaagtcaataaagcacctttttaaaggaaacactgcaactttccttaacagcctgttaataaaggctttgtgacaagctctcaaaaaatgcatttctaaataggaggacatcaatgtattgatgaagagaaaaaactagtacttagttgccacactcatgcttacatagaaagagagcccaagaatattagatttcctcatgatacaagatactacagtaacaggctttaatttaggaatccttagattttgggggtattatttggggactctcctgaaaatggaaaactgtggcctctgggtccaggtttccaaaggaataagggtcgtaactttgattggaattaaaaatttgggagccccctagaacccaaggggaagtgagaaaccggggctcggnggacctgaataaaaatatggggggcaaccccccttttcacctattaaaaactcccgggaaaccccctgggtttgaaattc

SEQ ID NO: 54987 - DNA, 674 bp, Homo Sapiens
cttgtcgagaaaatatcaagctaataggagggaaaagcatattcggcctccgcgccctgaactcaatatgtgcctcttgcccacaatggtggaaaccagtaagggcaaagatgacgtttatgatcgtatgctgctagactacttcttttcttatcatcagttcatccatctattatgccgagttgcaatcaactgtgaaaaatttactgaaacattagttaagctgagtgtcctagttgcctatgaaggtttgccacttcatcttgcactgttccccaaactttggactgagctatgccagactcagtctgctatgtcaaaaaactgcatcaagcttttgtgtgaagatcctgttttcgcagaatatattaaatgtatcctaatggatgaaagaacttttttaaacaacaacattgtctacacgttcatgacacatttccttctaaaggttcaaagtcaagtgttttctgaagcaaactgtgccaatttgatcagcactcttattacaaacttgataagccagtatcagaacctacagtctgatttctccaaccgagttgaaatttccaaagcaagtgcttctttaaatggggacctgagggcactcgctttgctcctgtcagtacacactcccaaacagttaaacccagctctaattccaactctgcaagagc

SEQ ID NO: 54988 - DNA, 741 bp, Homo Sapiens
  misc_feature (633)..(633): n is a, c, g, or t
ttttttttttggggtggctccaagcattaagaggtttaatctttgatggcattgttctagttttgaaatttctagtatatttcagagtctcttagaagacttgtgtgggaagtttcactttgttttcagtgaagatcacaaacctccttcttcctttactcaagaggaaaggtcccagtatacatatttgaatggttgatggttttcaagaccttcagggagctccctgcattttacctagaaacagaaaaggcccgcaaaatcttaagtttcctggcctgcatttcccgggtaggggcaaatgactccaagctggtctctaagccaatacccttataaaccagagcccaggaaagacagctcgagtgtataattctctggagctcaattctatgcagttgtgctgatatttcattaagtcactgtgtatttttaagtgttgatacattaaaagtcgctttatggaagatgagtaaattttttaaatacttggaaattttatttccttgttaacttctacagatcagggcatgcaaccaaaagcagcttaaatgaaatattttaaaataaaatatcaggaagctatttttagatttcttctggcttatgtttctactttaggaccctcattgntctcttattaaaaaaaattatttcctgtgcatctcatggactgcagggtaaattatttgggcataaataatttaaatagttttctttcattttgactatctccagtaa

SEQ ID NO: 54989 - DNA, 531 bp, Homo Sapiens
ccattatttgtggtttatattgggttactgtttaacaccaaatggaattggcattctgcagatttaattaattatgaaaccagggtctcattttccttgctgatacttgttgaaaatgagattcacattctagtctttattttcctcctgttttgtccctgtgcttgtacatcttccttttatttgtgtgttatagttctattccatttgagaaggcagttggtaagaactagattgcatgtacaaagacaggtttactaagtgctgtacagtggtcctgaggttacagttgaattagaaaaacgaaatgtacttacaggaaataagaaagcaaacctttcaaatgagagtgatgatttctttaaaaaaaatcagtttttttctctcaaataatgttctttatttcacgaaatcgtcaatcttaagcatgagcagggataaacaactcctagaaggaactcaattcattcttcctggattttctctgttgttaaatcacaaaaatgatagtccccaatcgtttctttatag

SEQ ID NO: 54990 - DNA, 636 bp, Homo Sapiens
  misc_feature (492)..(492): n is a, c, g, or t
cacgaggcgggcgcgaggaccggccgcaggaagttgctgcaaacttttttggggggtgcagcccgtgccccccgcgcgccggggccgaatgcgcgccgcgtagggtcccccgggccgagaggggtgcccggagggaagagcgcggtgggggcgccccggccccgctgccctggggctatggccatggtgaccggcggctggggcggccccggcggcgacacgaacggcgtggacaaggcgggcggctacccgcgcgcggccgaggacgactcggcctcgccccccggtgccgccagcgacgccgagccgggcgacgaggagcggccggggctgcaggtggactgcgtggtgtgcggggacaagtcgagcggcaagcattacggtgtcttcacctgcgagggctgcaagagctttttcaagcgaagcatccgccgcaacctcagctacacctgccggtccaaccgtgactgccagatcgaccagcaccaccgngaaccagtgccagtactgccgtctcaagaagtgcttccgggtgggcatgaggaaggagtgtgacggtgcaacgcggccgcatcccgcactcgctgcctggtgccgtggccgcctcctcgggcagccccccgggctcggcgctgg

SEQ ID NO: 54991 - DNA, 844 bp, Homo Sapiens
cccagtgctaaagtacgagagcaaagaatgcccagagatgacactagtgatttcttgaaaaactcattattggaatctgatagtgcttttattggggcttacggtgagacatatcctgccattgaagatgacgtcctccctccaccatcacagttgccctctgcacgggagcgcaggaggaacaaatggaaaggactagacattgatagcagtcgtcctaatgtagcaccagatggtctctctctaaaatctatatccagtgtaaatgttgatgagcttagagtgagaaatgaggaacgaatgcgaagactgaatgaatttcacaataaacctattaatacagatgatgagagttcactggttgaccctgatgacatcatgaaacacataggggatgacggatcaaactctgtagcaactgagccctggctccgccctggcacttcagaaacgctgaaacgtttcatggcagagcagctgaaccaggagcagcagcagattcctggaaaaccaggcactttcacttggcagggcctgtcgactgcacatggttaaaataaacctgtactggacccagtagtgccttttaaggtgaaaggaatggtaaatctgtacctttaatatgtcctacttttggcccctacctgaaagttactttttttccatcatctgtatataaaattatttttatcatgatgtatattatgtacataaataaaaggccatgattattgatttatataatagaattgtatagattatttttgcacagttttgtcataaattagggtggtaatgaactggattgaactactatatgtgcattatattgaattctgcttgt

SEQ ID NO: 54992 - DNA, 1062 bp, Homo Sapiens
agagaatggaagatgccaggaggcagaaattggtcctcaaaaaccagattctgctgtttatttaaattcaggtagcagtttattaggtggactaaggaggaatcagagtcttccagtcataatgggtagctttgctgccccagtttgcacatcctcacccaaaatgggtgtcctgaaggaggactgaggttcagcagttaactgaccttttatacaagttagcacatgaaggatagatatgcactgaaacatgtggtctggtctgacttgagagaaaaggaatgttgcacaagggttgtgaatgtgaaagggggaatggaggaatggaaataaaattgggatgagccctaatggaggaagtcgggcaaattgaaagtataaatgaatgggccatgagtgttcagagggagaaaagaaaggtttaatatactccttcagttgagttttcttgtcttgaacataaaaagtgaatacaaataaattcagtaatactaaaacatacagagatactgaacttgctggcacatttacttctggtaagcataaagcagagagaacccaggttagaaggatgggaagagaaaaggagcagttttattgcttatagaaagccgttctgaggggttggtggggtaagctcagtctattactgagacaatagtgagatggcttatatgtttcccctgttaatatctggttaaattatgtatccatcaaatggtatgctcgcagcattagcaaaattaggagtttcatctttttcattgaatcacaggtggagactcctattttcctttctgttttcaggcctttgagcccctgggagcccaaataccactcaattattttgtawtttatgattaataaaagttcattttttaaatttgtatttttatacaacctccaaaaaaaaaaacaactgggtagagggtgggggggrtttwcttttaaraggcaaatgtgagtwaattgaamcmaraaamctktttttaaawattyskctgawwagtmmrkagccaggadaaaamatawtgstgttttaaaatycytggggtggagggg

SEQ ID NO: 54993 - DNA, 810 bp, Homo Sapiens
ggaacatcatcaagtgtgttcacacgcggggtcggtttaatggagtgtccacgcggagataactgcgatattggaacacctgtgagagagattgttctatagggctggaatattcagagttacattcttggaagtttctgtttttacttgcatcaaacacccctctgttgttctccatcatctttaatagcaactggagaccactttggtcattggtaagggggtgcattctcctcacaaaggggttttatggacttcctcaggcggagagcttctgagaacacaggcaggatggaaaaagactactagccacttttgctttcccaaccccccttaatgccatccttcattgtctttctggcttctcttcttctggcacagtaccattttgggtctgtgccccagtgtggagcaaaacattgcctgtcccattctgatatacttcagaatttgagagcagaagttaatgtggaacaaaagttttcaccatctctcaagccccaaggactggagccacctctggaataatgtgttaaatatctgtatattatatatatgtagagaaaaatctaattttttggtttgatttccttcccattaagaatcttgttttttgataccctttgtctcctgagactctttcttggacacgtgttgatggggatggcactcctgctctccatcttttatgggcagagagatttcaaaacctgagcaggatcatgtcctggcagttactaaacagggacttttgtccatggttttggatcatggggtgccctactgctggtctaaactctggctcttcct

SEQ ID NO: 54994 - DNA, 564 bp, Homo Sapiens
agtgtgcagactcaataaaatcatgtacatttctgaaatgacctcaagatgtcctccttgttctactcatatatatctatcttatatagtttactattttacttctagagatagtacataaaggtggtatgtgtgtgtatgctactacaaaaaagttgttaactaaattaacattgggaaatcttatattccatatattagcatttagtccaatgtctttttaagcttatttaattaaaaaatttccagtgagcttatcatgctgtctttacatggggttttcaattttgcatgctcgattattccctgtacaatatttaaaatttattgcttgatacttttgacaacaaattaggttttgtacaattgaacttaaataaatgtcattaaaataaataaatgcaatatgtattaatattcattgtataaaaatagaagaatacaaacatatttgttaaatatttacatatgaaatttaatatagctatttttatggaatttttcattgatatgaaaaatatgatattgcatatgcatagttcccatgttaaatcccattcataa

SEQ ID NO: 54995 - DNA, 625 bp, Homo Sapiens
ccacgcgtccggcagaactctagctatatggggtagaaataaaatctctgagatgaaacaaaggaatcaacatgataaaatttaggcgaagtagttaagaaatggcccttttgaatgttgaagataggaaagaaagccatatattcaaatatgtaattttcctcatttagttataatgacatctttaccaattgggcttcataaatgtgtttctttcttaatagtatcctagttccagcatatattcaacatgaattttatcattctcctcctaatggaatgtcttccttatagaaatgttcacgacaaattcatttgtgttttttacatgtcaataatgtatgctaaattaaaatgttttccagttattctgatagatgtcattatggcatccttaatttttcttctccttctgtatatagggtaagggactgttctgaagaacctttccatttagtgatcaagatatggaagctgatttctgaaaatgctcagtgtgtactctaattatttatggtaccatttgaattgtaacttgcattttagcagtgcatgtttctaattgacttactgggaaactgaataaaatatgcctcttattatcaaaaaaaaaaaaaaaaaaaag

SEQ ID NO: 54996 - DNA, 720 bp, Homo Sapiens
ctccagatagcctgcatttgcaatggaataactgacaaatcacaagtggtttagttgggcagggctttgatcattcaaaagtaactaaagtagctccagaatgccaagtattcgtgtaaattacggttacatgttatcatttgctgttcttacataagcactcatgaaaatatggtattctgtaacttgaattccatccattttccagacgtctactcatgtctgaggtaaatctagaaattgtcttagttttaggattgaaacagtctataaactgtatttttggtccatccaggaagctagtcccttgtttctcctttctacatgacattgcagtggtggtttctgtaattaaaatttgtttgcctcatgtccctttgtctgataaaccttcactctaccgattcagttgtgagcattctttttttccttctcaaaacctactatgatttgttttactgaacaaaggttatcaaccacacatccagtcctgacatggagcttttcagtgtttggagacatttctcaatcccctgctgtggtaggaactccagtggtgaacggcttgcgcgcctgcagccagagttgcagggaaagctcgtacttactgcgagcagcatgtaatcttttttcttcctggacataaagatagcttgagtaaactgttctatttcattctcttcactctttttactgtcttgcaaaaaaaaaaaaaaaaaa

SEQ ID NO: 54997 - DNA, 541 bp, Homo Sapiens
ccaagctctaatacgactcactatagggaaagctggtacgcctgcaggtaccggtccggaattcccgggtcgacccacgcgtccgaacggtgcggaccggccggagcaggggttcagaagccgtgagtggactcgggaaaaagtgtctcttagacctggcgctcggcgggaccctcgccacccgcgtcggggtgatcgggtgaatgtcctggggctttggctcgacggcgaggcggccgagggcgtgcacctctcttgcagtttcctctcccagcgcctcgggggcgttttcagtcgaataaacttgcgaccgccacgtgtggcatctttccaagggagccggctcagaggggccggcgcgcccgtcgggggatcgcggccggcgcggtgcaggggcggcggctagaggcggcggcgcggcggagcccggtgccgtggatgctgcgtgcggaggcgctgccggttacgtaaagatgaggggctgaggtcgcctcggcgctcctgcgagtcggaagcgccccgcgcccccgcccccttggcc

SEQ ID NO: 54998 - DNA, 570 bp, Homo Sapiens
tgtcagcatcgagccacaccaacctgacaaggttcggagtgatgggggcggccaaggtgacactgggtccaggagctccctggggccctggcctaccactcactggcctcgctccccctgtccccgaatctcagccaccgtgtcactctgtgacctgtcccatggatcctgaaactgcatcttggccctgttgcctgggctgacaggagcattttttttttttccagtaaacaaaacctgaaagcaagcaacaaaacatacactttgtcagagaagaaaaaaatgccttaactataaaaagcggagaaatggaaacatatcactcaagggggatgctgtggaaacctggcttattcttctaaagccaccagcaaattgtgcctaagcgaaatattttttttaaggaaaataaaaacattagttacaagatttttttttttcttaatgtagatgaaaattagcaaggatgctgcctttggtctctggtttttttaagctttttttgcatatgttttgtaagcaacaaattttttttgtataaaagtcccgtgtctctcgctatttctgctg

SEQ ID NO: 54999 - DNA, 558 bp, Homo Sapiens
agcggagtcgcctgtaccaaccaccttctcaagttgtagcggtcgctcgcctggggttctccgtgggcggccgacgggcgcgtgggggagggggttcgggccgcccagcgcggcaaggagcgagtgtgtgcacgcagagggccggggctacggggcagcgccccgggcgatgaggggccggcgttgaccgggaagagcgggcaccgcggcagtggctccgaggggacccgcgatggcagcgccctgagaggaggctccaggcagggcgggctgcgctggcagcggccgctgaggtgctggccggccggctggctggcgacgggggcagaagcgacgagaggcgcgctcggcacccgcacccccgtgcccccgcctcagtgtctaaacttcgggctctcttccacccgctctgcgcgcccagagtcaacaacttcttcacccccctccgccccgcccttccctccgtcagccccgggagctcgcgcgcgccggggaccaggaacctccagcgctgagatgtggccgtgaggcgtggcgggcgggaggagaagctcgggt

SEQ ID NO: 55000 - DNA, 801 bp, Homo Sapiens
tggcagatggcagcctgcacccctcagccgagctctggagtcccccgggccaggcgggcttcgggcccatgctgggtgggggctcatccccgctgcccctcccgcccggtagcggcccggtgggcagcagtggaagcagcagcacgtttggtggcctgcaccagcacgagcgtatgggctaccagctgcatggagcagaggtgaacggtgggctcccatctgcatcctccttctcctcagcccccggagccacgtacggcggcgtctccagccacacgccgcctgtcagcggggccgacagcctcctgggctcccgagggaccacagctggcagctccggggatgccctcggcaaagcactggcctcgatctactccccggatcactcaagcaataacttctcgtccagcccttctacccccgtgggctccccccagggcctggcaggaacgtcacagtggcctcgagcaggagcccccggtgccttatcgcccagctacgacgggggtctccacggcctgcagagtaagatagaagaccacctggacgaggccatccacgtgctccgcagccacgccgtgggcacagccggcgacatgcacacgctgctgcctggccacggggcgctggcctcaggtttcaccggccccatgtcactgggcgggcggcacgcaggcctggttggaggcagccaccccgaggacggcctcgcaggcagcaccagcctcatgcacaaccacgcggccctccccagccagccaggcaccctccctgacctgtctcggcctcccgactcctaca

SEQ ID NO: 55001 - DNA, 410 bp, Homo Sapiens
  misc_feature (33)..(33): n is a, c, g, or t
  misc_feature (157)..(157): n is a, c, g, or t
aaggcctggccccttcctgtgctgagcccacancagcaggctgggtgtcttggttgtcagtggtggcaccaggatggaagggcaaggcacccagggcaggcccacagtcccgctgtcccccacttgcaccctagcttgtagctgccaacctcccagncagcccagcccgctgctcagctccacatgcatagtatcagccctccacacccgacaaaggggaacacacccccttggaaatggttcttttcccccagtcccaggctggaagccatgctgtctgttctgctggagcagctgaacatatacatagatgttgccctgccctccccatctgcaccctgttgagttgtagttggatttgtctgtttatgcttggattcaccagagtgactatgatagtaaaagaaaaa

SEQ ID NO: 55002 - DNA, 563 bp, Homo Sapiens
  misc_feature (559)..(559): n is a, c, g, or t
ctttctttcttttactttttattaaatttaatagaaaatatgacctgagtagttaaaaagtattttgcattatttgcagtaagatgtctctagcactgctcaaagggcaaattttaaaacttcagtctgggtgaaagatttgctagttttacagaaagatttgctatcttaaactcaagctggtttttctgttctcatgtaagtgactgggatgctgtcttatgaattcttccaaggtcatgtttgtgaaataaacattacatgagagctttcctgtcatctacactatatgttgtctggagtgttgaacaaatttattttagtttctaagttgtaatctatcctcatatggtctatacgattttgaatgtgtgccactacatactgagatgataatgctgtacaattttaagtggtagcagtttctgtatgcagtaggctgaaatattttgatgaactgcttaatttttggattttattttttaagttgtataatttattttcttgcaaaataaaaatgtaatataaaaaaaaaaaaaaaaaaaaaaaaaaacctcgntgcc

SEQ ID NO: 55003 - DNA, 600 bp, Homo Sapiens
cccaagttcaagcgattctcctgtctcagcctcctgggtagctgggattacaggtgcccaccaacatgcctggctaatttttgtacttttagtagagatggggtttcaccatgttggccaggctggtcttcaactccagatctcaggtgatctaccctcctcggcctcccaaagtactgggattacaggcctgagccaccgcgcccggcctatttttcactttaatttggcagctgagaatgcccaaaaagtgccagaagcatcgtggcatttccagaaccatggattctgcctttggacccctctctattaatattaaaactctgggccttcagatgtcaccctaatccactgccctaagacagaatttctggacaagatgggtaagggcttcattccttcaacaagtcaagtcatacttggcctctccctgagaatctgagcaggagccttataacctgtggtcattattttttctttctgtacagaaatagaaaagcattagaaataacttctaaccatcctctgaaaaaacagaaaaaatatcgaatccctctttcatgagaagtcttttggataattggaaaccttcatcactga

SEQ ID NO: 55004 - DNA, 602 bp, Homo Sapiens
cgtggttgcttttgattacccttaggaagtgagacagtgtttttgaaaatatgtatttcccccatttctccctctccttccctgacacttctctgggctgcacagcagaaacgttggtaaaagggcagtttggtttcaacacagcagacctgatatgggatcccttagccactttagtcaaacagccctgacagagtctataattgagttcaggccccccaccttgcctaataactgcaaatcgcatgttcagccagcagcctcctaagcccaccttcctcccccattagagaacacccatcctaggtgctctccaggctgtgtcattggcagggcttcacatgcaggaggcctctctcaggtgagtccaggttaaactgttgagttgtggcttcaacagatatgtatggcatgctgggatgtgccaggtgcctgcgttgtgccagttgctggagaggtagtgtgagcagagcagctgaaatcttgccatcaagcaaccctcattctcatgcctgtaggtttccattgctctgtcccaggacacttgcgtgccagagacgccacaacttcatgtccctgtctcttgcaagctccccgtgctg

SEQ ID NO: 55005 - DNA, 787 bp, Homo Sapiens
tttgatgcattgtttggaaaatttgcaatacaaactggcataagaattacttattctgatgatgcacttttatgtatttttcattagaaagtagaactaattttagattttcagcttgatggattttcagtttttcctgaagaattttctttaccattagtcttcaaattggatactgttgtgcagtggtgtactgttatacttcagagaaagggtaagagtacatctagttcagttcctatgaggtagctgtaacccttaaaaatgaaacgtcaactctagggtacatttgacattgaaagaatagttaggaaataacttggttttgatagggtcatgattaagaaatgatatattggttttatttatggaattgttttatagtgcatacaaatcagcgatcagccagcaaatatttttctttgagcttgtgaaagctctgtgttcttttgccttcaatctgttgtcttcaaaacaaacaaacaaaaaaagcttcttgcgcctttccctcccctgttttcttcctttttctttttgcttgtatgcacaaggtaggacttacttcgtaagaaacaaaatgccagtattttcttaagccatgatgtgaaaccaatgaccctgtgaccacatggcacagaacactaaattttggtcccatggctgaaacttgagggtgactaaaagtaatgcctgtgaaacatgatatctatctgggatggccatttgatctctaaaaggaattttgtacactccacagaactcctatctatagtaaaattgattttca

SEQ ID NO: 55006 - DNA, 713 bp, Homo Sapiens
  misc_feature (652)..(652): n is a, c, g, or t
  misc_feature (700)..(700): n is a, c, g, or t
ttttttttttttttttttgtagtaggaatgttttattagcaaagaagtttcagagagtgggtggatcagggctctatcacttggtccccacctcaccttggtggggccagagtgagccccttcctgccacagtcaccccaactgaaattgcctttctcttcggccagtgttagcctctgagcaggggaccctggacccttctgtgcgccaaaggctgaggtgactgacgaggagatctccccacagctaggtgtagtgagccagacgaggcagcttactgaacctgggggttctctccattgtcaccgcattctccttcaccaggtgtggctgtctgggagccagggggtgactcgctctggagagaggggaaaagaggggggcctgctgcaatctccttgaggcaggaaacgtgggattcagccccagcctcacttagtggaggttcttttaccatggacccaggctgcctggtttgtatccaacctctgccccttctgacctggaagaggcgcttgaccttcctcccacatcccttccagtggggtgagtacaggtgttcctcagtttacaatgggttacattccggtgagtacatcataggttgaaagtattgcaagttgaaatgtgtttaatacacctaatctcccanacatcacagcttagcatggtccatcttaagcttgttcagaacgcttancctgtagttgggc

SEQ ID NO: 55007 - DNA, 1016 bp, Homo Sapiens
cactgcattcatttttctaaagtaacaaatttggtttttttttaaaccattaaaatctatgtgtgtgcgtgtgtatgtatgtgagcagttggtcttaccagaatcattgttgaactacctgaaacaagtctttagaatactaaatataatgctgttgtctcttcctttttgacattttctgatttttttcccccaaaactcagttaatatttacccactatgattattgatgtcctgccttgaacagttttaaagaaaacaatttttggaatagctcaaatttcaattgatggcacaaatcagcattttgttgttgttactgtattacaattagtattctaaaggcagaagcagaagtagctgctttttagcaatagaattgtttcagtattttgctgctgtttaatgcgcatcttcagaaaacttcccagtggcttcaaggaatttggggatctctctggcaacaaattgtgaaacatgaaatttctgctgactttaatatatgaaacctaatcctacccctttttaacaaaaagaaactagtacatttgtgaaaattgtgttgtgttgtccattgttgctctagttctgacccagaggtagctctggagtgattttagacctactcactcagttgtgtgtaggtttttttgttttgttttgagagagaatttttctctccttaatagaagcatcctttttaaagagaagttgccttggtccacacactaagcagaaaaccaagttatcacgacagagatatttcccaattactcctaatcaatgaagaaagtggagttggatatttttaaagcaggtaacctaattttttccttacctaatctttttgggaagtttggcttggttgaaataaccctttttagttaaacctgaaaagattcccaaaatatggttctttaaagggccttgaagaactggaaacccaaaattaaaattggaacctttcctaaaaaatccctcctttataaagagttacctctttggccccctaaaaa

SEQ ID NO: 55008 - DNA, 705 bp, Homo Sapiens
gaagggcccacctgcattgttgagtgtctgctgctgaaacacatgattgtgtttaggtttgaaattgctcaagtgtctggctcaggtggtggttctgagacacatcgtcctgctgagagcccagatgcttaggtccactagggcccgtctagggaagggaaaggagatttcagcggcttccccgaaaggaacgggactgtcgggatgcttcccggatgtctacagttgccccttcctgcagtgagattactgcttcctgtttccctccagctcttcccagcagcagtgagggagtataagagggatctgtagtcgctgcctggctctgtgggcggcccctttaagactcaggtgagctcagccagtcccgctgcgccaggcttgaatcaaaggtgtcagcaagctagatgtcaaaacatttcgagagagaggcagcttgcagaaaagcagaaaggttgaattcaggggtcagcaaactatggcatgtggccccgtgagctaggaatggtttttcctctttaagacagggcctggctctgtcacctaggctggagtacagtagtgcaatcatgactcactgcagcatcaacctccctggctcaagcgatggcttttacctttttaaggagttgtaaaaaaaagaaataatatgtgacagaattcatgtggcccacaaagcctgaggtacttactgtcaggcccttt

SEQ ID NO: 55009 - DNA, 1111 bp, Homo Sapiens
  misc_feature (35)..(35): n is a, c, g, or t
  misc_feature (66)..(68): n is a, c, g, or t
  misc_feature (871)..(871): n is a, c, g, or t
  misc_feature (934)..(934): n is a, c, g, or t
aaaaaaaaaaaaccgacacacaccacccagagaanaagaaaaaacaccccaaaaaaacaaacaaannncgccgccaaaagagatggtccggtccggaatttcgggattgggcatcgtagatattctacacaaactgagtcagtcaccagattcaaacctttgtgacaaggcaaagatggcactgcagcagtacctggcatgatgggagtgcccctgggcacctgcgagcatcccacctccttgtttaaggaagtacaggaaccagcctcatttgattccttctatttgcacaagtcaccttggactgcagggagctgttttgcaaaagcagtttagtaggcttagatctcaaattcatcttgagaacatttttttgaggtagtaatttcctcagaagactcttgtgttttgttttggtttttttttctgagctactcggactctttattagaacaatcaatcattttcctttggacctacaatttttgcctatgctgcagccactttgtgagtgagaatgaatatgtctgtgtgaacacacaggcatgcgtgtgtatgtgcacgtacatgggccagaatgaatggatgtgtgtgtgtgagggatacctcagatttttcttttcttattttgtgtgaaaatctcttttctacagattttccagggtttaagcattgcttgctgtataaaaaactttactgaattatatacagtttgaatgaaatgttattttaaaaacaaaacaattgttaagtgttccataaaggttatgttgaattttgggtcagatgaatatttgtaagtaaaaaatatatgcatttctgaaccttcaacttacatagaattttcctttatataaaaaaaaaaaggaanaaaaaaaggaaaaagtttggcctataagttgggcctgaattaaacaaggcactataccatggngggcttgtgccaaaatagttaagcctaagcaatctttaacttccccgttcaatatttagcccaggggaacaagaaccccctttttttccatccccaaatttcaggtaaagttttcttcagggcttttccaaagttcacaatgggggaaaaaaattaaaaatttgaaaggcacaacac

SEQ ID NO: 55010 - DNA, 654 bp, Homo Sapiens
agttagcaagtttataataaagttaaatataaattattttgttttaaaatgcctcaaatttttctttattctaagcagcaaacattaaaataagaatatttcctgctaaatgtaaccatacactttattccacaaaatgttatttaacaagactgagggttttttttaagaaaaaattatttccatccaatatttaaagacttgaattttatttaaacttgaaaatgactttgccttaacttttgtataagacagcttagagtccatggagcccggccctgggttggcgtgagtgggtcagagttactcagttactgcgtggatctcctgtcgctagttttactgagtaagcatactgtagtacaagagctagtagtagtttttgtaatataccttaaagatcttcaacagttgatcttttttcagaatgttggaaaatcctgtaaatgcaaatagtcaatactgtattaaatacgtgcacttggagtgtgcttcgcttgtacagttgtaaataatcagaacatatgaaaaaggtaccctacagagaaaattctgatacagattattgatatattataaatgttgctgttgagcgggatgtagataaactaaatgttgtggtttgaatattaaaaaaaaaaaaaaaaaaaaaaa

SEQ ID NO: 55011 - DNA, 648 bp, Homo Sapiens
aaaaaccaaactgctttgagctttatatccccgacaataaagaccaagttatcaaggcctgcaagaccgaggctgacgggcgggtggtggaggggaaccacactgtttaccggatctcagctccgacgcccgaggagaaggaggagtggattaagtgcattaaagcagccatcagcagggaccctttctacgaaatgctcgcagcacggaaaaagaaggtctcctccacgaagcgacactgagcgtgcagccaagggcgttggtctgcgggggccttggagctcctgctcttctcccgcacctccatggatgcactgctgccgagcagagcgtcctctgccaggccccgccctggattcctagagactagcttcagcttttgctattttttttaagtgggagaagggtgggcagttatcactggggaagagaggaccggccacctgtccagcatgggctccagagccttcctctctcacagggcagagctcttgtcggcagggcagcctcctggccagtttctctgctcagtgttctggtagcagagctcagagccaactgtttacctcttggttgtccccgtgaagaagccttcaaaccctgcaccataaatacatgtgtccatatattattatatgttaagagaaa

SEQ ID NO: 55012 - DNA, 1122 bp, Homo Sapiens
cgacggtttcccggccctggcctgcagcttggaggagaagctgagcctgtgcttccgcccctcggatccgggcgccgagcccccgaggacggccgtgcggcccatcacggagcgcasctcctgcagggggacgagatttggaatgccctgacagataattatgggaatgtgatgcctgtagactggaagtcatcgcatactaggaccttgcacttgcttactctgaacctctcagaaaaaggggtaagtgacagtttgctctttgatacatcagatgatgaagagctgagagaacagctggatatgcactcaatcatcgtctcctgtgttaatgatgaacccctcttcacggcagaccaggttattgaagaaattgaagaaatgatgcaggaatcaccggacccagaagatgatgaaacccctacacagtcagatcggctttcaatgctttcccaggaaattcaaactctcaagaggtctagtaccggcagttatgaagagagagtgaaaaggctctcagtgtctgagttaaatgaaatcctggaagaaattgagactgccattaaggagtactctgaggagctggtgcagcagttggctttacgagatgaactggagtttgaaaaggaagtgaaaaacagctttatttctgttcttattgaagtgcaaaacaaacagaaagagcacaaagaaacagcaaaaaagaaaaagaaactaaaaaatggcagctctcagaatgggaagaatgagagaagtcatatgcccggcacatatttgactacagtcattccttatgagaaaaaaacggaccaccgtctgttgaagatcttcaaatattaacaaaaattctttgtgccatgaaggaggacagtgaaaagttccgagcttgttaactgattatattctgaaagttctgtgtcctacatagagcagcaactttatctgcggtgggstcmagctagattycgrcagcttattctgagagctggctaccattaccctcttgctatkggaactcasacatttaacttggggttgattmrtawttamartctkrctamctaatycttatattwwaracaacggaawatgggcctatttkratytagrrtggtttgttaa

SEQ ID NO: 55013 - DNA, 680 bp, Homo Sapiens
  misc_feature (667)..(667): n is a, c, g, or t
agtggcattcctgaggtcatgcataagaggcagtcaggactgaaacacagtctctaacacttatccgtccccttgatcttgttgctgaagtgatttaattacttgcgtagctctgcacacaggaagggctgctctgaataagagctcttttccatggacactcagcgctgccggaactgattttgaagaagtcactgccggctctgagggcctagggtatgtgtcttaggatctcctgtgtgcacaaagtgtcactgacagaacacagcaggatggagagcagcctcctcagaagcctcacaagtctttcctcagatgaagacagagcaacgagtcagaagacagatttcaacagcgacttcaccatgcgaccttggacaagttatctcacctcatcagtagaataggaatgatccctacccctcaaaggtgctgatgacactagtgaccaagatactcatgtgggttggactgcccaggacacagcagatgcttagtaaacacagatggaattcagagggaaaatgtaggcattgaagaaagttgtcttactgaccatccggaaccaggctaaggatcccctagaaatcatagacctctgaaattatatgcagaattctttatgtgttttcataattaataatagtctaacatattaaattcttanaaaaaaaaaaaaa

SEQ ID NO: 55014 - DNA, 756 bp, Homo Sapiens
ccctatgcagcctggtttctagcgtgacacgcccttgacttgaggaccatgaaccgcagccgccaggtgacgtgcgtggcctgggtccgctgcggcgtggccaaagagacaccagacaaggtagagctgattaaagaagaagtaaaacgcctcattgctgaggcaaaggagaaattgcaagaagaaggtggtggcagtgatgaagaggagacaggcagtccttcagaagatggcatgcagagtgcacgcacccaggcacgcccaagagagcccctggaggatggtgacccagaggatgacaggacgcttgatgatgatgagctggctgagtacgacttagataaatatgatgaggaaggtgacccagatgctgagactcttggtgaatctctcttgggtcttacggtctacgggagtaatgatcaagatccttacgttactctgaaagatacagaacaatatgaacgtgaagatttcttgattaagcccagtgataatcttatagtttgtggccgagctgaacaggaccagtgcaatttagaggtgcatgtttataatcaagaagaagactctttttatgtacaccatgatatactcttgtctgcatatcctctgagtgtggaatggctgaattttgatcctagcccagatgattctactggaaattacattgctgtaggaaacatgacccctgttattgaagtgtgggaccttgatatagtggactctttagagccagtcttcacactcggaagt

SEQ ID NO: 55015 - DNA, 715 bp, Homo Sapiens
gggggaaggagcagcaccaaatccaagatggcggccagcaggaggctgatgaaggagcttggagaaatccgcaaatgtgggatgaaaaacttccgtaacatccaggttgatgaagctaatttattgacttggcaagggcttattgttcctgacaaccctccatatgataagggagccttcagaatcgaaatcaactttccagcagagtacccattcaaaccaccgaagatcacatttaaaacaaagatctatcacccaaacatcgacgaaaaggggcaggtctgtctgccagtaattagtgccgaaaactggaagccagcaaccaaaaccgaccaagtaatccagtccctcatagcactggtgaatgacccccagcctgagcacccgcttcgggctgacctagctgaagaatactctaaggaccgtaaaaaattctgtaagaatgctgaagagtttacaaagaaatatggggaaaagcgacctgtggactaaaatctgccacgatgtggttccagcaagtgtgagcagagaccccgtgcagtgcattcagacaccccgcaaagcaggactctgtggaaattgacacgtgccaccgcctgggcgttcgcttgtggcagttactaactttctacagttttcttaatcaaaagtggtctaggtaacctgaaaaaaaaaaaaaaaaaaaaaaagtttggggcggggccaaaaattttaa

SEQ ID NO: 55016 - DNA, 597 bp, Homo Sapiens
ggaggacttccacatcggggagaagaaagtggaagctgagtttgatgaacaggctgatgaaagcaattatgatgagcaggtggatttctatggctcttccatggaagagttttccggagagaggtcagatgggaatctaattgggcacagacaggaggctgccctcgcagcaggttacagtgagaatattgaaatggtaacagggattaaagaagaagcttcccacttaggattctcagccaccgacaagctgtatccttgtcagtgtgggaaaagtttcactcacaagagtcagagagatcggcacatgagcatgcacctcggtcttcggccttacggctgtggggtctgcggtaagaaattcaaaatgaagcaccatctcgtgggccacatgaaaattcacacaggcataaagccgtatgagtgtaatatctgtgcaaagaggtttatgtggagggacagtttccaccggcatgtgacttcttgtactaagtcctacgaagctgcaaaggctgagcagaatacaactgaggctaactaaaaataggatctggcccttgagtggcatgcacaaaaataaactatggtaattaatgc

SEQ ID NO: 55017 - DNA, 873 bp, Homo Sapiens
atgcagcctaaggctgtatgatgaccacacgttcctaagctggagtgcttatcccttctttttctttttttctttggtttaatttaaagccacaaccacatacaacacaaagagaaaaagaaatgcaaaaatctctgcgtgcagggacaaagaggcctttaaccatggtgcttgttaatgctttctgaagctttaccagctgaaagttgggactctggagagcggaggagagagaggcagaagaaccctggcctgagaaggtttggtccagcctggtttagcctggatgttgctgtgcacggtggacccagacacatcgcactgtggattatttcattttgtaacaaatgaacgatatgtagcagaaaggcacgtccactcacaagggacgctttgggagaatgtcagttcatgtatgttcagaagaaattctgtcatagaaagtgccagaaagtgtttaacttgtcaaaaaacaaaaacccagcaacagaaaaatggagtttggaaaacaggacttaaaatgacattcagtatataaaatatgtacataatattggatgactaactatcaaatagatggatttgtatcaataccaaatagcttctgttttgttttgctgaaggctaaattcacagcgctatgcaattcttaattttcattaagttgttatttcagttttaaatgtaccttcagaataagcttccccaccccagtttttgttgcttgaaaatattgttgtcccggatttttgttaatattcatttttgttatccttttttaaaagtaaatgtacaggatgccagtaaaaaaaaaaaaatggcttcaaaattaaaactatgaaatattaaaaaaaaaaaaaaaaaaaggcgggc

SEQ ID NO: 55018 - DNA, 674 bp, Homo Sapiens
gctcgagagatccagatgttcgattgggcctcaatcagcattacccaagctttaaaccacctccatttcagtaccatcaccgtaaccccatggggattggtgtgacagccacaaatttcactacacacaatattccacagactttcactaccgccattcgctgcacaaagtgtggaaaaggtgtcgacaatatgccggagttgcacaaacatatcctggcttgtgcttctgcaagtgacaagaagaggtacacgcctaagaaaaacccagtaccattaaaacaaactgtgcaacccaaaaatggcgtggtggttttagataactctgggaaaaatgccttccgacgaatgggacagcccaaaaggcttaactttagtgttgagctcagcaaaatgtcgtcgaataagctcaaattaaatgcattgaagaaaaaaaatcagctagtacagaaagcaattcttcagaaaaacaaatctgcaaagcagaaggccgacttgaaaaatgcttgtgagtcatcctctcacatctgcccttactgtaatcgagagttcacttacattggaagcctgaataaacacgccgccttcagctgtcccaaaaaacccctttctcctcccaaaaaaaaagtttctcattcatctaagaaaggtggacactcatcacctgcaagtagt

SEQ ID NO: 55019 - DNA, 636 bp, Homo Sapiens
tcttagagggttcagtctaggacccggctctcctggccctgtgttgagggtagctggtccctctgtccctgtgtctgctagcactagactttgttgctgcagattgatccagtgggtacataggctaattaatgtgagtctttttccttgtttaaaggagtccctcttgctgaaagtagatgattactattgctgtagtgttaggaaagtattaagtttgtgctgaaaatccattgccatttggtacaaatgacatttgttctttctgtgaaagagatgccctcgagtgtgtttgtacacaaacccttaggatggtgagttgaagcatcaccctcgcgctatcttcagtgacgggtgacggctcagggagatggcaggcagattgggctctaagtcattattctctcagttactccattggtgaaatggccctttccctctttgcagttcagtctaagtctcgtatttgctttgctgtctgtgtgctgaagctcgtcccgtgtgagttgctgtctgccccttgtcaggctgtgaggtgctcgtgtagacctggagcatgcaggctgcctccgtttttgggtactgtgttgtgttttgctctgtctaaaaacatctgcatagttttcaactggaaaa

SEQ ID NO: 55020 - DNA, 954 bp, Homo Sapiens
cccttcctccccagcccagcctgggaacacagatgccccgcgggtaggaggcctcgagggaggagccgggctgatgcggggctgctcagggcaggccccagggcgagcttgccatcgtggccaggcagcctccacctgtgcttcagtggcccctgcccccctgaagcatgtggggtttgtccgctaggaggaggcaaggcccccgaagagaggagagacctgggagtgggagctcaggtcagggaggaggcaggggagtggggtctcccagacccaacggtgagctcagagcaagcttcacgcaggacgctccgaaacactgtgtggagggggctgtgttgtgggcaccttggggcctgattctccttcctccgaacgggctccttgatggcctggccacaggggcagctccccattggctgttaggaccagagtgtgaagaagaagtgaaatataaatatgtatacatatataaatatatttttaattacatgtcgtgtcacggtggctccagacatactgtttgcctagtttattccactgcttgaaagcgccttctagccaatctgaaacaacacactttaagctgtttttctaaatgcaggttgctgctcctttttcagatatggaaggaaaaagttaagactattttttttttaaaagagacaacagtcaagcctaaaatttgagaccccgaggcagcttcccgagggagactgctcaaacaggaactgcaggacagaaaggggatgcccccacagaccctggcccccctccccaaggtccttccccctcctctgtgggcatgaaggaaaggcccccgtccccgagtttgaacctcctgtaaatggaatgttgaatggaaaaaggccaaaaacctggaatatttggcaattttcttaaagggcttgggactttggctcttttcccccctccgacccccggggggatttc

SEQ ID NO: 55021 - DNA, 596 bp, Homo Sapiens
ctgggaacagtacctctgcccctgattcccaatgtgccatagttttattaactccattaaagaagcctgtatgtgttttggttagttacagttattttacaataatggtgggtaatggccccacctctgttatgagataatgttctaatcaatgtctctgcctttgtatcttttctgagggctttgtctgttctcttcattctaatgaaaggtgtattctagtgctgggtgcatatcatccaggataatattctgcccaactccatcctctgttactagatcccttaccagtcacatttgtggactggtggccagtcgtataccatccctggaaggattctgggacaatattccagggattcattgacttcttggctccttttctccatttcctttgggggaagggggaattgaccatgcttaagtgcatcctatcaaggggcagctccgtccccatggccattggatcatgagacactctgaagtcagaaggctggggcagatcacttcaagcaagcccccatgatggttctcagtcctgcttctctgtgggtacgtgcccctctgtttaaaaataaactgaatatggatgttta

SEQ ID NO: 55022 - DNA, 1029 bp, Homo Sapiens
tgtggcaagcggctttctgggtctcagccctctctgcggttgagggcccagaggacagagagatggacatgcgtcccctccctccccccgccaagtgctcacacacaacctcacgcgcacacacacacacgcagatggaggcgcctcamtgggaggtgccccgccagccctgggcagtgtcaggcaggactcactcaccgctgagcagatgagagaagttttagtcttggcgggtggaaatgagacgaagccacagttatcacactccagactcctgcccttttattttctccagccccttcttccttcagcaaaatctaggactcccgagtggcttccagggggccgtcagttctcagccgcgcctgtgtccggtgcccgaggggcgggcggcggtgtctgtatgtatgtgtacatatgcacatagaccttagagtgtatagttaacaaacgcccatctgctcacccatgcccacccagcgccgccgccgctggctctcggggcacctggcaggaggcgggtgtgtgaatagcatatatttttacatgtactatatctaggtgtgtgtacaagtgtgtgttaaaatatataccttgtgtgttagcagccctttttttttttggtctccacccccctccccccgccccgcactcctaagggcccatctgcccagcctctgagtgttctgttctattttttttttttaaccccaattatccttctctctctcctgcccccgcatcccactcccagggtgtcacgagccctgagctgcaatggcccgggcctgcaggsggggtaggggagggcaggggctcagcccgaagccagcwcagtacctgaggggctgctctatgctgtgtatgcgcctctytggcatccgagacaacctcttggctggcgcttgcbgcaggggggacccccccccgtccccaggtgaacaarggtytkcccsggggccattycarcttggcgcgtttkttacttkggcaatwattgacyytkttttcttaattcctctytktaaa

SEQ ID NO: 55023 - DNA, 627 bp, Homo Sapiens
agaagatgctcagattctgaaagtcattgaagcttactgcaccagcgccaaaacaaggcaaacactcaattcaagttcacgcaaagaatctgctccacaagttttgcttccagaagaagagaaaattatagtggaagaaactaaaagtaatggtcagacagtgatagaagaaaagagtcttgtggataccgtatatgcattaaaggatgaagttcaagaattaagacaggacaacaaaaagatgaagaaatctctagaggaagaacagagagcccgcaaagacctggagaagctggtgaggaaagtcctgaagaacatgaatgatcctgcctgggatgagaccaatctataagggacgtcctcagttctttctgttgaagaccagttctgaggtgaagctgggcacccctgacccaagtcggggtgcactcaggaccacagggcagggctgggtggggcgccaccttgctctctgtatatagaaaagctggagcttattctgcgaatggagacgatcaaaccatgactgatgaatccagacaggagggattgactctgaggacctgagctacatcaatccactctgtgaacatctcagttacctcattctgcaataagttcagtgac

SEQ ID NO: 55024 - DNA, 571 bp, Homo Sapiens
catgctaaaaaagtgtcctgtcctacttcaagaaatggttaatgtaatctgccaactaatagtaatggcccggaaccgtgaagaaagggagtttcgtgctccaactttggcatccctagaaaactgcatgaagctttctcagatggccgttcagggacttcagcaatttaagtctccccttctgcagctccctcatattgaagaggacaatcttagacgggtttctaatcataagaagtataaaattaaaactatccaggatttggtgagtttaaaagaatcagatcgtcacactctactgcacttccttgaagatgaaaaatatgaagaggttatggctgtccttgggagttttccatatgtgaccatggatataaaatcacaggtgttagatgatgaagatagcaacaacatcacagtaggatccttagttacagtgttggttaagttgacaaggcaaacaatggctgaagtatttgaaaaggagcagtccatctgtgctgcagaggaacagccagcagaagatgggcagggtgaaactaacaagaacaggacaaaaggaggatggcaa

SEQ ID NO: 55025 - DNA, 878 bp, Homo Sapiens
gactgcagttttgagaatcagttttgaccttgatgattttttgtttccactgtggaaataaatgtttgtaaataagtgtaataaaaatccctttgcattctttctggaccttaaatggtagaggaaaaggctcgtgagccatttgtttcttttgctggttatagttgctaattctaaagctgcttcagactgcttcatgaggaggttaatctacaattaaacaatatttcctcttggccgtccattattttctgaagcagatggttcatcatttcctgggctgttaaacaaagcgaggttaaggttagactcttgggaatcagctagttttcaatcttattagggtgcagaaggaaaactaataagaaaacctcctaatatcattttgtgactgtaaacaattatttattagcaaacaattgatcccagaagggcaaattgtttgagtcagtaatgagctgagaaaagacagagcatatctgtgtatttggaaaaataattgtaacgtaattgcagtgcatttagacaggcatctatttggacctgtttctatctctaaatgaatttttggaaacattaatgaggtttacatatttctctgacatttatatagttcttatgtccatttcagttgaccagccgctggtgattaaaggtaaaaagaaaaaaattatagtgagaatgagattcatttcaatgtaatgcactaaagcagaacacgaacttagcttggcctattctaggtagttccaaatagtatttttgttgtcaaactttaaaatttatattaatttgcaaatgaatgtctctgaataagacttggacctttccctgaaattattttatccgggaaggaattttttttaattcttttgaaa

SEQ ID NO: 55026 - DNA, 597 bp, Homo Sapiens
atggaccgcggcacgctccctctggctgttgccctgctgctggccagctgcagcctcagccccacaagtcttgcagaaacagtccattgtgaccttcagcctgtgggccccgagagggacgaggtgacatataccactagccaggtctcgaagggctgcgtggctcaggcccccaatgccatccttgaagtccatgtcctcttcctggagttcccaacgggcccgtcacagctggagctgactctccaggcatccaagcaaaatggcacctggccccgagaggtgcttctggtcctcagtgtaaacagcagtgtcttcctgcatctccaggccctgggaatcccactgcacttggcctacaattccagcctggtcaccttccaagagcccccgggggtcaacaccacagagctgccatccttccccaagacccagatccttgagtgggcagctgagaggggccccatcacctctgctgctgagctgaatgacccccagagcatcctcctccgactgggccaagcccaggggtcactgtccttctgcatgctggaagccagccaggacatgggccgcacgctcgagtggcggccgcgt

SEQ ID NO: 55027 - DNA, 699 bp, Homo Sapiens
agaagggaaaaggaaagaagaaaagatttttgcagaatttagtcaaaaatcagtttgtggattccagtagtatttatattgagagaaacaaattttagtccttctaactgtgctaaaacttggatatttgtgaaaactccttaccaccatacaagcatcagaagagctctcttgttgttagcacttattgtttgcaagaacagaatacatccttttatccttttatgaaaaatgacaagtgaaggcaaaaggggaaggttatttgatctggaagatgagtgttctgatgtggtggcttttgcaaaaatctttattggtgttgaaaactggaaaaaataactcatccagaattcatattgtcttgacaagaactatggttctctgtttttagatattgtggaaaatgtttttgggcatttttctctgattttatttcttctcccccacccctttttctaaaaaacaaacaaaaaaaaaaacacacaaaacaaaaacagaacaaaagaagagagaaggaaattttatcaattaaaaatgctgtgtgataaaatcccagcccagattgctcagctgtttgtacctgacttgccgcctgcataggagccagttctgttccttctgactagcccctcttcctccaggggagaacttccaaatgttaatttttttttttttgaaaatataaataattactatttt

SEQ ID NO: 55028 - DNA, 621 bp, Homo Sapiens
  misc_feature (621)..(621): n is a, c, g, or t
ggaagggttatattttaccctcaaatgcgtttttgtactttcagagcaggtttaaacgtttttttttttttttttttttcctatatccgaactgttggcctcatggaaatccctttcccgatctttgtagcaccatctactggcagaatggcagagtagctgcgaaacaatttgtttaaaaacttgcttaagacaattgcatcagatttggaagttttgccatcaaaattctttgcagaattggaagttaacacatttgcttgtaactgagatgggcttcacaggaatgtagttgccagttcatatcacaatagccctttctatatgaggtttgaaaatgtaaactgctatgcatagcttgggcaatagccctaaattgctatgacaactaatgaaccagctacgtatactggtattttaggtgcaagttgtaaagcaaaatatctgtgtattctgcttggttaacaaatgtatatttgtagccctttcctgcaatagcattcaagttgttgtttataagagaagaacaaaagtgataataggtgaaaattgcctttctggatagaaatagagaatagcaacgtttatggatatcccaaataaagaattcaattcctaaan

SEQ ID NO: 55029 - DNA, 567 bp, Homo Sapiens
ggagctccggagcaagctccacgagatggagggggccgtcaagtccaagttcaaatccaccatcgcggcgctggaggccaagattgcacagctagaggagcaggtcgagcaggaggccagagagaaacaggcggccaccaagtcgctgaagcagaaagacaagaagctgaaggaaatcttgctgcaggtggaggacgagcgcaagatggccgagcagtacaaggagcaggcagagaaaggcaatgccagggtcaagcagctcaagaggcagctggaggaggcagaggaggagtcccagcgcatcaacgccaaccgcaggaagctgcagcgggagctggatgaggccacggagagcaacgaggccatgggccgcgaggtgaaacgcactcaagagcaagctcagagggccccccccacaggaaacttcgcagtgatgcaccaggcgaggaaacgagacctcttttcgttccttctagaaggtctggaggacgtagagttattgaaaatgcagattggttctgaggaggaaacggacactcgagacgcagacttcaaatggaaccaagg

SEQ ID NO: 55030 - DNA, 881 bp, Homo Sapiens
  misc_feature (875)..(875): n is a, c, g, or t
gcctttgtagacctgcctgatttaatgcagcatcttgacaacaactttaaatactggaaaggactggacgaaatgaagctgcggaacctccgaccacctcctgaatagtgggagacaccacccagagccctgaagctttgttccttcggtcatttggaattcctgagggcagccagagctccttggtcctttcagtactaggcagaacagcccccgatctgcatagcctgtgaaagcccacggggacatcagtaaccttctgcagccaccatccaatgccattactgtcaagtgagacttggccactgtagcctgggcctgctgcaggagctcttcagaaaggcacatgaggaccacggtttgcctcagtttctggtaaaacacaaggtctggagtgcccctgcaaagggtattgatggacttcctgccagtgacagagcatgtctattgcaaacaattctctcagttacgttcagcacttaagaacggctaatggcaataggatctttagcaactttttcacatcatagaaggtgcaatcgctcacttgggaacactactgagagtgacttctcttttaaaattgagtagcagatgaaaaattaaaatttgaacttgattattaatatcaattaaaatgttttatttattttattaaaagctcaatattttctatgaattcaaaaatacttcagagccaaagccaacttcaaataccgtgaccaaatttacatgattcatattcattatgcattacttggtatacagacttattttcataatgcaaattaataaaatgacacttttactgcactatagaaatattcatgtatgttaaacttttctgattgaggctaactggaaaaagctggggntcgtat

SEQ ID NO: 55031 - DNA, 741 bp, Homo Sapiens
tgttcttttcatagtcgtattttgccaccgtaaacataaaaaaaaaaaaaaagatttccaaaatgccgttttcagaacctgggttttaatagcagtattgaatttgtaagcttagtagttgcagaaattgaacactaggtggcactcagttatcttaacaggggaagtactgatacaattgttgacttttcttttactatgtgtaagaaataccccaaacatgaaaagattgttttgatcatatgcatgtatgtagaatatttttgcagagcagaaagattatgttagaagtgtgatttttattttcagaagtcatatacatgtaagctacaattttgagtgctttataaacacttaagatatatatataaattttaatttcatagcaacttgtaaaaaataaaatacttgttgaaaagcctttttcaacatatccctaagctaagggaagaggaaggaataacaactcagtgaaaagatggtctccagtttctgaatgaaaaagctacagctgagaaataaaataaaatgtcatgctgcagaatatgttatacccttattttgtgttaaggatatattttattatgtgaatggttttgtttttgttttttgtttttgttttttgcttgtattgggaattagctttactggtaacttccttatttagtttttagtggtcaactctaataaaatgaaactagggctgagctagttagccctcactagccaaactgaaactct

SEQ ID NO: 55032 - DNA, 791 bp, Homo Sapiens
ggcaagaagaattttaaagcttaaaataggtggtaaatttgaagtatgagtgtgttcacgagaaacataggcttttcaaaaaaatttttattcaaggcaaagcaaggaacatcttgagatatgtctcaagaatataaagatgtattattttaagccaaggagctgaaatatatctcagtttataaattcaggtatattctttttgtctccatggcaaccataacttttgaaccaaaaattgtttttacatctttatgctgaaaatgtgtttagattaggaatatggtcgggctgaatttgctgttgctccctaaccaaatccacctcttgttttccttgtgagtccatggctaaatcaaagctgcccctgagaagagacttaatccaagcctgattgtactagtggcatcacttagaagtaggctttccctcttcctagtagatctcaatgttttataattccttaaaacagctgaaaattgggacaacatactttacgcaatgaacagtagttaaataggaaataaactagttccatgtaagtatacacctagagttttaattacctttataatgtttcttaaaagtgaaacttagatacaattgtgattggatacttagatactaagtgaaacttagtgtaacaattttgatctgttaaatgggattttacatgtacattttgaatgccaggaatttctaaaataaatccccctggtttaggaaaatttttaaaagttcaaagccttgtttttccttccaaccactaccctttctacattgtggttgaa

SEQ ID NO: 55033 - DNA, 897 bp, Homo Sapiens
ccaagataactgttttctctttgtagaagttttgtttttgaaatgtgtatttctaattatataaaatattaagaatcstttaaaaaaatctgtgaaattaacatgcttgtgtatagctttctaatatatataatattatggtaatagcagaagttttgttatcttaatagcsgggggggggtatatttgtgcagttgcacatttgagtaactattttctttctgttttcttttactctgcttacattttataagtttaaggtcagctgtcaaaaggataacctgtggggttagaacatatcacattgcaacaccctaaattgtttttaatacattagcaatctattgggtcaactgacatccattgtatatactagtttctttcatgctatttttattttgttttttgcatttttatcaaatgcagggcccctttctgatctcaccatttcaccatgcatcttggaattcagtaagtgcatatcctaacttgcccatattctaaatcatctggttggttttcagcctagaatttgatacgctttttagaaatatgcccagaatagaaaagctatgttggggcacatgtcctgcaaatatggccctagaaacaagtgatatggaatttacttggtgaataagttataaattcccacagaagaaaaatgtgaaagactgggtgctagacaagaaggaagcaggtaaagggatagttgctttgtcatccgtttttaattattttaactgacccttgacaatcttgtcagcaatataggactgttgaacaatcccggtgtgtcaggacccccaaatgtcacttctgcataaagcatgtatgtcatctatwttttcttcaataaagagarttaatagccatttcaagaaatcccataaaaaa

SEQ ID NO: 55034 - DNA, 905 bp, Homo Sapiens
  misc_feature (688)..(688): n is a, c, g, or t
  misc_feature (704)..(704): n is a, c, g, or t
  misc_feature (761)..(761): n is a, c, g, or t
  misc_feature (820)..(820): n is a, c, g, or t
gcaagctgagtctcacaggctcactccttcgttggttccctgtgggaatggtaggccaggcccagtaagccatgccccaacacgtcctctcctccggaggaagggccagctgccagctgagtcagcagctagtccatagcacagccttataactgtaaagccaggcattgcccatgagcagagctggaaccagagcttcagtcagtaagagggaggattaccttcaggagaaggcaaggaagaaaactggctgctatctttatagttccactgccctaaccaagtgtccacattctaaatgtgtagtgtccatcccttatgtaatagtggtttcccgcccaaagtgagactttccttttaattggagaagggtatagaggtagtccaggtgggaacgccagaagtgctgattgcccagccattgggaccacctgttcttgccccactaccctctagtgggaggccaaagtaaaggctggctggtgggtgtctgtggattgaggatgtggcagggactggtcctcccacctccctctggccaaagatgggctttgcccgctgtgtgcctgtcaccacccaccagcagtcatgccctgggcttcccaaatggagaggtagcaggcaacgtttttaaaaagaaagaaaacaggaaactgtattgtgtcgggggaggcgggagggagatgangaaacggtttggattntgtgtgtgggagggtatttttttgggggtagttgtctgtaaacttcctaagtgcttnttttttcctttttcttttttaaagtaaagttgcaggctttggcttgggaaaacccccanggggggatggggggggcagaaaacctgaaggcttgctgcccccttttattctgccctttccacgggaactggtcccccttttccc

SEQ ID NO: 55035 - DNA, 679 bp, Homo Sapiens
ggcagcgccagccccgaggaggagcaggagaaacccatcctcgacaggccaaccaggatctcccaacccgaagacagcaggcagcccaataatgtgatcagacagcctttgggtcctgatgggtctcaaggcttcaaacagcgcagataaatgcaggcaagaaaagatgccgccgttgctgccgtcaccgcctcctgggtcgtccgccacgggttgcactgccgtggcagacagctggacttgagcagagggaacgacctgacttacttgcactgtgatcccccttgctccgcccactgtgaccttgaaccccatgcactgtgacctccccccttctcccccttcccactgtgattggcacatcgacaagggctgtcccaagtcaatggaaagggaaagggtgggggttaggggaaggttggggggacccagcaaggactcagagagtcagacagtgccacttggccacttggggtaaagccagtgccagcaataacagtttatcatgctcattaatttgggatttcaaaacacaaatgaaaactcacacccacccacccccaagtgcatgtctccatcacttaaaaagtaagttccatttgaaaatatcctttctttttttttttcttcctatttttgtttggttatacaaatatctgatttgcaagaaaaaagtgca

SEQ ID NO: 55036 - DNA, 766 bp, Homo Sapiens
agtgctcacaagatgctggtgcgtgagaacggggtgcactctctgatcatagagccagtcacgtcacgtgatgccggcatctacacatgtatagctaccaaccgagcaggacagaactcattcagcctggagcttgtggttgctgctaaagaagcacacaaaccccctgtgtttattgagaagctccaaaacacaggagttgctgatgggtacccagtgcggctggaatgtcgtgtattgggagtgccaccacctcagatattttggaagaaagaaaatgaatcactcactcacagcactgaccgagtgagcatgcaccaggacaaccacggctacatctgcctgctcattcagggagccacaaaagaagatgctgggtggtatactgtgtcagccaagaatgaagcagggattgtgtcctgtactgccaggctggacgtttacacccagtggcatcagcagtcacagagcaccaagccaaaaaaagtacggccctcagccagtcgctatgcagcactttcggaccagggactagacatcaaagcagcgttccaacctgaggccaacccatctcacctgacactgaatactgccttggtagaaagtgaggacctgtaatccagcattcttgttaaagctgaaacactgaaacagccattgccttgaccaacatattcctttgtcacattatgtaaaaggcagaaacatacctttgactataagaaattaaaaaaaaacaccaaaataatatttttcttacttgata

SEQ ID NO: 55037 - DNA, 624 bp, Homo Sapiens
tagcctgcaggtaggaccattgcagtgatgggcagatgcgtctttcacacggaatcaggcacagtggccttctgtgacatgtgtttataaaaaatggttaagtatataataaattgaacatctttgagattggagaattatgtgagatttccacattatgtttactgggttcaatactgtccttgcttgttttattgcaggcaagcaaggcaaatggcctaaaatgctgtggcttatattttgataagaaatcaaaaaaccattggttaaaagatgcaactcagaagtctggaagtattctgaaagcatccatttaccgtccagttgacaggtttgagtctcctgcttgtataggtgacttgtgcccatgggtacattaaaggaacatgctgcccagggcctgggcggacagctcagtgggcaggatgtgtgctgggtctcagccccatgtgcctgcttgctgggcagttagtatagggcaaagcctgcctgcggcgaccctggctgctaggccattctctaggaacagctgcgactcataaagaccaagaagcataaataaactttcaaaaatttatttggctctttcgttaaaaactgtgcaaattaaaaaaaaaaaaaaag

SEQ ID NO: 55038 - DNA, 507 bp, Homo Sapiens
ggggtccttctccgagagccgggcgggcacgcgtcattgtgttacctgcggccggcccgcgagctaggctggttttttttttttctcccctccctcccccctttttccatgcagctgatctaaaagggaataaaaggctgcgcataatcataataataaaagaaggggagcgcgagagaaggaaagaaagccgggaggtggaagaggagggggagcgtctcaaagaagcgatcagaataataaaaggaggccgggctctttgccttctggaacgggccgctcttgaaagggcttttgaaaagtggtgttgttttccagtcgtgcatgctccaatcggcggagtatattagagccgggacgcggcggccgcaggggcagcggcgacggcagcaccggcggcagcaccagcgcgaacagcagcggcggcgtcccgagtgcccgcggcgcgcggcgcagcgatgcgttccccacggacgcgcggccggtccgggcgccccctaagcctcc

SEQ ID NO: 55039 - DNA, 797 bp, Homo Sapiens
ggaaaataaaaatgtccttcccatcttgtcctcttcagtaccacttgggttggtttgtctttgcttcctacaccacgtccttgagtggagtcccctgctgaagcccctagcacacactgcatgccttaacaagtgtgtgcaagcccctcagaactcaagacatccaaattttattgcgtctctacttatactggtttgcttttgatttattcctctattagttctataggagtgatctcaagtgagaaagcagagcaagaggccaaaagaccataaatagagtaaggtttctatagatgtgagavagatttgagagagcatttactctgtctccctgtggatgaaactgctgctgaaatggttccaatttttaggaatctgcttacccacttcattatttgacagcyttccttggtgacccaaaccttgtagcctaagccatttgtctttttctcagtggagggagtgtatggacctggccccatggctttgcatgtgagagacctggcagactaaagtctctagtgtttgtttgctcacatttgctgagtgacagccatgtgccagactgcataaagggtggtggcagaagtgaaaatgtttaagaatgaccaaaaacattagtaatgaaagttaatgtgttccaggcattcttctaagtggtttacatgcactgtctcatttaatctgagataaaggatacttaagcccaaactatatctaaacccaaatctcacttggctggaaacatcaatcttaaccatttattcagaaccattaaaccaatgattccaaga

SEQ ID NO: 55040 - DNA, 749 bp, Homo Sapiens
ggggaactaaaagattcatgtgtttcagcctagtgggagagagtgggggagaggaagagagagagagagcatgtatacccgtatgttatcatagagcacgattctccagtggatggatacctggaatggatcattaagatgaagagagtaattcacatttactctagaacctttaacaagcactgaaaggaagaagcctgagatttgatccttgacaatttctggaaagcactggtcagtcacactgtcctggacagagtccaagttacccactaaagcttgaggtggatgttggcttcactcctgcagcacaatgctggccctagaaagcgagcattttcattcttcccatggcagctgattctttggtgccagttttcatgttttctccataggccttgtgcagaaaggttttctcattgcatccatactgtgagaataaactgcagactgaaagaaacatgcctgcagggtcaggaactgggccactgttcccagaacgggttgtgcctcagaaatctatttctcttttagatgttgaaccctgagagaactaagatgatatttcagaagagttggctgccttctctggaaacaaggaaaagccaataattccgaggaacattgggggttaaataccaagaataacaaattggggtcttctttgacttcagctataagtgtattaaagacagaaatttaagcctctaaaaacagcaaaagagagatgattgtaatgatagaaatag

SEQ ID NO: 55041 - DNA, 624 bp, Homo Sapiens
atgtcctgctcccttctcatcctgaggacaggtgacccatcctgttctcctccttaggtccatgtgaaatctgaggtccttgctgtcaagttgtcacaagaaataaactacgcaaagagcctctactatgaacagcagcttatgttaagactcagcgaaaaccgagagcagctggagctggactcctgaagccccgctgctgagatgggcgctcccgacacagcgcagacccaccaggaggaaagaggcccagctctcagctgacgatggaggcagaaccggagtcgggtttggggaagttgtcaaggaatgagggaaagtaaatcctcatgaggaaaagtacaaatggaaatcgtattaatttgtgaggcagggagttattttagattatgggaaataatttttaaaggtattggttaaataacgtttaaatacatgtactgagatgaatctaatttttagattgccctgtattttgtcaacatgtatatatgtacaacagtgtgtttgtaaatatataggaacgtttctgaacagggtctgtgctatgtgtaaaggtttgttaactggtaaggaatataaagttatattggatcttctattgcactaattctagatgtctaa

SEQ ID NO: 55042 - DNA, 758 bp, Homo Sapiens
  misc_feature (727)..(727): n is a, c, g, or t
  misc_feature (746)..(746): n is a, c, g, or t
  misc_feature (749)..(749): n is a, c, g, or t
ccgcccttgggggcagtgccggccttcttgcgctgtctagtgctctgagtgggcagtctcacttggcaataaaagatgacaagaagcaccacgatgcagcaccacagagacagagagccgggcacaagtaattccctcctggtcccagacagtctaagaggcacagataaacgcagaaatggacctgaattttccaatgacatcaagaaaaggaaggtggatgataaggactccagccactatgacagtgatggtgacaaaagcgatgacaacttagttgtggatgtgtctaatgaggacccttcttctccgcgagcaagccctgcccactcgccccgggaaaatggaatcgacaaaaatcgcctgctaaagaaggatgcttctagcagtccagcttccacggcctcctcggcaagttccacttctttgaaatccaaagaaatgagcttgcatgaaaaagccagcacgcctgttctgaaatccagcacaccaacgcctcggagcgacatgccaacgccgggcaccagcgccactccaggcctccgtccaggtctcggcaagcctccagccatagaccccctcgttaaccaagcggcagctggcttgaggacacccctggcagtgcccggcccatatcctgctccttttgggatggtcccccacgctggcatgaacggcgagctgaccagcccaggcgctgcctacgccagtttacacaacatgtcgncccagatgagcgccgcagncgncgcggccgc

SEQ ID NO: 55043 - DNA, 745 bp, Homo Sapiens
cgcctacagtgcgtcgaaggttatctctcctaggctagtgtcaaacaggccctaaacaagtctgctgctgccctctcatcagacctccgcaccctcaccccaccatcacttaaactactttaatccagttccttcaaagtgatacccccacaggtaagccctcagcatcctgaatacatcatccgcagcctgggtaaccttctccctcgtacagcacaggaacctgacacatagtaggcacacagtaaacgtttgtgaatgaatgggagtcatccagtcctgactcttctgtctcttgaggtcccttgaatcttccgcttcctccccaccgatttcagcgtgtccacatcacagctccctccagaagctgcaagagcttcttagcagttcctggtctgaaccctctcccagtcctcatcttccaccctaaaactagagtgatcttcctaaaacttcacttaacccctcagctatgaaaaggcttccaggagtttccatgacataacaaaacaacaatacaagcgcctcaccttagcattcaaggcttgtctagtctgcccaacaattacttatcctcacctagctcctaccagtcttcttagagactctccagtcagaacatgtgtcgcatagttccactccacacctctctgctgacagcacattcatgcagacaagtctttccactgtctcagacttccgcaggcttacctgcgcaggcaagtctaaccaaggaaccaagaaa

SEQ ID NO: 55044 - DNA, 615 bp, Homo Sapiens
agtatcttcctcatgtcttcttagctaagaggaggaaaaaaaggctgaaaaaatagggaggaaattccttcatcagaacgacttcaagtggataacaatatttataagaaatgaatggaaggaaatatgatcctcctgagactaactttgtatgttaaggtttgaactaagtgaatgtatctgcagaggaagtattacaaagatatgtcattagatccaagtgctgattaaatttttatagtttatcagaaaagccttatattttagtttgttccacattttgaaagcaaaaaatatatatttgatatacccttcaattgccaaatttgatatgttgcactgaagacagaccctgtcatatatttaatggcttcaagcaggtacttctctgtgcattatagaatagattttaataatcttatagcattgtatattattattgctgttgtcactgttattattattgtggatactggcccttggtgtgttgcatagctccctatgtattctctgtttccatctttaagttcccagaccaatatacattaagagttttgcatggtctaaattgtgtttattccaaccacgtggaaagctcctggaaagaaattttac

SEQ ID NO: 55045 - DNA, 824 bp, Homo Sapiens
cgtaaaaccgacactaaaacgtccctgcctacaaatcatccggccaaattatgagttcattgtattatgcgaatgctttattttctaaatatccagcctcaagttcggttttcgctaccggagccttcccagaacaaacttcttgtgcgtttgcttccaacccccagcgcccgggctatggagcgggttcgggcgcttccttcgccgcctcgatgcagggcttgtaccccggcggggggggcatggcgggccagagcgcggccggcgtctacgcggccggctatgggctcgagccgagttccttcaacatgcactgcgcgccctttgagcagaacctctccggggtgtgtcccggcgactccgccaaggcggcgggcgccaaggagcagagggactcggacttggcggccgagagtaacttccggatctacccctggatgcgaagctcaggaactgaccgcaaacgaggccgccagacctacacccgctaccagaccctggagctggagaaagaatttcactacaatcgctacctgacgcggcggcggcgcatcgagatcgcgcacacgctctgcctcacggaaagacagatcaagatttggtttcagaaccggcgcatgaagtggaaaaaggagaacaagaccgcgggcccggggaccaccggccaagacagggctgaagcagaggaggaagaagaagagtgagggatggagaaagggcagaggaagagacatgagaaagggagaggaagagaagcccagctctgggaactgaaatcaggaaactcaaatcgaataggggaaagtaaaaaaaaaaaaaaaaaa

SEQ ID NO: 55046 - DNA, 578 bp, Homo Sapiens
ggcaaaataattctatgacatagggcccaagttcatggtagtaagtgtactctttgattaatcacacgctaatatagattactgcctctaactttgtaagtgtggcaatgacttcttaattaaagaaagatgcaggagttatgtctaagcgttcagtttttcaaatctgtgttattggaaatgtcttcaagtcattttgcattgtatttttgatatgagaggcagcttattgcgatgtgtatggccatgtttcattctcaaatttaattctataaatacaaatcctaaatacatggctacagcaactgcactggaacatttttgcttggttttagggattgagaacttgccttgcaggtttccttcctcaaaaggagcagggcagtcctttccctgttgagtcaattagaatttttacatagaggtgagactgtgaattattttggttattttcagtgatgtagattagtgtgaatgaccagggtggaatgtttttgaaggaatataaagcaaaaactggttgacattcacaaactgttcttttgtgaacatattttggacccttaaatatgactaac

SEQ ID NO: 55047 - DNA, 611 bp, Homo Sapiens
tgagccggcccgatggatatgatcgtaaaagataaccactgcaattttttcagtataaaatttttcactgcaaaaaaatttcagtagaaaataaggatgcagggccagttacaatagtccttaagagagttaaattatagcacatgttttgacattgtaatatcttttactacttgaacatttaaatttctaaatgagaaaggtatatatattactgtaactgtagaagggaaaagggaaagtatttggttctaaaaaatgttagccttcctcgtaaaagtagcacaagcccacttatgaatcactgagaaaaagtgaaaaacttgagttggcaaagatgcagagcagcagtgcagatggcaatgaactctctgaattctcttttaccttatttagaagaatgcagagtaaagggaccttcttggttctgcaggaacttctcaagggatgaggagacagaacccctacttccaagtgctctatttgtattacccagatgactgaagcttaagagaaggcagggaagtatacaagcagagccagttctggtacaaacaaagaattcgacaggcaccatgggagggtcttcttcaccactcctttacttctat

SEQ ID NO: 55048 - DNA, 824 bp, Homo Sapiens
taaaaccaagggaatggggccctaaccaaaaagaagtctcaactcagaaaaataagtccccagtcaggtggttcttactttcttgtgggttgcacattttgtatctctctaacatcagcgtattcctgactttaagcaggtgtttatatgtaaaataaaacctgagtatcgaagggaaatgcattctttttatggagtattgaccctgatcctctatgatgtcatatagagcaactcagggctatacttgctagattttaaccaagcagtttgaaatattaatcatcatcctctcatcttctccagtctccattgccaaagtctttgtcaaaactccaaatttgttgataaaagattgtgtttgccattctcatttataatgcagtttctccttaagcctggagttttttgaatgagtgcatgagtaaatgagagaatgtgtgaacgaacatttatgaagtatctaacatgtgccaagcattgtgcctggcactttcaatcattagaatgttttatgtgattccacagcattttctgtataagagtagctcacaacattttaaatgtttccaatatgaatcgtgttacaaaattcttaattttatatttcatataaattaaagaggaaaaagaaaaggtttataatatattttaaaacaatgtgttactatataatacaactataattgtagttaataactaaaacctctttgaaatgtcaaagaaatactttgatttctgatggcacctttgactaaaatatttactttagaaataaaaacgttcttaattttgcctatatccactttaattggcataaatta

SEQ ID NO: 55049 - DNA, 429 bp, Homo Sapiens
gcggccgccacttttttacatattaaacatgatcctgattatctgtattctgaactttcttaattgagaagaggcaagaaatcactgcagaatgaaggaacatcccttgaggtgacccagccaacctgtggccagaaggagggttgtaccccttgaaaagacactgaaagcattttggtgtgtgaagtaagggtgggcagaggaggtagaaaatcaattcaattgtcgcatcattcatggttctttaatattgatgctcagtgcattggccttagaatatcccagcctctcttctggtttgctgagtgctgtgtaagtaagcatggtggaattgtttggggacatatatagtgatccttggtcactggtgtttcaaacattctggaaagtcacatcgatcaagaatattttttatttttaagaaagcat

SEQ ID NO: 55050 - DNA, 635 bp, Homo Sapiens
ggaaaagcggttcatcggctgtttgggaaatggcatgaaagcatctactgtggcggcggctcctcttctgcctgtgtatggagagcaaatcctatgccgaaaggctacgagcaatactatagcttcacacagtttgcgctggaattaaatgaaatggatccatcatcaaagtctttattgccacctactgacactcgatttaggccagaccagaggtttctagaggaagggaacttagaagaagctgaaatacaaaagcagaggattgaacaactgcagagagaaaggcggcgggtcttagaagaaaatcatgtggagcaccagcctcggtttttcaggaaatccgacgatgactcttgggtgagcaacggcacctatttggaacttagaaaagatcttggtttttccaaactggaccatcctgtcttatggtgaaaaagtaaagaagaaagataacattagtgtatttctcctgtgcttgccttctgaagtggcacaaacctgtgtttatatatttaaaagatactctaggatgatcacttgtgcttagcttaacattgtaactctttaagtctatattttcctcagtgcgtttctttacaatttcaaatgttaccctgattgtttatatgaat

SEQ ID NO: 55051 - DNA, 442 bp, Homo Sapiens
gcacgagagatgactccagatgtgtttaaagactggacaattcacctatactgtgtaggaaattacctccttaattacctggtagaattgtcagcagacatgttcatccgatgatagtactgcagttttctattaataatttgcagacttttatctaacctgcactcatgtacagattattaaaagttttaaaatgtaactgatcagtattgatcaatcattgtcttgatttttttttacagcgtatatttctaatcatattttttaaagccaagagaactggttgaatgaatgtttattttcctgaaggtatttttaagataaagcttcctaatggcgtgtaaactttgcatatgtatgtagtttgatacatattgtcacatttgaaaatctttgtgggttgtaactggtttttatacaaaaatatcgaattagtggaaat

SEQ ID NO: 55052 - DNA, 782 bp, Homo Sapiens
accctctacagccttcctcaggcccctgtctctggtccccagcctcagtgcctcttggcccagggccaggcagtcgtggttgcagaaggagcaattaggctgcctgcctgtgggctgggagacagggacaatggggaaaagttaaggagcaaaatgggggttggaagcaaaaaatagggccccacctatttaggacgagattgaagactgacccttgaggcacacttgcactggagatgggtttatttcacgctctgtgcttgtgtgctagcggagggagagctcagggtggcttaatccagaggccctgtcatggcccgcccccagccatgggaaagcaaacttcatcctaaggtgtgcagcccaggccctgcccctttacagtctaggccgcctgccatggggtgcagcctctccaggggctgcgtcagacttgcacgctgcccacatccagattcctgcaaagacgaattgggtgcacagcaccccaaccacatacacgaggaagaagatgcggtcagcagtctcaggccagcttctctgtgacccctttactcctctggagggctctgtggggagagatacagggaaaggagctgttcttcaaggtcccctcaacatgagcggaagagcgaaccccaggggtcatcagcctgtatcgcttcctttcttagattctcagctgatgaaaatttgggtctggcccatttcaggccatcttcagttgaagaaacaccctcttaggctgtgcaaggcatgggttatcaggggattgaggtcac

SEQ ID NO: 55053 - DNA, 636 bp, Homo Sapiens
ggggcagcaaccccccgcacacgtcagccaacagcagtgcctctgcaggcaccaagagagcgatgatggacttgagcgccgtgttcttcagcctcagctggaaggggaaaagtcagggccttcccggcgggggggaaggaggtgggcatcgggggcatggggcctggcctctggccgtgcatcctcactcccacccgcctccagcagccctctgtcggcctcctcgcgacttgactcaccgtcacctggaagcagggcaccagctgctggggtgggacttgggtcttcagatcataaactacgtattccctcttgacactcacaatctcgttcaccacgtgggcctggaactctaactccatcgctgaggggtgggaatgagaactatgaaccaggaaggagagatcccagctgccaagtctgggggtagcagactggagcccaggggtgatggagacttttgatggcttttggcagggacagacttggacacaaaaccgatccatagaagggcttcccaaaccttgttttgcaacatcccaaattgtctccagttgaaggaaggcctttatcagattcatagatgagctttcattgtaaaaataaatgtactttgcaccacttcatgatggaggg

SEQ ID NO: 55054 - DNA, 927 bp, Homo Sapiens
  misc_feature (38)..(38): n is a, c, g, or t
  misc_feature (831)..(831): n is a, c, g, or t
  misc_feature (836)..(836): n is a, c, g, or t
ttttcttctcttttcactttttgtttctaccaggtagnagccatgttgaactggcctcttttcaggacttttatttccccctggatggttgttgggagggagggaaagtgttttctgaatggctattaatagtattagatcattacaacttatgtaactttcaaaggttgtacaattatacaaaaaaaaaaaaaaaggcaaactataggataacacagagccctttttgaaaataaattggcattggagtgttttaccctctagctgttttacttagaatgtaacatatgctgcctacccacctcaaaatgtctgtactgcaagagggccctgggcctctgctttccatattcacgtttggccagagttgtagtcccaaagaagagcatgggtggcagatggtagggaattgaactggcctgtgcaatgggcatggagcacaaggggtcacagcatgcctcctgccttaccgtggcagtacggagacagtccagaacatggtcttcttgccacggggtgttgttgtctctggtggtgctgcatgtctgtggctcacctttattcttgaaactgaggtttacctggatctggctactgaggctagagcccacagcagaatggggttgggcctgtggccccccaaactagggggtgtgggttcatcacagtgttgccttttgtctcctaaagatagggatctacttttgaagggaattgttcctcccaaataaatttgctttaccttggtcctttcttttgtgccagtattcaagtggtatagctctgagcagggtcacatttggccaaactgacactgtcttgctgcatctnctttngcaacatcagggtcagaattcagatagccctttctaggcactggacttctggcatgggggctgtgttgcacaagtattttcatgtacctgg

SEQ ID NO: 55055 - DNA, 619 bp, Homo Sapiens
ggtagagtgaacaggaaagggtcacgtggtcccatgttgcaacagccccaacatcacgcatgtcattcactgccttgccactccatctccctccgtgctccagccacccctgagctgaggctcccattgtctccatcagagcctgcatgtgtatgccgtcctcccctggtccggtgtttgtgttccccacccctcacagactgcctgagctcttctgtaagctggggtagggtgatggcagtgctccgggaactgggcctgcagccttcctcttctgggactgctgtgaggcagaggaatgatggagaatctagtgtagcagcctccaggcaggattcagcacaacactggggagtcacccttccctcgggcctctgcctaccaacaactgggcttatcactgggaaaacacaaaaaattacacaacccagcaacaacaaaagaactagtcctcttagaatttcttgcgctttgatttttttagggcttgtgccctgtttcacttatagggtctagaatgcttgtgttgagtaaaaaggagatgcccaatattcaaagctgctaaatgttctctttgccataaagactccgtgtaactgtgtgaacacttgggattttt

SEQ ID NO: 55056 - DNA, 647 bp, Homo Sapiens
gcggcgcttctggccgtgggctcggccagcgagtacgactacgtgagcttccagtcggacatcggcccgtaccagagcgggcgcttctacaccaagccacctcagtgcgtggacatccccgcggacctgcggctgtgccacaacgtgggctacaagaagatggtgctgcccaacctgctggagcacgagaccatggcggaggtgaagcagcaggccagcagctgggtgcccctgctcaacaagaactgccacgccggcacccaggtcttcctctgctcgctcttcgcgcccgtctgcctggaccggcccatctacccgtgtcgctggctctgcgaggccgtgcgcgactcgtgcgagccggtcatgcagttcttcggcttctactggcccgagatgcttaagtgtgacaagttccccgagggggacgtctgcatcgccatgacgccgcccaatgccaccgaagcctccaagccccaaggcacaacggtgtgtcctccctgtgacaacgagttgaaatctgaggccatcattgaacatctctgtgccagcgagtttgcactgaggatgaaaataaaagaagtgaaaaaagaaaatggcgacaagaagattgtccccaagaagaagaagcccctgaaagtggggcccat

SEQ ID NO: 55057 - DNA, 655 bp, Homo Sapiens
aagaagggggcgatagcatgcaggctgtgtctgcaccagaagaggctcccacagactctgctcccgagaagccaagtgatgctggggaggatggcgcgcctgaagacgcagccgaggtgggagcacgggcaggctcaggcgggaagaaggaggcatcgtccagtaagaccgtcccggacgggaagctggtgaaagcttcctttgctccaataagctttgcaatcaaggccaaagaaaatgatctgcttcccctggaaaaaaatcgtgttaagctagatgatgacagtgatgatgatgaagaaagcaaagaaggccaagaaagttctagtagtgctgcaaacactaacccagcagttgccccaccctgtgtagttgttgaggagaagaagcctcaacttacccaggaggagctagaagcaaagcaagcaaagcaaaagctggaagatcgcctcgcagctgctgcccgggaaaagctggcccaggcgtctaaggagtcaaaagagaaacagcttcaagcagaacgtaaaaggaaagcggcgttatttttacagaccctcaaaaatcctctgccggaagcagaagctgggaaaattgaggagagtcctttcagtgtcgaggaatcagcactacgccctgccctctactgactggaggc

SEQ ID NO: 55058 - DNA, 693 bp, Homo Sapiens
ggtggaacagagattatcagctgtctgaagaggaggcgcgaatagaggccctgtgtgatgaagagaggtatttagccttgcatacggacttgcttgaggaggaggcaaggcaagaggaagaatacaagcgattgagtgaagcactagcagaggatgggagctacaatgccgtggggttcacttacggtagcgactattacgacccgtcagagccgacggaggaggaggagccttccaaacagagagaaaaaaatgaggccgaaaatttagaggaaaatgaagagcccttcgttgcccccttaggattgagcgtcccgtctgacgtggagttgccaccaaccgctaaaatgcacgccatcatcgagcgcacggccagcttcgtgtgcaggcagggagcacagtttgagatcatgctgaaggccaagcaggcccggaactcccagtttgactttctgcgcttcgaccactacctcaacccctactataagttcatccagaaagccatgaaagagggacgctacactgtcctggcagaaaacaaaagtgacgagaaaaaaaaatcaggagtcagctctgacaatgaagatgatgatgatgaaagaagatgggaattaccttcatccctctctctttgcctccaagaagtgtaaccgcttgaagagctgatgaagcccttgaaggtagtggacccag

SEQ ID NO: 55059 - DNA, 610 bp, Homo Sapiens
ctgtgtctgtctgtgtctgcatgtaagagtgagggagggaaggaaggaactacaagagagtcggagatgatgcagcacacacacaattccccagcccagtgatgcttgtgttgaccagatgttcctgagtctggagcaagcacccaggccagaataacagagctttcttagttggtgaagacttaaacatctgcctgaggtcaggaggcaatttgcctgccttgtacaaaagctcaggtgaaagactgagatgaatgtctttcctctccctgcctcccaccagacttcctcctggaaaacgctttggtagatttggccaggagctttcttttatgtaaattggataaatacacacaccatacactatccacagatatagccaagtagatttgggtagaggatactatttccagaatagtgtttagctcacctagggggatatgtttgtatacacatttgcatatacccacatggggacataagctaatttttttacaggacacagaattctgttcaatgctgttaaatatgccaatagtttaatctcttctattttgttgtcgttgcttgtttgaagaaaatcatgacattccaagttgacatttttttt

SEQ ID NO: 55060 - DNA, 916 bp, Homo Sapiens
  misc_feature (776)..(776): n is a, c, g, or t
tttctttcttctttgtcatttgagaaaggatgcaggaggacaattcccacagataatctgaggaatgcagaaaaaccagggcaggacagttatcgacaatgcattagaacttggtgagcatcctctgtagagggactccacccctgctcaacagcttggcttccaggcaagaccaaccacatctggtctctgccttcggtggcccacacacctaagcgtcatcgtcattgccatagcatcatgatgcaacacatctacgtgtagcactacgacgttatgtttgggtaatgtggggatgaactgcatgaggctctgattaaggatgtggggaagtgggctgcggtcactgtcggccttgcaaggccacctggaggcctgtctgttagccagtggtggaggagcaaggcttcaggaagggccagccacatgccatcttccctgcgatcaggcaaaaaagtggaattaaaaagtcaaacctttatatgcatgtgttatgtccattttgcaggatgaactgagtttaaaagaatttttttttctcttcaagttgctttgtcttttccatcctcatcacaagcccttgtttgagtgtcttatccctgagcaatctttcgatggatggagatgatcattaggtacttttgtttcaacctttattcctgtaaatatttctgtgaaaactaggagaacagagatgagatttgacaaaaaaaaattgaattaaaaataacacagtctttttaaaactaacataggaaaagcctttcctattattntctcttcttaagcttctccattgtctaaatcaggaaaaacaggaaaacacagcttttctagcagctgcaaaaatggtttaatgcccccctacatatttccatcacctttgaaacatagcttttagcttgggaaatctgag

SEQ ID NO: 55061 - DNA, 1043 bp, Homo Sapiens
  misc_feature (625)..(625): n is a, c, g, or t
  misc_feature (631)..(631): n is a, c, g, or t
attcaaaggagcctaaatcatctgctcagctcctggaagactggggcatggaagacattgaccacgtgttctcagaggaggattatcgaaccctcaccaactacaaggccttcagccagtttgtcagacccctcattgctgccaaaaatcccaagattgctgtctccaagatgatgatggttttgggtgcaaaatggcgggagttcagtaccaataaccccttcaaaggcagttctggggcatcagtggcagctgcggcagcagcagcggtagctgtggtggagagcatggtgacagccactgaggttgcaccaccacctccccctgtggaggtgcctatccgcaaggccaagaccaaggagggcaaaggtcccaatgctcggaggaagcccaagggcagccctcgtgtacctgatgccaagaagcctaaacccaagaaagtagctcccctgaaaatcaagctgggaggttttggttccaagcgtaagagatcctcgagtgaggatgatgacttagatgtggaatctgacttcgatgatgccagtatcaatagctattctgtttctgatggttccaccagccgtagtagccgcagccgcaagaaactccgaaggagtaaaaaganaaaganaggcgaggaggaggtgactgctgtggatggttatgagacagaccaccaggactattgcgaggtgtgccagcaaggcggtgagatcatcctgtgtgatacctgtccccgtgcttaccacatggtctgcctggatcccgacatggagaaagctcccgagggcaagtggagctgcccacactggccagaaggaaagcatcccagtgggaaagctaaacaagacaatttcggaggggtgaggaagatcctggtaggaagtttggggggagacctcttaaagaggagggatgaccccccatatggaattcctgtcgggccctgacaaggaatggtgggggtaacctggatctgaatgggaaatacctggaaaattacttcactaaccacaatacaactggaacggaaatcgcccccg

SEQ ID NO: 55062 - DNA, 713 bp, Homo Sapiens
ttttttttttttttttttaaaagatcaacaaacctgggttttattatgacaccatatttttgtcattggtactgcacaaaattatatacaaagaaatatatacaaaatgttcaagtattagttaaatttcaattcaaggcttctgtttcaaaaaagctacatttaacatatttcataaagatagcacaaattagtcatttcaaataatctttccaactacttttggtttatatatatatatatatatgtatatatatatataattcagtaggcactaaaaacccatgcagctgcattgtgaggggcttgctcctgcccttaggtataagcaggttcatcactccaatttgtgagtttggctactacccattcatgctcaagtgcagtagtagatgattttacaaaatatgctgtgatgcactggaaaccaaagaccaattcaggtctcaaatcgtattatctagcaacaaaacatttacagttgtgcaagaacaaggattccattttcataaccaaataacaaaataaaacattttatgtgtaagataacttacatctttggactgctggaaaatactttttaattatgaacatgttaaaaataaaaaacagcagaagccctgatattacctctttttcctcatttcttatactaccttttaaaataaagcaggaaatgtggccagcagctggtcccgtctcttctgccccaa

SEQ ID NO: 55063 - DNA, 500 bp, Homo Sapiens
ctcatgattctgcctccaaggatgtttaaaatctagttgggaaaacaaacttcatcaagagtaaatgcagtggcatgctaagtacccaaataggagtgtatgcagaggatgaaagattaagattatgctctggcatctaacatatgattctgtagtatgaatgtaatcagtgtatgttagtacaaatgtctatccacaggctaaccccactctatgaatcaatagaagaagctatgaccttttgctgaaatatcagttactgaacaggcaggccactttgcctctaaattacctctgataattctagagattttaccatatttctaaactttgtttataactctgagaagatcatatttatgtaaagtatatgtatttgagtgcagaatttaaataaggctctacctcaaagacctttgcacagtttattggtgtcatattatacaatatttcaattgtgaattcacatagaaaacattaaattataatgtttgactatt

SEQ ID NO: 55064 - DNA, 972 bp, Homo Sapiens
cctggcctgtgtcaagggaaatgatcagtcattgcattgttattccaaagagcagccaacagtggcctcccccaggccctaccctgcaatgggattcgctttcatttaatggaaacttctgggactgatgcccaactcagtgcactcaagacgcatctccagttttcgggggaagctggtatttgacatagtgtgttaaacagctcctgagaacctttgggacactctgccatggctggcgtgaggcccagaggaccacgcagaggcaatggtagtacagatgtcacagctgagggtacgatgaggcctgggctcagtgagccaggacgaatgtgacagacaccccttgctgccacagtcagccctttgacgaaggtgggctggtgattctggaagtattggctatagcggtgggcccagtcaactcttccttgtggacttacgacagcagattttctctaggataagcttgtgtggttctgccagtgaagcagagaaccacctgtgctgttgtggaaggcgtgccgttgagggggaaaacgaagcccagtatttgctactgtttttcctttttttactatgacaggaaaataatgcaattttagtggaattgattgacagtgtctcctactttgaagttggcaacaaagccaagacggtcatatccaataattatccttggctggggtgaattgggccatgtacattcttggtcccggaaatagtcattagcggtctgggctacaaaaaccgtgtggccccacagatgctggcgtacctggacttaccgggtctcccaatcttcctttgactgtgcagcgtctggtccagctttgtggacgacgaccgtctgcaactagggcgcgtacccgaaaggagcaaaaccgcaaacaaatttgtcacaggcagtcgtaccactgagcaagcaggggatacagatactacagacaattgtatgtcaataatatacgg

SEQ ID NO: 55065 - DNA, 976 bp, Homo Sapiens
cgcggaccgccggtatgagcgcccctcgccaccccgtgtcccaggcccggcctttctgacaagagctagacttcgggctccttgaggatattcagttttgtatgtttgaatatcctctcaccatgttcagcataaagtaccattcttaatgattatcctcaacaagacaggtgtgagagggttgctgttgtattgcaatcatggtgcagaaataccagtccccagtgagggtgtacaaatacccctttgaattaattatggctgcctatgaaaggaggttccctacatgtcctttgattccgatgttcgtgggcagtgacactgtgaatgaattcaagagcgaagatggggctattcatgtcattgaaaggcgctgcaagctggatgtagatgcacccagactgctgaagaagattgcaggagttgattatgtttattttgtccagaaaaactcactgaattctcgggaacgtactttgcacattgaggcttataatgaaacgttttccaatcgggtcatcattaatgagcattgctgctacaccgttcaccctgaaaatgaagattggacctgttttgaacagtctgcaagtttagatattaaatctttctttggttttgaaagtacagtggaaaarattgcaatgaaacaatataccagcaacattaaaaaaggaaaggaaatcatcgaatactaccttcgccaattagaagaagaaggcataacctttgtgccccgttggagtccgccttccatcacgccctcttcagagacatcttcatcatcctccaagaaacaagcagcgtccatggccgtcgtcatcccagaagctgccctcaaggaggggctgagtggtgatgccctcagcagccccagtgcacctgagcccgtggtgggcaccctcgaasgacaamtagatgccgactacatcagrrrtamctgggsgatttgactccgctgcaggggactgctcat

SEQ ID NO: 55066 - DNA, 585 bp, Homo Sapiens
cccaaactacccaggcaattacccagccaacaccgagtgtacgtggaccatcaacccaccccccaagcgccgcatcctgatcgtggtccctgagatcttcctgcccatagaggacgactgtggggactatctggtgatgcggaaaacctcttcatccaattctgtgacaacatatgaaacctgccagacctacgaacgccccatcgccttcacctccaggtcaaagaagctgtggattcagttcaagtccaatgaagggaacagcgctagagggttccaggtcccatacgtgacatatgatgaggactaccaggaactcattgaagacatagttcgagatggcaggctctatgcatctgagaaccatcaggaaatacttaaggataagaaacttatcaaggctctgtttgatgtcctggcccatccccagaactatttcaagtacacagcccaggagtcccgagagatgtttccaagatcgttcatccgattgctacgttccaaagtgtccaggtttttgagaccttacaaatgactcagcccacgtgccactcaatacaaatgttctgctatagggttggtggg

SEQ ID NO: 55067 - DNA, 759 bp, Homo Sapiens
  misc_feature (575)..(595): n is a, c, g, or t
  misc_feature (597)..(601): n is a, c, g, or t
  misc_feature (697)..(697): n is a, c, g, or t
ggtggtctaactggtgcaatcatgaagagagttaatggttaacagacattggccaataacaaaacaccccatggactgtgactcgagtatccaacaggcagtcagagctctcccggtctgaaagttgcattgccactgctaactttgggattgcatcagagaggccctgagtggggttgagatgaggttggtttggtttgatgttacacactcctcacctgttctttctgagtgtcctttctctgaaaggatttatgtttttcttcgttagatagtgacttctgagcaagctgatctcccctggcatgctccaacctgattggacaaaggaagctctatggcctgggagagagactattcttaatttttctttcttacaaaaactgatttttcccataaatatttttacttcagaggactaggaccattttgttttgggcccttctgctgaaaatttgtctcgtttaagaggcagctagaatctttaccatatgtatgaatttgtataatttcatttttggatagggataaacttttgcttctgataaaagcctggaatttcatctggtcccccnnnnnnnnnnnnnnnnnnnnnannnnnaaacatgtccgggccgccctcgggcccctccgagaaagcttttcttagaacccatttcgttttgggcgcgcgggggcccccagttaagggtaaagntgggaacaatggggtccattaaccctggtttttccccctaagggaggaatcccttggggttc

SEQ ID NO: 55068 - DNA, 678 bp, Homo Sapiens
gttcattgccagtttagtctttttgacccatgtgtaattaatttttctcaacccaaagtaagattgagtcccctttgagatgcattagagcagtccaacccagaatggcacacactgctctgctgtagcatcatgtcagggcttcctggactcagtacacctctcagtttgtcttttaaaaaacagctgaatctttactacctatttagttctccttgttaaagaaacaggggtgggaataaaatggatttaggacacccagtttgaattgcagtttttttttttctgacacatggccaggctgtggtgccagcttaatggagtaggctgtccttggcacttgcatgtgtgaaaggagggttttgcctcttcttgagcatggcttgagttggtaaggaaagctgtaactcacgaagccctgagacctgctacccctaagatcgagcttgttttcagtgactggcttgagtcataggaggaggagtctggtacagctgcaggagagcagggccatctgaagcggtagcattgccaccatctccctctcatctagagcagttttcttatgccttggtttgagctgaatttgatgtgaattcttttgctgcttaataaagtgacctctaggtgcattagaatgcgaaggcaaatagttgcaataaatcacctgcacaagca

SEQ ID NO: 55069 - DNA, 898 bp, Homo Sapiens
  misc_feature (870)..(875): n is a, c, g, or t
gaagagaagaaacccccaactaaggcagtagtctctaaagcaaccactaaaccacctccagcaaagaaagcagcagagagctcttcagacagctcagactctgacagctctgaggatgatgaagctccttctaagccagctggtaccaccaagaattcttcaaataagccagctgtcaccaccaagtcacctgcagtgaagccagctgcagcccccaagcaacctgtgggcggtggccagaagcttctgacgagaaaggctgacagcagctccagtgaggaagagagcagctccagtgaggaggagaagacaaagaagatggtggccaccactaagcccaaggcgactgccaaagcagctctatctctgcctgccaagcaggctcctcagggtagtagggacagcagctctgattcagacagctccagcagtgaggaggaggaagagaagacatctaagtctgcagttaagaagaagccacagaaggtagcaggaggtgcagccccttccaagccagcctctgcaaagaaaggaaaggctgagagcagcaacagttcttcttctgatgactccagtgaggaagaggaagagaagctcaagggcaagggctctccaagaccacaagcccccaaggccaatggcacctctgcactgactgcccagaatggaaaagcagctaagaacagtgaggaagaggaagaggaatagaaaaaggcggcagtggtagtttcaaaatcaggttcatttaagaagcggaagcagaatgaggctgccaaggaggcaaaaactcctcaggccaagaagataaagcttccgacccctaacacattttcccaaaaagaaatggcggaaaggaacaaaggggacaannnnnnaaactccaaggcatctaaggtgg

SEQ ID NO: 55070 - DNA, 703 bp, Homo Sapiens
ttttttttttttttttatctaaaagtgcagtctggcagccttaagcccacctgggcacttttagataaaaaaaaaaaaaaaaacaaaaaacaacaccaaaaacagcagtgatatatatatatatatatatatatattttccaggtggtttttagtctttactgatgaaagggtgttcatgttagtttcttcaaaaccctatctaatactaggcaaagtagccaagagccttttgttttgtttttattttgataaattagtggagaaatggcattttaagaggagtctcttctcaacttacctgagagtcgaattcttctcttccctaaccaatgaagctaagtggttatcccagaaacttgtcttctaaaagggaggactccaggccatcaataaagatgtccaggcagtgagcgtactttttacaccctgtagaattgtgggctgtagcgttactctgattttctgtctagtatcagagaatgctggtagcttaaaatttttattttaggacttgtactctgaattttcaggaaccgtcaaaggagcagcagcaaattcacatattttcgacttgagaaatgcttgtggtatgtgttttccaaactgccccctatatgtaaagttcagtttaaccactgattgccttgttattactaggttttttgagaaaaaaaaaaaaaaaacctcgtgccgaattcttg

SEQ ID NO: 55071 - DNA, 630 bp, Homo Sapiens
aaagaacacactgttatttcttgtgtatatttcaacataaatcatgttgttaccaatttgtttggaaggccctggttgagaagagttttagttaataaggtcatatatacatatattaatataaaccaatgtctactgttttgctccagctagtgcttacagtttcattcgagccctgagtatgtgccctgctgttactctctttggtagttgaacgttgaattcaagtcttttgttttaagaagtactaagcaaacaagcaataaaaaggggaatggggtgtgctagtgtttgaatatgctctcttgttgctctaattctgtgcctctgtgcattaatatttggatgcatgcaatgccagcatggaaattggtcttcacacatactgcagttttccagaaacattcacaaaccaataaatgtaacagacattccatttgttaatgggcatatatgtgaaaagcagtgtagaaaataggctaatattagaaaatggttaagtcctaaataacttcaagtgtggttatataatggacactgtcaatgttcataacttaaacctgggtacctggtcaaaataatgcttgggaaacattaaaattgagctaaattgtctcaagttcttttatt

SEQ ID NO: 55072 - DNA, 903 bp, Homo Sapiens
tcgaaagagtccttggcgctactcttttgcctgacctgattcaaaaagtcctcacgtttgcactttcagaagaggtacgtccacaggacactgtatcggtaattggtggagtagctggaggcagcaagcatggtaggaaagctgcttggaaattcataaaggacaactgggaagaactttataaccgataccagggaggattcttaatatccagactaataaagctatcagttgagggatttgcagttgataaaatggctggagaggttaaggctttcttcgagagtcacccagctccttcagctgagcgtaccatccagcagtgttgtgaaaatattctgctgaatgctgcctggctaaagcgagatgctgagagcatccaccagtacctccttcagcggaaggcctcaccacccacagtgtgaatcctgaggtgccgccattggcggttctgctgcttcgctgcagggataaggtggagctaccgaacagctgattcatatgccaagaatttggagtcttctttcaaaccagtgggggttggacaatgaatgtagttaactggttcctgctcacactccagaattaaattctattgaaaaaggaaaatcagcaattcagcaaaaaataaataaaaaataaaaatgtaaatatgatagtaataaaatagagcataacgaaactgtgaaactttctgaagccttgtcagtggttaaaagtatttaacactctactgttaatgacagatgttccgtttttataccctaccaaagggaactagaggcttcttggggaagagcatttttgtggagtgggttcctgcaagagcctataaagcccagggtggtggccactttccgggaatgggtaaacacaaaaagctgatagctggtatcccatagc

SEQ ID NO: 55073 - DNA, 848 bp, Homo Sapiens
ctgaggaggtggccgcggacgtcttagcagaggtgattacagcagcagtgagggccgtagatggggaaggagcgcccgctccagagagcagcggggagccggctgaggacgaaggccccacggacacagcggaggccggtagtgatcctcaagccgaacagctgctggaagagcaggtgccctgtggaacggcacatgagaagggcgtccccaaggccagaagtgaggctgcagaggctggaaatggcgccgagacaatggcagcagaggcagaaagtgcccaaaccagagttgctcctgccccagctgccgcggatgctgaagtggaacaaactgatgcagagtctaaagacgctgttcccacagaatgatgctcatttccctgttccagggaaggcgttgggatgatggatgcgttggtctttctcccttggtttgtaagcagtacaagggcgtgtgctcccagaatatgctgtaatctaattttggtgaagagacccagcgtttcctcctgagcagtgcctctcacggcttgtctcatgcagtcgtgtggcttcttgcccaggtttcaaagctgaagtacattgtccttagcggctgtaacatgtctcttgacagtagtgcacttggaaaataaacgttgggtgattatagacatttaaaatgagcagtgttctctcggcggcgcttattaactcgaggatggtcctaagtgagtctatatagctggcatggcgtcttttcgccttgatggaacgctgctggatttggaggacttcttcgggtgctatgacactctcgaattagctcagtataatttaggaaggtacacgcactcgtgatgtcgg

SEQ ID NO: 55074 - DNA, 677 bp, Homo Sapiens
cccacgcgtccgtgacctcggtccccatgaacggaacaagcatccagtggaagaaccacgatcaaaacaaccacaacacagaccggagcagccataaggacagcatgaactgaccacccttagaagcactcctcggtactcccataatcctctcggagaaaaaaatcacaaggcaactgtgactccgggaatctcttctctgatccttcttccttaattcactcccacacccaagaagaaatgctttccaaaaccgcaagggtagactggtttatccacccacaacatctacgaatcgtacttctttaattgatctaatttacatattctgcgtgttgtattcagcactaaaaaatggtgggagctgggggagaatgaagactgttaaatgaaaccagaaggatatttactacttttgcatgaaaatagagctttcaagtacatggctagcttttatggcagttctggtgaatgttcaatgggaactggtcaccatgaaactttagagattaacgacaagattttctactttttttaagtgatttttttgtccttcagccaaacacaatatgggctcaagtcacttttatttgaaatgtcatttggtgccagtattttttaactgcataatagcctaacatgattatttgaacttatttacacatagtttgaaaaaa

SEQ ID NO: 55075 - DNA, 461 bp, Homo Sapiens
cgtccgggcgcctcggagcgggcggcccgggctgtagtgccggcgccgccgcgtcttcccggtctcctttcccggccgcacagggttttataggatcacattgacaaaagtaccatggagttttatgagtcagcatattttattgttcttattccttcaatagttattacagtaattttcctcttcttctggcttttcatgaaagaaacattatatgatgaagttcttgcaaaacagaaaagagaacaaaagcttattcctaccaaaacagataaaaagaaagcagaaaagaaaaagaataaaaagaaagaaatccagaatggaaacctccatgaatccgactctgagagtgtacctcgagactttaaattatcagatgctttggcagtagaagatgatcaagttgcacctgttccattgaatgtcgttgaaacttcaagtagtgttagggaaagaaaaaa

SEQ ID NO: 55076 - DNA, 602 bp, Homo Sapiens
ccttggtgagctctgatacagtgagaagagattatactcatgaaagagaatgttagtgttacagagaagcagccgatagcaaatcgactgtagagacttggcggcggtggcattgccccaggtcgtcagcagtgtggtattatctatgagaacttgagcgacagagtatttcttgatgaatttatagatcatttgagatgttgagttactttagtttagttttgttttgttttttcaaataagtagagactattgtaaaaaacgagaaaggaaaatgaaatgtgcgtgttgatagcaataatttgtttcttttaaagattctaaaaggtctgagacctgtagcattaattatttgagtgccctcccttctcccctcccctcccttttctcttctcttttttcctctcctctccttctcctttattcattgttttgcttttggagtaggtgttgttcaagtatctgtggtttggttctggcattttgttcccaccatccccttcccccattaacttcccccctgcttgccatcctgcagtagtataaatcatgaataaaaaataattttgctgttgtagtataaaaaaaaaaaaaaaaaaaag

SEQ ID NO: 55077 - DNA, 739 bp, Homo Sapiens
  misc_feature (651)..(651): n is a, c, g, or t
  misc_feature (726)..(726): n is a, c, g, or t
gtaatagatcccattcattgtcccctttggggtatttccaatacttgaatggcagattggagtttttcagagtatgtgtttcatctgctagtctttctctccttcatagcttttcttttcctggacttgctccttttgagttgcttttgcgtttctcatgcctaggcaagtgtaatagaaattatgtagctccttatgttggcaaaggagctctatatagtttcactttgtataaaagttaggaccagctgttgttacatgtaatattttagttcagaacttgacctgaaggaagggaagaaaagtatgtgatttttaccttttttaacaaatgtgaaaaagtcagttttagaaatttcgtggtagtaagttcggcatttgttacatgtatagagagaagactaataatctctatttataactaaatcattgagatagaaaaagattcccattgactgtagacttcttcccattttgtcttcccttctgcctgtttccccttcaggcttggctctaggaaccaaagtgatttgttgttgttccaacctgggctttgtgactttggttagtgccactaccttcttccctcctttcccccttcaatttggaaataaatttctgtatatgttgcaattttaggtttaggtttgntcttttttctttttcattaatcctctctcacctcacagatacccccctcccatggcaaataatataataaccagnggaattttccagg

SEQ ID NO: 55078 - DNA, 673 bp, Homo Sapiens
gcggccgctccaacatcactgggtagatacctgtattcaagctatctggacatgaaagtagtcacattttagaagtcatgaagttgatgctaataaacctaatctacagaaacactcttgaaagcccttgagcatttgttctgtgaacagaaaggtttgagattcagagcaagttcagagttggatggtctaagaatggaaaagccctccattctattagaagagccaggtagcaatttctggttatggaaccagaagctctcaggcttcaaataaaacagcatcacttgtactcttataaaactgtaaaaacagaaaaaccgaaaccgtatctacatctgtcctataaggcagagagtacttgagacctcatgaatttaaaaccaccttacaaactactttgcactatatgaagaaattatcactgtgggcaaagcatcaagcagagagcacagtacacagtgtgtggatgttaatgttattctctagccttcccattcctttgtcttggtcctttgtgcatatggaacagttctattattaaattttgtaatagtaactgagaacctgactctcagcaagggagtagttcagaaattgagggagtttaactctgaatgagtaaataaaaataaagcaattatgtcattagcttaaaattttatcatcatta

SEQ ID NO: 55079 - DNA, 745 bp, Homo Sapiens
  misc_feature (635)..(642): n is a, c, g, or t
  misc_feature (644)..(644): n is a, c, g, or t
  misc_feature (646)..(657): n is a, c, g, or t
  misc_feature (659)..(660): n is a, c, g, or t
  misc_feature (662)..(663): n is a, c, g, or t
  misc_feature (665)..(665): n is a, c, g, or t
  misc_feature (667)..(668): n is a, c, g, or t
  misc_feature (670)..(671): n is a, c, g, or t
  misc_feature (673)..(673): n is a, c, g, or t
  misc_feature (675)..(675): n is a, c, g, or t
  misc_feature (678)..(678): n is a, c, g, or t
  misc_feature (681)..(682): n is a, c, g, or t
  misc_feature (712)..(712): n is a, c, g, or t
  misc_feature (721)..(722): n is a, c, g, or t
  misc_feature (732)..(733): n is a, c, g, or t
ggtactaaaattacaaaaattagccgggcgtggtggcagatcccttgtagtcccagctactcgggaggctgaggcaggagaatagcttgaacccgggaggtggaggttgcagtgagtcgagatcgtgccactggactccagcctgggtgacagagcgagactccatttcaaaaaaaaaaaaaaaaaaaaaaaatcacttgtagtcttggtgtggtatcaaagaatagccacaattagctgaaaaggctattttaaaaacttttccaactgcgtatctgtgtgaagtcaacttacttcaacaaaaaagtttggatgtagaagcagctgtaagaattcaactgtttattataacaagatactaaagagactgtaaaatgccacccttctccttggattgttttggaagttattcttcataaaaaatgttaacgtgggctgggcatggtggctcatgcctgtaatcccagcactctgggaggctgaggtgggcggatcacttgagctcaggaattcaaggtcagcctgggcaacatggctaaactctgtctctattaagaaaaaaaatgttaacattatgatttaaaagtgcattaaccttaatctagataataaaagctttttggggcaacctcccnnnnnnnnanannnnnnnnnnnnannannanannannananaanaannaaaaaaaaaaaaaaaaaaaaaaaaaaaaanaaaaaaaannaaaaaaaaannaaagggaaaaaa

SEQ ID NO: 55080 - DNA, 605 bp, Homo Sapiens
atatacatggaatatattagttatattgaattagattgattggattaaaattcattcagttgagaggcacagttagtctacaagctgagatacaggctgccaaatttaagataacgatcagtgagatactcgctaaccactcctatccctaggttagaaggtgaaacattattatgccaaaggataaaatcaccttaaatccctagcactgaagtcatctacttactgattagttctcactctatcttatcacttttatttaatctccagttcagaataagtttggttgatgaagcagactagaagtagaaagcactaaaaagtgtgggtcaggaagatggaggaaagggagaggaattcgtagacagatataacagtgtaagtgatagctgtacttcttgactttgaagcataaaagggaaaaaaataaacgtatgctgtctatgataattatcctggattattaaaaaatttataattcctatgatctgaataaaaactcaggaaatatacatttctaaaaaaagtttatccacagtggttttgtttgtttgtttcgtatgagaatgataaaactcttagcagtctttaaaaaaaaaaaaaaa

SEQ ID NO: 55081 - DNA, 181 bp, Homo Sapiens
  misc_feature (172)..(172): n is a, c, g, or t
aattcgcggccgcgtcgactaggtgcgagaagacgacagaagggcgaggctacaaaaactaaccctggatcctactctcttattaaaaagatttttgctgacagtgaaaaaaaaaagaaaaaaaaaaaaaaaaaaaaaaaaaaaaaaaagaaaaaaaaaaaaaaaaaaaagnggccgctcg

SEQ ID NO: 55082 - DNA, 499 bp, Homo Sapiens
ttattttattgggttttatattgggtttctttagtttatgttgttttctcaaaagcagcattttaaattacgaatactggacttattggatttaattataaatccaattactactggaaactcatttttacataatatagtccttaaattatttaacccttgctaagtaattgacatatgtaacaataactagcctaaagaaacccaaaaaagtatctctcccgagctgaaacttaaaaattcgtaagtgtaagaaagaatgtgagaatatattaaatgcacactgtaccattagatgaaatcttacttgagaaattgccataagccatattacaagatcttactttgttactgaatcagattaatttcttgttataataattttcatcataaattttctatttttaaagccgctggtactagaaatattcttttaatgctatatctatgtacctactgacacatttttctccataaaagtacttttaaaaattaaaaa

SEQ ID NO: 55083 - DNA, 795 bp, Homo Sapiens
  misc_feature (718)..(718): n is a, c, g, or t
  misc_feature (777)..(777): n is a, c, g, or t
gggaagagagcgcattttgacttcgaggcaccgccgacgttactgtgtcgccatggggcgccgtccagctcgctgttaccggtattgtaagaacaagccgtacccaaaatctcgtttctgccgaggggttcctgatgccaagatccgcatctttgacctgggtagaaagaaggcaaaagtggatgagttcccactcggtggccacatggtgtctgatgaatatgagcagctgtcttctgaagccctggaggccgcccgtatttgtgccaacaaatacatggtgaaaagttgtggcagagatggctttcacatgcgagtgcggctccatcccttccatgtcatccgcatcaacaagatgttgtcctgtgctggggctgacaggctccagacaggtatgcgaggtgcctttggaaaaccccagggtactgtagcccgggtccacattggtcaagtcatcatgtccatccgcaccaagcttcagaacgaggagcatgtgattgaagccttgcgcagggccaagttcaagttccctggacgccagaagattcatatctccaagaagtggggcttcacgaagtttaatgctgacgaatttgaagacatggtggccaagaagtgcctcatccctgatggttgtggagtcaagtacgttcccagtcatggccccttggacaagtggcgggttctgcactcatgaaggttttggcagtactgtctncttggggccctgctggtctgacttatggcttactaataaattctggtttactgccaaanaaaaaaaaaaaaaaaaaa

SEQ ID NO: 55084 - DNA, 431 bp, Homo Sapiens
ctcctcctcgtcgtcctccccctcctccagctcgcccagtaaagagaacgccacaagtaactcctgagcccgcgtgggccggcacccaccactgcccgctgcgcctgaggctgcggggaaaccgcggggactttcccaaccaccctcagccagggccgcacggcacccacagactgggtgccccagaggcgccagtcttggctggtcagcgctacaggccccgcctgttccagggcaggatcctggaccggcccaccggctccctggctcgggaaggcgtgggccacatggtcccctctggggcgccttcagcctccccgtcttttgtctaacctcaccctctaaacgttcagcggtggaaagatttttagaattttaaattattactgctttgaaataaatggaagttttagctcaaaaaaaaaaaaaaa

SEQ ID NO: 55085 - DNA, 778 bp, Homo Sapiens
  misc_feature (767)..(768): n is a, c, g, or t
  misc_feature (771)..(771): n is a, c, g, or t
  misc_feature (775)..(778): n is a, c, g, or t
ggctggaccggtccggattcccgggatcgcacggatccgttgcggctgcagctctgcagtcgggccgttccttcgccgccgccaggggtagcggtgtagctgcgcagcgtcgcgcgcgctaccgcacccaggttcggcccgtaggcgtctggcagcccggcgccatcttcatcgagcgccatggccgcagcctgcgggccgggagcggccgggtactgcttgctcctcggcttgcatttgtttctgctgaccgcgggccctgccctgggctggaacgaccctgacagaatgttgctgcgggatgtaaaagctcttaccctcccaaagtgctgggattacaggcgtgagcccctgcgccccagccttggggcctgtctttgaatgggaatgagactgtgcaaaccgtggactaccctgtgtcacccacagctcagtggcctgcctgccggccctcaggggctgctgaccgggagaccagccagagcacgagggggtcagggctgtgtgggttttggcctgattctgcatttggttgtttctgggggccatgtagcctgcctgcattaggaaagcgctgtgccatctgatcatgagcccctctgcaccccctggtaaggtgaccttgcagcaggagctgtgccctgcctgggtaggcacccactaggtaggaccggagcaatcctggcagccgccacctgcacccgtgcacttgtttcttctcacagtttcaagtaaatcccttttttgaagggaaaaaaaaaaaaaannaanaaannnn

SEQ ID NO: 55086 - DNA, 511 bp, Homo Sapiens
ttttttttttttttttttgttttgagacatagtctcgctctgttcgcccaggctggagtgcaggggcacgatctctgctcactgcaagctctgcttcccgggttcacaccattctcctgcctcagcatcctgagtagctgggactacaggcacatgctgtcacacccggctaattttttgtatttagtagagatggggtttcaccacgttagccaggatggtctccatctcctgaccttgtgatccgcccacctcggcctcacaaattgctgggattacaggtgtgagccaccacgcctggccgaaagttagttgttttgaactcattttctcctttttacccctgcctttatcagcttctaccttctggtttcatgctgagttctagttgcctaaagtctccattgaaacactcctgttataattgccataaaatcataaatccactccccctttctcctcctagtcaaaatttgtattcttttcagcaggttggttttaatcctcgttc

SEQ ID NO: 55087 - DNA, 648 bp, Homo Sapiens
agcaaaaatacttttgggggagtaaaatgttgctggaggcatttaggcaattaaatatgggcattctcctatttctgtggcccgtccctgaagttacatgttcagtaaaacacaaaaacaccgccaatgccacctcaaaagcacctgctggggagcgttggggtgaagagctgtggggtcggagggacctgcccaggggtccgtgtgctcctggagctccaaagacacacaggggtccaagagccaccacggataagttatcaagtcacacaatcaacattatagctgaggaaaggactttagttaatcacacttctggattacatgtggcaattttaaaaatttaccagggctgggctgggcgcaggggctcaagcctgtagttccagcactttgggaggccgaggtgggcagatcaggaggtcaggagttcgagaccagcctggccaacatggtgaaaccccatctctactaaaaatacaaaaattagccatgcgtggtggtgggcatctgtaatcctagctgctcgggaggctaaggcaggagaattgcttgagcccagaggcggaggttgcagtgagccgagatcgtgccactgcactccagcctgagtgacagagagagactccgtgtgacccactcgcccca

SEQ ID NO: 55088 - DNA, 665 bp, Homo Sapiens
gatgttatgagttgctggccagagattcctcagataaaagagcctagaaaattgagttttgagcgggcatggtggctcacgcctgtaatgccagtagtttgggaggctgaggcgggtggatcacctgaggtcaggagttcgagatcagcctggcaacatggtgaaaccccgcctctactaaaaaatatgcaaaattagccgggcgtggtggtgcaggcctgtaatcccagctactcagaggctgaggcaggagattcacttgaacccaggaggtggaggttgcagtgagccaagatcgcgccattgcactccagtcagggcaacaagagtgaaactccgtctcaaaatataacaagaaaattgagtgtcccacccaaattttagggcgtacctccttccatttgataagaagatgctatttccagtgtccctgggagaattcttccatccagtttatatggtgaatgccaccagcgttccctaaaaggaagagagaacttagcttatttctggtctggtgacttttaatcagctagatcagttaatggtatttttaaattaaaaattagtaactagaggaagagactaagagaactatttttacctgagtaatgctctcctcttcttgtttccaaatctaatgggggaggcgaaacaccttggtg

SEQ ID NO: 55089 - DNA, 640 bp, Homo Sapiens
gtggttacataagcaagagtacatcaaactgtattatttgaaagtctagaacctgtcatgtgaaattactatttttgagccctctatgtggtccaggcagaatagtagacacactgatatttaatccttaaaacccctttaaatgagggccagtattatctctgctttcagaagtagacataataggatgaatcatataacagaaaaaaaaaagtgaagccaagagggagttaactacttaaagtacatgctatgctatactttctagagagatcacagatgtgtgtgaacatcctagcaattaacacaaagaaggaaccatcacattaattacacaatttattgtgtctgaggtaacccagtttcttgagagaagcgtaactattttcaaaagtgggaaagatcttttcataaagacgttgccagaaatagcaacattctcaatactcgtggtgtaaaaaccatgaatcccctggcttaatgccaaattatagccttagaagaataattgttccccaaatgggcaagaaagggtctaattgtcaagagtaacccaagtaagaacttttggaatatcaaaggaaatgagccaaatgtaaatagaggggatatgtactttgctgagtattaaaatggaact

SEQ ID NO: 55090 - DNA, 672 bp, Homo Sapiens
  misc_feature (505)..(505): n is a, c, g, or t
  misc_feature (529)..(529): n is a, c, g, or t
  misc_feature (672)..(672): n is a, c, g, or t
ggagaacaccatgggaaaaggtttatgtagtgtatcttagtggcctgcctagctgcctctgggccaggctgacttctgatgtccacattagctcgtacctgaaccctgttgctgaatgccagccctgttctcctgtaactattatatacgccatggcctggggggcattgaaggaagtaagctctcagagatcctaacactggctgggaacctctgactcagagcatgtctttaaagagtccacatctggccaggcgcggtggcacatgcctgtaatcccagcactttgggaggccgaggcgggtggatcacgaggtcaggagtttgagaccagcctggcaacatagtgaaaccccatctctaataaaaatacaaaaaattagctgggcgtggtggcaggcgcctgtaatcccagctacttgggaggctgagacaggagaatcacttgaacccaggaggcggaggttgcagtgagccaagatcatgccactgcactccagcttgngtgacagtgcgagactccatctcnaaaaaaaaaaaaaaaaaaaatccacatcttcagctgggcgcggtggctcatgcctgtaatcctagcactttgggaagctgaaggcggcagatcacttgaggtttagggttcaaaccagcctgacaacatagtaaaacccgtcn

SEQ ID NO: 55091 - DNA, 616 bp, Homo Sapiens
ggattgttttgacacctttgaaatattattaataatttttccagagcaaaaaagcaaacacgctcaataagactaaacaaaacaaaatataaatgtacatcatttaatgtcccagtggctctattctacctgtaagaaaatgatacaaaaccacctaagatattttgaagcctgacaaatcagcttcatggaaaaaggtaaaaaatgcatttttcaaccgaaagggcagatccaatagaagacccgctccttaaataaacataaaatgtaaaaagttggaaaattaagagtaatgttccatctggaaactgaacttttgtccttgaacttgtgttggcaccaagcctcatacacagtgagctcaataactgttgggacaaaggaaggaaggacaaaatgtgtaacttcccagcatctgggagatgctgtctcttgcctcactgagtgttccttttctttgctctcatgtcattccctgagaacaatgaattctgggacaggctaaacatcatgatgaagtttcttaaacagactttcttagtggaaatccatttagatctgggtgtgctctatggggagtgctgacgtcaaagagcaaatgtctataaggggccct

SEQ ID NO: 55092 - DNA, 800 bp, Homo Sapiens
tcctttttaatttgaatatttgaatgtattttttaatgaatgaaatttaattcatcaaaagacctcttcatgctcacactgaaacataaggggaatgtagatggcatttgaatggaatatacaactcacaaattttctttaaaagcgttttatgtgtatatatgaaatgtttcaaatttaataagatttgtctttataagaggccaaaaataattttattaaaaatatacacagaaatacaatagaaatatttccagccaccaataaaacaaatgttcattaaggatagagataaagttactgatccctatttagctgtttaaattcacacaaaaaaatttagtaaaagtaattttcttgaaacagcagcaaataataaactttccttgggaaaacatttttcaaacaacatttaaaaatattctgatgatttgccttttatattgagtttaataatgaagcatattcatcttatttgcaaaagttactcctccagtctgcattcactgttttgaattttttaatatgcacaggccatattctcttttgaatagtttcatttcatgctcactactgttggcactaaatgtaattttttacacttataattattttatatgtcaaacaatattgagatggatgatcaagtttattcaccaaatgatttgaatatatttctttaaacaaactgtttctcaagaattccattttccttcaaaaaaatttacacaatatcatatagctcacacatacaggcagagccagaatgtctattctaagtaccacgttgtggaaagagc

SEQ ID NO: 55093 - DNA, 769 bp, Homo Sapiens
gaggagatagaggaggcttccctccaagaggaccccggggttcccgagggaacccctctggaggaggaaacgtccagcaccgagctggagactggcagtgtcccaatccttcaattggtgatttctgctgtgatgtaattgtatgcaggggttgtggaaaccagaacttcgcctggagaacagagtgcaaccagtgtggtgatcgtggcagaggtggccctggtggcatgcggggaggaagaggtggcctcatggatcgtggtggtcccggtggaatgttcagaggtggccgtggtggagacagaggtggcttccgtggtggccggggcatggaccgaggtggctttggtggaggaagacgaggtggccctggggggccccctggacctttgatggaaacagaatggggaaggaagaaagaggaggacgtggaggacctggaaaaatggataaaggcgagcaccgtcaggagcgcagagatcggccctactagatgcagagaccccgcagagctgcattgactaccagatttattttttaaaccagaaaatgttttaaatttataattccatatttataatgttgggcacaacattatgattattccttgtctgtactttagtatttttcaccattgtgtgaagaaacattaaaacaagttaaatggtagtgtgcggagtttttctttcttccttcttttaaaaatggtggtttaagactttaacaatgggaacccttgtgagcatgctcagtatcattgtggagaaca

SEQ ID NO: 55094 - DNA, 319 bp, Homo Sapiens
  misc_feature (312)..(312): n is a, c, g, or t
cggcaagctgggtctctggaagaggcggcagaggcgcgcggggtggggcgggggtgggtctggagcggagacccgcagggctgcggccgtccggagggcgggcggaagggcggtgcaggcggtggccggcgcgctcggccgcggtagctcgatcccgggctcgccgcccccgcaccagcagagctgccgccgaccagccgctgccgcccccgggaagggaacccgcttataaggcggcgctgcccgacgggaggggcttcccaggggtggggcaggcgggagcggggaggagaggagaggggagggggatgnaagagga

SEQ ID NO: 55095 - DNA, 1120 bp, Homo Sapiens
  misc_feature (22)..(22): n is a, c, g, or t
  misc_feature (25)..(25): n is a, c, g, or t
  misc_feature (33)..(33): n is a, c, g, or t
  misc_feature (36)..(38): n is a, c, g, or t
ataaaaaaaawaddwwtaattnggntcaaagtnctnnnargcwgtacargaagcatggctrgggaggcctcaggaaactgacaatcacggcagaaggcgaaggggaagcaggcacgtcttcttaatattcctttgaaattccttatggcgcacaggaaacgtagaaaataactgcttcacgctgactgwrgtccctctggrgatgggggtagggggtttcmtggatgattttmccatcgtgatcaaacaccagtmgagtcccaaccttcaccgamgcgtggaaggaagaaatggtgamatcgctcagtacacacagtgagctcagagcttccccctgaaaaccgaaagtttcaacttcagttaggtyggcaaactcttgaatcttacatgtktgatgtttcwgagctgaaagagattaakyyttcaaagttttcttcttctaccccacatccattgtctgaaacttcaatgagatccactccatagtccttaagctttagatcaatattagtggcaccagcatccagactgttttctactaactccttcactgcagtgcttagactcagtaccactggcccagagcaaatctgatggactgacttccgatcaataggtttgatggccttagcaggttctggactatgttgacatggaaattcaccttccattatccacggctcctctccctgctccacttccttcacctccactccatgatgatgtttggcttggtgataatcataccccacagaaactagatggctgtagttctccaacatcacatccccgtatgctatcttctcatcagggtccagttgccaccactcctcctgggtgaaatccacagccacatctttgaatgacactggcccctgcaatgtgttcatttcctgttgctcttgaaaacatgcagagactgtggctgatagaccctcctggggctcgsagactctgccccccggctcccgagaggccggggcggggctgctgtacctgsscgcgcgtctbccgcgaggtccctcctgtccactcacaaggykttctgytccgagggscgggcsggctacggggcaatcagggggtttctyttggggcmaaycgctcctggggtacmata

SEQ ID NO: 55096 - DNA, 794 bp, Homo Sapiens
gcacgaatcccagccaggatgtgactgtgccctgcccagttcccccacctcccccatgctgccacccccgactgtcgctgcaccgaccggccctcgaggacctgctcttaggttcagaagcgaacctcacgtgcacactgaccggcctgagagatgcctctggtgccaccttcacctggacgccctcaagtgggaagagcgctgttcaaggaccacctgagcgtgacctctgtggctgctacagcgtgtccagtgtcctgcctggctgtgcccagtcatggaaccatggggagaccttcacctgcactgctgcccaccccgagttgaagaccccactaaccgccaacatcacaaaatccggaaacacattccggcccgaggtccacctgctgccgccgccgtcggaggagctggccctgaacgagctggtgacgctgacgtgcctggcacgtggcttcagccccaaggatgtgctggttcgctggctgcaggggtcacaggagctgccccgcgagaagtacctgacttgggcatcccggcaggagcccagccagggcaccaacaccttcgctgtgaccagcatactgcgcgtggcagccgaggactggaagaagggggacaccttctcctgcatggtgggccacgaggccctgccgctggccttcacacagaagaccatcgaccgcttggcgggtaaaccacccatgtcaatgtgtctgtcgtcatggcggaggtggacggcacctgctactgagccgccggctgtccccaccctgaataaactcatgtcaccc

SEQ ID NO: 55097 - DNA, 377 bp, Homo Sapiens
atcgctcgacatcgatacgactttttttttttttttttttttttttaatttaagtggtctcactctgttacccaggatggagtgcagtggtgtgatcacggctcactgcagcctcaacctcccaatctcaagcaatcctcccacctcagcctcccgagaagctaggactacaggcgtgtgccaccatgcccaactcttaaaaaaactttttttttttttgcagctatgggggtctcactttgttgtccaggctgacagaactgcatttttaattctatagaaatataattctttataggacttcctggtcaatacagtaatgtaagtttgagctcttgattcttcatcgccataattcccttctgtcgtcttctcgc

SEQ ID NO: 55098 - DNA, 337 bp, Homo Sapiens
tggcatgcgcttcaagaggaagttcgcagtggaagcgcaccagtggatccaccgctcctgctccggggggcggcggggccggaggcctgggatccgggctgtgcctcgggcccccgtccgaggtgaccgggacccgcctgtgctcttccggcactacccagacatcttcgaggagtgcggctgagcggcaccgcaggctggagttgagcctgaccttggcacgaaggactgacggatccctgaggtgggccactgagtcggggactccggaactgaaattcatgccctgggctttcctcaaggatccctcaagtttccaacttgtaaaaagaaaagt

SEQ ID NO: 55099 - DNA, 649 bp, Homo Sapiens
ttttttttttttttttttgagatggagtttcactcttgttgcccaggctggagtgcagtggcgtgatctcggctcaccgcaacctccgcctcccaggttcaggcgattctcctgcctcagcccccctagtagctgggattacaggcatgcgccaccacacccagctaattttgtatttttggtggagacggggtttctccgtgttggtcaggctggtctcgaactcctgacctcaggtgatccgcctgcctcggcctcccaaggtgctgggattacaggcatgagccaccacacccagccagatgcaaataattttcttagaaaattatttcaaaagttattttaggcccagaaatcaaggattgttccaaccatgaaaatgggtaagacacctgccttaagcaaatctaacctgctattacttgccaaattttatatattcttttctcttgcctgtatttctaattagtgatttgtttaatgaagaactcttcatgtagagcaattaactgggcctaagaaatttcgaagctttccatgacataaagtggttaaaaaaaaatgctttgacagtcttcttctgccattagttcaactgcctttacgcttttttttttttttttttttgagatggagtttcgctcttgtt

SEQ ID NO: 55100 - DNA, 800 bp, Homo Sapiens
taaaccatgagcaactacagtgtgtcactggttggcccagctccttggggtttccggctgcagggcggtaaggatttcaacatgcctctgacaatctctagtctaaaagatggcggcaaggcagcccaggcaaatgtaagaataggcgatgtggttctcagcattgatggaataaatgcacaaggaatgactcatcttgaagcccagaataagattaagggttgtacaggctctttgaatatgactctgcaaagagcatctgctgcacccaagcctgagccggttcctgttcaaaagggagaacctaaagaagtagttaaacctgtgcccattacatctcctgctgtgtccaaagtcacttccacaaacaacatggcctacaataaggcaccacggccttttggttctgtgtcttcaccaaaagtcacatccatcccatcaccatcgtctgccttcaccccagcccatgcgaccacctcatcacatgcttccccttcacccgtggctgccgtcactcctcccctgttcgctgcatctggactgcatgctaatgccaatcttagtgctgaccagtctccatctgcactgagcgctggtaaaactgcagttaatgtcccacggcagcccacagtcaccagcgtgtgttccgagacttctcaggagctagcagagggacagagaagaggatcccagggtgacagtaaacagcaaaatgggaaaatcccacctaaacgcccaccaagaaaacacattgtggagcgctatacagagttttatcatgtacccactcacagtgatgc

SEQ ID NO: 55101 - DNA, 596 bp, Homo Sapiens
aacagcagtgtgtagagagaatattatgcagatgccgttaattttttaccctatgtttacatcttgaggcagcagagtctgtctgcagctatgtggtgagctatgtaaggaaaaaaatctgggctgttagagtgaaaaagtgtgttttatgtcaattgtgaaaggaaaatgttaggagtatggtttttaaacttgggcttcattttaaacttttttttttaaacccagttatttcacttgatttgctagcttcagagaagagatccgaatctgtgcccagcgctaaaggctcagtgttagcatggcttgtgctggccggtgtgccatattcttgttggagatgaaccgtagcaccagagcccattcttccttgtcagtcttggcccaaagatgtcaccattcctagttatttgtcaccacataattggtgttgattggaaactttttctgagatgggacagaactgctgggttgtctttttccatgtaacttaagcatagtaatataaataaagtaatagttggatgcttttggtcctgtgttgcttttaaaaacaccttataaaagaggagagtatttgataagcaattttcata

SEQ ID NO: 55102 - DNA, 879 bp, Homo Sapiens
gggctctccttggagttcttccatcccccagtggtacctcaggacccagggctgcagacacaggctggtgctgcaagggctcctgccccattctcagccttccttccctctccttgtctcatgttgaccggagggtaggggtctgtccctggtcttcctggtaggttttgtacacatattttgctactgtgtggatccatttatttttattgtggagtgtatacaacaggttgcgaactggctgcctgtgtcttattttgacttgcactgccattttgaggggagaagaatcaattagtggcaaacatttaaaaatgcaattttttgcagaccaaagtataattttaaaaaatgcaaattttctaaaagacacatctcttgaaaaatgagatgatgtggccaggcgcagtggctcacgcctgtaaccccagcactttgggaggccgaggcgggcgggtcacgaggtcaagagatggagaccatcctggccaacatggtgaaaccccatgtctactaaaaatacaaaaaaattagctgggcgtactggcatgcacctgtagtcccagctgcttgggaggctgaggcaggagaatcacttgaacccgagaggtggaggttgaagtgagccaagatcgtgccattgcactccagcctggcgacagagtgagactctgtcccaaaaaaaaaaaaaaaaagatgcacgcaacccacaagtcaatgaccaggtccctctgtgttggttgctgctctgggctctccgttagccccccctccacctggctccactcggctcctggcctggggtggcagggaattttgagttttgcctattccctggttttattaaccttgttcctggcaaaaaacctatttttttat

SEQ ID NO: 55103 - DNA, 1033 bp, Homo Sapiens
cccgggatgcatgaattgcttcaaattattgtcaacttgttctcttccattttcattcaaattaactttgactcctggaagtattgagtcttcctttcaaggaccataaggtacatcagttatcttgaacattctgacgtgtaaaggaccataaggtacatcatttatcttgaacattccgacgtgtaactcacagccgaagcactccatcccagatttgttgtctgggaactttaggatcctctaggaagctaatctgcttagtctatttttagaggattgatctctggcacaaccagcttcctggagttacctcagcagaagactagaattagagaaaagggaaagaccttttcttctagtaagtgtcaagtacagatgctctttgacttatgatggggttatgtcccagtaaacccattggaagtcaaatgcatttaatacccctgactggacaccacagcttagcctcgtccaccctaaatgtactcagaacacttagaattgcccacagttgggcagaatcatctaacacaaactctattttataatcgagtgttgaatatatcatgtaatttattgaatattgtacattatgttgaaattgcaaccatttcacaccattgtaaagtccaaaaatcagaagctgaggactgtctgtacatgacattgaatcacatgaatggattactagggcctgaggggtgtccgttctttagaaaaatgtagagtatatatatcttcagggctgtgaattccatactagttatcaatattttaagatcattctgtatatacatattttaaattatgcaagcaaactaggaggagaatgtgcaattttgagggatacctaatttgcattcggttaggggrtatttttcaamctcttgctttatactctgatatggggtgtgtttatgaacttgttaatgttatttwatcatgcmgatttccaatcagtgtattgctcatttwctgacaaaaaggggaaawacgaaamacagaaagggaaawaaachkgmttttwtaa

SEQ ID NO: 55104 - DNA, 666 bp, Homo Sapiens
ggaattccgggatatcatgctctggcccaaacttgagctcagcctacagtatgacatggctctggccactctcagggaggacctgacacggcgacggtacctgatgagtggggtgatggcacctgtgaaaaggaggaacgtcatcccccatgatattggggacccagatgatgaaccatggctccgcgtcaatgcatatttaatccatgatactgctgattggaaggacctgaacctgaagtttgtgctgcaggtttatcgggactattacctcacgggtgatcaaaacttcctgaaggacatgtggcctgtgtgtctagctgtgatggaatctgaaatgaagtttgacaaggaccatgatggactcattgaaaatggaggctatgcagaccagacctatgatggatgggtgaccacaggccccagtgcttactgtggagggctgtggctggcagctgtggctgtgatggtccagatggctgctctgtgtggggcacaggacatccaggataagttttcttctatcctcagccggggccaagaagcctatgagagactgctgtggaatggccgctattacaactatgacagcagctctcggcctcagtctcgtagtgttatgtctgaccagtgtgctggacagtggttcctgaaggcctgtggcct

SEQ ID NO: 55105 - DNA, 904 bp, Homo Sapiens
tcacaatgacagtcacctgatatcaactggtggaaaagacatgagcatcattcagtggaaacttgtggaaaagtatctttgcctcagaatgagactgtagcggatactactctaaccaaagcccccgtctcttccactgaaagtgtcatccaatctaatactcccacaccgcctccttctcagcccttaaatgagacagctgaagaggaaagtagaataagcagttctcccacacttctggagaacagcctggaacaaactgtggagccaagtgaagaccacagcgaggaggagagtgaagagggcagcggagaccttggtgagcctctttatgaagagccatgcaacgagataagcaaggagcaggccaaagccacccttctggaggaccagcaagacccttcgccctcgtcctaacaccctggcttcagtgcaactcttttccttcagctgcatgtgattttgtgataaagttcaggtaacaggatgggcagtgatggagaatcactgttgattgagattttggtttccatgtgatttgttttcttcaatagtcttattttcagtctctcaaatacagccaacttaaagttttagtttggtggttattgaaaattaacccaacttaatactaggagaagactgaatcattaatgatgtctcacaaattactgtgtacctaagtggtgtgatgtaaatactgggaaacaaaacagcagttgcattgatttttgaaaacaaaccccccttgttatctgaacatggtttcttcagggaacaaccagaaggtattacaaaaccctggttaatcatccactgggtccagattgtaataattttttttttttttttttccttgaaaaagaaaccccgaaaaaaaatggactcccttactgaaaaaacc

SEQ ID NO: 55106 - DNA, 875 bp, Homo Sapiens
ttgcctggggagccggacggggctcctgaggggtacaggttgggtgggccctccctgagggtctggggtcaggctttggcctctgctgcctctcagtcaccaagtcacctccctctgaaaatccagtcccttctttggatgtccttgtgagtcactctgggcctggctgtcgtccctcctcagcttcttgttcctgggacaagggtcaagccaggatgggcccaggcctgggatcccccaccccaggacccccaggccccctcccctgctgctttgcggggggcagggcagaaatggactccttttgggtccccgaggtggggtcccctcccagccctgcatcctccgtgccgtagacctgctccccagaggaggggccttgacccacaggacgtgtggtggcgcctggcactcagggacccccagctgccccagccctggtctctggcgcatctcttccctcttgtcccgaagatctgcgcctctagtgccttttgaggggttcccatcatccctccctgatattgtattgaaaatattatgcacactgttcatgcttctactaatcaataaacgctttatttaaaaaaaaaaaaaaaaaacgggagaagcgggtcctacgcacgcctttgttgtcgcgcttttgcctcccgtccttgccccctactcccgcccttacctgacttcctttttcggaaggaagatcctttgaacagcccgacgttgggaacaaaagaattttggagaaaccccagggctaaaagtccacgttttttccctccctttaaaaattaaccttcaaaacttttccctccaatgggaaagttcccccaaaaaaccccgccccctaaaccaccaacttaattttaatattt

SEQ ID NO: 55107 - DNA, 583 bp, Homo Sapiens
aaatgccgtaggccgggtggcttacaaacaacagaaacgtattgctcacagtcctggggggctgggacgcccaagatcaagaggccagcagattcggactccgctgagggctgtttcccgatccatagatggtgccttctcgctgtatcctcaatggtagaagcacaaacaagcaagctccttcctgcctcttttataaggactccaaccctgttcatgagggttccgcccccatgacccaatcagctccaaaggccccacctcctaatactgtcaccttgggggtgagaattccaatgtgaatttgcagggggaatgggggacacacacaaatttcggggccataccacccttcaccacaccctcctgcgctcagggtggcttgcagtccctggcccttctggtgggcatttggtatgtcctttctcttggggtgatttctgatgtttttactctatatagtgaaaagctagggagagcgggtcttctcccccctccctctccagtcccctcacaatcccagatgggttctaatgcagctgctggggcctgatgccctgagttgtttgtgattcaataaaga

SEQ ID NO: 55108 - DNA, 686 bp, Homo Sapiens
  misc_feature (134)..(134): n is a, c, g, or t
  misc_feature (272)..(272): n is a, c, g, or t
  misc_feature (517)..(517): n is a, c, g, or t
  misc_feature (582)..(582): n is a, c, g, or t
  misc_feature (599)..(599): n is a, c, g, or t
ggaggacttcctagtggaagggacatcgaactaaggacctgaactatgagaaataggcaggaagaagttgtacctgactcatttttctcaggtgtctccagggagcaggacccatggagggacccctggtgtangcctgggcgatagactcttcctcagcagcctggcaggcaggaaacagacataggaccccagcccagatctgaatggcatgggaggtgctgcccttaaccatgacaccattgtaagagctgtccacatttgtatgttgngccctggaatcagcctggttgagctcaaatcccaacttagccacgtctggcctgtgtccttgggcagtcacactacctctctgattttgtttccttatctgtaaaatggtgatcatcataatacaacttcaaaaggatttcaggctgagtgtggtggctcacgcctatacacccagcactttggaaggctgaggaaggaggatcgcttgaggccaggagtttgagactagcctaggcaacacagngaggccttatctcaacaacaaccacaaaatctaaaaattagctgggtgtggtggtgcatgcctgngatcctggctacttcanaggctgaggtggaaggatcacttgaggccaggagtttgaggctgcagtgagttatgatggcactgctgcactccagcctgcgggaca

SEQ ID NO: 55109 - DNA, 699 bp, Homo Sapiens
agcttttcttaactcagtccaagctgacttgtttagctgcactggaatttcttaccaaccaaatatttgcatcgagcaaagggggctgtgtgcacctccctaatggcagcgatgatggctgctgtcattcaagcccatcttcagacgtcacagtctggaagtgaaatgtccacaaacatctgtggcagaaaaggctatacggaccacccagttgtgctgcagctttacagagcaaggaagggttgtggcaaataaatgattaacctgcctcgactgtgctgagggcaacaaaggccatctcaccaaaggattattcgatgccattaaatcatcccgtgaccttcctgcttccgagtccatggcctttgcccagggcatgtactcccctgagaggccttctgcctagaaagatctatgactgggttccaaagttgaggcctaggtttttgctgggatttagatattttcaggcaccattttgacagcattcaggaaaacggttattgaccccatagactagggtaagaataaaggcaataaatttggtctgactcagaatataggagatccatatatttctctggaaaccacagtgtacactaaaatgtgaaattgaaggttttgttaaaaagaaaaagataatgagcttcatgctttgttaattacataatgatttccattacgctatttctgtgaaat

SEQ ID NO: 55110 - DNA, 498 bp, Homo Sapiens
tagtggggagagaaaaacaatccaatacatatttttctctcagaatagaaagaaaacacaaagagaaaatatgaacaatataaagcacttaaaggaagaggatgatttcttccagcttttccacactctctttatgcgcaggaacaaacagctgttgagtgagctgctatgactttggtagagaggtgcaatatgttttttgaaccagctataaaagaaattaagaggtacatgtgagggtagaaacaaatatcaaggatgagaatggcactggctgtcccatatggtatccaggagccaccaatgtctgttgagtacttcatacatgcctagtctgaattgagatgtgctcaatgtataaaatatataccagatttcaaatacctacttcaaaaaataatgtaaaatatctcactaataacttttcctttgtgtattgcaatgatatattgttggtctattggattaaataaagttatgttattcattttagaaaaa

SEQ ID NO: 55111 - DNA, 586 bp, Homo Sapiens
caaataagttatttgtcctttaaggttggttactataatacccctcagtaagattccagtattaatttctgggcagtttgttctctgtatacaattgcaaatgataagcatttttgtgagtgaccacctttgcaatatgtttgttaatttacttcatgttgggttctttctgaaatgtacatctttacatataaaaacctcacattctacttgatttacacttcctagtctacattacatgtggttgaaggttttatacattctatatgcttttactaaatatacaagatttactactagaaatttggagaaagaacactaacacatgtacttgtgatttgttcatgttatattaaaacttgagatttgtgtatttatgtagagtctgtattgacaagactgttgttttttgctccttgagctatataataatctgtgtattggattgttgtcttgatttggtctaaatttgaatatatatgagttaccttgaatataacaaaaatgaattttgtttgatagatttatattgtaacctttttctagttcttgaataaatatagcctgctttccctaaaaaaaaaaa

SEQ ID NO: 55112 - DNA, 507 bp, Homo Sapiens
  misc_feature (40)..(40): n is a, c, g, or t
gaagttttagggccctaaggaaccttagtgatcttctatngggtctttctgaggttcagagagggtaagtaacttcctccaggtcacacagcaagtctgtgggtggcagaagcaagctagcgctgggcattcagtacataccacgatgtgctccctctcttgatgcttggcccctggggccttcagggctttgggacatcttgtcctcaaccctctccctagatcagtctgtgagggtccctgtagatattgtgtacaccatccccatgtatatacaagtacacacagatgtacacacagatgtacacatgctccagccccagctctgcatacctgcacctgcaccccagccttggcccctgcctgcgtctgtgctcaaagcagcagctccaaccctgcctctgtccccttccccacccactgcctgagccttctgagcagaccaggtaccttggctgcaccggtgtgtggcccgctctcacccaggcacagccccgccaccatgga

SEQ ID NO: 55113 - DNA, 1100 bp, Homo Sapiens
  misc_feature (872)..(872): n is a, c, g, or t
ctggggggatggtgtctatagctggctctgctggctccctcaggccctgcttaccaagctctggaggagggagtgctgcattactgagcaccttccttgttctttcctcataggacactgatgttactgtcactttagttatgctaaagtggaggtttcagcctccagaagacagcagagccttctagggtcaccttaagaataggtttagctaggctgggtgtggtggctcatgcctgtaatcccagcactttgggaggctgatgtgggcggatagttgagcccaggagttcgagaccagcctgggcaacatggcaagaccttgtctctacaaaaagtacaaaaattagatgggtgtggtgtttcgcgtctgtagtcccagctatttgggaagctgaggtgggaggatctcgagcctgcgagatcaaggctgcagtgaatcatgatcgtgcgctactgcactccagcctgggccacagagcaagactgtctcaagaaaaaaaattttttaaataagtttaattataaagtgaaggaccagttggaccacggacccctagaaactcagccaaggagacctgactttatctgagacaggaaggcagtggttaaaagaattaaaaaaggacagtggtgcttgacagagcaggactgaagttttcattcctctacctgctgggggcttggtcaagtcctaaaagctttccaggtctgtaactggttttgtctgtaaaatggggaaaaaggtaccttttctgccacatgaagtagctgggctggggaaatgatgtcatactacgatgtgtttcattaactggttggaaattatcccatttaatttgagcagaattgggatccttttaaaaaaaaanaaaaaaaaactcgagggcatcttatgtccgggtgggggagaaaaaagggaatggaaatggggcccatgggcccaaagccgggtttcctgaccccaagctttttcttggaacaaaaggggaaaaaaatttgcccgggcctccccccttaatagggggaacgccctaattaattttttcacataaaagcccccggggtttaaaccccggcccctttaaaatgggaaaata

SEQ ID NO: 55114 - DNA, 565 bp, Homo Sapiens
  misc_feature (517)..(517): n is a, c, g, or t
atcaagggtacgagaacttgccaatgggaaattcatccgagtggcactggcagagaaggataggagtggaatgcccacacagtgaccaacagaactggtctgcgtgcataaccagctgccaccctcaggcctgggccccagagctcagggcacccagtgtcttaaggaaccatttggaggacagtctgagagcaggaacttcaagctgtgattctatctcggctcagacttttggttggaaaaagatcttcatggccccaaatcccctgagacatgccttgtagaatgattttgtgatgttgtgatgcttgtggagcatcgcgtaaggcttcttgcttatttaaactgtgcaaggtaaaaatcaagcctttggagccacagaaccagctcaagtacatgccaatgttgtttaagaaacagttatgatcctaaactttttggataatcttttatatttctgacctttgaatttaatcattgttcttagattaaaataaaatatgctattgaaactaanaaaaaaaaaaaaaaaaaaaaaaaaaaaaaaaaaaaaaaaaaaaaaaaa

SEQ ID NO: 55115 - DNA, 871 bp, Homo Sapiens
  misc_feature (831)..(831): n is a, c, g, or t
  misc_feature (833)..(833): n is a, c, g, or t
  misc_feature (835)..(835): n is a, c, g, or t
ggacgcgtgggcgcgaggccctgaccgagaccacgctgcggctggcgcagctcaaggtggagctggagcgggccacgcagaggcaagaacgcttcgctgagaggccagccctcctggaactggagagattcgagcgcagggccctggaacgcaaggccgcagagctggaggaggagctgaaggccctgtctgacctccgcgctgacaaccagcgcctcaaggatgagaatgcagcgttgatccgcgtcatcagcaaactctccaagtgacccggagggactttcccgcacccgtatttatacagctgcttctgccacacgcaccccttcccccgtgtgaacacgagtgacagggctccgggggaagtctcagagaagccatagcccccctgggacctccggactgggaggggagcagagtccccaggagccgagggggccacccgaggccaggatggaggtgggaggccgagccaagcagggggacgttgccagaggggaccagggccagagacgggaccaggaaggaactgaggaccaagaagtgcaaggatcagtagccaggaccagagtggccgcctggaggtccccatctcacgtgtgatgccaccccgtcacccctcccctcctgagcagggatccaagaatgtgccaagagtcccgccagcctcagccaggtgggcctgtatatagggtccatgtgcaatagggagggacgtcctctattttttgctgccccctccccgcccactgtctgggggcagggggagaaggtattttccagataaagcacaggcaccacaaataaaagccgtggaagtgccccttcccngnangagaggccgcgaaatggacgcaggggacgtggcaaa

SEQ ID NO: 55116 - DNA, 535 bp, Homo Sapiens
cacgaggagaaaagtctgcttctaaagcagaaacagcttaataattcttcagtttcttccccccaacaaaacccatggtccaactgtaaagcattaccaaactctttaccaacagagtatccagggtgtgtccctgtttgtgaaggggtgtcgaagctagaagaatcctctaaagcaactcctgcagagatggatttggcccacaacagccaaagcatgcacgcctcttcagcttccaaatctgtgctggaggtgactcagaaagcaaccccaaatccaagtcttctagctgctgaggaccaagtgccctgtgagaagtgtggctccctggtaccggtatgggatatgccagaacacatggactatcattttgcattggagttgcagaaatcctttttgcagccccactcttcagacccccaggttgtttctgccgtatctcatcaaggcaaaagaaatcccaagagccctttggcctgcactaataaacgccccaggcctgagggcatgcaaacattgggatcattttttaagc

SEQ ID NO: 55117 - DNA, 383 bp, Homo Sapiens
gcacgagaacccacaagcacttatcttggctactaatgaagctctccttttttttgtttgtttgtttgcttcattgttgattgtgtattttcttcattcctggggagtactaacccaaaagcgtctgtctcttgttttctagtccagtttgagattaatttagaagaaaggaatactgtatgtgaaattcatcttgggctttcccctaaattgcaagataaggccatgtgtaagattttccctaaaactagaatatattaatgcatgtttgagaattttaaagcaccatggtcaaaaccagaagctatattttgcatatttggactcagccatccattaagaacccatgttgtcctctggacatatttatcaatataattggg

SEQ ID NO: 55118 - DNA, 792 bp, Homo Sapiens
ttttttttttttttttttcatctgtaaacaataaatttatttcatttcttttaaagatttaatgatatacaaaacgtatatagtatctttaagtaatacactttttctttctccccacccccaatcaatattaaacactatttaaacagcttatcatctcttgccttgtctgtatctatgagatacactactaaatacaaataagctttatactgctcccttccaaataaaaattaaaattagtaccaaggaaacaaaagaaaaagaaaaaaaaagaaaaaaaattaaagcataaaacttagatgaaaagcttttcttgttattgttgaatattcaacaatatctggggctgttaaattacattttattggcataaggttgcactgcaatctgccagtatcacataatgataatccaactgaattaatttcttaagtaccacaaacagcattcatgttcaaatgttccaacacaattttaaatatatgcaagagttcatgtttacattctgatttgatataacaatcaataaaatctttggagaagtttgtaagttctgggttgttgctatagatacagatagggaaaaaagtactttaactttcctcaaaaggtaacttcccttgacgagtgagttaggtttctgcttttataatttaggttatgtatcagtttaccatggctttcttctacttaacagtgacttgataaaacaatgtttaaaaaacccaattaacatttttacacaatttgggttctatttaaaaaaaaactggctctatctttaaatat

SEQ ID NO: 55119 - DNA, 862 bp, Homo Sapiens
  misc_feature (15)..(15): n is a, c, g, or t
  misc_feature (26)..(26): n is a, c, g, or t
  misc_feature (29)..(29): n is a, c, g, or t
  misc_feature (700)..(701): n is a, c, g, or t
  misc_feature (734)..(734): n is a, c, g, or t
ataaaaactgctatnatcttctggtncgnaaggaaaggcttattgttctcttcagccactggttacttcatgcctatggaataatctccatttccagagtggataaacttgagcaagatttgccccttttggctttggtacctacaccagcccttttttacttgttcactgcaaaatttaccgaaccttcaaggatactctcagaaggagccaatggacactgagtgtagacatgtgaaatgccaaaaacctgagaagtgctcctaataaaaaagtaaatcaatcttaacagtgtatgagaactattctatcatatatgggaacaagattgtcagtatatcttaatgtttgggtttgtctttgttttgtttatggttagacttacagacttggaaaatgcaaaactctgtaatactctgttacacagggtaatattatctgctacactggaaggccgctaggaagcccttgcttctctcaacagttcagctgttctttagggcaaaatcatgtttctgtgtacctagcaatgtgttcccattttattaagaaaagctttaacacgtgtaatctgcagtccttaacagtggcgtaattgtacgtacctgttgtgtttcagtttgtttttcacctataatgaattgtaaaaacaaacatacttgtggggtctgatagcaaacatagaaatgatgtatattgnntttttggtatctatttattttcatcaatacagnattttgatgtattgcaaaaatagataataatttatataacaggttttctggttatagattgggtcaagattttgttcggattattgttgctgtaaagaaacaataataaaaagcttacctacataaaa

SEQ ID NO: 55120 - DNA, 676 bp, Homo Sapiens
cgcgtccggaggtcactcctcccggcagactgccagattcacttacagccccagctaattccaccaaacatggaggagtacatgaacagccttctctcagcggtgctgccttccgtgctgaacaaattccgcatttatctaactcttttgagattcttggaatatagcatatctgatgaaataaccaaggcagttgaagatgactttgtggaaatgcggaagaacgaccctcagagcatcactgctgatgatcttcaccagctgctcgtggtggctcggtgtctgtctctcagtgctggtcagacaacgctgtcaagagaacgatggctgagagcaaagcagctagagtctttaagaagaacgaggcttcagcagcaaaaatgtgtgaatggaaatgaactttaaagatgtaatacctatgaagagtaatgggcaaactgtagccacataattgtaaaattcagatattcatttataccacattgttttataggtaatttctatcacaaaccagtgacatttcctgaaatcaagcctggtaacacctgatgtttatatgatattcagtaaggacttttaccttactgatttcatggagcttttgaagtttgttttataataattatataaattagtaatgatgtaaaaaaaagtatttgatattaaaagtttaata

SEQ ID NO: 55121 - DNA, 555 bp, Homo Sapiens
gaagctctgcccgtgctgcccagtggcattgagttcctggatgtccgcctaaatcggctccagagctcggggatacagcctgcagccttcagggcaatggagaagctgcagttcctttacctgtcagacaacctgctggattctatcccggggcctttgcccctgagcctgcgctctgtacacctgcagaataacctgatagagaccatgcagagagacgtcttctgtgaccccgaggagcacaaacacacccgcaggcagctggaagacatccgcctggatggcaaccccatcaacctcagcctcttccccagcgcctacttctgcctgcctcggctccccatcggccgcttcacgtagctcggagcccttccactcctcccaggtcatctcttggaccagcgggcatcacattctccagcagccgccatctcacacgcctccctcctgtggccgccggcagcatggacaaaggtctccatgcagggggaggaggcctgcttctttccccacagctctcacgtctcccttctccctgcgggtgacaaagaagcc

SEQ ID NO: 55122 - DNA, 630 bp, Homo Sapiens
gtttcccctaagatgttattatgttagggacataacacttttgggaggttgtgtgggagatggttgatttaggttttcaaaagctagaaataaaatttacatgccttagatttcataaaattctgctctaattgggtggaaggtgctgtatctaacttgtgttcctcctaaggttatgtcctaataactattctttaggagtatacttctactttatagaaggttgcttttctttttaattttttctaacaaagaaaagaataaagtatttattaataagaaccagaaagcacttgaaactgatgtttttaatggctcacttagggtagatttatttatctcattaacttaaaacagctatgtgtatgaaataggtcacaacagaacttgaacaccaggttggtgtctgagcaatccctttcttatgggaaaaacaatgttcttgtttgaacagagggtatcattgcagtcagtattcacgtgtatatcgttatataagttgtataatatgcttgtaaaggctgagggtgagctgtatctggatgcctttttacatttgatttaacttttaaaataaatttaaaacataattgacaaaagacaaacacagagcacaagcagacaacacac

SEQ ID NO: 55123 - DNA, 635 bp, Homo Sapiens
  misc_feature (569)..(569): n is a, c, g, or t
agactgactaaactgttctaaattctcacaaaaaagtccccaaacaacatgcctcctaaaaaacattttcctatcttttacaagaggtatgaacatttgtagggttccacatttgcatctagaaatccaatgctctttagaatgttattacgaatagaaagatggccaggatgacctttagtgttacatgatgttcagcaaattttaattcaaaccttgatatgcctggacactgaaaagtaaacgcatcacctcctattttataccctaccttctggttcccaattgggagagcacatagagggaaggagacaatatagaaactacggagtccgctggtagtgggctgcatggtgtgacagagcccttctctgtaaaatggaaatgacaccactagccatctcaatagttacaagaattaaaagagatacagtacctgaagtgcttagcgcatggtagcatttcataaatgtttagtgtcaatactaatgctctaataatgtaaattgttaataatttatttccctaatatcaggaaatcccagttgtctatgtggcccagtgcttanaaacgccttcttgcatgaggggattgaactatacaatgtttgttaactttgtatttgtattttttc

SEQ ID NO: 55124 - DNA, 576 bp, Homo Sapiens
  misc_feature (474)..(474): n is a, c, g, or t
  misc_feature (567)..(567): n is a, c, g, or t
taattttcagccttaagacatttaagtttggaagtccttgctattcaacagaataacaagaaaacttcagaatgtatcactctcctgaaaagaagatattaataagcccttttatttatggttatagttttatttatagtctcaaaattcctaaagcaatgctacaaccattgaatttgccatattttgtatcagtgctgttaatttgctgttgcctcaagaaaaagtgctttttctccatggatgaggctagaccctaagaagtaattaagtcaatgtaaatcaaatggaagttttcccatgaactaagaatttattagttccctgattagactggaagaagaaaccactatttcatgaaaagcatggaatattatattttattgttcataattaatgaataaaattgatatgaatgaatgtagtgttctttgaattagtaaacagtacatctgtgacaatcatttttaacangctctacttgtgttctttataaagtgtgattttcagaaagcaaacaacacaattacaaggttgaatctgaggaaaataatccttgtgccatanaagtattta

SEQ ID NO: 55125 - DNA, 639 bp, Homo Sapiens
ctattgtctcagctataaattcaaatttatacatactattgagtattaatattctctgatttcagggagaattctgtcagtcacatgatgattatgtttttgtttaacattctttccatgcacttgttattttattaatttgcctgaatgatgagaccagaccagtgtctacagattttcattgtcagaaaaatctataagtctgccctttttacaatgatgatttaaaaaaaacaacagcgtaaatattagcccacaagagcagtcctaaacaatcacaattacactgtactacccaagaagactgtttattgtgaagcatttacctttcaaaaaatcattacatttctatttcttggtggagcagcacattgtggagtgtgattcttaattcttcattgagtttgtcaataggacattgatgctggataggttgtcttttgtttttatgtctcagaccatcttgtgagattgtttgcctatctcataatacagttttatgcagaaaggttgaaactatgtaaatggtttttatggaaattatcagttacaatattttaaaggtgtagaatggcatctttgtttataggagaacatttgtaaataaagttaaatttctaagtcaaaaaaaaaaaaaaa

SEQ ID NO: 55126 - DNA, 628 bp, Homo Sapiens
aatccagagcagcctgtggcctgtaaagcatatatttctaatgactgcagactggtgggatcataggagccttctgaatgaccaggactgctttctttggagctgatgaaaatgtactcttttagcgtgttagaaatcacttgttttattttgtttctttggccaagctgggtctagtgtttcttttgctgggaatagactttcaaaagttgtacttctatcaagaaacaaaactgcccttgcagaaatttcaggtcttttgttaagcctgtattggtcttaaggtgcagtattttttaaattattatttatagaaagaatctataaattcttggggaagtgtgttataagctttaataattacattgagctgcacctcagtggtgtgtcattaacatgcagtggggttaatatctgaggcctcagatgactttgtgccttttggaataaagggtaaaataaactctcccagagtaagagctgtatcgtgaattgtcatactaattattgagggggacttatgtgcttttattgaatggagtgctttacaatttttatttttaaatggggttgggatccttggaatatttcaataaaattgataaaatataaaaaaaaaaaaaaaaaa

SEQ ID NO: 55127 - DNA, 577 bp, Homo Sapiens
atgtatccactgtggaataaactccatagactcaactcttctggagttcacaatgcctccctacctctattcttgatagtgagccagtatctctaaggaaaggagagccgtatttttagtcatcctagggcaggagccactgtggcatctgaggaagacccagggtacagtattagcatttctttcaaccctaagtatgggcatgtgaccagagacactgccaaaccctaagaaatcattagggcatgatcatgctcaccatatttcacaaatgaaatcttaatgtgggctgttttttatgatcaaactgtcatccatgttgacctgatgaaaataacaccctccttcacctccctcagggtaatgaaagtagaaatttgactgaagctcctacttccttatacagcctttccttctgtgggcttgtcacttttcagtacatttctagtggggaagagcagggcgacccctctgctgggtttctccttaaatgtgaagcaaaataaatttatataatggaatttggtggcagtgactgatgtttgtctctagctaaaaccaactgtttagttgactt

SEQ ID NO: 55128 - DNA, 704 bp, Homo Sapiens
cgccgcgctggcgacacaacctaaggaggacctttttgttaagtcaaatccaacggcccggtgcgccccaggccgggagcgcgcgcggactggcgtctcccctcccggcgatccgcccccagcactggggaggcgccactgaaccgagaagggatggtcatctgctccggaaggaaagagaacgggccaagactgggactattccccacccccggtcccccattgaggcccgccacccccataactttgggagcgagggcccagccgagggtggatttatcttctcaaagacctaagagtgagcgcggggtgggggagggatgtgaagttatccagcctctgctaggcttcaagaaaccgtcatgcccgcttgagggtcaggacccacggggcattatcttgtctgtgattccgggttgctgtgacagccggtagagcctctgccctcccgaaactaagcgggggggcgtgggtcaaatcatagccaagtgacttgtttacatgtgagtgaaactgcacaaaggaacacaaaacaaaacttgcactttaacggtagttccggtgtcaacatggacacgaacaaaaccttacccaggtgtttatactgtgtgtgtgtgaggtctttaaagttattgctttatttggttttttaatatacaataaaataatttaaaatggaaaaaaaaaaaaaaaaaaaaaaaagg

SEQ ID NO: 55129 - DNA, 605 bp, Homo Sapiens
  misc_feature (580)..(580): n is a, c, g, or t
actctctgcccctctccatttataccaaagaaatcataggtgaaaccccctaccctccccaacgttaaatgctcgagaggaatcttccacaaggcagggccatgcacgcaacctgcacacgcacttggagggcccaggtgtctctccaccagcccccatgcagtagggactggaagatatgtcatctgctggttgtgttatcactcccaccccctaccccagcccgtcttccggaatttctcaactaaatttcattattgggcaggaaggaggtcatgggttcatttcatttttgttttttgtgtttttaattaaaagaaaggttacctcagttttcactccttagacatggatgtagctacctttttttgtatgtcttttttttttttaagcaatcgtgttgaattaggagtatacttggtgtggaaagagtatgaatttgccatgtgatttgcaaatggggggaagctactgtgagcgtgtgtttttttaatttacactatagagtgatttttttttcccccaacgtcaagtttttaccttgcatgtactggagtatttatttcatctattaaaatgntatgtttctcaaaaaaaaaaaaaaa

SEQ ID NO: 55130 - DNA, 565 bp, Homo Sapiens
tctaatctcttcccttaagccctgtggccacacagccaggagagacttgccgctggctcccgcctcatttcagcccagggtgctcatccaggggcccagaacagtcccacctgtgctgctatgcccacagcacaaagccaggcttcactcccaaaagtgcagccaggccctggagggtgatcctgccagcagccctacagctccacaccctacccacccatcggcagcccctctgctgttccccagggacctctcatacactggccaggaggctgcagaacgtgtgtctccccctccctccaagaggtcctgctccctctgccagaaccgtgtgtgggcgggtgggagggcgctcggggcccggcccctccctctccctgctggttttagttggtccctatgttggaagtaaaaagtgaagcactttattttggttgtgtttgctcacgttctgcttggaagtggggacccctcactgcgtccacgtgtctgcgacctgtgtggagtgtcaccgcgtgtacatactgtaaattatttattaatggctaaatgcaagtaaagtttg

SEQ ID NO: 55131 - DNA, 646 bp, Homo Sapiens
cacgcgtccgattttggtgtctctcaggctttcccccccaactatggtttctttgctttttgttttaacatagttttgttgctgtcttctgtaatgatacagttttgtgcagctgttttcacttagcatatcgtgggcatctccccttatgattactaaatattttattttggagtggctgtgtactctcccattgactagatggaccattgtgccagttgccaatcactaatgctgttactaacttttcagttataaattgatgaatatctttgtgcacaggctgtttcccaatgtcaagttattagggtagactccaggaggtgggattcttcaactaaagaatatgaaaacctttgaggcttttactacatattgacaaaatggtttccggaaatatttgtatccccttacactgccaccagcaaggataaacatgtccatcttgcccgtattgggaattatcatctggctaaatatttgctaatttgataatgaaaaaatagcatcgtgtttcagttggcatttcactgacttctagcacggttgaacatctttcatgtggagcgattgtatttcctcctttgtggattgtcagtgtcctttgctctatcttctggggtcagataaatttgtatgagctcgg

SEQ ID NO: 55132 - DNA, 497 bp, Homo Sapiens
agatgaaaagattggattccgaaatgatgcatattttgactggcaaaatgtggcagatttcagggatgcaggtggatccttaactgaggtcaaggtggaagaggaagaaagggatccgcagagtcctgaatttgaaattgaggaggaggaagaaatgttgtcatccgtcataccagattccaggagagaaaatgaacttcccgatttcccccacattgatgagttttttacccttaactcaacaccatctagatctgcatatgatgagcctcatttgctcgtaaatattgagaaacagaaactagagttggaaaaacgacgactggatatcgaggccgaaaggctgcaggtagaaaaggaacgcctacaaatcgagaaagagaggctgcggcatttagacatggaacatgagcggcttcagctagagaaggagcggctgcagattgaaagagaaaagttgaggttacagatagtcaattcagagaaaccgtccttgg

SEQ ID NO: 55133 - DNA, 469 bp, Homo Sapiens
tctagactaaggtcagcagatttagcaaatacagactgccccagttcattgaattttagataaatgaaataaatctataaggttaagtatgtccccagaactgcatggaacatgcttaatctaaacaatgatttgttgttcacctgaaattcaaatttagctgggtgtcctgtatttcatctggcaaccctacttcagacccaggtgtaaggtacatggatgtgctttggtcaaggaataggccaaggcagagatccatgcctgcatgactcagtgggtttggtgcacaggcacacacctccacttgttatataacctgtttgtgtaagttcatacttggtctgagccactgttgtctgtaaaaggtaattgtcctgctaatgctgtacaggggctcttggggttcggctcagctcaacatggcttgacatggtgggcacactggcgcccagtaagagagagagagagc

SEQ ID NO: 55134 - DNA, 870 bp, Homo Sapiens
gcactctttgctgccccagaagctggtcccctatggattcatcttggcctgacccagccaggtggccttatttcttccctgtcacctcccctccttgaaatctgggccctggtgcctgctgaagattccctctatccctgagtacttagtcttctcccccttccctggggcttctagagctctctctgcccctcaggtcctggcccttgggtccttgtcaaccagaggtctagggaaccacaacccttattgtcctgggtggaccaatccaaaggctaagtgatagtgactcatcaatgttgggtcctgtggggtaccagtttaggttcctaagtaatagtgaccctttcacgtcctggagcccgagtggaccaatcggaagcctaagtgacgatgaccctcgcatgtcctaggtccctgggtggacccatcaggaccccaagtgatagtgacccagtggtcttttagatcctcagtagaacagtccagaagcctgagagacagtggccccttgataatctgggtctcacgggaccagctaggggtccaggtttcagtcagtaaataagagtggtccacgtcctaaagacacctctcctttacaaagacttgtgatgctctggggcttctgtggccaagccccaccctttcctggtcatggtacccgtacagcgttgatggccacagctcgaaggggggctttcgtgtccccctgtgcggtcagtgttttcagtaccacctctctcccgtgcccacttggctatttacttatttatttattgtgtgccagtgatggtgggtgggggstggggcytccccgccacctccaccctgttgtkactgtcyttcgtacttataartgcgctggga

SEQ ID NO: 55135 - DNA, 833 bp, Homo Sapiens
  misc_feature (816)..(817): n is a, c, g, or t
  misc_feature (826)..(826): n is a, c, g, or t
aaaaaaaaaaaaaaaaaaaacataacaagtatgaaaacaggtgagcttgagaaagaaacagcccctttgaggaaagatgcagatagttcaatatcagtcttagagatccatagtcaaaaagcacaaatagaggaacccgatcctccagaaatggaaacttctcttgattcttctgagatggcaaaagatctctcttcaaaaacagctttatcttccaccgagtcgtgtaccatgaaaggtgaagagaagtctcccaaaactaagaaggataagcgcccaccaatcctagaatgtcttgaaaagttagagaagtccaaaaagacttttcttgataaggacgcacaaagattgagtccaataccagaagaagttccaaagagtactctagagtcagaaaagcctggctctcctgaggcagctgaaacttctccaccatctaatatcattgaccactgtgagaaactagcctcagaaaaagaagtggtagaatgccagagtacaagtactgttggtggccagtctgtgaaaaaagtagacctagaaaccctaaaagaggattctgagttcacaaaggtagaaatggataatctggacaatgcccagacctctggcatagaggagccttctgagacaaagggttctatgcaaaaaagcaaattcaaatataagttggttcctgaagaagaaaccctgcctcagaaaatacagagataacctctgaaaggcagaaagagggcatcaaattaacaatcaggatatcaagtcggaaaaagaacccgattcttcccccaaagttctagaacccgaaaaccagcnngaagaagancggaaaa

SEQ ID NO: 55136 - DNA, 603 bp, Homo Sapiens
ggcacgagggttgataacccctcttagcttacaggaagctttttgtattaattgcctttgaggttattttccgccagacctcaacctgggtcaaagtggtacaggaaggcttgcagtatgatggcaggagaatcagcctggggcctggggatgtaaccaagctgtacccttgagacctggaaccagagccacaggccccttttgtgggtttctctgtgctctgaatgggagccagaattcactaggaggtcatcaaccgatggtcctcacaagcctcttctgaagatggaaggccttttgcccgttgaggtagaggggaaggaaatctcctcttttgtacccaatacttatgttgtattgttggtgcgaaagtaaaaacactacctcttttgagactttgcccagggtcctgtgcctggatgggggtgcaggcagccttgaccacggctgttcccctcacccaaaagaattatcatcccaacagccaagacccaacaggtgctgaactgtgcatcaaccaggaagagttctatccccaagctggccactatcacatatgcttactcttgcttaaaattaataaatcatgttttgatgagaaaa

SEQ ID NO: 55137 - DNA, 573 bp, Homo Sapiens
  misc_feature (517)..(517): n is a, c, g, or t
atttaaacttcaattttttatatttaaacttcaattttttagcaacagctgaatagctttgcggaggagtttaatagttacacattcatgctaatatacatttcctttaaacatccacaaattcttaaaaagattgaatcagtaaatttcatttcagctaaaaatggagtctaatatattgtttcaaaagatacatttttacccaccataaatgttacaatatctgaatatgctttgtcaaactatccctttatgcaatcgtcttcatattgtttttatgattctaatcaagctgtatgtagagactgaatgtgaagtcaagtctgagcacaaaaagataatgcacgatgagattgcctaccattttataggatatttactatgtatttatacgttaagacctctatgaatgaatgtatcagagaatgtctttgtaactgtttaattcaatctgtaataaaaatctaactaactaactcatttatttctattaaaaaggtattgtcctttaggcggngaatgggaatccttgctgcattgttgcagtcattctgaaaggacctttccctgtac

SEQ ID NO: 55138 - DNA, 679 bp, Homo Sapiens
caaggctgctgacgtgcgcscaggtgacccactacagcaacctgctgtgcgacctcctgcgcggcatcgtggccaccaccaaggccgctgccttgcagtacccatcgccttccgcggcccaggacatggtggagagggtcaaggagctgggccacagcacccagcagttccgccgcgtcctaggccagctggcagccgcctgagggtggtgaccccaggagggaggcaggggaggggtgcggcggtcccagctccctggctcccatgtcaagagtcgctgtgccacaggcttagggacaggaccccagctctgcgtcggtcctggtgccctggatgcccaggaatctgtatatatttatggccgggcagggtgtggggccatgcctcctcaggagccgaagcccaggggccggccagtggccttccccagcatgcaccacgggcccgggttgggtcaccagacggggctggagtgtgagggtcctgcagcctgcaggacctcgtgccaccccgagggctgagcctggtcccacgagggtgccgtgtcccctgacagggccagtgcagtttggtgtgtcctccgcctttccaggagaagaacctgaagaactatttttcgttattggttttccaatcatttgactaagagtctccatttaaataaagtttttaaaaggaa

SEQ ID NO: 55139 - DNA, 563 bp, Homo Sapiens
aacagcaagcggattttcttgcaagatcagggaccccatttctgcagccagtgtctcctgggtgccttctgaggactcccacccccatcccagtatctcatctgtcccctctcctggggcttaagtgggttgcttccaggcagaagcagccaaggaccgattccaggcactttctgtagcaaatgactgtgaattacgacttctcttgcccttcttctagcagtctgtgcctcctctctgaccagtttggagggcactgaagaaaggcaagggccgtgctgctgctgggcggggcaggagaggagcctggccagtgtgccacattaaatacccgtgcaggcgcggagaagcaaccggcacccccttccggcctgaaagccctccctgcaagaaggtgtgcaggagagaagaggccccggcatggggatctgggttctagagggcatgtgatgactgtaaatgttcactgggtgggtagggagtggtatccagtgttcaagtgcagaaatctttggctttgctaccagttccatatgatgagaaataaacgttcgctgaggttt

SEQ ID NO: 55140 - DNA, 1102 bp, Homo Sapiens
tcccgcggcgtgggaggctgcgcggcgatgctgcagttcgtccgggccggggcgcgggcctggcttcggcctaccggcagccagggcctgagttccctggcggaagaggcagcgcgtgcgaccgagaacccggagcaggtggcgagcgagggtctcccggagcccgtgctgcgcaaagtcgagctcccggtacccactcatcgacgcccagtgcaggcctgggtcgagtccttgcggggcttcgagcaggagcgcgtgggcctggccgacctgcaccccgatgttttcgccaccgcgcccaggctggacatactgcaccaggttgctatgtggcagaagaacttcaagagaattagctatgccaagaccaagacgagagccgaggtgcggggcggtggccggaagccttggccgcagaaaggcactgggcgggcccggcatggcagcatccgctctccgctctggcgaggaggaggtgttgcccatggcccccggggccccacaagttactactacatgctgcccatgaaggtgcgggcgctgggtctcaaagtggcactgaccgtcaagctggcccaggacgacctgcacatcatggactccctagagctgcccaccggagacccacagtacctgacagagctggcgcactaccgccgctggggggactccgtactcctcgtggacttaacacacgaggagatgccacagagcatcgtggaggccacctctaggcttaagaccttcaacttgatcccggctgttggcctaaatgtgcacagcatgctcaagcaccagacgctggtcctgacgctgcccaccgtcgscttcctggaggacaagctgctctkgsaggactyacgttamagacccctctwmcccttyarcctgccctaaagcgaattccccsgamcctyccccamgcyaaccaagggscmacgggcamcccgkamcaatgttkragtkaaaamctttttttaracaagssgarcccttkgcggatttggrrcttwaggscmamgccacaccttkaggragggtwmttgagcccttwwttyargrggaakkakagggmaarggrrgggmatccawttggaagggg

SEQ ID NO: 55141 - DNA, 890 bp, Homo Sapiens
tttttcttttctggaacagtgggaattaaggctactgcatgcatcacttctgcatttattgtaattttttaaaaacatcaccttttatagttgggtgaccagattttgtcctgcatctgtccagtttatttgctttttaaacattagcctatggtagtaatttatgtagaataaaagcattaaaaagaagcaaatcatttgcactctataatttgtggtacagtattgcttattgtgactttggcatgcatttttgcaaacaatgctgtaagatttatactactgataattttgttttatttgtatacaatatagagtatgcacatttgggactgcatttctggaaacatactgcaataggctctctgagcaaaacacctgtaactaaaaaagtgaagataagaaaatactcttaaagctgagtatttcctaattgtatagaatcttacagcatctttgacaaacatctcccagcaaaagtgccggttagtcaggtttgttgaaaatacagtagaaaagctgattctggttatctctttaaggacaattaattgtacagacacataatgtaacattgtctcaacattcattcacagattgactgtaaattaccttaatctttgtgcagactgaaggaacactgtagtataccccaaagtgcatttgcctaggacttctcagcttctcccataggtagtttaacaggcattaaaatttgtaattgaaatgttgctttcactgaaaaagtgtcttgatgtttcagttatttttaatcgccataaaaaaatagaactatcttttgggtttatctgttttctcatgcacaggcaatacacaaatttaaaatgagttgtgagccaattgtttctgaagtgttttggtagttctat

SEQ ID NO: 55142 - DNA, 680 bp, Homo Sapiens
ggaagccttccttggtgtctcagatcttaacaattccaatagaagagaagacatatgaatgtaaggaatgtgggaaaatcttggctccttccataggccttactattcatgtgtctgtgcatcctaggaaacaaactgaacgtaggaaacctgtcgatgcttacatcttactgagtctgtttgaactcatgctggagagaaatgctatgaatgtgaggaaggtggaaaagctttcattattttcctcgggccttactgagcttgtgagcacattggatataaatgcacgtcctctggctgtaaggaatgtgttgaaacctttcgctctgccttataccttaatattcagctgtgatctcacaagtgtgaaaaatcttatgaatgtaaaatgtgtggagattcttcttagtaatttagcttccactttgggaacatgtcaaagcacacattgagaagtcccatgagtgaaagagatgttggaaagcccttgaacttggtcgttaggaaacatccacactgaagaggaacctgactgtatggaaggtcaaaaggctgtattaatttacatgcaaaaaagtcacactagaggaatgcccatatcagaatgcttttggtaaatatacatgtctttacagagcgttcactatctcacttaattaaacaatatcttagttgggtct

SEQ ID NO: 55143 - DNA, 809 bp, Homo Sapiens
gcgagatggcggacgtgctagatcttcacgaggctgggggcgaagatttcgccatggatgaggatggggacgagagcattcacaaactgaaagaaaaagcgaagaaacggaagggtcgcggctttggctccgaagaggggtcccgagcgcggatgcgtgaggattatgacagcgtggagcaggatggcgatgaacccggaccacaacgctctgttgaaggctggattctctttgtaactggagtccatgaggaagccaccgaagaagacatacacgacaaattcgcagaatatggggaaattaaaaacattcatctcaacctcgacaggcgaacaggatatctgaaggggtatactctagttgaatatgaaacatacaaggaagcccaggctgctatggagggactcaatggccaggatttgatgggacagcccatcagcgttgactggtgttttgttcggggtccaccaaaaggcaagaggagaggtggccgaagacgcagcagaagtccagaccggagacgtcgctgacaggtcctctgttgtccaggtgttctcttcaagattccatttgaccatgcagccttggacaaataggactggggtggaacttgctgtgtttatatttaatctcttaccgtatatgcgtagtatttgagttgcgaataaatgttccatttttgttttctacatttaatgttactttcctgtccctaaattgaagttctaagcatagcaggctgtatgatcatgtgagatcttctaggactgactctagtattcttttttctttttgagaaagtctgcggt

SEQ ID NO: 55144 - DNA, 564 bp, Homo Sapiens
ctgaagaaaaccacaaccatgccattgaactaatgctatttcatgggtctccttttgtgaatgcaattatccacaaaggctttgatgaaaggcatgcgtacataggtggtatgtttggagctggcatttattttgctgaaaactcttccaaaagcaatcaatatgtatatggaattggaggaggtactgggtgtccagttcacaaagacagatcttgttacatttgccacaggcagctgctcttttgccgggtaaccttgggaaagtctttcctgcagttcagtgcaatgaaaatggcacattctcctccaggtcatcactcagtcactggtaggcccagtgtaaatggcctagcattagctgaatatgttatttacagaggagaacaggcttatcctgagtatttaattacttaccagattatgaggcctgaaggtatggtcgatggataaatagctattttaagaaactaattccactgaacctaaaatcatcaaagcagcagtggcctctacgatttactcctttgctgaaaaaaaatcatcttgcccacaggcctgtggc

SEQ ID NO: 55145 - DNA, 462 bp, Homo Sapiens
gcacgaggactggatgtaccaccaactactacctgtaatgacaggcctgtccaacacatctcccttttccatgactgtggtagccagcatcggaaagaacgctgatttaaagaggtcgcttgggaattttattgacacagtaccatttaatggggaggacaaaatggggcaggggagggagaagtttctgtcgttaaaaacagatttggaaagactggactctaaagtctgttgattaaagatgagctttgtctacttcaaaagtttgtttgcttaccccttcagcctccaattttttaagtgaaaatataactaataacatgtgaaaagaatagaagctaaggtttagataaatattgagcagatctataggaagattgaacctgaatattgccattatgcttgacatggtttccaaaaaatggtactccacatacttcagtgagggtaagtattttcctg

SEQ ID NO: 55146 - DNA, 692 bp, Homo Sapiens
  misc_feature (660)..(687): n is a, c, g, or t
gggggaatattctgtgatgctctgactcccctagtctgtagacggaattggcatacggtctaatttgtgtagtaagcacctttgttcatactagtagtgactgtattcttgattcagcctgatagctaccatgctgctgtcaaaaccaaccagaggggagcttgttcttctgctgtagtgtgcagtgactggcctcacccaggactttgatgtgagaatgagcactttcctctatcaggaaatttcaagtgtttcctgttattcgtagctcaatgtaatgcctcagttcattttcagttgtttgattatatgtgactaatatgtattttttattcaaacaagacttctgtacatgtttcttcaaaacagtttattaactgtcttcagtcttggattacatcaagtttataattttggcaaattgttaagacactgtgaagtcagcgttaaccatgtgcatacaacttaaggaattttttcctcctcatgtaaattttacttttcatgcttatatagtttcaacttttatcttcatagtaatttctcatctactcataataccaaaagttaagtcatgctgttttgtgtgctctcttgctaaagaccgcagagaccatacctgttgtcaaagagggtgtaataaactggtaatataatcannnnnnnnnnnnnnnnnnnnnnnnnnnncatgt

SEQ ID NO: 55147 - DNA, 647 bp, Homo Sapiens
ctgaatctctctatgaactttccattcaaaactttccaagtttttccttatgtggaaccgaaatctttctttctcccgtgaaactttactactatcagataattgaagacagatctctttgtattctcttcaagcccaaaccaattctgttccttcaatctaaatagtggtaatatgaatgtttaagaaatgaaataagaaacatgtgcaggcactttggaaggtgctaagtgactgccctaaggaatgaaaagcaagggccaggtgggagtagcccagcgaaggcacttgggctgccaggaacaggaggcgtgggaaactctggcttaggaaaacatgaacacaggggcaacagaggcaaactgttgttcgagttaaatataaatctcaggctctttaaaggtaaaaggtttaaggataatccatttggaagaagaaaagagtgaggctgaaagtaaagccacatgacaagcatataaaaaaaaatgcagatgatacaaatatgaaagaggccttcagtgtttgtttattaagaatcttaatgcagtttactgatggattaaaaacagctaacattgtctgaaaattatgttacctataagaagttggaaataaataaaagcataatcactaaaaaaaaaaaaaaa

SEQ ID NO: 55148 - DNA, 784 bp, Homo Sapiens
ggctccaggtgaaccgcctccaggagctcatcgaccagctcgagtgcaaggtgagggccgtggggccaggtccccacaagggaggaccctcctggtatccaccagagccaggcccatgctggaggcccggcccacactctgtgccctcacaggccccccggctggaacccctgcgtgaagaggacctggccaaggggcctgacttgcacatcctcatggcccagaggcaggtccaggtggcagaggaaggcctgcaggacttccaccgagccctgcgctgctatgtggacttcacaggggcccagagccattgtctgcatgtgtccgcccagaagatgctggacggtgcctccttcaccctgtatgagttctggcaggatgaggcctcctggagaaggcaccagcagtcgcctggcagcaaggccttccagcgcatcctcatcgaccacctgcgggccccggacaccctcaccactgtgttcttcccagcctcctggtggataatgaataacaactgagccagacctgcacacgccgagggccccgggaccctgcctgcctccctctggagccttctggactggccagcccagcgcaaagaccagggcttgtctcctcctggacttgggcctggtggaagggctctcagcccagggatcagggactgggctgcttgctttctatttattattgatttatttatcccgtgtatttatcgtttgtcacttcagcctccaagctactttggcttctgcctggctcaggagaactgggattctggtcc

SEQ ID NO: 55149 - DNA, 597 bp, Homo Sapiens
cggaggagtcctattcagactggggccttcggcacctccggggaagctttgaatccgtcaatagctacttcgattcttttctggagctgctgggagggaagaatggagtctgtcagtacaggtgccgatatggaaaggcaccaatgcccagacctggctacaagccccaagagcccaatggctgcggctcctatttcctgggtctcaaggtaccagaaagtatggacttgggcattccagcaatgacaaagtgctgcaaccagctggatgtctgttatgacacttgcggtgccaacaaatatcgctgtgatgcaaaattccgatggtgtctccactcgatctgctctgaccttaagcggagtctgggctttgtctccaaagtggaagcagcctgtgattccctggttgacactgtgttcaacaccgtgtggaccttgggctgccgcccctttatgaatagtcagcgggcagcttgcatctgtgcagaggaggagaaggaagagttatgaggaagaagtgattccttcctggttttgagtgacaccacagctgtcagccttcaagatgtcaagtcttcgagtcagcgtgactcattcg

SEQ ID NO: 55150 - DNA, 1097 bp, Homo Sapiens
  misc_feature (31)..(31): n is a, c, g, or t
  misc_feature (662)..(662): n is a, c, g, or t
  misc_feature (832)..(832): n is a, c, g, or t
ggtccggaattcccgggattgcgaggctgtnggggaagttcaccaaggccatggatgacggcgtgaaggagctgctgacggtggggcaggagcactggaagcgctgcacgggcccattacccaaggaatatcagaagataggaaaggccttgcagagtttggccacagtgttcagttccagtggctatcaaggtgaaacagatctcaatgatgcaataacagaagcaggaaagacttatgaagaaattgccagtctcgtggcagaacagccaaagaaagatctccatttcctgatggaatgtaatcacgagtataaaggttttcttggctgcttccctgacatcattggcactcacaagggagcaatagaaaaagtgaaagaaagtgacaaactagttgcaacaagtaaaatcaccctacaagacaaacagaacatggtgaagagagtcagcatcatgtcttacgcgttgcaagctgagatgaatcactttcacagtaaccggatctatgattacaacagtgtcatccgcctgtacctggagcagcaagtgcaattttacgaaacgattgcagaaaagctgaggcaggccctcagccgctttccagtgatgtaggacagaacgggccttgaagagaatgccgcgtgctttctcctgacttgnggcaatgcaattcaaaactttttttcccctattattcagaaaaaaaggaaccaaacccaaaaagaagagttgcaaaaaactgcatttattttattagccacccctaaatgcgtcagttaatttagggatggtccttttggtccatttccgcctccattattttaaacaantggaaaattggtctctattttttgaaaagtacttaaaaaggtaccagaaattttccatgggaaaaatgaggggggttctccccccctgaatatttttacctagaaagcccaaaatttaatattggccttaaaaaatataaaaggccttaatataattttataaaggcctccccacaaatctttcccagtttttttacccccgggggccagaaaaaattaaatttacctaatttaacctttcctttaaaaacactgggaacctttc

SEQ ID NO: 55151 - DNA, 777 bp, Homo Sapiens
ctggcccagccagacagtttgagcaaggaggaggaggtggactgtttggtgctgccactgcaccgggttggggagcacgctggagaaaatgaatgggcagcgcatggatgagctctttgtgctgatccgggatggcttcctgctcccaactggcctcagctccctggcccagctgctgctgctggagatcattgagtcccgggcggccggctggaagacaacgccagccgcccacaagtattactacagcgaagtctccgactaggcctccagatcagggcttcctcaccagccctggcctttcttctacccacctctaaagctggcagtggagtctctgcctcacccaaagacttttcccttccagactttgagtgtcttcccttctagactttcccatctcctggtgagatgtttcccacttatgccgtggtcctgccctgagcccctttccccaccacaacccaccacggccaggcagagaagggcaactcccaagagccactgcactgtgtaaccattagtgcaactactaccttggtgcctcagtttacccatctgtaaaatgggtaagcatagccactggtgggatattttgggatgtcaaggggtggaggcagagcacaagtcacaccagacactgctttttatacattttgtataaggacaactctggaaacaagcctatttcctccagccagtttcactgaatgctgcaccacatgctacaccagtycagcgtgagaattttctaataaatcttttctgatactaaaa

SEQ ID NO: 55152 - DNA, 887 bp, Homo Sapiens
  misc_feature (796)..(796): n is a, c, g, or t
  misc_feature (803)..(803): n is a, c, g, or t
ttttcctcttgtggcagcgactggcatccgacataaaggaacagttgtgctctgcccacaaacaggcgtccctttccctctggataacaacaaaagcaagccgggaggctggctgcctctcctcctgctgtctctgctggtggccacatgggtgctggtggcagggatctatctaatgtggaggcacgaaaggatcaagaagacttccttttctaccaccacactactgccccccattaaggttcttgtggtttacccatctgaaatatgtttccatcacacaatttgttacttcactgaatttcttcaaaaccattgcagaagtgaggtcatccttgaaaagtggcagaaaaagaaaatagcagagatgggtccagtgcagtggcttgccactcaaaagaaggcagcagacaaagtcgtcttccttctttccaatgacgtcaacagtgtgtgcgatggtacctgtggcaagagcgagggcagtcccagtgagaactctcaagacctcttcccccttgcctttaaccttttctgcagtgatctaagaagccagattcatctgcacaaatacgtggtggtctactttagagagattgatacaaaagacgattacaatgctctcagtgtctgccccaagtaccacctcatgaaggatgccactgctttctgtgcagaacttctccatgtcaagcagcaggtgtcagcaggaaaaagatcacaagcctgccacgatggctgctgctccttgtagcccacccatgagaagcaagagaccttaaggcttctatcccaccantacaggnaaaaacgtgtgatgatcctgaagcttactatgcagcctacaacaggcttagtattaaaacatttatacccataaattttcaaat

SEQ ID NO: 55153 - DNA, 464 bp, Homo Sapiens
tattacaggtactgatatttataaatttaataaactgtaccatgctgctgcatgttttcaagtacatgttgaacagtaaggattggggagttgttttttaatggtcacctaaagcagctgctatagaaatgttgaactaaaattttgcatctggtcataccttcatgcatttatcatttgcagatatttttccatcattattaaaaaacaggaacttttaggctctgaagatcatgtggaccagagcaaattaaagttcagtttgtgtcacaattcattgccagacttcattggaatgctttgtttgatgatgtatgttcattctcagctttattttcagatgcttaactgggcaatgaagtctaacttcaggttgaactttctcatgtttaatctcaggctaaatgtaaatgatatttgtaaagtttgaataaaattctgtttactcattttgaaaaaaaaaa

SEQ ID NO: 55154 - DNA, 702 bp, Homo Sapiens
gtgcctgatagagtgaaaacacaaagttgcactttaataatttcaataaaagctaatctgtgtcagcctccctctgcttcagagagtcaggtgagcatccataacctaacaggcagagccctagcgatgtggatcaagtttcctgagcccgggggcggtggagcctcatgatctcttatcttttgaggctgaggcaggtcacatgcaacaaattgtgaccctgctccccacaagtcatgcaaaggttttgaagagcttttaccgtggtcagatgaacttgtgtcaaccatgcacaccctgtgagaaccaagtacctgtgtttctaaggcgggcactcaaggtgaggggtgcattctggccaaagaaacaaaagctgtggtttcaggaccatgccgtgtgtagctgatctgtacgggacgtgtatgtaaggaagagcaatcatgatagataagaacagtgtgtgaagcagccctcacactagagtgtttggtcatctcttataatgtaagggaaggtactttaaaattctgggaagatgcgatgaactcatgtcccagtcagaaaataatccaatgaaataagcattggttgccaggccacagttaggaattgtattgtgatacatctagaggccaagagagcaagagagagctaccaacttacactgtggtttaagctaaatgaccgcacagcatcatagca

SEQ ID NO: 55155 - DNA, 664 bp, Homo Sapiens
gcgtccggggacatcgggcgggggaagctgtaccatcagagcaaggggcccggagccccccagtatccagcgggaactcagggtgagcagctggaggtgccagagagactgctggtggttctggacatggaggagggaactctgggctacgctattgggggcacctacctggggccagcattccgcggactgaagggcaggaccctctatccggcagtaagcgctgtctggggccagtgccaggtccgcatccgctacctgggcgaaaggagagcggagccacactcccttctgcacctgagccgcctgtgtgtgcgccacaacctgggggatacccggctcggccaggtgtctgccctgcccttgccccctgccatgaagcgctacctgctctaccagtgagccctgtgataccacagactgtgctgaggtcttgccaccacccctccccttggggaggtggggaggcactgctggcctagaccagctgctgaaagctggtgaggctgagcccctaccccaacccaagctctgcggaaatcaacagccccagagccacttggagggaggaagaaagggagccggcgttcaaggctatgacagtctgctacgcaaaacattttttcaagtaaaaatagtaagagatgttgttataaaaaacaaa

SEQ ID NO: 55156 - DNA, 472 bp, Homo Sapiens
tgaatcctcctcctcctgaaccttaggattccttgtgaccatgttctgtgtgcattataaattttcctctaaactcaactatgataccgtcacctttgatgggctccacatctccctctgcgacttaaagaagcagattatggggagagagaagctgaaagctgccgactgcgacctgcagatcaccaatgcgcagacgaaagagggtaagggccgcttggtcttaagatatttggtggctggagagagatactagctagaagtgtgcctggcaggaagctaaccgccattatgtctctagtggggactgttcgttctagtactttggatacaactttcattgatagccaaggttttgcagcagttggccttggagtttcactggtttattttatttctgcatacttgggtcatctgtaacaggctaacccaaaacgtggaagcctgattattcttctcgctgtttatataa

SEQ ID NO: 55157 - DNA, 664 bp, Homo Sapiens
ggcggggccgctgcccagtgcaggtctgctcagaccacacatggtgcagctcctccggcggtgggggccgggttcaccagcagggcagcggctgagcaagggctttcagctcctccggtggtgggggccgggatcaccagcaccagagcctcgcaagggccccttccctcctccagaccctccttggccggtgacggctgtgacagtgatggcaggttcagtgccttcagcgcagagcgtggatgctctggaatcacccggacccctggccttggagggaccctccagccccaggaatctgctttggagggaaatgtctatttttctaccgggaatattttagagattggggcatgctggctcctcccgccagctgcaaacctgcaccttccgcctgattcccgatccccctgcgtgggccgcattcctggtcccctgcctgcgtccatcgaggggcctggctgtggcctgttttcctttgaccccacacagcgtcattgcgggtcatggggagcccctggtgggagcttgtggagtcggatcacgtacctgtgcagaaaccgctctgtggctgcatttgaaataaaacccgacccagcagcaagccgtggggtccgtgcctctgtgaataataacataaaaaatatacaattacacaaaaaag

SEQ ID NO: 55158 - DNA, 714 bp, Homo Sapiens
tgagcgtgaggtgtgggtgttcgtttctcaggtaaaacatggctaaaagcttacggagtaagtggaaaagaaagatgcgtgctgaaaagagaaaaaagaatgccccaaaggaggccagcaggcttaaaagtattctcaaactagacggtgatgttttaatgaaagatgttcaagagatagcaactgtggtggtacccaaacccaaacattgccaagagaaaatgcaatgtgaggtaaaagatgaaaaagatgacatgaaaatggagactgatattaagagaaacaaaaagactcttctagaccagcatggacagtacccaatatggatgaaccaaaggcaaagaaaaaggctgaaggcaaagcgagagaaaagaaaggggaaaagcaaagcaaaagcagtgaaagtggcaaagggtttggcctggtagactcttaaaaccttggaaaatgccacatgggatagatgacggattagaatgtatacacatgtatactttgatttcaactgccaccaaatgaaaaccatttgttttcctattttaacttggccttttttcttcaattcaaacccagcataactcctcaagtttgttttgggaacttgaataaaatattttctttgatacatccaagctctactgatactttaactggatgctacccaatatccagttataatcaggcctcaacgttctgtcaggtattaatatggtt

SEQ ID NO: 55159 - DNA, 1070 bp, Homo Sapiens
agggatataaaccgaaacttcgatgaaaatgaaattcctcaagagaatggcaatgcctcagtgatttcccagcagatcattcggtcttcaaccttcccacaaactgatgttctttcaagttcacttgaggcagaacacagattgttaaaggaaatgggctggcaggaagacagtgaaaatgatgaaacatgtgctcccttaactgaggatgaaatgagagaattccaagttattagtgaacagttacagaagaatggtctgagaaaaaatggtattttgaaaaatggcttgatctgtgacttcaagtttggaccgtggaagaacagcactttcaaacccacaactgagaatgatgacacagagacaagtagcagtgatacatcagatgacgacgatgtgtgaaggatttcctaacagctttagaaatcttagtgtgatacatctctcatacagtttggggtgaattgtaaaaatgaagaactataatttatgtagtgaaataccccattagaagaggatttttgggggacttcaatatgaagaaaaccaagaatgtgtcgttgggctgtgttgaacattatttctttgtaaatgaatgtgtaggaatgaggacttgggtcggtccaacattgactttcttcatcactgcaacatttctctgactagcaatgtgacgatgtacaaatgagatttctcatttactcatcaccaattggtgtactgttttgcaaagcttctgtcttaaatgtccaggtcttaagaaaaaggcaggttacactgcttagctggcgagtcctaatctgtccgcacaacggaaatcctcagatcacttggtgggacaccctatccttcccagaaaacacccgcgcagcacaaaccgaagggaaatgtgccgttgggcaaccgggacaaagggcaaacacgtcggaaaccgggagcataccttacacgaaagacttacccagagggcaagatatgcgaaaagggctgtccccaacgagggacacaatagggtgcacagacgatcgagagcacatatatacgcacaacacgtgccgcacatagaactg

SEQ ID NO: 55160 - DNA, 653 bp, Homo Sapiens
ggttttttatctctcagtacacattgccaaatggagtagattgtacattaaatgttttgtttctttacatttttatgttctgagttttgaaatagttttatgaaatttctttatttttcattgcatagactgttaatatgtatataatacaagactatatgaattggataatgagtatcagttttttattcctgagatttagaacttgatctactccctgagccagggttacatcatcttgtcattttagaagtaaccactcttgtctctctggctgggcacggtggctcatgcctgtaatcccagcactttgggaggccgaggcgggccgattgcttgaggtcaagtgtttgagaccagcctggccaacatggcgaaaccccatctactaaaaatacaaaaattagccaggcatggtggtgggtgcctgtaatcccagctacctgggaggctgaggcaggagaatcgcttgaacccggggggcagaggttgcagtgagctgagtttgcgccactgcactctagcctgggggagaaagtgaaactccctctcaaaaaaaagaccactctcagtatctctgatttctgaagatgtacaaaaaaatatagcttcatatatctggaatgagcactgagccataaaaggttttcagc

SEQ ID NO: 55161 - DNA, 827 bp, Homo Sapiens
cggttggaggaggtcggctggttatcgggagttggagggctgaggtcgggagggtggtgtgtacagagctctaggactcacgcaccaggccagtcgcgggttttgggccgaggcctgggttacaagcagcaagtgcgcggttggggccactgcgaggccgttttagaaaactgtttaaaacaaagagcaattgatggataaatcaggaatagattctcttgaccatgtgacatctgatgctgtggaacttgcaaatcgaagtgataactcttctgatagcagcttatttaaaactcagtgtatcccttactcacctaaaggggagaaaagaaaccccattcgaaaatttgttcgtacacctgaaagtgttcacgcaagtgattcatcaagtgactcatcttttgaaccaataccattgactataaaagctatttttgaaagattcaagaacaggaaaaagagatataaaaaaaagaaaaagaggaggtaccagccaacaggaagaccacggggaagaccagaaggaaggagaaatcctatatactcactaatagataagaagaaacaatttagaagcagaggatctggcttcccatttttagaatcagagaatgaaaaaaacgcaccttggagaaaaattttaacgtttgagcaagctgttgcaagaggattttttaactatattgaaaaactgaagtatgaacaccacctgaaagaatcattgaagcaaatgaatgttggtgaagatttagaaaatgaagattttgacagtcgtagatacaaatttttggatgatgatggatccatttctcctattgaggagtcaa

SEQ ID NO: 55162 - DNA, 554 bp, Homo Sapiens
cacgcgtccgctcctgattccgtctcctatttcttgcttggctacgccagttcccaaatctggtagatgtccatgcccatgtgctcctgctgggactcaattcaggctatgtatgactatgaagtcaggctcatctgcttactggctgtgtgaactttttgtatcttggttttcttcatccatgaaatccaagtaatactacctaattgttactgtggagattaagttcaaatgcaatgtatagtaatattaagcaatttctagttattattctagccagtaatggacttcagaatcttttattacacaatataagaatatgtatgtaaagacattttggaatttcctggatgagaaggaagtctgggctgggcatggtggctcacgcctgtaaccctagcactttaggaaatcgaggcgagtggatcacttaagctcaggagttcaaggccagcctgggcaacatggcaaaaccccatttctacaaaaaatacaaaaattagctgggcatggtggcacccgcctgtagtccagctacttgaggctgagatggg

SEQ ID NO: 55163 - DNA, 721 bp, Homo Sapiens
  misc_feature (8)..(8): n is a, c, g, or t
  misc_feature (686)..(686): n is a, c, g, or t
caaatttntttgtagatactgaactaagggctaatgtcaggagctgatttttaatgataaagctgcagatgggctaaataaaagccaaattaatcctacaatcaggtattatgtttttaaaccaagttgagtgaattgtagtggacttgggaaatcttccccagcagaatctggatgaatggcacagaattgaaatctctttgtttcccaccatttccctttaagtgctctgctcctttgtaaaaagttaaagatttgaaagagaatctcatattcccgaggcattaggaagaaaggatttaatcccttcaatttggggcttaatcttgtttaaaaaaatgtaagtgaagatggaaggctggagagaatgattgctttttgtacagttaaataaggtcacaatattcttacatactttgttttacaactgtgttttcattttttcaaatgtctggccatttagcaaagttatttactatttactgtgtacatagaaagctttattatgtgtggtgtatctaaattttttttgctgaaatacattatggtcaatcaagccaagcctgcatgtacagaatttgtttttttttcaaataaattagttgttttcttatttttttggcttagtatgttgaaataaactatggtatcttcatcattttgtacatttcctttttgaggaaggnttctttataagtgcaagggctaccctaataaagga

SEQ ID NO: 55164 - DNA, 707 bp, Homo Sapiens
  misc_feature (686)..(686): n is a, c, g, or t
attgatattacattttaataatgcttttgtatggcactttatagttttcagacaccttttgtaacagccctgtgagacagacaatattatccttattgtacagatgggggtgctctggaggctctgaaaagtttttggtgatattcccctaagtttataccacaaaatgatggagccagaatttagttgcagaacttctgactccaagtccagagttctttactagacatctggtttcttactagctttttgctagctttttattttacagtgaaaagtatggaagcaaatcctgataattttggcttattatcaaatatcatttattttttattgcagagacccagcagatgtaactctcattgtagccatcccaaagaaaacccttctttgccctttgcagtgccacttatttaggtaactgaagtgtatttccagtacaatttgattttgaactaagatttgatatagagttgtaattgcttacataactctttgaaaatgtatcatccctgggttctcaggtgaaggaggcaattcaaaagtaaaaaagaatattcgaatacaataaataccctctgttctcacacaaatgctgtttcttagctaacttgctttgacaacctactgatgtaacttctttattaatgtgaaatatttatattttgaaataaaattactagtgntgaatgaaaaaaaaaaaaaaa

SEQ ID NO: 55165 - DNA, 661 bp, Homo Sapiens
  misc_feature (441)..(441): n is a, c, g, or t
gccggtcgcaagtccaatgagaagcaaggaaaagagtgaaaagccacagaaacgccccttgactccttttcaccatcgtgtgtctgttagtgatgatgtggcatggacgcagattcagccaggcaaagacttgtgatctctgctccagacagtcaagtgagattttcaaatatccgaactaatgatgtagcaaagactcctcagatgcatggcaccgaaatggcaaattcacctcaaccacccccacttagtcctcacccttgtgatgtggttgatgaaggagtgactaaaacaccttcaactcctcagagtcaacatttttatcaaatgccaacaccagatcccttggttccttctaaaccaatggaagataggatagacagtttgtcccagtctttcccacctcaatatcaggaagctgtagaacctacagtatatgtnggtgcagcagtaaacttggaagaagatgaagccaatatagcctggaagtattacaagttcccaaggaaaaaaaatgtagagtttttaccacctcaacttccaagtgataaattcagggatgatccagttggaccttttggacaggacagtgtaacatcagttacagagttaatggtgcactgtaagaaacctttaaaagttctgatgaatagtgcgcata

SEQ ID NO: 55166 - DNA, 546 bp, Homo Sapiens
atagaatcagtgcatgaaagtgttttagtagcccagattagattgtaccctggcgaataagcaagagttctttttcattttcatcttgcaattcaactgggtatttgggttctttttctattcactcatgtcagatagagacatgcatgttgtaaattattttgtcagaatgaaagcctggcagattaaatgctttcttctcttcttgctttacttgatatcaatctcttgttcatttcttgataatatgtttggttatttttgttttcattgcttttagtgtcagaggtggctttggattccccattctgtgtgctgctgtctggctcctgaacccacctgtagaggtgtgtcaatcccagctggtgaagtactgagaagaagctacacaaaaggcatcaaagtattagtaagtgtacctctgacattttaaccacctctgacttttccatggaatggacaagtagtagtctctgtcagagctacattttaaaggagaaaaagaaacgtgaagtcatgaactggttatttatgctggtatttttg

SEQ ID NO: 55167 - DNA, 962 bp, Homo Sapiens
ggtggcaattcggacgaggaacctttatgtcatctcccaatgctctcagctcgcttcagtggcaacttgctggtcagcctgctgggcacctggtcggacacgtcttctgggggcccagcacgtgcttatccagttggtggcctttgctattacctgtcccctccagaatcttttggctccgtgttagaagacccggtccatgcagttgtatacatagtgttcatgctgggctcctgtgcattcttctccaaaacgtggattgaggtctcaggttcctctgccaaagatgttgcaaagcagctgaaggagcagcagatggtgatgagaggccaccgagagacctccatggtccatgaactcaaccggtacatccccacagccgcggcctttggtgggctgtgcatcggggccctctcggtcctggctgacttcctaggcgccattgggtctggaaccgggatcctgctcgcagtcacaatcatctaccagtactttgagatcttcgttaaggagcaaagcgaggttggcagcatgggggccctgctcttctgagcccgtctcccggacaggttgaggaagctgctccagaagcgcctcggaaggggagctctcatcatggcgcgtgctgctgcggcatatggacttttaataatgtttttgaatttcgtattctttcattccactgtgtaaagtgctagacattttccaatttaaaattttgctttttatcctggcactggcaaaaagaactgtgaaagtgaaattttattcagccgactgcccaaaaagtgggaaatgggaataggattgtcccccagtgtccatggtaacttttgttttaacctttgcaccttctcagtggctgtatggcggctgcaaccggcctcacctgttttccccccaaaggggatttctccacctcttggttggaaacaccaacacctgaaggggctaccttttcc

SEQ ID NO: 55168 - DNA, 656 bp, Homo Sapiens
  misc_feature (653)..(653): n is a, c, g, or t
tctccaaaggcagcgttctttgaatgatattattttaagtctggtctccggaagaaagtgaacgcagtgaaagaggccatcgtgaactttgtcaaccagaagctggaccgcctgggcctgtctgtgcagaatctggacacccagtttgcagatggggtcatcttactcttgctgattggacaacttgaaggcttcttcctgcacttaaaggaattctacctcactcccaactctcctgcagaaatgctgcacaacgtcaccctggcgctggagctgctgaaggacgagggcctgctcagctgccctgtcagccctgaagatatcgtgaacaaggatgccaagagcacactgcgggtgctctatggtctgttctgcaagcacacgcagaaggcacacagggacaggacgccccatggagccccgaattgaccctcactgcctccaaagcccagagcctgcctgtcagcccagctggagggcccgaggctgcagggtgtcctcccacagtcccgctgtttcctgtgcattcgtgacccgcttccctcccaccctgtctcctgtctccatcgttggattatctgtgaacccccttgtgtggatcattttgagccgcctggccttgctcagtttattttaataaaagtattctgggnggg

SEQ ID NO: 55169 - DNA, 677 bp, Homo Sapiens
cgtccggagcaggtcaccaaggccgaggccgagctgggcaccttccccagggcgttcaagaagctcctgcacacgatgaacgtgccctcgctctttagcaagtctgctccctcgaggccacagcaagccggctacgaagcccccgtcctgtttcggaccgaagactacttcccttgttgcagtgaaaggcctcagctctgacggcctgaccactgcggcaagaggaccccagctggggtgcttacctccagtatgaagtgaattgcaaatcctgcttatggacatatatgatgttggagtgtgggattttaaagtttactttctacaaactctccgtagtatattcatgattcagtgtagaatgtatagactttatgtcttccaagtttaaaaaaagagacagggtcttggtatgttgcccagactgttcggaaactcctgggctcaagtgatccttccacctcagcctccccagtagctgggactacggggtcgccactgcacccagcctgtgtcttccagctctaatcagaaagctgcttgtcgagggcatggggaatcaaactgaatgaacttttctctgcactgtggcaaaactgttatttttatggattttactaaatggcgttaccttttcaagatttatatgtttgtataatcataagaaaattgagcca

SEQ ID NO: 55170 - DNA, 709 bp, Homo Sapiens
  misc_feature (675)..(691): n is a, c, g, or t
  misc_feature (693)..(704): n is a, c, g, or t
ggagatccagccaggggcttccctaaagcagtgcagcaccggcccagggcatcactagacaggccctaattaagttttttttaaaaagcctgtgtatttattttagaatcatgtttttctgtatattaacttgggggatatcgttaatatttaggatataagatttgaggtcagccatcttcaaaaaagaaaaaaaaattgactcaagaaagtacaagtaaactatacacctttttttcataagttttaggaactgtagtaatgtggcttagaaagtataatggcctaaatgttttcaaaatgtaagttcctgtggagaagaattgtttatattgcaaacggggggactgaggggaacctgtaggtttaaaacagtatgtttgtcagccaactgatttaaaaggcctttaactgttttggttgttgttttttttttaagccactctccccttcctatgaggaagaattgagaggggcacctatttctgtaaaatccccaaattggtgttgatgattttgagcttgaatgttttcatacctgattaaaacttggtttattctaatttctgtatcatatcatctgaggtttacgtggtaactagtcttataacatggatgtatcttttttttgttgttcatctaaagctttttaatccaataaatacagagtttgcnnnnnnnnnnnnnnnnnannnnnnnnnnnncatgt

SEQ ID NO: 55171 - DNA, 746 bp, Homo Sapiens
  misc_feature (722)..(741): n is a, c, g, or t
caaacagggaagaaggttgggacctggtgcctgtgccgccctggctgccttgctgggcccttctgggactgtgcgctggacttggagccccttggagtatggcttttcacacgggcttctataccgcttcgactggaagatccacctccccactgccttttctcactcagatggggacaccgaggtccagaggaaaagacacctgtcaaatgtcacagatctgggaggggacttaagacttaccatgccaagaggacacctgtctactcagttttttttttggtggggtggggggcggtgatagggtctcgctctgtcaccaggctggagtacagtgatgactgctcactgcagcctccacctcctgggctcaaagtgatcctccaacgtcagcctctcgagtagctaggactacaggcacatgccaccaccaagcccagctatttttaaaatttttgtgtggagacaaggtctcactatgtggcccaggctggtctcgaactcctgggctcaagtgatcctcctgcctcggcctccaggagtgggagttggagttgatgcctggatacaggagctctgtgggtgggagtgagacaaaacacagggtcctgagctctggggaccaagcaatgtcctctggtgaaaaaaatcctggacttgctggcagaagatttgcctcttactcgccatgtgctctgaatacatttacctgccctcaaaannnnnnnnnnnnnnnnnnnnaaaag

SEQ ID NO: 55172 - DNA, 778 bp, Homo Sapiens
cacgcgtcccgtaagctgtggaagaatgtgacccttactctggcctcttgcttgatactgaggagaacaactctgacaaccacaatcatgaggatgatgtgttggggtttcccagcaatcaggacttgtattggtcagaggacgatcaagagctcataatcccatgccttgcgctggtgagagcatccaaagcctgcctgaagaaaattcggatgttagtggcagagaatgggaagaaggatcaggtggcacagctggatgacattgtggatatttctgatgaaatcagccctagtgtggatgatttggctctgagcatatatccacctatgtgtcacctgaccgtgcgaatcaattctgcgaaacttgtatctgttttaaagaaggcacttgaaattacaaaagcaagtcatgtgacccctcagccagaagatagttggatccctttacttattaatgccattgatcattgcatgaatagaatcaaggagctcactcagagtgaacttgaattatgacttttcaggctcatttgtactctcttcccctctcatcgtcatggtcaggctctgatacctgcttttaaaatggagctagaatgcttgctggattgaaagggagtgcctatctatatttagcaagagacactattaccaaagattgttggttaggccagattgacacctatttataaaccatatgcgtatatttttctgtgctatatatgaaaaataattgcatgatttctcattcctgagtcatttctcagagattccta

SEQ ID NO: 55173 - DNA, 501 bp, Homo Sapiens
aagtaaggcacaaccccagacccagacccagcaactggaaggaacggatgggcctctagtgacagatccagagacacacaagagcaccaaagcagctcatcccactgatgacaccacgacgctctctgagagaccatccccaagcacagacgtccagacagacccccagaccctcaagccatctggttttcatgaggatgaccccttcttctatgatgaacacaccctccggaaacgggggctgttggtcgcagctgtgctgttcatcacaggcatcatcatcctcaccagtggcaagtgcaggcagctgtcccggttatgccggaatcattgcaggtgagtccatcagaaacaggagctgacaacccgctgggcacccgaagaccaagccccctgccagctcaccgtgcccagcctcctgcatcccctcgaagagcctggccagagagggaagacacagatgatgaagctggagccagggtctggggttgtgccttactt

SEQ ID NO: 55174 - DNA, 778 bp, Homo Sapiens
  misc_feature (562)..(609): n is a, c, g, or t
  misc_feature (612)..(619): n is a, c, g, or t
  misc_feature (621)..(642): n is a, c, g, or t
ggtgctgaaaaagtattagcctaccaaagacacactcaggctttagtgaataactttacataacctcagtttttaacacatgcatatcttctccaaccatgaaatcaaagcacggtgcagaacttgtaccaagtacaaaaggtccatgtatgattagcattattttcttttgcttttgtttatggacaatgttcagctgacataagcagaagttggccaaaatactgcctgtactgttaatttcctgtataattcacttaaataaaagcaggttaacctcaatgatagcagttaaaatgttctatcttatgtatttcttttaagtattaccattatggtgctactgagcgttttcttttggtaaaaagaaaaatgccatgggctgcagtcttcttccatcacttttccctaccaggtccattaatatgcttataacactagtgccagttattttatttgataatgcttatggtatttgtatatttgtttgcattccaattttgtttaataatgagtgtgtaaactgcatacgttaaataaatgtaaatactaatgtaaaaannnnnnnnnnnnnnnnnnnnnnnnnnnnnnnnnnnnnnnnnnnnnnnnttnnnnnnnnannnnnnnnnnnnnnnnnnnnnnctgggccggccgccctcggcccctcaaaaaaatttttttaaaaacattcggtttggggcggcggggccccgaaagggaaggggaaacttgggcccaaagcgtgttttcccaaagaaaaacccggggcaatagacaa

SEQ ID NO: 55175 - DNA, 677 bp, Homo Sapiens
gggatgagaggcgaaagcacttctcatacaagcccctttattgccactaccccacgctcgtctagtcctgaaactgcaggaccagtttctctgccaaggggaggagttggagagcacagttgccccgttgtgtgagggcagtagtaggcatctggaatgctccagtttgatctcccttctgccacccctacctcacccctagtcactcatatcggagcctggactggcctccaggatgaggatgggggtggcaatgacaccctgcaggggaaaggactgccccccatgcaccattgcagggaggatgccgccaccatgagctaggtggagtaactggtttttcttgggtggctgatgacatggatgcagcacagactcagccttggcctggagcacatgcttactggtggcctcagtttaccttccccagatcctagattctggatgtgaggaagagatccctcttcagaaggggcctggccttctgagcagcagattagttccaaagcaggtggcccccgaacccaagcctcacttttctgtgccttcctgagggggttgggccggggaggaaacccaaccctctcctgtgtgttctgttatctcttgatgagatcattgcaccatgtcagacttttgtatatgccttgaaaataaatgaaagtgagaatcctcta

SEQ ID NO: 55176 - DNA, 582 bp, Homo Sapiens
accattgtgatggcgtatattctcaaatggtaatatcttgcaatggcacacagatttaatggataaaggtatacctcagacttcactgtgctcacaaatctttgaggagaaagtttggtcacctgtttggcttgatttagttactgctgcctttggttttctccaggaatgaagtattcagcacagtgactcagtatttttagttattttgcatgggctggtagtacctctgttatgctctcagttacaatcaatttaaaactgtataacagtcttggtacctaacagtagctatgcataatcctgtggcacagtacactcccaagccaccaatgcagttaatatgctctcatagtggtttttctatgctatatgaaaatagtcttcaagccttggttctctaatgcagctaccacaagaggttgatatttttatagtggcgtgtaatctccttttcgggaggctttttatggaaggtagaatttgtaaaagttcgtatgctttgcctctcaactgcattaacatgccacaggctcagactgtttttgtgtaaaggatgtcaaagaacggcactttttctaa

SEQ ID NO: 55177 - DNA, 815 bp, Homo Sapiens
aaatgacccacagtgaacttatggaaaagttcttaacagattatttaaatgacctccagggtcgcaatgatgatgacgccagtggcacttgggacttctatggcagctctgtttgtgaaccagatgatgaaagtggctatgatgttttagccaaccccccaggaccagaagaccaggatgatgatgacgatgcctatagcgatgtgtttgaatttgaattttcagagacccccctcttaccgtgttataacatccaagtatctgtggctcaggggccacgaaactggctactgctttcggatgtccttaagaaattgaaaatgtcctcccgcatatttcgctgcaattttccaaacgtggaaattgtcaccattgcagaggcagaattttatcggcaggtttctgcaagtctcttgttctcttgctccaaagacctggaagccttcaaccctgaaagtaaggagctgttagatctggtggaattcacgaacgaaattcagactctgctgggctcctctgtagagtggctccaccccagtgatctggcctcagacaactactggtgagcaagctggacccaccatgtacagtgtgttatagtgttaatccttgtgcatatgtgtcataatacaactatttctgtaaagaaaggacactattacatatgaaaatatctcttctttatataagagaaattactccagtcagaaggacttagaaacatgtttttttccttttaaacttttaagtcagtttttatgaagttgttataatgtttctttacttttcaatgcacacatgctttgggatacgtt

SEQ ID NO: 55178 - DNA, 716 bp, Homo Sapiens
ttttttttttttgaatgtgtggaagtaattttagtataattagattttttccatatttttgaaagatttttcagatgtgaacattaaaaatagggattaaatgtctaggcttccatttaaaattatatgaatggtttgggatctttttgcactgagcaattttatttcaggcttccagctgtccctgtgagttatcctggacatttcgatggtttttggtaaggccaaactctgataagcaaaacagagaatactgacgtatacttaaccatatgtgtaactgatacttggcaccatggaatttttcattgagttatttcctcattcttttaaaaaataagggactataaatcagttatttagtatcttttgtttttgtagctgattccttaactttcttgtatgcctctagtaatttcagagattaaatattgctttaaactgtgatactttgatttgctagattgacaaaactgatactaatataattaagttcatctttgaaatacatctttgtgcgtagagccaaaaaaagagataaaattaataatagttcacttgttatttgagattaatttggcatttgaaatgatcattttattttacaatcatttataatgaatcaatgttccagttagctttaaaaggtatacggtgctaattagtaaaatattgaaggcactattttactgctagcttgcacagttatgagagtt

SEQ ID NO: 55179 - DNA, 699 bp, Homo Sapiens
gaagaggaaaaccgaataccccaacccccacccatcgcccacccgaggacgtccccccagccggagtcgggcatcaagcgactgtttagcttcttctcccgagataagaagcgcctggccaacacacagagaaacgtgcacatccaggagtcctttggacagtgggcaaacacccaccgcgatgacggttacacagagcaaggacaggaagccctgcagcatctgtgaccttggcccatctccaccctccaacctggactgcccgccaccagcgcctgcaaccgaactgcagcccaggggtcattgctgcctcaagcctctcggtgcagatgcaccctgaaaactgacccctcaaacagactgtctgatttgaggatggacattgaaaaactgacgccaaactctaaagaaatgtttatttatacccagggctatcactgtttctaatagatgactctgatcccgtaggatatatatttaataatcccacaaacggaggccagacttctgcgttaacttcagtaacacaagcttctttaagccaaatacatcacttgccactatcattgctgtttgacttgctttgtataaaatgctatgtggtagaggttttattatcacaggtgacatagttcagcaggaggcatggaagggctagatcttcattagttacattcatgaaattgtgatggtaacgta

SEQ ID NO: 55180 - DNA, 960 bp, Homo Sapiens
ctggtaaaccggtccggaattcctccggatcaaaatgaagaaatccgagcagttggcagactaaaaagagagcggtctatgagtgaaaatgctgttcgccaaaatggacagctggtcagaaatgattctcttgtgacaccatcgccacaacaggctcgggtctgtcctccccatatgttacctgaagatggagctaatctttcctctgctcgtggcattttgtcgcttatccagtcttctactcgtagggcataccagcagatcttggatgtgctggatgaaaatcgcagacctgtgttgcgtggtgggtctgctgccgccacttctaatcctcatcatgacaacgtcaggtatggcatttcaaatatagatacaaccattgaaggaacgtcagatgacctgactgttgtagatgcagcttcactaagacgacagataatcaaactaaatagacgtctacaacttctggaagaggagaacaaagaacgtgctaaaagagaaatggtcatgtattcaattactgtagctttctggctgcttaatagctggctctggtttcgccgctagaggtaacatcagccctcaaaaatactgtctcaacagctggaaatataaaagattttgcaaacttctttgtttctgtctctgcattgtatgccatttttatagtccacaccctggaaatgtatttcttccagaaagtctgggagaaggacctatatttgtagaaataaaaggtatattctgtcactcagctgtattcacgtcctgagcagttctgccaataacaccttgcttaaaaattcttcctttttgcatgtttttgtaaaataggcctcccagtttttgttttttttaaaaaaggaaattttattttttttggccctcattcaggtcccccccccaaacttgaatttccggaaatgggggaaaaaaaaatcccggttaaaaaaaaattta

SEQ ID NO: 55181 - DNA, 1022 bp, Homo Sapiens
  misc_feature (982)..(982): n is a, c, g, or t
caacagtgattctatagaaagggatgctgctcaggaagctgaggctgggacagggctggaacctgggagcaactctggccaatgctctgtgcccctaaagaagggaaaagatgcacctatcaaaaaggaatccctgggccactggagtcaaggcttgaagatttctatgcaggaccccaaaatgcaggtttacaaagatgagcaggtggtggtgataaaggataaatacccaaaggcccgttaccattggctggtcttaccgtggacctccatttccagtctgaaggctgtggccagggaacaccttgaactccttaagcatatgcacactgtgggggaaaaggtgattgtagattttgctgggtccagcaaactccgcttccgattgggctaccacgccattccgagtatgagccatgtacatcttcatgtgatcagccaggattttgattctccttgccttaaaaacaaaaaacattggaattctttcaatacagaatacttcctagaatcacaagctgtgatcgagatggtacaagaggctggtagagtaactgtccgagatgggatgcctgagctcttgaagctgccccttcgttgtcatgagtgccagcagctgctgccttccattcctcagctgaaagaacatctcaggaagcactggacacagtgattctgcagagcctgagctgctgctgtggtgtggcccactggagcaaactgctggcacctattctgggttgcttgtgaacttctactcatttcctaaattaaaacatgcaggctttttcacaaatttattctattattgagtggcccacaatgtagaagtggctcaaagtaacttcaggattaggaaatttgggttttggtcataaaatggattcctccgggttgaaggggtggcctggggaatataacctgaaccccacccatcctttcaaaagggaccccatggtccaaggtcctggaaccacttggngggaagccaaaagcccttggtttcaccccctgggaacctc

SEQ ID NO: 55182 - DNA, 670 bp, Homo Sapiens
cagcaagcccccctcccacgacagggctgctccgggagcttcggagacccgccccgggcctgagcgcaggctgcctccgggaccccacggctgtccggacgtgccatgggcgcgcagctgccgggcaacgtgttgtgtaagtgaacatctgggaggtaaacactacacgtgaagagtggtgaaagggaacattgattactgaagtgccctggagagggaaagcactggtcaacatcacatggacaaatttcattgttttctaaagatggcctggaagtagtctttgccactgcttcctccacaaacagctcttcataacatgggctgcatgaaatcaaagcaaactttcccatttcctaccatatatgaaggtgagaagcagcatgagagtgaagaaccctttatgccagaagagagatgtctacctaggatggcttctccagttaatgtcaaagaggaagtgaaggaacctccagggaccaatattgtgatcttggaatatgcacaccgcctgtctcaggatatcttgtgtagatgccttgcagcaatgggcatgcaaataacatcaagtaccatgacattccatacattgagagtgaggggccttgaggctgtaggatgacaacactttgactgtggaggtgctagtttgaataaatgtgaccaaagc

SEQ ID NO: 55183 - DNA, 974 bp, Homo Sapiens
ctctgaagtctgggcttcagtttgctcagccatctgctttgctgtgtgagttcagctatcatctatctgtagcaacaggaaagtaatgagggcgacagtagggcacttgctttgattccctctttcccatgccctgtcttaatatacttctctgcagctgctttcctgcagcttaacttgctctcagattgagcactttcaagctttttgtgtatttctgtctttggcaggatttggcataggaattggtgcatggaggagaggagtgtatgataaaggatccatgcagtccttcctttattacacatatagtctggcttgctgtggaccaaattaatattctcctcccatcagactacaaaaaaattggactaccacgctacaagtgtgtctcccccattccacctcctgatccctccccaaccctccagtgtttgaatactgctgtgttacttccaggccgttcaacgtcaggctcagtcccctctaccagtcatgattcacattactactaggctgtatcctttttgaggctgggaaacagtcaggctttcgtcattggaagtgattctgcagacttctgactcaccttatcaggtgactctggttaaggaaagcttttgagtggtgaactcaaagactccagttgaatcaggaggcaaaggcaaaaattagcataattatatttaaaagcctcaagaagtgggaagagaatactgcctcccagcctcaattgctgatatgttattggagamaggcttttgaaactgctccagctatttctctgtaacctttagttaaaatataagtagaaaggagacaggaggctcaggaaattttctaaattgctagtataatatctatatgtatacacacatatacacccgtggagagagaggragagtatacagtyctgtttgaatcatttggaggattttkttgctgaataaagttctcaagaaaattttctaaaa

SEQ ID NO: 55184 - DNA, 694 bp, Homo Sapiens
ctatgttttgctatcagccaaagtaaatgtgttcacactaacatataagttactaaccttcattatacagcaaagctaaaaagtggtgggatatttggggtcttaatgaaaattgtatcatttaattccataaatattaaaatatttgggtaccttttaagctttttttctttccttctataatggtggtacaagttctatattcattcagtttaatctcatttgaaattgtttaaatcagagtacatgtaaatatttgtgggtttttttttttggtttatagactcgagctttccttttacacagttttttttagggaaaaactaaagctattaggaaattctaaatcttgttgatgaagagttgggctttctttgatataattaataaaagggatgtatggtatttatggctgggtaggaccagaaatgcactttgtattacagagtgttaaggctggttgctatagtatggaacagaaacacctctccttggtctccctagtaatggttcaagttcttcccaggaagtcttacatattataactttgttcattatctttcccttatagcatcattttcctttttgtagagtggaaatcagactagctgctaaacatattaaggttaatcctccagaaatgtactggggaggcattttagtcacaacaacttacatttggctttggaagttg

SEQ ID NO: 55185 - DNA, 807 bp, Homo Sapiens
cacttttcccccacaacaagccttgtttgttccgataggaatacgtgtacgtcagtgcacttgtccttacgtcagtcccttacaccaccaaagcacttcacctttctggaaataaaacttttaagacactactataagtaaaaatgagagtattcactagacttattgctcaggcacatttgagtgggtcccagctgtgtgattaagaagtcaactgggtggccttttctgggttatcttctgatcatggcctttcaacccaacaagggcccttccctgctcttccaccagtaaaggctcctggcctctcatcaggatctgccccccagagaccccccagacactgcagggcctggtgatgctgtcctctgtaccggaaatggcaggcactgtcagatttccactcttctgcctttaggaaggctgggtgcttcttgctctgacagccagtttggggagatgactcttacgttgcttgagttttggtggcaggctgctgttcacgggggagaagtctctgctctggactggacagaagagagacttttaccctggggcactcacacggccaagcttctgccaccacttcattagctgtattctccatagtatggtgaaatagcaggtgcgtcttctagtttattcctcctggggacatttcctcaaagcagtmttgcgcccccgcaaggaaatggtcagcctaagggtaatgtacagcccgtgcttggagaaccatggaagctacacccctacaggtgcatactgttctgcttttccaataaatacgagcggcgatttcaaccacaa

SEQ ID NO: 55186 - DNA, 519 bp, Homo Sapiens
  misc_feature (483)..(483): n is a, c, g, or t
gaattgtcatctgaaccatttctataacaatggcatcttaaatgggggtcatcagaatgtatttcctaatcatattagtgtgggaacaaatcgaaagagatgcttggaagactcagaagactttggagtaaagaaagctagaactgaaggtgagaccgctttgcgggtgggaagagcacacttatttttcctttctgtaatatgttttctttttatggctgagcgcaccttcgagatgagaccttcacttcaggtggtaatgcgcctggtggattgtgcggtgacggtggagatttctcctgtactgccactgcgaagatgggacacttaacaaaagggaatgtgagggaaatactgatggcccaagtgtaaatgtctatgtggaactttttgagcacccatgtttacctgccgtgaattagattttttaatttgttgtatctgtttgaaatatatctattaaagaaaatctgccactgtganaaaaaaaaaaaaaaaaaaaaaaaaaaaaaaaaaaaa

SEQ ID NO: 55187 - DNA, 1258 bp, Homo Sapiens
actcctggtgttgcatccctccagacactctgctgtttcctgcctaggcgtggctgcagccatggctaggaaagcgctgccacccacccacctgggccagagctggttctgctcctgctgcagggacactgagctggctatctcggcgcttcgggcaagaactgcaacaggctctcctgggtcctgcaggtgtacagccgggcccctgccttgtgcctcagctctcgagagctgctgctgccgggtgacctgatccaaccggataaggtgccatcttcagctaccactgcaaggccctgagggcaacagcagcacggcactgcccacccagctgctgatggcctggtgccagctgggagtcctcccggcacttcgaggccactgagccacccttccagccccagcccaccatggacaggggtatccagcttcctcctcaacctcgtcctctgcccctgagccagtgacgcccaaggacatgcctgttacccaggtcctgtaccagcactagctggtcaagggcatgacagtgctggaggccgtcttggagatccaggccatcactggcagcaggctgctctccatggtgccagggcccgccaggccaccaggctcatgctgggacccaacccagtgcacaaggacttggctgctgagccacacacccaggagaaggtggataagtgggctaccaagggcttcctgcaggctaggggaggagccacccccgcttccctattgtgaccaggcctatggggaggagctgtccatacgccaccgtgagacctgggcctggctctcaaggacagacaccgcctggcctggtgctccaggggtgaagcaggccagaatcctgggggagctgctcctggtttgagctgcattcaggaagtgcgggacatggtaggggaggcaaaaagccttgggcactaccctccctgtggagctgttcggtgtccgtcgagctagccacaccctgacaccatgttcaagggtaccggaagagaagggtgtctgcccccaacctcccctgtgggtgtcactggccagatgtcatgagggaagcaggccttgtgagtggacactgaccatgagtccctggggggagtgatcccccaggcatcgtgtgccatgttgcacttctgcccaggcagcagggtgggtgggtaccgtgggtgcccacccctccaccacatggggccccaaagcactgcaggccaagcagggcaaccccacacccttgacataaaagcatctt

SEQ ID NO: 55188 - DNA, 769 bp, Homo Sapiens
  misc_feature (651)..(651): n is a, c, g, or t
  misc_feature (731)..(731): n is a, c, g, or t
  misc_feature (734)..(735): n is a, c, g, or t
  misc_feature (739)..(739): n is a, c, g, or t
accgttccttcagagttgatacagcgaagctccagcacagactgaaaaggacttctcagagaagcattcgaccctggtgaatggtgcctataagaccctcctggcccccctgagcagaggactgtaccttctaaagctccatggaatagagattcctgaaaggacagattatgaaatggacaggcaattcctcatagaaataatggaaatcaatgaaaaactcgcagaagctgaaagtgaagctgccatgaaagagattgaatccattgtcaaagctaaacagaaagaatttactgacaatgtgagcagtgcttttgaacaagatgactttgaagaagccaaggaaattttgacaaagatgagatacttttcaaatatagaagaaaagatcaagttaaagaagattcccctttaattgtggatagtttaaagtttaaaaaataaagttcttgctgggcacagtggctcacacctgtaatcccagcactttgggaggctgaggtgggtggatgacaaggtcaggagttcaagaccagcttggccaacatagtgaaaccccgtctctgctgaaaatacaaaaattagccgggcatggtggcgcgtgcctgtaatcccagctacttggtaggccgaggcaggagaatcgcttanacccgtgaggtggaggttgcagtgagcagagatcacgcaactgcactccagcttgggcaacagagtgagacttaatcttngannatanataaatgggaaaataaaaaaaaaaaaaaaa

SEQ ID NO: 55189 - DNA, 922 bp, Homo Sapiens
  misc_feature (818)..(818): n is a, c, g, or t
cactgtatgttgacttccctctgggaagcaaaattccacttgtaaaaatcagcttccaagacaaaagatgatccgatgtcacttctgggtcaccaggaagggacacaggatctctctgaactttggaacagaccctcatattctggggccagaagtttgcccagaaagcagcaggtggctctgcctggctgtagagcccagctcattggctgtccctgggcttcgtctccctcttccgagtagttgctgcctttcttcagatcaggttaccacgatgcctccccgctgctgacgcttcatcccccacacctccagccccagttacctggagcttctcagaacccactttgccggtgctaaaacacaagagggggtgaaagtggctgccagtaatggccagaaaccaaccaccagaggccaggctgaaagacaagctccgggtgtccaggggctgacgggccaaccatgtggcaggtcccaggccccacccactgcgccatccgcctctgagctccacagtggtcccactaatgggaacctcctctagggagagtgatactgcaccttcacccgtaggactcatatttataacaatgtgtaatggctgtagcaaaaagcccttgtttctagatgtaaatggtcaaagaaacaagcgctctattgttttgaataaaatagttcaaatgagtcctgtatcattgtatctcctattctggattagtgcctttttggacagtagactgttctgtaattaaaaatgtagtatactgctttttttggacagttttgtttttaataaaactttttttttaatttgngggttatttttagaattggaacctattaaggagaattaaaatgtgataaactgaaaaaaaaaaaaaaaaaaaggcgcgggccgcctctagaaagtattcccctc

SEQ ID NO: 55190 - DNA, 724 bp, Homo Sapiens
ttttttttttttttttttgagtctgggtgacagagcgagacccagactcaaaaaataaaaataaaaaccctgaatatcttccttctacttcttcagtgctgtttttatttaaaaaaaaaaaaaaaccagccaaaaccacaactttttactgaagtgtaatgtaaatgctgtaaaaggcagtgaaaggcacaagggaggtggaggggtaggaagggtggaagtggcgggaggaagtggcagggcaggcaaaatgaagggaagccctgggttcttgtcctgcatccgcagccagctcccactttcctcaccctccaggacctgtaaactgtgaggctggaccagttatgtcaaatctgtcctcccccagagctcagtccctctgcccttgggtgtccttggcacaaggcaggctaggctgcaccagcttcctccatctccgtcctgcctcccccatccccaggtgccattcccacaccatctgaatcactgatttcctcgcaatcagacgctatcttccagttaatcacttcgcttgtatttaacataagaaagaaaaaccctttcattatcacatacagctggaaatcggcttcttgcaggaggcgtatccaaaggaattggagaagagataaactggtaattggtgaaagaatactttaattttttttcctacttgctgtcatgatgatgtccttagaattgtgagcccgtggacacttctgta

SEQ ID NO: 55191 - DNA, 420 bp, Homo Sapiens
  misc_feature (354)..(360): n is a, c, g, or t
  misc_feature (362)..(367): n is a, c, g, or t
  misc_feature (369)..(370): n is a, c, g, or t
  misc_feature (372)..(373): n is a, c, g, or t
  misc_feature (377)..(377): n is a, c, g, or t
  misc_feature (412)..(412): n is a, c, g, or t
  misc_feature (414)..(414): n is a, c, g, or t
ggaagtgggtacttaataaatgagtcgttatactatgcataaagaaaaatcctagcagtattgtcaggtggtggtgcgccggcattgattttagggcagataaaagaattctgtgtgagagctttatgtttctcttttaattcagagtttttccaaggtctacttttgagttgcaaacttgactttgaaatattcctgttggtcatgatcaaggatatttgaaatcactactgtgttttgctgcgtatctggggcgggggcaggttggggggcacaaagttaacatattcttggttaaccatggttaaatatgctattttaataaaatattgaaactcaccagtcatggacaannnnnnnannnnnnannannaaanaaaaaaggaaaaaaaaaaaaaaaaaaaaaaaaaananccttgt

SEQ ID NO: 55192 - DNA, 716 bp, Homo Sapiens
  misc_feature (531)..(531): n is a, c, g, or t
cacatttacatgaccgtaatttcttatcaattctacttttatttttgcttacagaaaaacggggggagaattaagccaaagaagtatatttatgaatcagcaaatgtggtgcttgattatagaaatttgtgatcctatatacaatataggacttttaaagttgtgacattctggctttttcttttaatgaatactttttagtttgtatttgactttatttcctttattcaaatcatttttaaaaacttacattttgaacaaacactcttaactcctaattgttctttgacacgtagtaattctgtgacatactttttttttcttatagcaatacactgtaatatcagaaatggttggcctgagcaacctagtaagacctcgtctctactaataattaaaaaactagctggcatggtagcacacacctgtagtcccagatacttgggaggccaaggcaggaggattgcttgagacctagcaatcagtcagggctgcagtgagccatgatggcaccactgcactctagcctgngcaagagaacaagatcctgtctcaaaaaacaaaaaaaagaaagaattgatagtacaaaatccaacaacaatactgagatgatctaagaaggttataacaaaatgctcttcagaaatacctaagtgctgagaattttagtactaaagagcacagctgctcccaagtaagctgagcagtgttctcag

SEQ ID NO: 55193 - DNA, 583 bp, Homo Sapiens
aaaaccagcagtttttacactaaattttttaaagaaatattagacaaaaatatagaattaaaacctttggttccaaaatgggaaaggttccacgatacataaatcatttctcatttgctttaaaaaatttaaaagtgtaaaaattatgagagactttattcgttaacaatgggggtaaagagctatatacatgaaaatgagtcttataaaattaagtgaagtgcaaataaaagcactgctactataagacattctggaatggttgtttaataagggtattatccatttgatctatagcaatgtgattttatttttaaaaagaaaagcagtgtgttttctttttttgttgttttcttttgcttaagcacttcatcaattgctttattctgtatctgcgaagtaatctgcaatctcttttgttctttttaaaatttgatttgttataaaattgccaaatagaagtgtttcagatacatagtttgtacctgtatttttattttattgcctcatgttcttgtaagtcattcttaattgaccaatgattgtagaccttgcttgagtattttttctaataaaacaaagc

SEQ ID NO: 55194 - DNA, 500 bp, Homo Sapiens
tgttgagaagaccattttgttcacttggcagtttcttcacacttgagatggggcctgccatccgagggactgtgttgtagattgtgatcaaggttgattggcaaaactgggcagcttttgcatggtgcctgcttactatatctgaattcagcacctcatttttgtgggagttgtaatacccacaattaaaaaaaaagtataaaagagaaaaatatttgaaggtgtctttaacctaatgcgaggaatgcatgttgtttttgtttgtttattgtagtgtgatgccttttcccttacacctactaactattcaaattaataatacttacttagttttagaatgtttattttatgtagtcattaatttttagtaacttcaaagaaacttgtttgctgtgtctattattttgaacataattccatttcctgtgtacagagaatcacatgtatattcacaatgaagcaattgtgtgcaccagaaataaacccctttcaaactaaaa

SEQ ID NO: 55195 - DNA, 934 bp, Homo Sapiens
  misc_feature (848)..(848): n is a, c, g, or t
  misc_feature (851)..(851): n is a, c, g, or t
  misc_feature (891)..(893): n is a, c, g, or t
  misc_feature (895)..(895): n is a, c, g, or t
  misc_feature (900)..(900): n is a, c, g, or t
  misc_feature (903)..(903): n is a, c, g, or t
  misc_feature (906)..(906): n is a, c, g, or t
  misc_feature (910)..(910): n is a, c, g, or t
ataccctgacaaaatcgcacaactagtaagcaggatagctgataccacggctatgagggagtaggctctgagagggcacagacttgtggagctgggcgtctggatcaaaactgctttgggatggaacctcgagccctagcagtgaagaagattccatttcttgtccaggggatttaaaagagttttctgctttgagagagaaatagagagtttagaaagcaattgctcttgggaaagctatacacagctctgttttgtcaatgacctttgttgtaagtctcccaacgtcctattaggagccacagcaggtgaggcatttggtgcagcaggaaacatggggactgcctaggctcgaatctgtggcaccctgagcaattacttaaattgtggagcctagttcctcatctgtaagatggacttgagattcctacctctcatgattactatggagattgaataattggtaaaattctcctagctcagtgactgccacaggatgggtctttcagattttggttctctttagcttctggttcttgaaagaaattaatctgtatataacataagaaactttgaaagtcaaaaaaacaaaaaattttaattcctcgtagattaattgatttgctatcttttagtttttttttctatgcatgtagatgtattaaatatgtaaatgtttttcaaagttgaggtaatattgtatagaattttatagcctacattttaatttcttgatatcttaagcatttcacttattagatattgttcaaaaatgccatttttaatatttgtataataccctatcatgtgagtataccctaaactagccattcccatattcaacattntgngtactggtttttctaattacatatattacaatggaccccnnnanaaaanaantanttanattattatttattatatttattta

SEQ ID NO: 55196 - DNA, 581 bp, Homo Sapiens
  misc_feature (366)..(368): n is a, c, g, or t
  misc_feature (378)..(380): n is a, c, g, or t
  misc_feature (412)..(413): n is a, c, g, or t
  misc_feature (481)..(499): n is a, c, g, or t
  misc_feature (501)..(501): n is a, c, g, or t
  misc_feature (506)..(506): n is a, c, g, or t
  misc_feature (509)..(509): n is a, c, g, or t
  misc_feature (511)..(522): n is a, c, g, or t
  misc_feature (529)..(530): n is a, c, g, or t
  misc_feature (533)..(533): n is a, c, g, or t
  misc_feature (535)..(536): n is a, c, g, or t
  misc_feature (538)..(539): n is a, c, g, or t
  misc_feature (541)..(545): n is a, c, g, or t
  misc_feature (552)..(552): n is a, c, g, or t
  misc_feature (557)..(558): n is a, c, g, or t
  misc_feature (571)..(571): n is a, c, g, or t
gttttccgtgagagacgtagagctgagcgacccagcccgcgagcgaggtgagatgccggtggccgtgggtccctacggacagtcccagccaagctgcttcgaccgtgtcaaaatgggcttcgtgatgggttgcgccgtgggcatggcggccggggcgctcttcggcaccttttcctgtctcaggatcggaatgcggggtcgagagctgatgggcggcattgggaaaaccatgatgcagagtggcggcacctttggcacattcatggccattgggatgggcatccgatgctaaccatggttgccaactacatctgtcccttcccatcaatcccagcccatgtactaataaaagaaagtctttgagtnnnaaaaaaaaannnaaaaaaaaaaaaaaaaaaaaaaaaaaaaaaannggggccccttttttcccacctgggggggggggcccttaaaattttataacacccctcccccccccccnnnnnnnnnnnnnnnnnnncnccccnccntnnnnnnnnnnnnccctttnnttntnncnncnnnnnccttttntcccnncctctcccccttnggggccctcg

SEQ ID NO: 55197 - DNA, 780 bp, Homo Sapiens
  misc_feature (732)..(732): n is a, c, g, or t
cccacgcgtccgggcttatctccttctcctacatcaacaatatggttcgagtgggaactctgatcatgtgtctacatgatgtctcagatttcttgctggaggcagctactcttctgtgattgggagactgcaaggcactgaggagtatcaaagaagcaaatattttcactttgaaagaaaactgccattttgtatttaatagcctccaggttctttcagtaatgttatttgctctgtgtgtttttgtgtgtttgttgatgtgcgtttgtgcatatgcgtgagtttcattgccggggttggggcacaattgtggactggggccatgaggccttccctggtccccactgaacccaccttagttccacatttggctgcatcttgaattatgccgactccagacttctcctccttttttgcccttggctcttgacactctaaacccctggaccatctgaatggagcagccaagttcagtcccacatttctgtactgttcctctttcacagctggaatatgtcacatgatgaagttgtatagaaacagaaccatggatggatggccaggattgccgtggtccctagctagatccccttcctatcaatcacctgatagcaacagggacagctgccaataccctgctctttactcaatggtacccagggagggagcatgggaagagggtgagctgagggctggaggagggcaacagccactgggtgagctgttcacggnctatactattgtttgtgattaaagtgcttcacccaaaaaaaaaaaaaa

SEQ ID NO: 55198 - DNA, 676 bp, Homo Sapiens
  misc_feature (611)..(611): n is a, c, g, or t
gaacgaggtgttaccattctgatgttggacgttaatgcccacttttcttattcttactcagccccttttcctcccttaggagcattggtcctctgttgtccatttttatcaccagatgttttccactgaagcatgcacatgccactgtcaccaaaacaaacaactaccactttccaaatttcattcagaaccattttagtgttttcctattccctacccctcccactactttcaatgatgaaataccctaagttaagttctccttttgacactttattgcctagatgctgcaatgtttttatgtttcctttatgccaaacataacaaaacagttatatagactgctttagcaaagtacacaataatggcttataaatggtgtttaaatatgcattcattttaatctactgaacaaatattgggataactccaaaccgcatgaaagggtgtaattgcagcatgagttaaatcttgaagcctagaattgtcagcacttccaacttcttgtttgacagtgttatttatgttatttatattagctaacaggaaacaactactgtgtttcaacataataaatataatagaaaaatattttatttgtattgttgtantaaatatttacaatcatatagaatatatagagttacattttaatagcaactgtgtacatgtcacg

SEQ ID NO: 55199 - DNA, 588 bp, Homo Sapiens
atggaggatttgctcgacttggacgaggagcttcgctacagcttggctacctccagggccaagatgggtcgccgagctcaacaggagtcagcgcaggccgagaatcacctcaatggcaagaattcctctttgactctgactggagagacttcctctgctaaattacctcgctgccgacagggaggctgggcaggtgattccgtgaaggcttcgaacggtacccaaacaggcaaacaacagctggatctgaacgcatgctatcacaaaacgcatcacagaaatttggggctggcttcattggaagaggcagatattcctatcattccggatctggaggaagtacaggaagaagactttgttttgcaggtggcagcccctcccagcatccagataaagcgggtgatgacctaccgtgacctggacaatgacctcatgaagtactcagccattcagacactggatggggagatcgacctgaaactcctcaccaaagtgctcgcgccggagcacgaagtccgggaggatgatgtcggctgggactgggaccatctgttcactgaggtgtcctcagaggtcctcactgagtgg

SEQ ID NO: 55200 - DNA, 635 bp, Homo Sapiens
  misc_feature (563)..(629): n is a, c, g, or t
tgtcacgtcttgtgggccgtgggcttctacctgcccttggcctgcagtgctttgctggagaagggactccctggtccccagggtggacggagccgctgtcaccgcccagagctgggccggggaagcacggtgtgttctgcttttcttttcagattgttgaaatttcattgtcatgatttaatatatggatttttttatttaagaaaaagacgagggactctttgtcacgtgggtttgttttctgtctccgtgcctccggcttcccaaagagatccaggtctttgcgtttccagggcgtggggaccccggccccctatgccgccacgccgccacaccgcctcaccctggcttctgtgctacttggcagttccatttcattatttattttttgtgctgctttttatcatgatataaattattgaaaacagatcacatgtgggcccgtgtctggccgccgccgccctgccccgtccctgcggccaccacctaatttattgccgtgcgtcctgctgctgtgactgcttttgtacctttgcaataaagaattttctggtttcaaaaannnnnnnnnnnnnnnnnnnnnnnnnnnnnnnnnnnnnnnnnnnnnnnnnnnnnnnnnnnnnnnnnnnaaaaag

SEQ ID NO: 55201 - DNA, 719 bp, Homo Sapiens
gtttactgatgcttcctggtccggtggcctcggtcccggtaagccaggcatgaagatcacaaggcagaaacatgccaagaagcatcttggcttcttccgcaacaacttcggagtccgcgagccgtaccagatcctgctggacggcaccttctgtcaggcggcgctgcggggccgcatccagctgcgggagcagctgccccgctacctcatgggggagacgcagctgtgcaccacaagatgtgtgttaaaagagctagaaacattgggaaaggacttatatggggcaaaactgattgcacaaaaatgccaagttcgaaattgtcctcatttcaagaatgcagtgagtggatcagaatgtctgctttccatggttgaagagggaaatcctcatcattattttgtggcaacacaggatcagaatttgtctgtgaaagtaaaaaagaagcctggagttcctctcatgtttattattcagaacactatggttttggacaaaccttctcccaaaacaattgcctttgtaaaagcagtggagtcaggtcagcttgtctcagtgcatgagaaagaaagtatcaaacatctcaaagaggaacagggtttagtgaaaaacactgaacagagtagaagaaaaaagcgcaagaaaataagtggtcccaatcctcttagttgtttgaagaaaaagaaaaaggcaccggacacacaatcatctgcttctaaaa

SEQ ID NO: 55202 - DNA, 785 bp, Homo Sapiens
  misc_feature (647)..(647): n is a, c, g, or t
  misc_feature (663)..(663): n is a, c, g, or t
tgcgggacgtgctagccgtgccggggaccgtgtggacggcaggctttgtgctcacctacaagctgggtgagcaggtgccagcagcctgtttcctcttctcctgctggaccacggcgtttctgctcccgagttgggactgtggaatggtgtgggtgctgtggtctgctccatcgctggctcctccctgggtgggaccttgctggccaagcactggaaactgctgcctctgttgaggtcggtgctgcgcttccgcctcgggggcctagcctgtcagactgccttggtcttccacctggacaccctgggggccagcatggacgctggcacaatcttgagagggtcagccttgctgagcctatgtctgcagcacttcttgggaggcctggtcaccacagtcaccttcactgggatgatgcgctgcagccagctggcccccagggccctgcaggccacacactacagccttctggccacgctggagctgctggggaagctgctgctgggcactctggccggaggcctggctgatgggttggggccacatccctgcttcttgctcctgctcatcctctctgcctttcccgttctgtacctggacctagcacccagcacctttctctgagctgagtggctggagtgggtccaantaaaaaggcccacaanttgttgccttggtgtggcccaacgaacaaacaatacagaaatagaacaacaaatataccaaccagggacgcgcaccaaatagcatcgtggtccaaaggacaacgcgcccgctcaaaatagcc

SEQ ID NO: 55203 - DNA, 541 bp, Homo Sapiens
ttgcacattttgttttactttctttatagaatatttaatttcaaaaatataatttatgccaaaaaaagcatacctttcaattttgctacttggttgatttagcacaaaatgcaaagtcttggggcagagagggggagtgaaaaaaattttataggtaattgttacaaaaatacctgtcagaaaccctaaagctgcattgtaaaacaaatggtgtaaactagttttgaaaagtggtaaggaattgtgaaaaaaatctcagacttaatgctctctaaccacatgagtttcttcttttttatttagtaatacgctgctacatatttggaggttctggtgtttgtaggtcactgaacagacattgaaatctgatttatattgtataactgtaacatagaaagaaaaagtatttatattttttctgtaagaatatttcattgagttgtgtataatttaaataagatttgtccccaaatggttttgctcaccttgatttttttttgttgtgattttcttgtttttgtataatgtgtatagtttatgt

SEQ ID NO: 55204 - DNA, 712 bp, Homo Sapiens
ctgtttttcagcaaggttgaaattgggaatgtccttttgaatcagaagaaaataggccatagactcatctcccagcacaaatgggcattctatgaaatggtactggccctaggaggatttcctcaaccactctcctactcttggccttgaacctacctctgggttggatcttactattgtagctgctcactataccctcctgcatgcttagaataatgctttgaggggagcactggtaaaacacagtatttatttttttacctcctttaagaggacttggaggtaagttgcattcattcactcaagtttccctcttgctgtctaatagaagcttactttttgctatatcagcatttgttacagccaatatttaaggacaaaatttagaaaatatatcatttcctggcccatcatcaaactaatacagcttaaccttgcagctaccaacttttgtgtcaagctagatatctttatttgatatctaaggtgcaagaccaacaatatattaagagatctgtagacatgaaggcaaagctcttgtattttttttcatccaaacacctcaatttattttataaattcgttcatttttcctgttatgttttatataatatatggactaaacaaataaataacagtgcaaaagaggagaatatttcctctgtgctttccttgatgtcgtgtccgaattccttttatttatcctctaact

SEQ ID NO: 55205 - DNA, 649 bp, Homo Sapiens
gatatcgaattcgtatcggccattatggccggggagacacagagaagtgagtcacagaattgagcccgctctcttgactgcccagccagagacactgatttctgtaacctcttcactggatcctgcctcttaagcattaaaacattctcctaaacctctgagtgttttgtgggttctgggtgtttggtacattttagccaagctaaccacttgtctgcaagtactgactttcctatgaattctttgaagattattgagtcagaaaggaaaaatatagccccaaatcccaggcttttaatgcattacattaactgcctattgaaatgagaagttcttcacaaacttgtatacccactaacaagttggcacataaacatgcattaaagtatatactaagaaaccctctgtccaacggctcatgcatatgaagtccgaacatgggagtttgccaattgcattcatcaagtcgtttggcggagtcagatccctgatggaagagctcacaggctctgccttccaagtcctgggttcctaactggtgaccttagcctggggtctgtagggagaccaaccctggcttccaagaaaaccacattccatggactatcagaaatagacacagatttgggtgacaaagctggctctgtat

SEQ ID NO: 55206 - DNA, 759 bp, Homo Sapiens
ggaaaagatggaccagacacagctaggacatctagctttaaaaccaaagcagccttggcacctcacacaatggccagctatgaacctcacctggatccacaccactccaatttgcaacccccctctcagctccccaggtactatctcctttagccatggtcctttaggcactggaaccggcattggcgtcattcttttcctccagcatggagtgcaacccttcacccactctgccccaaccaccccagtcccacctactacagcatctcctgtcatccctggtgagcctatgaaactatctggagagggtcctcgttgctacagtttgccagtaactctgccatcagactggagctataccctatcccctcccagtctacccaccttggccagaaagatgaccataggacaccgggagcagcagagaagccatcctccagttgctgctgatgctcatcttctcaacctctagcccagggcatacagctgtccactgtgacttctactttgtgtaaatatttatgtatatatgtatttttactattaatgtgtgcatttgtgttgagggaagataaatcctttctgattaaagaaatttttttatacctaaaaaaacaccacacacccacacacaccaacaaaaaaaaaacaaaaaaaaaaaaacaaaaaatacaacaaacaacaaaaggacgcaataacaaaacacacagagagacacacacaagaacacccacagaaaagaacaacaaggagcccata

SEQ ID NO: 55207 - DNA, 502 bp, Homo Sapiens
ttcctgcagactcttttttcccgaggatcctgttaagattgtccgggcccaagggcagtacatgtacgatgaacagggggcagaatacatcgattgcatcagcaatgtggcgcacggtcagtatcacacctcaggctggcagggcaggagaggaaggcagtgctgtgaacctggtcccaaggtgacctgagattgccgagaggtgtggagaacctgggtggagttgaggcactgtcagtatgcagaggaggctcagccttcgcaatatagctgtggaattctgcaatctggagctgtgctaaaccaggcaggggtcagcaatctaggtctgtgagtctagttccacttgggactgatgatgagttcacaaagtggcagatggcccagctgtgaccagcaacgtagcacagtgctggccaagtgctggggtcatggcagtgcttcagccccattggccatctcaggtgctaggcaagggagctgaagtaggaattcagtcatc

SEQ ID NO: 55208 - DNA, 927 bp, Homo Sapiens
aagaaactgaatatgttaaatatattaacataacaacatatttggactgcttaactaagattatagagatgatcagtttataaaaccaccttcaacttaaataaatttgaactcgaaattgcaaaagcagtctagaggctttgctagtatccttcaaccaatttctagtaaaaatatcctatataaccataattatcaaaaccagaaaaacaacattggtaggatactataaagtaaactaatcttattttggatttgacgaatttttacatgtttttttcttttttagtttgtactctaagaagttgtattacatgtacagattcgtgtaaccactgcaaccacataaaactaatgaacacaaagtccctcatgctacctttttatgcttacactccatccaaacctaactctgccaaccacttttctcctatcagtataatttcatcatttcatgaatatgataaaaataaaatcgttttgtaaatggtttttataaattttatataaataagttatatgaatttttattgatagagagtatgtaagctttggcatttttgtcactcagcaaattactcctaaggtttatatgagttgatgaatagttgttctattatttttttttaccaccatgtatctaaccagatgaaagttgtctatatttgagagtagtatacatattgatgtagtagttatccattcactatgagatattatttgactgttcctggtttagtgctataataagatgctgtgcatctcacacacaactcaacaaaaaaaaggggggaaaatcctgggcattcgtccccttttgcaaggccaaaggaaaaagcgcggtacaggcgaagccgcttcgagcccttgggcagaccaaaacgcaaaattgcctccgtgtaaaaaacgaaaacctaaaacccacct

SEQ ID NO: 55209 - DNA, 463 bp, Homo Sapiens
cctaaaagggtttcatttttaaattcatctgttttgttaacatccagtccaattgaggtgatctcagaggtgcatcaggacatctagcactgggggaggccaccttgcccagatagttgaaaagaaaattggtctgggcagcctgttgtcttttgtcttcatgtaatgttttttctttgttttaaaggactaatgtttattacagtgttaaataaaagtgtaagatactaagtgtgtagaataaaagtgcaataacaaaatacaatgactttggcacacacttcagtctttatcctctctcctttcttgtgctacctggctctttccataatattgttacagcaggaccgtcttaattgtgtgcattttgaagagatgcgactctgggttaatcttcactagtgtaatattgaagggttgggtttggttttatatagtattctgtatacttgttgggatacac

SEQ ID NO: 55210 - DNA, 601 bp, Homo Sapiens
ggcacgaggttgaatacaaatagattacaaagccaaaatttgatgttaaatgactcaggaaattttagttgtattttcaattcaagtacttagtagcctacgtttgcttggcctctggttctttatggaaaataggctttgtagtggcattgtggagcaaaggagactgttacaccttaattaactttttttactgatgcaaataatttgaggatagagaggagggaagtagtgaaagctatgacctaaaacattgggaccaaatagaggctcacagatatttggattattttatgtgcttattattaaataaggaaagcattttgtgatatgtggaagacgctatgtgaagttttacctatcttctcaaagaccttttcttttgtattttcttttggtgtttcttaaagccaaacaaagaaatgttcttaaggagacagggtgggtttttctgtgggcctttgttggtttttctgtgggccatcgccctctaatggaattgatctctggctgtttgatttttttcatattgtatttttaaaatttgttgtacagtgccctgtgagcaccaagtaccactagatgaataaaacgtattata

SEQ ID NO: 55211 - DNA, 519 bp, Homo Sapiens
gatggtggtggctccacgcaaggcatggcggttttccctgcaacttcagacactcccagaggactcggactttttcttctgcacttttttggaaaatcgccaggtgccaaaaggtgcattttaaagcgctgactgtaaatgctttatttctttgattagtaccactagtctatgtgggcagcggcattcctccctggagcactcagctaggcggttccgtccaggagcttgaaagcatcccagcggtgcacctgttcagtctgaggacctcaagcttgggtcaggccagcatgttttaggtatggatgtggtgacttaaagtacttgattgtcttgatttcaccctgaaagctttggcaaaccaagtttcaacccttactttaaaaatctgacactgctttactccatatcaatttggaagcttctaattcataaatatacctaaacgttggcattttatctctccaggagttattaaacatttcttcctttttagaaaaaaaaaaaaaaaaaaaaaaa

SEQ ID NO: 55212 - DNA, 366 bp, Homo Sapiens
gcacgagaagaaaagagtggggagagagtaaagtgctttgcttctgtcttagaattgagctagcttgagtcaatttctgtgcctgcaaccaaatgaaaattaatatagtgagttctttcaggagctttctctgtttttctattgatacctctatatatttttaaggcaatgtcactttgttttgtttacaaatatattgaatatgtcaagattactattttgttattgccctttgtgaatttccttgtctattttgctcgcttgttctttcaggtgaaatttattattttattaatgttgccaaaaattataagtaaaatatcaattatagtaataaaatgttttgtgaaaaaaaaaaaaaaaaaa

SEQ ID NO: 55213 - DNA, 644 bp, Homo Sapiens
tccctgccagtatacttcgttgggtcggggagaacaaagaatggttttgaaaccagagctttcagttcccttcatggtttccagaggtgagaagcctctgtgggtagtagatttgggatggaacacacacaacccttctaatgaccctaagttgttaactaactgcctttgaatggttgtcttgaaatacctggtgtatatactgcagaaaaggaatgcagctgttttccacagtgtttgtccccaacttctgtttgtactcagaatcgttgaacatatgaagattttggtcccataatccttaaactatagcctgaggtgcacctgattacatagagtttggatggagcaaagaaaaatccaatagcattttgcagagtaatgtatataattatgggctcacttcctactggagatgttgaaagtctaaatcggtttgaccattttgattgatggcacaatctggtttagaaaactttgtttagatcaatgacataaccctgctgcctctgcctgcccttcccctcccttctcccatccccttttccctatctggtgtctgtactttgatgaaggtgagctataatattggtggttaatataatccagaaggcttagttctgtgtgtgttctgtccctatata

SEQ ID NO: 55214 - DNA, 717 bp, Homo Sapiens
  misc_feature (624)..(628): n is a, c, g, or t
  misc_feature (632)..(635): n is a, c, g, or t
  misc_feature (639)..(640): n is a, c, g, or t
  misc_feature (661)..(661): n is a, c, g, or t
  misc_feature (663)..(663): n is a, c, g, or t
  misc_feature (670)..(670): n is a, c, g, or t
  misc_feature (676)..(677): n is a, c, g, or t
  misc_feature (683)..(683): n is a, c, g, or t
ggtaggacgggtagttttccaggttccagactggcttcatcatctcttaatgggaactcgaatcctctttaaaaacaccctggaaatgtatactgattactatcttcagtgtaaactagaacagctatttcaggagcaccgtttggtctcactcataacacttctcagagatgctatattctgtgaaaacactgaacctcgctctctccaagataagcaaaaaggagcaaaacagacttttgaagaaatgatgaattacattccagatctgttagtcaagtgtattggtgaagaaaccaagtatgaaagcatcagacttctgtttgatggcttacagcaaccagtactcaacaagcagctgacttatgttttattggacattgtgatacaggaactgtttccagagctcaataaggtacaaaaggaagttacctctgtgacatcttggatgtaaacacttggatttggtatagaataacccattgaaatttctgctgtgcgagggtggtagaaatttacttttttgggtatattcttatatatattatgtacgtcgctgtctgaaattttagttattttttttgttttttaataaagactaacacaaaacttaatggtttaaannnnnaaannnnaaannaaaaaaaaaaaaaaaaaaaananaaaaaanaaaaannaaaaanaaaaaaaaaaaaaatttagaaaaaaaaaaaaaac

SEQ ID NO: 55215 - DNA, 540 bp, Homo Sapiens
aaaagtgaaggattcatagcacagattacttgcctaagatcatccaggaacgaagacaagaatccaaatgtacttggggacaagaattagtccccaaattcagtgttcttcctagtattaaacattgcccctttcgacaaattttggatttcattcttgttatatttcagtactcttgctgatttattttaggtttaactggtaaagaatgaacatttcagaagtgttaggattagtcagtgtcatcgcttatgtatatgaatcacttgccaaagacactggctctcctcagctgtaaccagcatgtcaaatgtgaagattattgtgtgggatcctttggtttcattgttatgatgtattttataaatgtactagttatatccttgtttatgtatttttgctgatctttcataaagcagaatggtacgtatcggattgttttaatgttatatattggattgtattcgttgttacaaaaccaatattctatggagaatgaaaaaaataaaggactaaattaactggaaaaaaaaaaaaaaa

SEQ ID NO: 55216 - DNA, 524 bp, Homo Sapiens
tgtttaggatattattttgcagcttgtaaagacatttttccctaaaaaaagaaaagctgtgctttacatagcaatcttataaaagaaatgctagaatcagaaaaccatcattttaggctgggtgcagtggctcacacctgtaaccccagcactttgggaggacgaggcaggtggatcacttgaggtcctgggttcaagcgattcttgtgtctcagcctcccgagtagttgggatttacaagtcaattttttttttaactaaaactacagaatctatttttcttggtctcatactcagttttttatgtagtcacttagtaaataacctaatttgcttgttttctccacactaattttagggtgaattcctcatttcgcttttcagatcatggggtgagggggatggttgtgtgtgtgaggaactgaggaatcagatggaaaacaatgcctctgctcctttgagtataatcagtgatatttgaggttccagggttaaatgctgcatttttatttctgacgttcgta

SEQ ID NO: 55217 - DNA, 581 bp, Homo Sapiens
tacgctgctcaaagactaccagaatgtccctggaattgagaaggttgatgatgtcgtgaaaagactcttgtctttggaaatggccaacaagaaggagatgctaaaaatcaagcaagaacagtttatgaagaagattgttgcaaacccagaggacaccagatccctggaggctcgaattattgccttgtctgtcaagatccgcagttatgaagaacacttggagaaacatcgaaaggacaaagcccacaaacgctatctgctaatgagcattgaccagaggaaaaagatgctcaaaaacctccgtaacaccaactatgatgtctttgagaagatatgctgggggctgggaattgagtacaccttcccccctctgtattaccgaagagcccaccgccgattcgtgaccaagaaggctctgtgcattcgggttttccaggagactcaaaagctgaagaagcgaagaagagccttaaaggctgcagcagcagcccaaaaacaagcaaagcggaggaacccagacagccctgccaaagccataccaaagacactcaaagacagccaataaattctgttcaatcatt

SEQ ID NO: 55218 - DNA, 662 bp, Homo Sapiens
gctggaccggtccggattcccgggaatcgtcgaccacgcgtccggtggggtgtgggcaacaagtggctttccttgcctactttagtcacccagcagagccactggagctggctagtccagcccagccatggtgcatgactcttccataagggatcctcacccttccactttcatgcaagaaggcccagttgccacagattatacaaccattacccaaaccactctgacagtctccttcagttccagcaatgcctagagacatgctccctgccctctccacagtgctgctccccacacctagcctttgttctggaaaccccagagagggctgggcttgactcatctcagggaatgtagcccctgggccctggcttaagccgacactcctgacctctctgttcaccctgagggctgtcttgaagcccgctacccactctgaggctcctaggaggtaccatgcttcccactctggggcctgcccctgcctagcagtctcccagctcccaacagcctggggaagctctgcacagagtgacctgagaccaggtacaggaaacctgtagctcaatcagtgtctctataactgcataagcaataagatcttaataaagtcttctaggctgtagggtggttcctacaaccacagcaaaaaaaaaaaaaaa

SEQ ID NO: 55219 - DNA, 865 bp, Homo Sapiens
  misc_feature (820)..(824): n is a, c, g, or t
gtttgcctgcactcaagatccgggaggagctgctgaagatcctgcaagagctgcctagtgtgagccaggagaccctgaagcatagtgggattggacgagcagtgatgtatctctataaacaccccaaggagtcaaggtctaacaaggacatggcagggaaattaatcaatgagtggtctaggcctatatttggtcttacctcaaactacaaaggaatgacaagagaagaaagggagcagagagatctagaacagatgcctcaacgacgaagaatgaacagcactggtggtcagacacccagaagagacctggaaaaggtgctgacaggagaggagaaggctcttagacctggagatcctggattctgtgcccgtgcaagggtcccaatgccttcaaacaaggactatgttgtcaggcccaaatggaatgtggaaatggagtcatccaggtttcaggcgacctccaagaagggtatcagtcgactggataaacagatgagaaagttcacagatataaggaaaaaaagcagatctgcacacgcagtgaaaatcagcattgagggcaacaaaatgccattgtgaccttgcctggaatgtgtccccatctctactctaagaaatgcgcaatggactctttggagaaagaagatattttaaaacatttttagtgtgtctgtaaatggttcagcgtgtatcagatgttgtcataggactcacatttctctcagttatatttaaaaccgttgtgtactttgtacaaaagaatactagtcatacttctataaactttacacaataaaattttcatttctgggttttannnnnccccaaaacaaaaattaaaaaaaggccgggccggctctaaa

SEQ ID NO: 55220 - DNA, 479 bp, Homo Sapiens
ggcgtggcgtagcgtaacgcagtgttggggaaacttgcggctgtggattgggggaccggaaagggaggggtgggccgcaggcgccggacgtgacgtaagccggaagcgactttccgccgagaaatagggggcgcgtgtttggaaattgatagaaaagataaagggaccgagctgctgtcagcctggcttactgatctgcgtccgtttcaccacggattcagttactaagcatttttttctttttttggttctttgcaacgtgagtggcattggctcagtgatttccatgagcatctctaccagaaaacattgcctcgatgaggtgtggtggaagcccggcagccccttctaatcggctaggcttgagaaagcgtgtacctctgcatttccgaaattaactcagcgtgatcggcaagattttcctcagcatctggtgtcaagacactcgtcactattaattcggaaaaaaaaaaaaaaag

SEQ ID NO: 55221 - DNA, 822 bp, Homo Sapiens
tttatcctctaatggccaggcttttgggacagcagcatattgaaatattttcaccaactaaaggaaatagacagaaaaacaatgacaatattcaatcacagcagtaaatggcctttgtgttgcaatcccttctaccccatcagacagctcctagaaacattccttacagttcatttctctaaagcattttctgattcttagataactccaatttttgctacctttatcttagacattaacactatagcccaaagcatagttactttgctaaatcagaaagcaactgagttctttgttttctcctcaaatagaatggggaacgttcacaacattctcttaagttctaacaggaataccattgtggttatagaactcagggctgctaaagcaactactctagacccatagttctttttagttagatgtattgaaacagacaaaaatattaacatcagaaaaagctcttgccaattagaggatcttcttaatcctcagcaattaagtttggggtttgaggggggcaggtcattgttacaacagaagtaaatttggcatctatagaaatcaattatgatttttgaaagatttatctaaatatatcaatatagcatctctttaatgttagtcatttattagaaagatcctttatcctgatttgcttaaacctttcaataaattgcactttaaaggattataaataatccatttaaaaattcaagtacacacatcagtgttggttactatgcagagaatgtcattgtgtatagtttcatgtaatctgttatgtcagctgtattttttattaaaatcatgtcaagaaaa

SEQ ID NO: 55222 - DNA, 339 bp, Homo Sapiens
  misc_feature (217)..(217): n is a, c, g, or t
  misc_feature (220)..(220): n is a, c, g, or t
  misc_feature (224)..(224): n is a, c, g, or t
  misc_feature (231)..(232): n is a, c, g, or t
  misc_feature (234)..(234): n is a, c, g, or t
  misc_feature (243)..(243): n is a, c, g, or t
  misc_feature (249)..(249): n is a, c, g, or t
ttaaatagttaaaaaagacaaaagaagggagagccatctatgatatagatggtaccatttcagttcaaagttgtaataacctttggagtgttacagtttggttgtcaaatggtttcagaatgtataattgatttttttaaatgttgcattgtttgaatctaaagtacagcactataacatgctttagcttggggggttgggtgtggggtggggactngcncttnttctctnnantgttgactnatccanaaagcctgatgcaacataatctggaaaactgctttggtacatttgtagaaatccatagaaataccatatccagcctcaaagcattaatct

SEQ ID NO: 55223 - DNA, 670 bp, Homo Sapiens
cgcgtccgtaactttgaatgactaaaattagtatgaaactaggttttggacccccttctcacctcacccggatgtaatgccaccaatttcaaataactaaaatgtgaccaattactttgcttcaagttctatacaaatatctctgaaatctgtaagccatatttcagctattctggtttttataatacattctaccctaaattaaccaaaggactttttattcagtgtattccatgtttcagcataaggaaagtttgtgcctgatatggcaggagaaagaacactatggtaatttcattgttacttcaggtctctttcaatctgaagaactgggttgtctggagaattgaacatagccaagcaatattatcaattagtaatgtcatcttaaaaatgttcacttttactaagttttattcagaggatctatgtattattagaaaaatgaagtatttctgacatggaacaaagaaagtggaaactggtacttaatgggggaagcaaaattagctgggactaaaacggacatgttttgttttgtgaattctacctaaatgtctctctatccacagagaaactagtattacttgaagatgtgaaagttcctgtggtagccataccttgaagcacagtgtttgtacataagtaaatatcttgattctaaattaaa

SEQ ID NO: 55224 - DNA, 677 bp, Homo Sapiens
ctcagtgataggtggtttgtgagtgaagtaacttccacactgtcaagagttgacagcatattaattgtgtggcattataattgtgagaaacaaatgagagcaaaatgttaggtcctttgacaagcattttcctcctgtttttaaaaagggctttaagttgtttcctatgtaaggtaatctttcttttttagtattatctaagaaggatggtagattatgtcattttggaaactattgtgtcccttgtattttaaatatttcaggaaaatgcctacgattgttacaaagatgtgtgttttacttataacataagctctgattctccagtggccactgggccttctctgtgctctgtattcaactgcagtatgaattacagaatgctgtgcatgttcgttagtaccaataccatgtgtatgtggtagaagttgtaaccagtttctggatctgtatggtactataaaatacttattttataattctgtaaccgtatggcagtgttatgccaaaaatgtataaagagcaatagtttttgttgcttactgctgtattttaaaatattgtttctaaaataatagagttagagttccttttgagtaattatttttaagaactattgccaaatatacatcctgtaaaactaataaaagccactccatcttaaaaaaaatacaaag

SEQ ID NO: 55225 - DNA, 647 bp, Homo Sapiens
tttttttttttttccctcctctctttttggagggaaaaaaaaaatatcactacacaaaccaggcactctccctttctgtctttctagtttcctttccttgtctctctctgcctgcctctctactgttcccccttttctaacacactacctagaaaagccattcagtactggctctagtccccgtgagatgtaaagaaacagtacagccccttccactgcccattttaccagctcacattcccgaccccatcagcttggaagggtgctagaggcccatcaaggaagtgggtctggtgggaaacggggaggggaaagaagggcttctgccattatagggttgtgccttgctagtcaggggccaaaatgtcccctggctctgctccctagggtgattctaacagcccagggtcctgccaaagaagcctttgatttacaggcttaatgccagcaccagtcctctggggcacatggtttgagctctggacttcccacatggccagctttcttgtctatacagatcctctctttctttccctacgtctgcctggggtctactccataagggtttacaaatggcccacaacactgagttagtggacaccggctaaatgaggaagagcagcaggcattgtcatggtgaatgcccc

SEQ ID NO: 55226 - DNA, 773 bp, Homo Sapiens
acaagtccaacgagggtgttcaagcagttaatggttgtgctaactcttgtttctactgaagcgggttttgcaaagctgacatcccttaaagataacttgggctttcggaagcggcaaggaaatggcacccgtagttgccaggacaggtggtgtcctcggccaggactaagagccagctcatctttgtaacattcataatacgggaaactgaggaccaggtggctcggaaaagagatgagttccagcttttacctaacacagggttctctcgtcgtcccccaacccctccagctcggcttctttgtgtccagggttgtagatttttggatagaggtgtttctgattctagtgagtctgagaactggaaaagaccaaggaggggttgatgatttacaaggtccatagaaaaactttttgtgtggtcggaagttggccaagcagaggcccacagcctgatgctactgccccccacccccccaaagatctgaattccctaaagatcaagagggttcagctggccttgggagatgtttgctggagaatgacttcagttttctcctaaggcaatcagattgcaaccattagcattgtatcttatctgcaaatcagtttactccgaggttccccaaggatagttttattaggaccacaggactttactaaccactgaggtaacacgctgcttgtgcagcaattattttgaggtggaggtatttatggggacagtttataattccatttattaaagggactaacctaaaaaaaaaaaaaaa

SEQ ID NO: 55227 - DNA, 810 bp, Homo Sapiens
ttccggcgggctggtgaggaatggagccggtaggctgctgcggcgagtgccgcggctcctccgtagacccgcggagcaccttcgtgttgagtaacctggcggaggtggtggagcgtgtgctcaccttcctgcccgccaaggcgttgctgcgggtggcctgcgtgtgccgcttatggagggagtgtgtgcgcagagtattgcggacccatcggagcgtaacctggatctccgcaggcctggcggaggccggccacctggaggggcattgcttggttcgcgtggtagcagaggagcttgagaatgttcgcatcttaccacatacagttctttacatggctgattcagaaactttcattagtctggaagagtgtcgtggccataagagagcaaggaaaagaactagtatggaaacagcacttgcccttgagaagctattccccaaacaatgccaagtccttgggattgtgaccccaggaattgtagtgactccaatgggatcaggtagcaatcgacctcaggaaatagaaattggagaatctggttttgctttattattccctcaaattgaaggaataaaaatacaaccctttcattttattaaggatccaaagaatttaacattagaaagacatcaactcactgaagtaggtcttttagataaccctgaacttcgtgtggtccttgtctttggttataattgctgtaaggtgggagccagtaattatctgcagcaagtagtcagcactttcagtgatatgaatatcatcttggctggaggccaggtggacaacctgtcatcactgacttctg

SEQ ID NO: 55228 - DNA, 408 bp, Homo Sapiens
ggcagtatgcattaggcagctcactcagaagggagatttgtgcctcctaacccagattctgggtatagttagtgtgtgtggggtgtgtctgtgtctacccacaggtgatgtttgaggcaccatcagagtaaacacaaagaccccaagtagggtgctatatccatggattattcctggaaggtgcccgctgggatccagaggcctaccagctggctgagtctcagaccaaggagctgtacacagagatggacgttatctggctcttgccaacacccaaacgcaagggcccaggaccaggacttttacctgtgacccatatacaagaaactgactcgttgctggaacactatcaaccacaggacactctaccaactatgtcatggctgtggagatccccaaccatcagcc

SEQ ID NO: 55229 - DNA, 493 bp, Homo Sapiens
ccacggtgtccataaaacaagagttctttaccacgtttaagcaaatgtctctcaaaaaaaattgtatttctgtgcacattagctgagattcacacattttgcacctcagtagtatttcagatgagactcaatgtgtggagaaaactgctaacttgtttggttctactcttaccccctcttctgtggcaatgtggggtcagggccgtatcctaaagtatccacatggtcttaaatggaaatcatgggactctggaaagctggcatgagctggttggagcttttaaacagaagtgctttatgggtatcagatctcttctgacatcaattgtttcaaatcattgttgggctctgtcgtgttctgcaatcttccccattcccctcatgatctctggcttatcttttatccaatctgtatggactttttaggattttttttttcttatagtacaaataattttcagatcccagctttggtaaatgtgttaattctact

SEQ ID NO: 55230 - DNA, 632 bp, Homo Sapiens
ggagatttaaaaggagcacatgatttagtgggtgggccatgaaactagagatgggatttgggggtgaatttgtaatatctggattttaatccagacatctctgctaacaagcctttggtaagtcacttcagatacttttcctcctttttacaaagagagggctggcttagttatttgccaaagccccttccaggcctgaattccacaagtacgatttactgtagtgtcttatcactctttcatgtcacaatagcgtggagcattagagaaaagcctagacttttagttgatagccagttgaaatatcattgatagaattttagttttaggaaaaattggtttgatttctagctttattactattaggtatgtgagcttgggcaaatcgcttaatctttgagtctagttttctctcaaaatgagaacattaggctaaatgatttccgagtttccagctagtcctagagttctatatttctacatagttgaattattttatcatgctgttgctggggaatatgactaacccttttgaagctactaattttatgtcgagctttaaagtccataattgttatcttcagaaaatattatttgacctacagtatgtccaaatcaatttaataaaatcg

SEQ ID NO: 55231 - DNA, 1051 bp, Homo Sapiens
  misc_feature (537)..(538): n is a, c, g, or t
  misc_feature (540)..(540): n is a, c, g, or t
attccctgcatcgccgtgttctccgagccatggttccagcgctgtggcgggcctgcaacggactcatggccgccttcttcgcgctggcggccttggtgcaggtaaatgacccagatgcagaggtgtgggtggtggtgtacacaatccctgcagtactgaccctgcttgttggacttaaccctgaagtcacaggtaatgttatttggaaaagtatctctgcaatacacatactcttttgtacggtgtgggctgttggcttggcgtcctacctcttgcatcgtacacaacagaacatcttacatgaggaagaaggcagggagctgtctggtctggtgattattacagcatggattatcctgtgccacagttcctcaaagaatccagttggtggaagaattcaattggctattgccattgtaatcacacttttcccatttatctcatgggtctacatatatattaacaaggaaatgcggtcctcttggccaactcactgcaagacagtaatttaaataaattcaagaacttcgtttttannanaaaaaaaaaaaaaaaaaaaaaaaaaaaaaaaaaaaaaaaaaaaaaaaaaaaaaaaaaaaaaaaaaaaggggggcccccctaaaataccccccaaggggcccaagtttacgcgaacccattttttttgaaaaaaggggcccctatagggagccgaatttaaacttaggcctgggccgcctttttaaaacgtcgggacgggaaaaacggcaactttgggaatctttggaaagaaaccttacttcgggggggggaaatatttgggaaaaactccctacaaaaatttaagcctctaaaggaaaaaaaaaatttttttaaggggataggggggttaaactaaaccggaaaatgcttgcctgctttgaaaattttttcctcaccgaagattggttttttggaaaaattttttttccccggggaccctaggggttcccaaatgggttgggggtattttaaaaattccccggccccaagggggctatttttggggccccccaaagctcctcaaagggtg

SEQ ID NO: 55232 - DNA, 826 bp, Homo Sapiens
  misc_feature (446)..(446): n is a, c, g, or t
  misc_feature (538)..(538): n is a, c, g, or t
ttctaggcaaggaactaaggaaggaatccccttcttagagcagaggcacaagttagagcaggcccagcatttgggccaacttactgtggggcctctgagctgctcagctgggtctcctgtcctagagggaaggtggcccagagtctttggtggagcggaatctgtagatgaggttaagggactccagttgccaaggttgatctgaaacaggcagggagctaagctcatcagaacaccaacagattcatgttctcgtcttagctttcatctattctggtctcaatggcttcgggaaacacacatatacacatacaccatgcccttgaactcaaagcaaactacgctctcagggaaatacaaatatcacgttcttatagctgtaaagtatagcttagctatttatagaagactatgaggtactgttgtgagttatttgcttatcctgntttattctgaaaaatgaaagtgctcaatagaatttttaacgttggcaacaccataaggatttcttatgttaagtcccaacttggggttgcanaatcatttttttcctttatacctgggtgttgtattagatctcataatttgacaaggtaacctttttagaaatccacatatattttcaaatctgggctactggaaaacccagttttgccagggtcagattttcatatgtatagggtttaaatagccaccacttagtgaacaaaattcttttaagcattttgggtacctaaaggtggatggtttaagtgatcaaacttagaatattgtttttaggttttaaaaaccaaccattaaaattttatttttccattaaatttgc

SEQ ID NO: 55233 - DNA, 628 bp, Homo Sapiens
tagagagctgctaaatgtgttattatcagcgatcagaaagtcttctggtctaccacacatgtccctccctactatctcttcagtatgtgtggctgaagttagcctctgtgtgagaaaacaatacaactccccttctccacacacgttactttccagcccagattaataagtatcccctaccgctaatccgcaactactatgatctactaccttatagtagagaggaaccacttctttttattattgaaatctgctggtttacttgatgtaattctcactgttctgtgtgactaggagctgaccacagggtgtcatcaattcagattcctaaataatccctttctctgccacaacccagtacctccagctggtgagccctgggccagattgttatgatcttcaggtattataaattttagttacatcaattactgtacaattaatccaaatgctaattatatgtggtgcaagaagtgtcttatgtaaattcagggtatggataagctaattaagatatccatctttggtggctctaagtgtataatttgtttttaaataaagtgtacaaatataacataacatgctataggtgtatcatgaattggaatatatgtcgagaattgggata

SEQ ID NO: 55234 - DNA, 681 bp, Homo Sapiens
  misc_feature (637)..(637): n is a, c, g, or t
tttttttttttttttttcatgtatccattcagttgatgtttattgagcaactacagatgtcagcactgtgttaggtgctgggggccctgcgtgggaagataaagttcctccctcaaggactccccatccagctgggagacagacaactaactacactgcaccctgcggtttgcagggggctcctgcctggctccctgctccacacctcctctgtggctcaaggcttcctggatacctcacccccatcccacccataattcttacccagagcatggggttggggcggaaacctggagagagggacatagcccctcgccacggctagagaatctggtggtgtccaaaatgtctgtccaggtgtgggcaggtgggcaggcaccaaggccctctggacctttcatagcagcagaaaaggcagagcctggggcagggcagggccaggaatgctttggggacaccgaggggactgccccccacccccaccatggtgctattctggggctggggcagtcttttcctggcttgcctctggccagctcctggcctctggtagagtgagacttcagacgttctgatgccttccggatgtcatctctccctgccccaggaatggaagatgtgaggacttctaatttanatgtgggactcggagggacttttgtaactgggggtatattttgg

SEQ ID NO: 55235 - DNA, 597 bp, Homo Sapiens
tggccaagtgcccttggaacctccctcagctatggccgtcctgacctcatcccaggaactctacggtgaccaggaaccacccctctgacgaggtctgtagcggcccttctcagagtggaacagcccacagtgctagttgtgcctggtcttacctgtactccacggacctcggtgaagcaaaagcttcagggcagagggaatgaggcaacccagtggcagccccgctgggccccgtggctcccgctctcctattggacgtagaggcaggggagagacttctctatacaaatattctcatcacagaagggatgatccttgctgctctgccgtagggtttttgatgctgagctatgctgcacatgacgttaacctaaagaacttggactgagcttttaaaaaaggacagcaaacaattttataatccttaaagtgtaatagacggttacactagtgcagggtattgggggggctctttgggtgtggaggctgtcacttgtatttattgtgactctaaatctttgatagtaaaacaaatgtaaaaagaaatgtttgccaccagatgggaatagaagttccaataagcaggctggaatgggt

SEQ ID NO: 55236 - DNA, 657 bp, Homo Sapiens
  misc_feature (625)..(625): n is a, c, g, or t
  misc_feature (628)..(628): n is a, c, g, or t
ggaagccaggtaggtagtctgagtcaggattggatcaacagcctcctctcttggggactctcaagagcctgtgttcatctagaagtagtagtttgattctggtttccctcctacagtgtgtcctccgtctctgtgcagctccgtcattaccataggggacttggttttagactctgatgaggaagaaaatggccagggggaaggaaaggtgagtgggaaggagcagaaagctgggaaaggggatgggtagaacaagactgagaaatccacatgcttcagaattcagagggttcagggaatggtttcggatagtaggctctccctgctcccttctctacaggaatctctggaaaactatcagaagacaaagtttgacaccttgatacccactctctgtgaatacctacccccttctggccacggtgccatacctgtttcttcctgtgactgtagagacagttctagacctttgtgatagaactaaaatgctctctgtactctagtctcctgcctcctcagctctgcaagtagtttagtaggaatgaagtggaagtccaggcttggattgcctaactacactgctaaaaatatttgtaatccttaataattaaactttggatttgtntanaaaaaaaaaaaaaaaaaacacttaatggg

SEQ ID NO: 55237 - DNA, 909 bp, Homo Sapiens
tggaggcggaggtcgataagctggaactgatgttccagaaagctgagtctgatctggattacattcaatacaggctggaatatgaaatcaagactaatcatcctgattcagcaagtgagctgtcaccactgactaaagaagagaaaactgcggcagagcaattcaaatttcacatgccagatttatgaagaaatggacttggaaaggaaattctaacagagaagagcttaattccggagaaatttaggaagatgtcttgttaacccttgatgtctagagattgggggctggtgaagggggtttggcttcaatgactggataatgatatctttcatgagagagattataagaagaagggcagataatatatgaataaagttcagccaaaaggatcaaatgagaataaaacgatttaaatatatgtacacacgcatgcacacacacacttagtcttgtaatttcaggccagaaattctcaacactattttgcatctgttttctttttctaagtcatgataatatagatgttctggtctatcataaaagaatgtttatgtacatttcagtcattcggtatgtggctttgtaaattaaagtataggcaaaacatttgtgttatacatgatatataatttcattttgtaaatgttgattgcacatgtggtcacattattgttgagactgcttttatgtgacctgtagtctcccacagaacctaaagtaataagctggcttttctgtgawarccacgtttgcgtatttctttccyaatttccctgsccggcaatgttgaaaagaagaaattgkwttwygatgwgtttaacatgtamcsttgtawymawaatawwttgttttayyaagayttattatataatgttatttcawggaagtaggaatgaattagagaga

SEQ ID NO: 55238 - DNA, 845 bp, Homo Sapiens
ttttactacggggagtgaggggaaattgtaatttcattccttaacttccttttccccacccctgctcttcaacctctttatcagttctgaggctggagggtttgggcaaggcaacatccccattccaattccattttctgatgcagattttagctgagggatttggaagccatttggggaggcaggctgggccaaagggtagagctgggtaataaatgtctattctcctggggaggagggattctaaactttccttccgtcctcaatttctacctccatagaccggccagaatttagcttcacttgagagagatctggaatggtcgccatgattgaaaccacgcaccattacatcatcattacattaattacatcaacataaattatttcttcccccttcccttttccagcactcaaccaaggagcaaagctcatcccaccccacacccctcccagatctgctcactgccaggctcctctcccctttgttcagtggagctggcttttctcccagcccctttccatggctttcactccatttggcaagctctgagggggagcctggggacgggtttgggtccccaggaggagagccttgggtataatctatttttctaggagcctcttgccttgtcccttgcagctttcgccctctgctttgatggctggagggaactcatggtctttgggaaaagggaaggcctgctgtggaaataaaatggttatttgcttcccggggagggggcaggggaggtaggccccaccccgctgcccaaaaagggggggccctctaaaaaatccctccagggggccaagcttaccgggaacccagcttttcttgggca

SEQ ID NO: 55239 - DNA, 839 bp, Homo Sapiens
gttcttttttctgtatgtattatgcctttttataaaaggtgttgaagtatgtctcagtgataaaaagagagagatgttaatggttgtgtatatttcaccgtatccaatgtaagtatttgcagggtacagcagagccttagcttgcaagagcgttgtgcaggaggtgtccctcaacacccaggagctgaagggattggaaaggtttggattctttgtaaatgtcctgcttttctttctctctgtgtgtatctatttacatgccttagcacacgccctcccatcctgatccctttgccctgtcgccggaacaaccagaatgctggtgcgctgccggcacagtacaagttgatgaaaccctaatcagttatcttgtgtgacaggggaagaagagaaactccatagtattccttgtagaatatacatacctgtaggatgctgtgtaatgggaaaccatagaattgggcttttgtcatttcaaagttggagaaatgtatgaataaaatgtataaaacatgaaaaaaaaaaaaaaaaaaaaaaaaaaaaaaaaggggggggggggaaagagaccccctcgggggccccagattgaccgggaacacacaactttcgtatttacaacggggcgccccataaaggggggccgaaaataaagcacaagacggggggccgagattaaaaagggcgcgcggggggaaacagcgcccgcgtgcaccgtggggaggaaccaacctgggggggcggcctatgtggcacccccaacgagatatagtctggggaaacaaattcggctatagtgtacaaccgcatgctggggcgaaatgcacggaatcttgaaattg

SEQ ID NO: 55240 - DNA, 664 bp, Homo Sapiens
gggagaaactactggggaagcaggataggttacagtatgaaaagacacagataaaagagaaagatagatgccctctctcttcatcttcacttgaaataccggatgattttggaggtaggtctgaagatccaagagatttttataacagctataaaacccaagcaggtagtagcaaaacagaaaagccatataaatcagaaagacatttttccagtagaagaaattcctcagattccttctgtaggaattcagaggacaagatttatggttataggagatttgaaaaggatatagagggaagaaaagagcactatagaaggtgggaaccaggttctgtgaggcattctacctcaccagcaagctcagaatactcttggaagtcagttgagaaatacaaaaaatacgctcactctggatcacgtgatttcagtagacatgagcaaagataccgtttaaatacaaatcaaggagaatatgaacagagaggacaattatggggaggatatcaaaacagaggttccagaagaagatgcactaagtagcaaagaacactcagaaagcagtgttaagaaccaatttacctcagaatttactgaatatatttaatcagatagctgaatttgaacaaagacccccggacataagtcaaaaaattaatacacca

SEQ ID NO: 55241 - DNA, 476 bp, Homo Sapiens
tttttttataaggaaatcatttattgttttttaagggcagaagggatttaggagaaaagctacagtatagattgattctctagaatatcaatgatcccttttcatccatggttcatcaaaaacatactaactgcatttgtttgatcattgcaaatttaaaacaaaacagcatttgctgttaggaaacaagacacataatcctcttaggaattaccattatatcacattaccactgtgaggtagaatggatcattcattaatttctttatgaaatttgcatgctaagtttttctaatgaggctgtaggtttccatgtaaattctgtgatagatagtggctgtagactggtgatactatccgtgatttctatgagaaacatccttacaagaaccatagggcataatttatatcttccctaagtgtaaaaggatttttatcagggtgatagtatacttgaatgaaatttgtctaatgca

SEQ ID NO: 55242 - DNA, 1053 bp, Homo Sapiens
gaattcggcacgaggattttattgatggacattatagctgctgatgactgtcgttataaatttcacaattctcggtggatggtggctggtaaggccgaccccgaaatgccaaagaggatgtacattcacccggacagccccgctactggggaacagtggatgtccaaagtcgtcactttccacaaactgaaactcaccaacaacatttcagacaaacatggatttactttggccttcccaagtgatcacgctacgtggcaggggaattatagttttggtactcagactatattgaactccatgcacaaataccagccccggttccacattgtaagagccaatgacatcttgaaactcccttatagtacatttcggacatacttgttccccgaaactgaattcatcgctgtgactgcataccagaatgataagataacccagttaaaaatagacaacaacccttttgcaaaaggtttccgggacactggaaatggccgaagagaaaaaagaaaacagctcaccctgcagtccatgagggtgtttgatgaaagacacaaaaaggagaatgggacctctgatgagtcctccagtgaacaagcagctttcaactgcttcgcccaggcttcttctccagccgcctccactgtagggacatcgaacctcaaagatttatgtcccagcgagggtgagagcgacgccgaggccgagagcaaagaggagcatggccccgaggcctgcgacgcggccaagatctccaccaccacgtcggaggagccctgccgtgacaagggcagccccgcggtcaaggctcaccttttcgctgctgagcggccccgggacagcgggcggctggacaaagcgtcgcccgactcacgccatagccccgccaccatctcgtccagcactcgcggcctgggcgcggaggagcgcaggagcccggttcgcgagggcacagcgccggccaaggtggaagaggcgcgcgcgctcccgggcaaggaggccttcgcgccgctcacggtgcagacggacgcggccgcaagcttattcccttta

SEQ ID NO: 55243 - DNA, 616 bp, Homo Sapiens
  misc_feature (601)..(601): n is a, c, g, or t
ttttttttttttgtttttgtttttttgaggctcaaaaaatgctggggagaaatgaaaatgctgtgggatagggctcctgttgcctttcagaggaagtctgacactacagcgttggcacagtgccgtgaacagtggaactgtgcccaagggactctgattatccaagcatcttccgaagagtgttgtggtcaccttaaagagacttccccttctggaaatgtggtgacttggcttagtcttcaaactggattcatggatttgaagtaactgtaaaccctaaatcttcattttcatcccagatctggttgagtataaacctcagaattgtaggggctggcctgagctgtttatttcaaaagatactattcaatttaaagctatttttcctcagagtttttgttttctatatattaagtctaaattaagttttctactcattaagactaacatctccccactccatccccactgaaatttgtggaagaaaatttagtacttggctctgaggttgccagttatacaataatctattttgcatatgaaagtttgtatttaacttttttgttcattaaaaaccttactgatatggttataacttcanaaaaaaaaaaaaaaa

SEQ ID NO: 55244 - DNA, 535 bp, Homo Sapiens
ttcatgcttctatttttctttagcacctccatggttctcatatacccatgtctgtaaaaagtgacatgagaattttgttgggttacattttattgtatttattagattcgcttatatagatgacttaggcagaaataaagtcatgtctttagaaggtgaacaagccaacttgtgatggcctgccttttgcttttggcagttgggatgagaacaattgactctcccattggttgttagatagttgaaatggtgcgttggtggtcatacttagtgttctaggctgtgaaatcatggagttcttccacttccaagaatgactcatttgctgttggattctagtacagaatttagcagcctgatgtgtccccaaactgatttaatttctactgaagtgcccttgtgtacatttgttttgtaatttaccaaagtacctacctgagtgtataatgactcctgcagtgagttaatgtaattgctgctttgaccattgttttaaatctgtgtactagagtaactgtgagcagaatgaaatcac

SEQ ID NO: 55245 - DNA, 683 bp, Homo Sapiens
ttttttttttttttttttaaaattaataaaaatattttattgaatttcaggaacttggtacttttttaaaacttcaaatctttgcacacaaatcaccactatactttctagaatagtggaagttaggacttcaagattgtcacttatctccttgtgtcacacagcacagaaaccccaagtcctcacactgcccccaccccccttctggccatgactaccaactactctgttattctagcggaggacaatgacggaagtgggtagacgactgaaggagatcagctgtccaccgcgtactctactaaagtgagaggaggagcaaccgaggatcatgccgcacacactctgagtgcaccacgtgacgtgggtcatacgggagttcccttttgttttctcgtttggttcagggcaaagctactgaaattgttcctagtccctgaggagctcagaagttgggcaaaggtcacagcagacttcctgaaaagcagacactgaggaacacagtggagagcgggagttcacagcgacgcagctgaggacgacgcaggacctctcccaaaggtgctgcagctccagcaccaggggccagggctgcggcgacagcagctcagcaacccttgctgtgctcaagttcttggggattcagagctaagttcaaaattttagaacagtgccttaaagac

SEQ ID NO: 55246 - DNA, 1139 bp, Homo Sapiens
cttaaccaatattattgattaccagacttttatgaaagccaaagactgcttgctagtaggaaaaaatttcaaataataaccaaagctgaaaaatggtctgtcataaattatttccccggtaatttttgaaaggaaaaatgtataacaagtactatttacatatctgcatttaaaaaagcaattcttagaatacttcctttacattattctcctattttagacattttgtgaaagagaacaaattgtccagtggcctcctgtcagatcaacaattattatactccttaattccatgcaaatttaaatgaatgctataaaattttaaatctgtagcctgggtgtacgtttcactcaagttctcctactgaggactcttgactaacagcatactggcagtttcaccttaacctgcccgttaaataatgtgttggtgtgagatatcaggaatgtctcatgatatcacgtttaccatttacaccatctgcaaccatatgctattaataaaatggaaaaaaaacaaaatggtcattttgcatatacttcactctgacctagtttagtccatgatactataattgtgagagcatatccagatgctgtgttctctatgtaaaacagtattgtccattcagaaatgtgtgacccttcatttatggatattgactatatgtaatgcagtgctatcccaatattttccaataaaggactttatgcatttaaaaacacacacaaaaaactacacagaaagaaaaaaaaaagaaacagggggggcgccgacataaaacataatcactccaagagaagcacagaaatatatgtacaacacacggttgttgcgaaacatagtggcctccaagaagaggaggcattaaaaagaaagacgagagccgaacgcagcagtataaacacacaagcgcaggagcggagaaaaacagctccacacgggagaccacatctggggaaagaagaccacccacacctctgcggggggggcgacacacaatgggagggaacacacacacacgaagagatataacaccgcaggaggaaaaaaacaacacagggtgttacttggtggtgacacaacccaaatgagtcgcgcaggagaaaagtgcccacaggaaatgagttgcgaaaat

SEQ ID NO: 55247 - DNA, 681 bp, Homo Sapiens
ttctaagaacttcggacatgttatctcacttgtataagtacttaggtgcctacaacataaacagcacctggtaaattaagtattgaaaaaatgctatggggcagaggaagaaatgctaagcttctgtgagaagagaagacagcttgttacacaggtgaaaagaacaagctgcagctgagagaagaaaagtataagagttgctaggtgtgacaatctcaagacttttcaaccactacaaatttaaacagccaccctaaatcaccccaaaggacagactcgagttgttctttttgtctttaatgtttgcgcctctccgaatcagagaagaagctgccaggattccagtacataccaaaacatgatgacaataccctcaactgtgcaaacttttgtgcatctaccgctatgtaaaggaagctgatgtcagtagactggggggaacagtaaggcatgtttgtgaccgaagctcaatttgccatcacagtgtggccacacctacctcactaatattctaatagtgggataaataattcaatagggataaagcctggattttcctcttattctctcttagtgcttacattcttggcatgatatcgatgtgccatagacaagccaatatgtgagtgtactctatctgaataaagtatagcctttctacattgcaaaaaaaaaaaaaaa

SEQ ID NO: 55248 - DNA, 764 bp, Homo Sapiens
gggcctcagcctcccaaagtgctgggattacaggcctgagccaccatgcccagctgaatttgagctttttaataatctcattccacatagccttatagatcctgtaaatagggggggtcacaaaagtaatatattgtgttatggaagataattttgtactgtgctgtttcctaaatcataccaatatcctaaagtcatgcacttcccagatgatcgtgatcctccaaatgctttgtaagatggggcagggcgtggaaatatatatatatacacacacacacagagacacacacacacacaagtatagtatatattttcctaacctttcttctgggtccttcctcagatctttgagtcacgatagaaaaggagctcgagttctttgtgtaggaaagttaagcttcctgcctgcggtgttcttgcaattgccttaggaattcacaagctctaggagttctgaacggaaggcagacgagaggcactttatccagtcccagaaagaatctctaaccgtgtgacttgagaagtcatctagaaaaacttatatttttaatgtaaaaacaaatggggcttaccagacctcacagagtattggacgtctacaagtgcttttatattttgtaactgtaaagaagtttcatatgcacagaagagcagttggaaatctggtcgactgcaataaaacaagatgacctttgcatgtacaaagatgttgcattccagactatgaaaatagcaaaataagctttggtgcaagtttgcat

SEQ ID NO: 55249 - DNA, 781 bp, Homo Sapiens
gaggattctcatctgtgcttataatggttagagattttatttgtgtggaatgaagtgaggcttgtagtcatggttctagtgtttcagtttgccaagtctgtttactgcagtgaaattcatcaaatgtttcagtgtggttttctgtagcctatcatttactggctatttttttatgtacacctttaggattttctgcctactctatccagttgtccaaatgatatcctacattttacaaatgccctttcagtttctattttctttttccattaaattgccctcatgtcctaatgtgcagtttgtaagtgtgtgtgtgtgtgtctgtgtgtgtgtgaatttgattttcaagagtgctagacttccaatttgagagattaaataatttaattcaggcaaacatttttcattggaatttcacagttcattgtaatgaaaatgttaatcctggatgacctttgacatacagtaatgaatcttggatattaatgaatttgttagtagcatcttgatgtgtgtttttaatgagttattttcaaagttgtgcattaaaccaaagttggcatactgcgaagtgtttatatcaagttccatttggctactgatggacaaaaaatagaaagtgccttcctatgggagagtattttcccttttacaaaattcaccaacggtctattattttgacaaacaaacaacaagacaacacaaccacaccagagagaagaaacccaaaacatccaaaacaacaaaacaagggggggggcgaataaacaccgggggccaa

SEQ ID NO: 55250 - DNA, 569 bp, Homo Sapiens
  misc_feature (489)..(489): n is a, c, g, or t
  misc_feature (517)..(517): n is a, c, g, or t
  misc_feature (522)..(523): n is a, c, g, or t
ctggctgagaatgagaggaaaatcttagttgcttggcgggagggggtttgtggttgtgaaagatagttttgtttaatcttagtcttaaatttaaaaccaagtagcaaggatctagctgagagaataattgaatacattaatataggaggacagacaaagatcctgaaaaggctgggagaagagcatccaaagcacaggtggagagacaaaaaggttagggctgctggcagctgtggagagaactgtacgtggtaagggggagatataagatgtcctgcataagtattttccctgtagattgcaaagtcatctatggagaggaaaggtccaaaatagtcactggggagagcaggtgaattagatggccaagcagggtggatggatcatttgaggtttggggtgacagatcaactgagatccacttacacttctgaaaacgcaagaacactttagaaattaacaacacttaaagctttttacatcatttgntaataactggtggaacttaacaccacanaatannagtattataagaactttatatgaataaaaatatatgcagtctgaaa

SEQ ID NO: 55251 - DNA, 728 bp, Homo Sapiens
  misc_feature (8)..(8): n is a, c, g, or t
  misc_feature (613)..(613): n is a, c, g, or t
  misc_feature (624)..(626): n is a, c, g, or t
ctttgaanccccttttctcggtaagcgcgccattgtgttggtacccgggaattcggccattatggccgggcctgaattcaggctgcagagcctgactcctccctgtggctacttttgggacctaagataagtgactttcctgaacctccatgacctcctcatatgtaaaccagggacaggacccaccttgtgtagtgcctgacccaaagcctggccctgcgcactgtctctgactcacagcaatcatcagcacctctctttgcctcctacttgctcagtctctgtcacaagaactggatctccatccccttgatgctctgagcatcttcacccatttggtcgttgagacatatctgtccatgtctgtctaaaaggggaggagatgagggagaaaaaaagggaatctactcagagcctgtgtgtgctgcccagtctaccaaataatttatatacatctcagtcctcacacaaccatccctgttttatagaggaggaagtggcttagagaatgtaactgaccaaagtcacactgccaggaactggaagcactaggatttgacagcatatccaaatatgtcagcaatttcaataaacatgactgtactcaactaanaaaaaaaaaannnaaaaaaacatgtcggccgcctcggcccagtcgactctagactcgagcaagcttatgcatgcggccgcaattcgagctcacttggccttcgccctatagtggt

SEQ ID NO: 55252 - DNA, 560 bp, Homo Sapiens
  misc_feature (509)..(509): n is a, c, g, or t
atagaaactcccagttaaagcctaggctagcaattttttttagttgcaactaagtaagatatactacaaactaaggatgctgctagactaaggaataaacagcaaggtaccaaagtacagcaaagcaacaacaaaggctctgtatttgcagaggggtctatcatgcttttaagaaaaaagaagagtacaggaaaaaaattcagatagacataagagtattttggatgccattaaactttgtcaataaccattaaaacataggcttaaattatcacgtattgttacaaagacacagttttgtctcattataaaataagattatatgaaatttatattctagaaatgattccaaatcatgtcctaagaatttctcccattcaaatgataatggaaattactgtcaaaaggaaaatctcaaagttaccattacgctgctctcttgtaaatgaactagggataaagatatgggttttatcaaaagccctaaggaatatatctcacattcaccntctatatgtatgtgtatatataaatgccactataaatgaaaatgtcaccaa

SEQ ID NO: 55253 - DNA, 498 bp, Homo Sapiens
aacatatactgtatgtgtatacatacctgtgtatatataaaaggtcaatttatatatttttctataggaaaatggagtaacaagttccctatctcccatatttatttgtccatagtaaaatggccacattgatgataatttctagaactagtttctgagattgtcagccctttgtctaaaataatggcagtattaatgattgacttctgtcactgccatagttacctggattgtcagccttggtagcctttgtctaaagtcctaaagagttccaaaaaaaatgtgttgaaatttaattgctaaatagtggttggtgattctttacagtaggaattgtaataattttcttgcaaataagttatttactgctattgatattgaataatttgtcttttattcagatatatttcaaaaagcatgaatatatgattattcataaattgtatactttaccagtaagttttcagaggaaataaagacttttaaatccttttcaaa

SEQ ID NO: 55254 - DNA, 836 bp, Homo Sapiens
  misc_feature (660)..(660): n is a, c, g, or t
  misc_feature (836)..(836): n is a, c, g, or t
ggagtcttgaaatgccttcgtttgtaaaaataaaataatggtactttcatttaataacaaggtgtttttttcaagaaataatccatgctaaaatggatatttgtgatcctgaaatgtttactaagcattgtaaatttatttataactgccatctccaactacatccttatgatgtttttaacaataaaattaaaacaactgttaaactaaaaaccacaccgttttccagtacttgatctctgagctacaatactcactaaatataattttccaatcaaaatattctattctatattctaagggttaatatgtgattatagtgtccacttgccaccatttttttaaatcaatggacttgaaaagtattaatttagatggatgcgcagatataccctcagttcagtcatagattggagtttgcatataataatgtaaatgtatgtcgacactattctaaatagttctattatgactgaaatttaattaaataaaaaaggttgtaaaatgtgatgtgtatgtgtatatactgcatgtgtactttttaaaataggtgtatgtcccaaacccttttttatacagggttgaatttaaaaattacctgatatatacatatacctttattggttctaaataaagaattttatggccctccccccccgngcaactaaacacaaaacaaaaattttcggcccgcctcgggcccctcgaaaaagcttttcaaaaaccattcgttttgggcgccccggggccccagtagggtaaagtgaaacatggggccataccgtggttttcctaagggaaaatcctgggtcctaaaaaaaagggccttggaattn

SEQ ID NO: 55255 - DNA, 944 bp, Homo Sapiens
gtcagtcaccttcagcctcctggtgagcggctcccaggactgcacctgtatcctgtgggatctggaccacctcacccacgtgacccgcctgcccgcccatcgggaaggcatctcagccatcaccatcagtgacgtctcaggcaccattgtctcctgtgcgggagcmacttgtccctgtggaatgtcaatggacagcccctggccagcatcaccacagcctggggcccagaaggagccataacctgctgctgcctgatggagggcccagcatgggacacaagccagatcatcatcaccgggagtcaagacggcatggtccgggtttggaagactgaggatgtgaagatgtctgttcctggacggccagcaggagaggagcccccggctcagcctccaagcccaagaggccacaagtgggagaagaacctggccttgagtcgagagctggacgttagcattgctttgacagggaagcccagcaaaaccagccccgcagtgactgctctggccgtgtccagaaaccacaccaaactcctggttggtgatgagagggggagaatattctgctggtctgcagatgggtaggaagagagaggcagcagaggctctggcacaacagtccagggctgagggtggcagaggtgactggggcctgagctctgcctacagaagaaacccccagggcctccttccccacagttctcaaggaagggcctctggcaatcacagctctgcagcccaaccctctccatggccgatgggacttctatgaaaaggatgagcacacacactcggagggctgagcagcacgctggaaactgtgacttggtgatgccagctgcacacgaaattacacatgactyacttattaaggstattgcmtgaaaaaaaaaagatgggtgctwctggaattttgtttktyttwtttwttaagcactatgttt

SEQ ID NO: 55256 - DNA, 709 bp, Homo Sapiens
  misc_feature (691)..(691): n is a, c, g, or t
  misc_feature (700)..(700): n is a, c, g, or t
cttaggcaaacagactgggttggattgagaattgaatgtatacataaaatttggtttggtcagatgagaacaccaaatgtggtagctagctcacctttatttatgagatttttattgggttgatttgtcttgaaagaatcaaatctaagagaaatgtttggaatggctagatgatcctaacagaagaaatcttacaggtctttactgctaaacctaaggagatgagagtaaacagtaagtggccaactcaaagaagcatggactatgttgaaacatggactatagctgcaatttcccagtggtgcagttttcaagcgctttaccccaggagagaaaaaaataaataaatgaaaagtagccatttcaccattcagaggatagatactgttgcccagtgaaaactgcatgaattatgtaatagttttatgcttgtttcccccactcaccattccaaaactgtaagacttcaagatagaacaggaggtatgaaattttaacagcacataaaaaaatagtgaacattctatccccgcacttcattgccgttactaaggctaaggcaggactgagtttagaatgcagcaaagctttgaaatgtataagagataatatctctaatattcaaatacaccataaactcaaaacttagaatcaatcctatttttaaaatactgaatgtgactagaaacgntataaaagntttcaagat

SEQ ID NO: 55257 - DNA, 553 bp, Homo Sapiens
cttcacagtaacgcacggacgatccctaaactgccttgtaaacaaaaatgagagcttgagtcagaggaagccgagacaatatccttcctcgacaacgtgcgagaaccctgacgtcccccagcaaaggaagacgttgcaagcaggcaaaatgcgtcgatttttttttttgtcagtatgatgatttttgcagccacttggctatggagagcagccgacaccccctcttacagccgtggatgtttcctggaagctgactcagtctgttcactggttgagctttgagtgaaaagataacacaggtctattgactcacacacatgttttaagatggaaaactttacttctgttcttggcaggacatggagagagggagggattccaaaaagtctcagcctccatcaaggcgtggcagctcatgccggtaatctcagcactttgggaggctcaggcgggaggactgattgagtccgggtgttcaagggccaacctaggcaacacagtgagaactcatctctgtaaaaaataaaaataaaacattaaaaaaaaaaaaaaa

SEQ ID NO: 55258 - DNA, 530 bp, Homo Sapiens
  misc_feature (530)..(530): n is a, c, g, or t
ggcgagcttgtgagaaggaagggatggatagtagcatccacctgagtagtctgatcagtcggcatgatgacgaagccacgagaacatcgacctcagaaggactggaggaaggtgaagtggagggagagacgctcctgatcgtcgaatccgaggatcaggcatcagtggacttatcgcacgaccagagtggggattccctcaacagtgatgaaggagacgtgtcttggatggaggagcagctgtcctacttctgtgacaagtgccaaaaatggataccagccagtaaggagcttctcaattcctttgatttgtcaattcctgtgtgaaggtttgtttttccaacctgtgaaagaaacgtgaatgtaaaagagacctaaataaaaggataattatatttattctctagttgatcagctataaatttatataaaacataggcatgtttgtactaatgaaacgtactgtcaacctctatcacattgttaaattaacacttttggtggtaactcaataaaattgagaaaatttan

SEQ ID NO: 55259 - DNA, 495 bp, Homo Sapiens
tgggtgggggaggctggaggtcattggagaggctggactgctgccaccccgggtgctcccgctctgccatagcactgatcagtgacaatttacaggaatgtagcagcgatggaattacctggaacagttttttgtttttgtttttgtttttgtttttgtgggggggggcaactaaacaaacacaaagtattctgtgtcaggtattgggctggacagggcagttgtgtgttggggtggtttttttctctatttttttgtttgtttcttgttttttaataatgtttacaatctgcctcaatcactctgtcttttataaagattccacctccagtcctctctcctcccccctactcaggcccttgaggctattaggagatgcttgaagaactcaacaaaatcccaatccaagtcaaactttgcacatatttatatttatattcagaaaagaaacatttcagtaatttataataaagagcactattttttaataaaagg

SEQ ID NO: 55260 - DNA, 813 bp, Homo Sapiens
  misc_feature (632)..(632): n is a, c, g, or t
  misc_feature (774)..(774): n is a, c, g, or t
  misc_feature (781)..(781): n is a, c, g, or t
  misc_feature (810)..(810): n is a, c, g, or t
cagcttgtcttctctgtttggctatcattgttggctagtcagcaaaaataaatctacattagaggcattcagaagtccagtatttcgacatggaacagataagaatggattcagcttgggtttcagtaaaaacatgcgacaagtttttggtgatgagaagaagtactggttgctacccattttttcaagtctaggtgatggctgctcctttccaacttgccttgttaaccaggatcctgaacaagcatctactcctgcagggctgaattccacagctaaaaatctcgaaaaccatcagtttcctgcaaagccattgagagagtcccagagccaccttcttactgattctcagtcttggacggagagcagcataaacccaggaaaatgcaaagctggtatgagcaatcctgcattaaccatggaaaatgagacttaactcttcaagcaagataaattcatactttataaaagtatcaatgctgtagatggatggaagaggcttcccacaggaaggtgccaccagtcagttgtgcctatgtccctttggctggaaatgcagaatatgaattgattagttctctccaagccattgcttaaaatataacatgttttggatccaatacacacattgntacaactaacacaaattcctattaaatattaaaagtagttctggtttattaatcaacggggaaaacatcttcttcaaaaaacttggaataaatcaaggaccagtttttacccaaatatatgggtagcacagtttatcacatngaaactncattaatcatctggattttccgaatctgnaaa

SEQ ID NO: 55261 - DNA, 921 bp, Homo Sapiens
  misc_feature (45)..(45): n is a, c, g, or t
cccggcccccctcccaaggctgtgtctgatattcttgagcctgtncgagtttccttttccaagcctcctgttctcccacccccacccctgccatgctgcagtgactaaatctgtggttctcatccttggagaacacctgagtagctgctacaagctggccacagcccagcgactctgatgtggttgggctgggtgtggccagcagccagggcatcgggacttttcgaagctcccaggtgactcaccggcagctggggatgagaactgtcaggagggaaggtcagaagtcccaggatgcacttgaaaagcctctagctccaccagtgaccagctcctggctggactcctggtctggactcagcatcagggaggctctggcctctcgccctcagggctgggggcttcttcacatggtcatcaaagacttggccagttccgcctctcccgcggccgtccttgtctcacccagcatcacgacgcatcagttcaccaacaaacacgattcagtgctgctagtgctgggtcctgttctgggggctggtgatgaggccaagagggaaagagggagctctgtgttccatcgagggggcgacaagcctgggaccagatgaaagtgactcatgttgttaattagcggcttagggccaaaggtggcccctggaccagtggcctcagcatcacctgggaaaaggttagaaatgaacattcccaggccccacctcagcctcctgaatcagagcatccctttggcaaaccatactgagaaacaaccacgtgcatcaccaagcgctgtgaagaaggcaagctttgagaccttgaaggaatcatcaaactctgggcctcggtgtgctcacccagggcgagacaaagacgccmatgctcctccaagtggcctccaagattaaatgagcaatgactttt

SEQ ID NO: 55262 - DNA, 686 bp, Homo Sapiens
atattcatgtgttctttcatctaataaacatttattaatgtatagttctacaccaggcattctgaagggtccaaaagaaagttcctgccctctagtagcacataatccgttatttctcagcacaccatgccatctgtttatcattcagcagttaagtaattcatcacttcatatttttaccaaagtatatttacaagtctgtttatctggatctggcaaactggaaaatgtttgaagggatactcaggctttgatccatgccaacatgaaaggactccaagcacatttaagtaggctggtcttttcatcatgcatgattttttttttagtgcaaatttagactttagtttgggaaagagaacagtatacagtatcctttgtaagataaatcacaacaacaaaaattaagttttattgcacaaagtagataaatgagaaagtctttcttaaaaaaatgcttctttaactgtaacagcaaaactaaatgcatattttatcaaccccttatttctaattgctgtattcatttccacccttaaactatttaagcatttcatctgctgaaagtccttatatacatggtagacggaatatttctccattaatgatagatcaaaatgaagatatttaaaaattaacaaaatcaggccaaggcaggaggatcactttagcccaggaggtccaga

SEQ ID NO: 55263 - DNA, 1038 bp, Homo Sapiens
ccgggattggaaggaaagctctactgcagattctgaggctcggagcaggaaaaccccacagaagaggcagatacacaattttagccatctggtatccaagcaggagttactggagctctttaaggagctacacactgggagaaaggtgaaagatgggcaacttacggtcggactggtgggctaccctaatgttggtaagagttcaacaatcaacaccatcatgggcaacaagaaagtatctgtgtctgccacacctggtcacacaaagcactttcagactctctatgtggagcctggcctctgcctgtgtgactgtcctggcttggtgatgccatcttttgtgtctaccaaggcagaaatgacttgcagcggaatcctcccaattgatcagatgagagatcatgttcctcctgtatcactagtttgccagaatattccaagacatgttttagaagctacctatggcattaacatcataacgcctagagaggatgaagatccccaccgacctccaacatcggaagaactgttgacagcttatggatacatgcgaggattcatgacagcgcatggacagccagaccagcctcgatctgcgcgctacatcctgaaggactatgtcagtggtaagctgctgtactgccatcctcctcctggaagagatcctgtaacttttcagcatcaacaccagcgactcctagagaacaaaatgaacagtgatgaaataaaaatgcagctaggcagaaataaaaaagcaaagcagattgaaaatatcgttgacaaaacttttttccatcaagagaatgtgagggctttgaccaaaggagtccaggctgtgatgggktacaagcccgggagtggtgtagtgactgmtccactgcgagctctgagaacggggcggggaagcctggaaaaamatggcamagaaataaaaagaaaaagtcgwgatmytamagmactggatatgtrgggtgggakgcamagaatgtmtctgmttktsagtggaaagagmgaagtgctktkgctktgaacgtccca

SEQ ID NO: 55264 - DNA, 1075 bp, Homo Sapiens
aagggaccctctctttttggatggcagagatggttttttaatgaaatcccaccatctatctgagtgagtctggcaggctttttagttcctgagttaaatttgtaatagaaccaaggcaatgctgctgactttgatatgtatgactcagtctttcaatatgtggttttcaaaaaattgttgaagacgtgacttcatagcaatatatagagaataaattaaaatcagcagattgagttttcaacattgcaaaatcagttttttacctctttcctaccaatttcacattttgcagaaacttgttcacatttccaacaatatcagaattagaaaacagttcagataacaagaaagattaaaaattagggaaattctgatatcaccataaagcactattttacatttagagattacatttaagataaagtcatcatacacaaaaacaataaatatttataactttctctataaggtccgcatatactgtatatattgaaacaatctgaatgactagtagatttcatatgaccattgttatttccactttctccaatacttgtattttatgctacatgtaatgaagttggacctttttattatttagtaattcctatatgttcctatacttttcattttcaagatgattgctctattgtttcatgttgtttctagcaaatatatctccatgagatatgcactttgtttcactcttgacacagtttcaaacttttatctttcaattcgctgtgtgtgtatcctaaggggttatctggcatgtattagcttcctattctaattaaattttcttagcaagccaagaaaaaacaaaacacacacaaagtagaacacaagaaaagagggggcgccgcaaaaaggatccgccaggggagccaacaataacaatacccccaatgtcgtgcgtaacaacaggccacaaaagggggtgcgtacaaagagaagcacacgcgcgcagttatacagacgcgatgaagagcgaaacactgacgaggagaataggagagacaccaacacgggcggaagacatgcggcagcgcgacgaaattaacacacgagaaat

SEQ ID NO: 55265 - DNA, 685 bp, Homo Sapiens
  misc_feature (555)..(558): n is a, c, g, or t
  misc_feature (562)..(563): n is a, c, g, or t
  misc_feature (566)..(570): n is a, c, g, or t
  misc_feature (572)..(573): n is a, c, g, or t
  misc_feature (576)..(576): n is a, c, g, or t
  misc_feature (590)..(590): n is a, c, g, or t
  misc_feature (601)..(602): n is a, c, g, or t
  misc_feature (605)..(605): n is a, c, g, or t
  misc_feature (619)..(619): n is a, c, g, or t
  misc_feature (622)..(622): n is a, c, g, or t
  misc_feature (624)..(628): n is a, c, g, or t
  misc_feature (630)..(634): n is a, c, g, or t
  misc_feature (640)..(649): n is a, c, g, or t
  misc_feature (653)..(654): n is a, c, g, or t
  misc_feature (656)..(667): n is a, c, g, or t
  misc_feature (671)..(684): n is a, c, g, or t
attcaaggtctgggttccctaaagttactaagaatggatacaaattagttgtggccgttgcggttaatgcttcttgtagctcttaacccagccctttctaaacctttggatatacttactagtcagttccgaaggtactcagtacaaatttgcgttggcgcaccaggccgactaaagatgaggtgggtgtattagactcaaaatttcttaagtcggccagggggtagaattgagctaccaagagaatgagagactaccctgttgtaacagatttggatcgcgcttagaaaaacagggagaaagctggatgatgttcaacttaatgtcttgcatttcagacgattatcgaatggacggggataaataaaaacgatgttacagatagccctctaagtgtggatagtaaatattttgatttacaattaagcctaccttgaggtgcaggccctaaccaacggatagttgagtaataggggcctagacgccaatggaaagaaaatgggactttaagctttgtttgaacatatattctgttaataaagaagtttaaatcannnnaaannaannnnnannaanaaaaaaaaaaaaanaaaaaaaaaannaanaaaaaaaaaaaaanaanannnnnannnnnaaaaannnnnnnnnnaaannannnnnnnnnnnnaaannnnnnnnnnnnnna

SEQ ID NO: 55266 - DNA, 823 bp, Homo Sapiens
  misc_feature (724)..(724): n is a, c, g, or t
  misc_feature (770)..(770): n is a, c, g, or t
  misc_feature (784)..(784): n is a, c, g, or t
tagcagagcagggcttcctggcttgaggctggaagcctttgggaagaggcccagctgggacattccctgggcacctgtcttccgctgaagggagcaaggtgccctctgggactgacagccatgaccctctgtgccatcctcaatccttgagccatatatcaagagtcctctagagccggatggtcctcaaaagtctgtccaaggaatgccaacgttcaccgggctctgagaaacgacgcaaatctctgagctggggaccacttggagaaccggcttagtaacagtcctgatcttcgcaagccagcttcttctgcatctgaggggctcctggcgcccagaggaggcagacagatgtcttctagctgagtttctaaccgcatgatgagactcagaccttccgctgcactagaaaatctgcaacagtgtccctgagtcacttctccttagtgggcagactcgtgttagatttgtggaacccagctctctgatttactccttttggaaaacccatggaatttcatgtataaggctttcatttgtattttaaggtttttctgtttgttttgagtatatacatggtgctcaatagcaacatcttagcagatgaaagcagtttatgattccactccctcctgtatgacaggtagccactatactgaatcaaggtgctgaactcaaatcacaaaattctggcttaccgatacaacaaccaatacatctttgntctgtaatgtaaaatttgactccttacttttataacttattaaagntaaaatgtctgggnttttgcaaatcaaaaaaaaaaaaaaaaaaagatctttaa

SEQ ID NO: 55267 - DNA, 652 bp, Homo Sapiens
taaatttaggtctgttggtccatgtggcctggtttcctagcacccattaaacataatgctatcttttaagcctgaacatgtgggttttttaaatcaaattggaaaaaaattagacaactgatgtcatgctgtcttggtatccatactaaaaaagtatcaggaaaatagattatttttgtgctgtgaaacactattcagtggaaagtttagtggcaacttttccatatcattcatgacttaatacctgaaatgcacttttaaatgtttgccttatatccaagtgtttacttgtatccatgacctaaccgtctattgaaaagaatgtttgcagatgcagattgcaatgttgtttgtattcataggcaaaagtcctcttctctagtataattttttaaatctgagagaattgaaggtacagaaaaaaattctggagtgcctgaaccacagtttgagagcacaaaggtcacattctttcagtaaatttgggggaaataaatttcagctacctggttagcttcagtgactacttacacacagggctttggttccattacttgtttccaccacagccacatcctaaatacttggaatatccgaaaacaacttctaaaatcactcaataaaagtattcacttctaaaaaaaaaaaaaaa

SEQ ID NO: 55268 - DNA, 795 bp, Homo Sapiens
  misc_feature (631)..(631): n is a, c, g, or t
cacgaggggaagtcctcactgctccgggccatttcaaacgccagacccgccgtggcttcctacccgttcaccaccctgaagccccacgtcgggatcgtccactacgaaggccacctacaaatagcagtggccgacatccccggcatcatacgaggcgcccaccagaacaggggtctggggtccgccttcctcaggcacatcgagcgctgccgctttctcttgttcgtggtggatctttctcagcctgagccgtggactcaagttgacgatttaaaatatgaactggagatgtatgaaaagggcctgtctgcgaggccccacgcaatcgtcgcaaacaagattgacctccctgaagcccaagccaatctgtcccagctccgggatcacttgggacaggaggtcatcgtgctgtcggcgttgaccggcgagaacctggagcagctgctgttgcacctgaaggtgctgtatgacgcctacgcggaggccgagctgggccagggccgccagccgctcaggtggtagccacgccagagcggggtcgcctctgggcctctgtctgagcaaacctggatgtgaattcggtggttttgaatgcataaagtgccttgtggacacgggggagttgtggtgnctctgggtctctgggccccgcctgctggcctgggatgccctcatgttgggagcattccgtgcccccacccgcctgccctcgtattcctgcactgtcagctgcgcgactgagagcagttgctattgtgcgattacaccctaaaagggtgggggcccaacgggtgc

SEQ ID NO: 55269 - DNA, 659 bp, Homo Sapiens
aaactccatctcaaaaaaaaaaaaaaaaaaaaagaaaaacgttttttaattcaacccaaagtctgaatttcttgaggaaaaggtcaatgtcttttcatctctgtattgttccccacctcttaacacagtgcctggcacatactaggtgctcaataaatgtctgttgaatagaattattaataatttaagagtaggaaaaaggagtgtcagagagagactcaaagatgagtgagagagcatggaagatggctgtttcatgtgagacaggaatggaagaagttatgaatagggatcagatgggggagtgagaatccctgtaagtaaaatgtgaggaaaagaacaagctgagaacaagattctcctgtcaaaaaggcgtcttactgtaaatagtccaaggtgacatttgttagttttgaatactgcttttgggtttctttttttcatttttatattttaaaatttttatcaaagaacaaagacttatgtagttttcttttattctacacaatccaaattaaacagcttttggtgatgcaattgtacactttcttaagaatatatctaataccacattttagcagaaccaagcaatgactgacattattcattgggatctggccactaaataaaattcttttatgcataaaaaaaaaaaaaaa

SEQ ID NO: 55270 - DNA, 657 bp, Homo Sapiens
gaagttaccaagaagttcatgacagatctatttcaaattctggtgaagaaggaagaattggcccttgaaagaatcagtgttttacaataattttgaaagagggtagcgacagaaggaagaaaacattatcaggagggaattcagataaaggacaaaccatattttgactgctactgacttgttgaactggcagtcggggtcaacttgggaagacagctgtgaccataaatattaaagaagacaaaaggattctttgtgacactgagaccttctgcagtaccacagtggaggaaatgccagtgtacacaactggcctcatttaattcctgggaggagatagtttgggatgcagtgcttgttgttgctgagcaggcgatcacagcatgcactgtgtttctttctttgagaatatttgaatcctgcctgaatactcgtaacagatgagagacgcaggttttgatagcatagatttacgctgtcattagtcatgagctcttgggacgaaagtaattggttttatcctctttagagttagaccctgtggttgggtatgaaagatgagtgtctgtaaaaatccttcttagaaatgtatttcctcaagactctgtctcaaaaaaaaaaaaaaagaaatttatttcctagttctgtaaaaatcgc

SEQ ID NO: 55271 - DNA, 543 bp, Homo Sapiens
cacgagggccgccccacttttttttttttttttttttttaacttcaatttttaataatggaaacaattttgccattctagaaactattttaggggagaaaaatcttccctacaaaaataaacttaaacccatcaaaattataaatattataactttttacttctgccatttaaaatgctctcctgcaataccaccccttcatttaacatccttcctgtaccatcacatattgaagagaaaacagtattacagcaaagcttagatagtttaacataatgatttgtacaatgattcttaaaaaatctttggccttagtggccttttttcttcacttacacattaaaaatgctgctgcagtaaccagtgtttgggaaaggacatcagtcttcaagaaccataaactgacagaatttcaatacagtaggtttccaaattgcaatttgtagtgcacatgacagtaagcgaggttttgggtaaatatagatgaggatgcctattcagacaatctacttcaagtaaaaaaaaaaaaaaaaaaaagtgggg

SEQ ID NO: 55272 - DNA, 701 bp, Homo Sapiens
ccatcgcgtagaaagaaccagggtgtccccgggacaggccgtcccccaccccatcctgtagaagtccattccccttttccctcctgtgctctgtcccccaaggagtcatggaactcagggtactgggcctcaacgggaacctgagacagctccagcttcgcagcccttcccggagctacagggggatcctctagcatggggggtgtgacttggttcctttgaccaggtcctgtgaggaagcctggagcaagggtctcccccagcaggatgggtggggcctgctctggagctgagcccgtggccgctcacaggtgtccttagtggtgttgcagctgtctactggctgcatgtgctgtgaatatcccaaggaactggctgtggaatgcgtgtttgggtcagtctgtgccctctcagtagacactggagctgctctgtccctgaagaggccccgtgccccaggcatggcaagcgcctgcctctccccttccggtgctcacacgcccacgccgtgccacccgatgcaggactcacctctgtgccttgctgctcctgaggcccaagggcagccatggtgctctgtactgctcgggccgcccaggtcacagagcctgagcttcgtagccaaagcagcctgatgacccacccaccaagggaagaaagcagaataaacatttttgcactgcctgaaaaaaaaaaaaaaa

SEQ ID NO: 55273 - DNA, 558 bp, Homo Sapiens
atagtttatgaagcttgacaacaaatgtaaacagacacgaaattataaatctgctaaatatgtattaagggtattaattattgaaagtccctttccccaaaactcaactcctatggcaattatgaactccattttaccaagaacatttaagtgcctcagcatctgtatgatatagtggagcaggtgctgacataggtaccagctgacatgatgtgtcactagctctgtgggatgattgccacatacatggaacacctgggagtgctggaaatgtactgtgatcgaagtgacaaagtgtgttttcattcacagtggaggctacatcaagcaaggggaggtccagccctcttgcaagtgtggtgagaggctctactagcaaagacatgggcaccggagtaggtcccgtgtagcatgcgggtgctgtagagaaaattcagtgacgtacatggctctggttctggacacaaaatctgtactggagaggaaatgactgctgaaataaggcgatgtatgaatatttaaacatgcctggaacactaaagtaaagtaatgatattt

SEQ ID NO: 55274 - DNA, 456 bp, Homo Sapiens
gtaaatttgatagtacattttgatagtacgggaggcgatacggcatggtgacagaaaagcgccggcttggttagcaggaccacctggcagggctgcaggctgtgccacttaccaggcaggggaccttgggccagctgcttggcctcactcaccctgtttctcagctgcaattgggatgaacagactgcctgcttcggggttgcctaaaactcacattggttaatgatgtgaaatgcttagcgcagtgcctggcatagagagaattctcattagatgatacctcagctgggctttaggagctacagaagaagctgcatctccatgagctcagcgtgtttctagctttcctttttgttttctattcaacctttcacccaactcagcttctcaatccctaaatgacaaaggtttgggaaggaagacttggaccgaggcttgcatttgtttctgagaatt

SEQ ID NO: 55275 - DNA, 587 bp, Homo Sapiens
  misc_feature (561)..(561): n is a, c, g, or t
aaggctgctgctatggggccgggcggccgtgtggcgcggctgctcgccccactaatgtggcgcagggcggtttcctcggtggcggggtccgcggttggagccgagcccgggcttcggctgctggccgtgcagcggcttcccgtaggagcagcgttctgccgggcttgccagaccccaaactttgtccgcggcctgcacagcgagcctgggctggaggagcgggcggaggggacggtcaacgagggacgcccagaatcggacgcggcagatcatactggtcccaagtttgacatcgatatgatggtttcacttctgaggcaagaaaatgcaagagacatttgtgtgatccaggttcctccagaaatgagatatacagattactttgtgattgttagtggaacttctacccgacacttacatgccatggccttctacgttgtgaaaatgtacaaacacctgaaatgtaaacgtgaccctcatgttaagatagaagggaaggacactgatgactggctgtgcgtggattttggcagcatggtgattcatttgatgcttccaganaccagagaaatctatgaattagagaa

SEQ ID NO: 55276 - DNA, 285 bp, Homo Sapiens
ccaatactagttaataaatctatttttcttcatttcctttttttgcacagaagctggtaatctaggacctacgtgtgaacaactttatatgaatattttttgtacttggtttacttgggttggtatgatacattatatttaagttccttgaacactgtggatcccctaatgtgtatgaatgactgaggctttgtaaattaagggacgtttgtgtgaataaagttatttgatggggtcaaaaaaaaaaaaaaaaaaaaaaaaaaacaaaaaaaaaaacaaaaaaaa

SEQ ID NO: 55277 - DNA, 796 bp, Homo Sapiens
  misc_feature (638)..(638): n is a, c, g, or t
  misc_feature (756)..(756): n is a, c, g, or t
atgatccagcctacctggaaagccaaccagtcctcataatggacaagatccaccagctcctcctgtggactaactttgtgatatgggaagtgaaaatagttaacaccttgcacgaccaaacgaacgaagatgaccagagtactcttaaccccattagaactgtttttccttttgtatctgcaatatgggatggtattgttttcatgagcttctagaaatttcacttgcaagtttatttttgcttcctgtgttactgccattcctatttacagtatatttgagtgaatgattatatttttaaaaagttacatggggcttttttggttgtcctaaacttacaaacattccactcattctgtttgtaactgtgattataatttttgtgataatttctggcctgattgaaggaaatttgagaggtctgcatttatatattttaaatagatttgataggtttttaaattgctttttttcataaggtatttataaagttatttggggttgtctgggattgtgtgaaagaaaattagaaccacgctgtatttacatttaccttggtagtttatttgtggatggcagttttctgtagttttggggactgtggtagctcttggattgttttgcaaattacagctganatctgtgtcatggattaaactggcttatgtggctagaataggaagagagaaaaaatgaaatggttgtttactaattttatactcccattaaaaatctctaatgttaagaaaaccttanataaacttgattgatcaatatggcaaaaaaaaaaaaaaaa

SEQ ID NO: 55278 - DNA, 461 bp, Homo Sapiens
aaggctgggaacagaggggatgtggtgagagccaggttcctctggccctctccagggtgttttccactagtcactactgtcttctccttgtagctaatcaatcaatattcttcccttgcctgtgggcagtggagagtgctgctgggtgtacgctgcacctgcccactgagttggggaaagaggataatcagtgagcactgttctgctcagagctcctgatctaccccaccccctaggatccaggactgggtcaaagctgcatgaaaccaggccctggcagcaacctgggaatggctggaggtgggagagaacctgacttctctttccctctccctcctccaacattactggaactctatcctgttaggatcttctgagcttgtttccctgctgggtgggacagaggacaaaggagaagggagggtctagaagaggcagcccttctttgtcctctggggtaa

SEQ ID NO: 55279 - DNA, 522 bp, Homo Sapiens
  misc_feature (442)..(442): n is a, c, g, or t
gtctcctggaattttacattcccattaatgtcctcattcaattggcagacctaggatgtatggttaactctcaggccattatgtttttcatggctcatttcccaaactgcattgttggtaggtgccttgctaagctgtaatgcagtgaagaagatggtggggcatttttagtaattggaactgtaacattaatttacaagattgaaccggggatgtctggatgctgacaagggagagccaagtactgttaatgccatcaatcctctaggaaggaattggtggtttttctgaagtgtgggggaaagggtggtttcttgctggatttcatggccagtaagtaaatttaaatgcttcatttttaatttggatgtttctgctagagacctttgatttggaaattagttattttgcatgtttgtcaactgtatatgtatgaaaatanaaaaaaaacatgctttttgtaaaaacccctaagatttgtatatgttcatctttaggcttctgaaaaggagagaaatcata

SEQ ID NO: 55280 - DNA, 595 bp, Homo Sapiens
atcttcactgttagaatttcacttaaaagtgaataactgccatacatgttttcttggcatcttcatttacagaaataacatacagcatctaaagcaagttctgtccctcttaatgtgtatgacatctttttaagtagctgatcagcaataatagccaccagttgactaggtcagcctgatatactagtggatcactgtccaagataaaaaggtaaccccaagtattgcaaaatttccctcaatttctttatgtaacattgaagaaatgttgttaccagctaagatgataaattggaaaacagtcttgttaaggtgaaaggggtccttggtgatggatcattatttcaaaaaagaaaaaaatcatgtgaaaaggaatagtggttcctcttgatgtatagtatgcctgtattatagtttttacaaaattgtgaacttgtgtaatagtataataggagatattgttgaatttctaactgtttatacatttaaattcatatatgtaatgtttgttttatcaattacaatctgaatttctaagaagcatgttgacttttgcaataaagatgcaatatggaatggttcacaattggaaaaa

SEQ ID NO: 55281 - DNA, 838 bp, Homo Sapiens
gggcttatatggaaatattgagaaggtaaaatttatgaagaccattcctggtacagcactggtagaaatgggtgatgagtatgctgtagaaagagctgtcacacaccttaataatgtcaaattatttgggaaaagacttaatgtttgcgtgtctaaacaacattcagttgttccaagtcaaatatttgagctggaggatggtaccagcagctacaaagattttgcaatgagcaaaaataatcgctttacaagtgctggccaagcatctaagaatataatccagccaccctcctgtgttttgcattattataatgttccattgtgtgtcacagaagagaccttcacaaagttgtgtaatgaccatgaagttcttacattcatcaaatataaagtgtttgatgcaaaaccttcagccaaaacactttctgggctattagaatgggagtgcaaaactgatgcagtagaagcccttacggcactgaatcactatcagataagagtgccgaatggttccaatccctatacattgaagctttgcttttctacatcatcccatttataagaagagaagagcatgttagaaatttatggttcacctttattaccaatttccaaagctaccacttcatttaaaaaaaaaatctaaaatggggtggaatttccagggttggccttggcttacatttaaaaatacctggttctggaaaataaaacattaattttgccccttgagataaaatttttggttggtaaaccttttacaataattggagaattgcgttttccaattttttaaggaaaagaaattattccttaaagtgctaagacactaatccct

SEQ ID NO: 55282 - DNA, 621 bp, Homo Sapiens
caaagcagaaaccacacccagcatgatccccagccagagcagagccttccaaacggtctgaattacaatggacttgactcccacgctttcctaggagtcagggtctttggactcttctcgtcattggagctcaagtcaccagccacacaaccagatgagaggtcatctaagtagcagtgagcattgcacggaacagattcaatgagcattttccttatacaataccaaacaagcaaaaggatgtaagctgattcatctgtaaaaaggcatcttattgtgcctttagaccagagtaagggaaagcaggagtccaaatctatttgttgaccaggacctgtggtgagaaggttggggaaaggtgaggtgaatatacctaaaacttttaatgtgggatattttgtatcagtgctttgattcacaattttcaagaggaaatggggtgctgtttgtaaattttctatgcatttctgcaaacttattggattattagttattcagacagtcaagcagaacccacagccttattacacctgtctacaccatgtactgagctaacacttctaagaaatccaaaaaaggaacatgtgtcttctattctgacttaacttcatttgtcataag

SEQ ID NO: 55283 - DNA, 770 bp, Homo Sapiens
ggtacattggtttgccctatgcggaccataattatggtgctcgtcctcctccgacacctccggcttcccctcctccatcagtccttattagcaaaaatgaagtaggcatatttaccactcctaattttgatgaaacttccagtgctactacaatcagcacatctgaggatggaagttatggtactgatgtaaccaggtgcatatgtggttttacacatgatgatggatacatgatctgttgtgacaaatgcagcgtttggcaacatattgactgcatggggattgataggcagcatattcctgatacatatctatgtgaacgttgtcagcctaggaatttggataaagagagggcagtgctactacaacgccggaaaagggaaaatatgtcagatggtgataccagtgcaactgagagtggtgatgaggttcctgtggaattatatactgcatttcagcatactccaacatcaattactttaactgcttcaaagtgtccaaagttaatgataaaagaaggaaaaaaagcgggggagaaagaacaacacatttcaaaatgtaaaaaggcatttcgtgaaggatctaggaagtcctcaagagttaagggttcagcctccagagaattggatcccttctcctgaatggttcaaaatttttgggatggggaagacaaagatccaaagccatgggaattggattcgaattatgaaaggaaagcgcaaattaaccaaccccggttatcaattggaaaggggtgggttccaaaaaat

SEQ ID NO: 55284 - DNA, 903 bp, Homo Sapiens
cactgtgattgcaattctgtctttccatagaaatgaactttttctatcgaaatgtttaacttaaatattttaacataaattatttacatggatctttatgtataattcatccttatatataccccttaatcacgtagtcatgagaagataacttgctttctttacagaaagggcagagaggaataagataagaaactgaaacaagcaagaatgaagagagatgtgggggagagactgctggtctccagaccacagcaatgtgttttaagataagatgaaatattttaactgcagaagggatataaaatctatgtaattacatgctgatgggatccattgcacccaggttttgaccttggctgtaaatgctagactatgatatcttgttattctttttctcctttgggcttttaaaaaataatttcattctcagatcattttctgtactgtttactgaggcaaaaaaaaaaaaaaaatctgaagtcaatcatggcttctactttcgggactgagcatttggagaatgcagatctttcctgtgtttggacatgaaatagccatggttctaaaagatagtttacttgtggggtcacgggaggtatatgatggtcaccccttttccaaaaatcatttggtagtttagtggaaacgtcatcaggaaattttctatcatactttataattaattccaatactaggacttagggtggggagaacatggttggggggcctttataggatcctttttttgccccaattggtttgggagttactgggggggctctctaagaacaggtgttgtggtaaaagtttttaacaacaagatctttgggggacagcataacaacaggggaggaggcgacaccccggggggggaaatggtgaaaggagaaggtcttaaaa

SEQ ID NO: 55285 - DNA, 510 bp, Homo Sapiens
agtccgtaagataaatatgagctccattgacttctgatgtctggtttagcattacataatatgttgatcttacactctgcttttgtccaaataaaatgcaatagtatcaatatcaatttcagaaaaatggactgaatatgcttttttggtgatgaaatctcatgtacgatatttatagtgatgtgcttttattttctcatgagatactaaatattaattgtgttgtacatttgttcttagcatatattaaagttttgaaccaaatgtgttaaagcttacgctttgccatgtaaatttcccagaagttgttgagctcaaatgtatcctacatccagctgtagaaatttgtcagaaattgtttaaattttgtatataattgtactgtttaattctagccattgcgctgaacagtatttgagttaccatataatatggctttacacaaggaaatgtgtggctttagtttcgtattttttcagtatagaagttcctgtgtcttatttaaataaa

SEQ ID NO: 55286 - DNA, 625 bp, Homo Sapiens
  misc_feature (537)..(537): n is a, c, g, or t
ccttcactgacctgcctttgtgcctacaactgaacatcatgcagaggctgagcgacgggcgggacctggtcagcctgggccaggctgcccccgacctgcacgtgctcagcgaagaccggctgctgtggaagaaactctgccagtaccacttctccgagcggcagatccgcaaacgattaattctgtcagacaaagggcagctggattggaagaagatgtatttcaaacttgtccgatgttacccaaggaaagagcagtatggagatacccttcagctctgcaaacactgtcacatcctttcctggaagggcactgaccatccgtgcactgccaataacccagagagctgctccgtttcactttcaccccaggactttatcaacttgttcaagttctgaatcccagcacatgacaacacttcagaagggtccccctgctgactggagagctgggaatatggcatttggacacttcatttgtaaatagtgtacattttaaacattggctcgaaacttcagagataagtcatggagaggnacattggaggggagaaatgcagttgctgactgggaatttaagaatgtgaacttctcactagaattggtatggaaaagcaaaatactgt

SEQ ID NO: 55287 - DNA, 777 bp, Homo Sapiens
agctccccagggcagccccagtagctacactgtccagacagcacaagaccaggctggtgtcacgtccatccgagcgctgcctcagggatcgataaagtttcactgcagaaagtctccactgcggtatgctgacatctgccctgaaccttcaccctacagcattacaggctttaatcagattctgctggaaagacacaggctgatccacgtgacctcttctgccttcactgggctggggtgatccttggtgcctttgtttccacaaggccttttcctgccccctgccttgccaaagacatttaatcagcacacagctgccagactattcccacagtgctccaaatgcacatgaacaacagtgacggctccagccttcgacccagagccccgtgcccagtgcgtcagtgggcctggggttccaggctacatcaagcactgatggtgtcagggctggtagttaccaaatcagggttaagaaacatcagggccacatttcactaccttcacagatcaaactcagcagcagtcatgactgtctgtcactacactggggatcccaattccacataagcacttttggaagaaaacagccaaagttggcctaaaattggcgctggaatttgggctgggaaaaatcttgtggttatttcctttaaaaaggaacaaaactttagtatttaattagttgatttatttaatgtaatttcaaacaattaaattatgaatcatgcaatgtacagtagaatcacggtttcgattttattaacactgaccaaa

SEQ ID NO: 55288 - DNA, 564 bp, Homo Sapiens
  misc_feature (546)..(546): n is a, c, g, or t
  misc_feature (554)..(554): n is a, c, g, or t
catgttcactactggactcttacgggctcagtatctctcccttagccatgagctggctcaggcatcccttcccttccctggagctgccctgcctttctcaagtatttatttatttattgcatggttcctgggaacatgtggcacaagtaatgggatgaggaggaattgggggtgggggtcttctacctaggactcttccctggagtcatgggctgcctgggacccaggacccatgagggggctgagaggtttctacactcgaggagcaggggtccagagaggcaggctggggaggcaagggacccatcctaggcccgctttcttgccgagccaagcagcttagctggggctgtgcagccaggggcttacccaggccagtggaggtgccacagccctggggagccagacaggctttggtatcgtatcgcctctgtgtccttttaagagaggagagttcagtaccccgtgctttctttacactggagaggaactaaaaggatctctgtgtctatggagaattgtcaataaaaaggcctcaagcttaanaaaaaaanaaaaaaaagg

SEQ ID NO: 55289 - DNA, 519 bp, Homo Sapiens
tctttaaaataaaatagagaaagtagaaaaaagtgcagggttttatataggtgatcttctctcacgccgcactgatcgaacagcaacgctccgaaagacagcatctgaaaattcacaaagaattaactctgttaagaagacgctaaccgaactaaagagtgacttcgacaaacatacagatagatttctaagcttagaaggtgacagagccaaagttctgaagacagtgacttttgcaaatgatctaaaaccaaaggtgtataatctaaagaaggacttttcccgtttagaaccattagtaaatgatttaacactacgcattgggagattggttaccgacttactacaaagagagaaagaaattgctctcttaagtgaaaaaatatctaatttaacaatagtccaagctgagagtaaggatattaaagatgaaaaagcacacatttcagatatgaattaggttgaccttattgagattagactaaggaaattttttaatgggacctctcatgagaagac

SEQ ID NO: 55290 - DNA, 120 bp, Homo Sapiens
gcggccgcctactactactatacggctgcgagaagacgacagaagggactggcctctgcccacaccttgacttcagtatttctgacctcctaaactctaataaagtcatgcttacagcca

SEQ ID NO: 55291 - DNA, 565 bp, Homo Sapiens
cacgagggtcaatttttcctttgttatcttaaaaggagccattgctaaggcagatctttttcatgttgatctttaaattttcccacaccataagagaggagcaaaggaaattaccagtttagactaagttacagtatgtgtttcataagtgattaaagctatatcattcccagttattagttaacacaaattcagccacattctgagtattgtttgttcacctttcagacttggtgatactggacatgtcagtgtaaataacactaaggttaggatcttctaagtgtataactgtctcctaagcccatcactgtggcacactgtagagtgagcttatagtttaattgagatatttatcttgtggaaatattaaaaagcctatgcttgtgtaagtgaaaaaaaatcacattcatttgtttaaaaatgtaaagctattttgtagaggctcagtacttttccaatgcactgttgtatgaatgcattaaaaattgtatagtaccatgcttaaaatataaaataaattaaaaataaatttaaaaataaaaaaatgggccttatcgggccc

SEQ ID NO: 55292 - DNA, 398 bp, Homo Sapiens
ctggatccagcaccagaaaattagcctctcttagccccttgttcttcccaatgtcatatccaccaggacctggccacagctggcctgtgggtgatcccagcacttactaggagagggagctgaggtcctggtgccaggggcccaggccctccaaccataaacagtccaggatggaacctggttcacccttcataccagctccaagccccagaccatgggagctgtctgggatgttgatccttgagaacttggccctgtgctttagacccaaggacccgattcctgggctaggaaagagagaacaagcaagccggggctacctgcccccaggtggccaccaagttgtggaagcacatttctaaataaaaactgctcttagaatgaaaaaaaaaaaaaaa

SEQ ID NO: 55293 - DNA, 399 bp, Homo Sapiens
ctgaagggctggtcaccgagtaggctctggcttctgccacagcgcacctgtctgccgctgccgcctcagctgctttggcccagccagcttcagatctggtcttggcgagctctcgccaggaccccaaggctgttggtctgtctggcccttgccccacccccttgccagatccctggtgtctggagctgagtggccgggcatcggtcccaagcatcaaagcctttggcctttctcctcccaggcctccacaaaggcctggcagacagaggtctcattccagcctgactcttgtcccctgggggacccagacaaagcacagcagccgctcagagacaggaatagaaatttcattaaaatctatggactttaaaaaaaaaaaaaaaaaaaaaatgcggcatt

SEQ ID NO: 55294 - DNA, 1425 bp, Homo Sapiens
gagagcgagaaggtgtcaggagcagcccagttgtgtctctctctctacctctgtgaagggcgcgaatgggcagagcagaacttctagaagggaagatgagcacccaggatccctcagatctgtggagcagatccgatggagaggctgagctgctccaggacttggggtggtatcacggcaacctcacacgccatgctgctgaagctcttctcctctcaaatggatgtgacggcagctaccttctgagggacagcaatgagaccaccgggctgtactctctctctgtgagggccaaagattctgttaaacactttcatgttgaatatactggatattcatttaaatttggctttaatgaattctcatctttgaaggattttgtcaagcattttgcaaatcagcctttgattggaagcgagacaggcactctgatggttctaaaacatccctacccaagaaaagtggaagaaccctccatttatgaatctgtccgggttcacacagcaatgcagacaggaagaacagaagatgaccttgtgcccacagcaccttctctgggcaccaaagaaggttacctcaccaaacagggaggcctggtcaagacctggaaaacaagatggtttactctgcacaggaatgaactgaaatacttcaaagaccagatgtcaccagaaccaattcggatcctagacctaacagaatgttcagctgtacaattcgattattcacaagaaagggtaaactgtttttgtttggtatttccattcaggacattttatctctgtgcaaagaccggagtagaagctgatgagtggatcaagatattacgctggaaattgtcacaaataagaaaacagctcaaccaaggggaaggcacgatccgatctcggtcgttcatctttaaatagatctttcttgccaaggaatgctctggcccaggagcaaggtggaatgtttccctgacgctgtgatctgcagcaggcttcaaatgaaaaccgactaaggattttcttttcaaaaacaaatcagaagcagatgctgattgggacccatataccacgttgctgactcacgttgctgcccttccatgatgttgccatctccttgagaacactgaagcaatcaccattctgatagaaagtgcttaaaccaccactcttaggtctgctcactcttagaacacacaatggaagaggaagggtttttgttttcactcattgtggtccccaagcctattgacactagttgcctagagtcccactgtgagtcatggtcagcctgtctgacatccaggttgtgctattaaccaagaaggaaacagatacttggaggcttagatgacttctgcaggatttatattcagatagaaaacatcaaatattttcaggggagaggtttttttttttaatttttccccctttatac

SEQ ID NO: 55295 - DNA, 429 bp, Homo Sapiens
acagttataaattggtatacatgtgtctctgtaatagggataatattgatatatctgttgctacatatttaagaatcattctatcttatgttgtcttgaggccaagatttaccacgtttgcccagtgtattgaattggtggtagaaggtagttccatgttccatttgtagatctttaagattttatctttgataactttaatagaatgtggctcagttctggtccttcaagcctgtatggtttggattttcagtaggggacagttgatgtggagtcaatctctttggtacacaggaagctttataaaatttcattcacgaatctcttattttgggaagctgttttgcatatgagaagaacactgttgaaataaggaactaaagctttatatattgatcaaggtgattctgaaagttttaatttttaatg

SEQ ID NO: 55296 - DNA, 926 bp, Homo Sapiens
gcaataaatattttaatttgtttagtttttatgatgacaaataattttcaagtttatttccttatttaaatacaagagctaaaccacaaacaggtataatcaagacattgtgtctcacatttacactcccatcggatcctcttccaatttgctgaccactgaccaggctagcggggggtgggagggaagactttcttaggtagcaccgtcgtgaggcccgaggtggggttgggggggaatcaaagacgaggacagcctctcatacctgtctccattcacatttacctgggaccagggtgggcaggagacaccaggtcatggctcctgagccccggccccctggactgaagggacagtgtgtgagaatcagttctgtgaagggcgggaggaagcagtcacctattcctcctgccttcacagttaaggtgaaaaccttagccctatccttgattcctgggggctgccgggccctgtgtgctcccctgcacacctgggtgcctttctgaggctggcagcagcggccggggtcaggggtcctgggctcctaggctcacacctcagctcacagttgcgtccttgcaggaggacactgggtgtctgacaaacacaaggcctcgacagcaggtctggaactttcaaccccagcaggatgagggggaatggcggttgtatgtcaggcaagtaatttctggtcccactacaaaactttatttttgattagagtaccattctgaatctcttctacaaaagctgaaaagagcaaaaaaaaaaaaaaaaaaggccgccacttcactcactttaaagacctatttacatgtaaagttggtttcttggggttttttttaattttaaattttttaaaatttttagcgcgcgctcgcttaaaataaatcccagggttccacatttcttataagaattctccc

SEQ ID NO: 55297 - DNA, 734 bp, Homo Sapiens
  misc_feature (627)..(627): n is a, c, g, or t
  misc_feature (730)..(730): n is a, c, g, or t
aaagtagctattgaagtatatttgcgactttcgaaggctcctctttctgcccttccccatttgatggatggctgcaatctcagtgcctgagggaagatgcctagtagaggaaagcttaatactctttttcctgaaagaatatcgtcctctgcattatccccatggaacgtttcactttaaccctgactggggagcaatatgttctgtgaaaatatcttagaaattgtacaccaaaaccttacaaccaacttatttgaacatttattacacacagggtttacgtaagacttttcttattggcatataattaatttcctttggtctcccttatccacattggcttattctggaggaaaagcagggatctgtaaaacaaatcaagaatatattaaatctacaggaatgcagagaagaaaactataaaacagaaccaaaaacttgttgcacagcctacataattaagagatcaactggctggaagcagatcaaggcctaacttcattcaagacctaaatattatgagactcagctatttcggtttatgtgacggctcttccattcaccatgcacaggcttttccagctatctatataatgttcgcaaatatttgatcaagatgatgttacnctatcttccttcttctgattcctgcaatgctggaaaaaggcgaatcttgagtacccccattaaaattaatgtctgggggaccttctaatttggctcactgatngggt

SEQ ID NO: 55298 - DNA, 883 bp, Homo Sapiens
cggctcacgcctataatcccaaaggggctgctcttggatcaccgaagagccttacctatatcaaatcaaaaagacattctgggtcagattagactatgctcctggccctacagattgcacataaactatcataaatacagctttttcagggaactagttctaaaactcttacctgctgagaataagtcttaacactaagatgactgtattatatcaatttattattagaatcagacttatacctagcacaattaactattgtgtgggcaaagaacatttaaagggcatagtagaggtaaggagagacacatactcagctagagataaaaatactaagttgcactgattacttaaaatactagtcacaccataaaagtgccctgtagtttcaaaaacacgtaagcaatgaaatgttagccattatgtgttaaactacttaatctcatttctgtgatgtgaatatttttaaccccctttttgtagatgagggaactgacaagtgacttgtccaaggccatatagctgtgagaaaacccatgcattctcttttcagagttcatgctatcactcaactttaaagtaggccaagattaatgttggtaagggtttgtaatctgtaagaatgctaaaaacgtaagtatatatatcattttagatttgacattttgtatcttgccagtttttaggagaacttttcattttgttaagtatgcatgaatatagttgagtatatgagtaactggttcttatgctgctgttttgtatttttaccagcaggaagattgcaaaagttgatgtatgtaaatcttgaaaatatttctaagtttttatgtataacaaaatatgtattttttaataaactttctttttgatatttttaaaa

SEQ ID NO: 55299 - DNA, 690 bp, Homo Sapiens
ttttttttttttttttttgtgctgtacaatgtctactgtactgtgggtcatttagatgagatgaaaaacttaattaaatctgaagtgtcagaggcgcttagtaagccttagtaaagttgtgattgaagaaacttaatacaaatgaactagaggtttgtaatcatgccactcactaacgattttatttctgtagcagaatcattttttctatgtaaggtgttaatgtgtgtgtatgtgctttggttgtaggaaaacttgaaaattccaaaatccttattttcctatttgagaggctggttcagcagggtgtgtgtgtgtgtgtgtgtgtgtgtgtatgaatggtatatttattacattattttgaaagagaattagtgtgttatgtggataatgttatatacagccaaagtggatgtttctgtttggcaaggaaggtaggatttctgaaactcaggccttaaccaataggttggaagacaagaccaattgaagagttaggaaatgtgagtttttgttacttctgttattccagtcttggtttcattgtctcattctttatttttaaaatcttgtgcctaaaagtttttttgcttaattatgaagtagacatgcatgtttacatttatgtaaaatatttgctgtgtgaagtattttttgtttattctcttaaaagatcactatattgtaata

SEQ ID NO: 55300 - DNA, 682 bp, Homo Sapiens
  misc_feature (665)..(665): n is a, c, g, or t
cttgtaccagaaacatttccaatttactatcaaattatagtaactgagcctgtgtgaagtatctcatcattttcgaaaggaacaccttgtgtgatgccagtgagcatttctaaaaagggtgtgaggtagaggtaaaaataaggtgagagaccatttcagaatgcactgttgctcaaaaaggtgatctggttctttcttcagagatttctacggggatagaaaatcgggagtctgccctcattaatctgtgactccacctcttgcatcaaatcaatatctatttgttgagcacttattgattaagaccttgcatatgtctgtccattttgatttgagatacaactttttgtgtgggttgaatgacaaatcactccaaacaaaactgggcacagagaatcagctaggagaccagttattcagggtccatttctcttggatgtaaaggagtcctgggtaaaatgtggctgtaacctaaaccaactagtccttgtgatttgtttctgccctctgtgtttcctgttgtcaaatgctaagtgtgtgttttgcagtcatgaactaaagcacaaaaagatgcatgagacattgtagtcatatgtctggtgtgacactttggagcaaaaccttgcagtggtaaataaaaaatttccaacagggaaaaaaaatanaaaaaaaaaaaacgcgg

SEQ ID NO: 55301 - DNA, 542 bp, Homo Sapiens
cgcgtccggttttctaacttttgctatcccccccgcgaccaaaaaaagggggggtttataatttaaagaaaaggaaaagaggcgtgggttggtagttgtgtccttaacatttaggaatgacatagcctctggagtctacaaactgaagaaactttcatctgatcagccttggaaatccaaagttaaagagcctatgtgtctcttgaggcgggggttagaggattcaaatttgggatgatgctcattgattcctgaccatagcagtgagaggccattttttgtgcaggaaatgtgcttaggactcagtcttgttttcgattatccaccacagaaaccctgagacacagagcagcttagaagtctctacccaggcgtaaatagagctccctactccagaccacctgccacccacctcccaagttgagaacacaagctccagctgggctggagagtcaggcttggtgcagggtgactttggcgaagttttgtcagatccataaagcaaactggaatttgagctttcacttaccctagtatacgtt

SEQ ID NO: 55302 - DNA, 601 bp, Homo Sapiens
gatcttcaaaactgtccatggcatgaaagacttggaccgccatctcagaatccacacgggagacaaaccgcacaagtgtgagttctgtgacaagtgcttcagccggaaggacaacctgaccatgcacatgcggtgccacaccagtgtgaagccacacaagtgtcacctgtgtgactacgctgccgtggacagcagtagcctcaagaagcacctgcggatccactctgatgagcggccgtacaaatgccagctctgcccctatgccagccgcaactccagccagctcaccgtccacctgcgatctcacacgggggatacccccttccagtgctggctctgtagcgccaagttcaaaatcagctcggacttgaaaaggcacatgatcgtgcactcgggggagaagcctttcaagtgcgagttctgcgacgtccgctgcaccatgaaggcgaatctcaaatcgcacatccgcatcaagcacaccttcaaatgtctgcactgtgccttccagggccgggaccgggctgacctcctggagcacagccggctgcaccaggccgaccacccggagaagtgtccagagtgcagctactcctgctccagc

SEQ ID NO: 55303 - DNA, 536 bp, Homo Sapiens
taaacaaaaaaatggtttttttctttgccttgtaataagattgtaaatccatttcctgcttgtgttcttagtgggcatgattgtgagtgtgtgtggggtgctcacacgcgtgccagtctttttgtactgtaactacctcatggtttgaatgatgattgtactgctggttgtgttaacagagcacattttgttgggtgagtcctatgtgatttttttcatgtttgttttatctgggggttgttcatgaaactgacagatgtttttctaaaaaggactattatcagtttccaaatacaatacttctctcttctggtttttcctgaatgagcctgattttgttgctggttttcatcatctatgagggtaaaacgagtacccttaaaatccctgtggccagtttgaacacccctgttgtattcttttctctgttcagtgtgtcagctattttgtgaagatgcttagatgtatagttttgataaccacagttttaaatcttttatctgtgcataataaaaagatatatatcagttattaaa

SEQ ID NO: 55304 - DNA, 607 bp, Homo Sapiens
tttgagaacggagtcttgctttgtcacccaggctggactgcagtggcatgatctcggctctgcaacctccatctcccaggttcaagcgattctcctgcctcagcctcccaagtagctgggattacaggcaggcaccactatgcctggctaattttttgtatttttagtagatatggggattcaccatgttggtcaggctggtctcgaactcctgaccttgtgatctgcctgcctcggcctcccagtattgggattacaggcatgagccaccatgcccggccttaaaatgccttcttaaaggaaaaatgccaactccatccttaatctcaaggaaatctgattgtccaaatagatctgttaatatgtaacatattaataggtaacttgctgtgtaaaattataagccatattttaaaaggttttaaaaatacttattgtgctccatttgtgatataatttctaacatttctgctctgtgatgggggtttatttgtaagaataagaggcaaaggaatgttagcatagcaaaaatgtgtttgaatgagttaaccttttaatcgcaaccctatgtgaataaaattactccactgttaaaaaaaaaaaaaaa

SEQ ID NO: 55305 - DNA, 751 bp, Homo Sapiens
agcggggacctcagagtgccaaggagagggtcaaggagtggaccccctgcggaccgcaccagggccaggatgaagggcgggggccagccccgggcagcggcacccgccaggtgttctccatggcagccatgaacaaggaagggggaacagcttctgttgccaccgggccagactccccgtcccccgtgcctttgcccccaggcaaaccagccctacctggggccgacgggaccccctttggctgtcctcccgggcgcaaagagaagccatctgatcccgtcgagtggaccgtgatggatgtcgtcgaatattttactgaggctggattcccggagcaggcgacagctttccaagagcaggaaattgatggcaaatctttgctgctcatgcagcgcacagatgtgctcaccggcctgtccatccgcctcgggccagccctgaaaatctacgagcaccacatcaaggtgcttcagcaaggccactttgaggatgatgaccccgatggcttcttaggctgagcgcccagcctcacccctgccccagcccattccggcccccatctcacccaagatcccccagagtccaggagctggacggggacaccctcagccctcataacagattccaaggagagggcaccctcttgtccttatctttgccccttgtgtctgtctcacacacatctgctcctcagcacgtcggtgtggggaggggattgctccttaaaccccaggtggctgaccctccccac

SEQ ID NO: 55306 - DNA, 621 bp, Homo Sapiens
  misc_feature (12)..(12): n is a, c, g, or t
  misc_feature (19)..(19): n is a, c, g, or t
attggccctcgnggccagnaattcggcccgaggaaaattaatggctgtcatgttcactctgaaaaaaatctaaatgactgaaatgtacagaaataaaaattagcaaacaattattctagggatattttcagattttacttcatttcttgaaatgcgtgtgccatatgcaattgcatttcttgtgccaagaaactaatagaacttatttcactttacctttttttaaaatgtgaatttagttattatagttcaattttatggccttacagatggcttttattttgtttgcagctgacactgcagttcctttcatgcaaaataccataaactgtttgatgaaaatcatgcccctaatggaaactctctagtttttccatataactatcctactgtacatgtttaaacatattttatttttgctccaatggcttaatgtgaaaagctcctgcagataagtggacctgtcatgtggttaatcttgtttaagccaattcattaactgtgtactgatactgatgctatgttttttttaaatggattttattccaggtgaactttttttttataataatgttcgtctaaaataaaaactacataatgaaaatgaaaaaaaaaaaaaaa

SEQ ID NO: 55307 - DNA, 600 bp, Homo Sapiens
cttggaagtgtttaaggttgccattggttgaaaacataagtgtctctggccatcaaagtgatcttgtttacagcagtgcttttgtgaaacaattatttatttgctgaaagagctcttctgaactgtgtccttttaatttttgcttagaatagaatggaacaagtttaaatttcaaggaaatatgaaggcacttcctttttttctaagaaggaagttgctagatgattccttcatcacacttacttaaagtactgagaagagtatctgtaaataaaagggttccaaccttttaaaaaagaaggaaaaaactttttggtgctccagtgtagggctatctttttaaaaaatgtcaacaaagggaaaataaactatcagcttggatggtcacttgaatagaagatggttatacacagtgttattgttaaaatttttttaccttttggttggtttgcatcttttttccatattgttaattttataccaaaatgttaaatatttgtattacttgaattttgctcttgtatggcaaaataattagtgagtttaaaaaaaatctatagtttccaataaacaactgaaaaattaaaaaaaaaaaaaaag

SEQ ID NO: 55308 - DNA, 554 bp, Homo Sapiens
acctttaggttttggtgcttatgtagaagtaagaattaacactttatatcatatatgagctactacattattacatgtatagcctcaaaggtagaagaatgatcttgtattctcatttatgcagaaatatacaattgagaatgacttgtcccctgttgaccttccataccactgaaagaccagtgtatttctccctcctctccagcagcacggagctgctaatagctctccattaatgcatgtttgctttatttcttacccacgtgcttttgttcctgctattctttctgcctccccttcctccaccctaagtagcccttttctgggtccccatgctcatgtgcgcatatctccatcattgtacagaatacagtgtagtagagattttatctctgtttattgccttagtttgtgagctctagcggacctctgagtagatgatgaggtcaggattatatcatattcatttttgtcaccctagcaccctgaactgccaggaggtgctaaactaaaggtcattggtttttttccataatgttaaaaaaaaaaaaaaa

SEQ ID NO: 55309 - DNA, 821 bp, Homo Sapiens
ggaagggtgtcccgcactgctgtcccccgagctgctctacgcgctggcgcggatggggcacggggacgagatcggcctgggcatccgcagctcctggaggccgtgctgaagctgctgcccctggacacctatgtggagagtccggctgcagtcatggagctggtgcccagcgacaaggagaggggcctgcagaccccagtgtggacggagtacgagtccatcctacgcagggccggctgtgtgagagccctggcaaagatagagaggtttgagttttatgaacgggctaagaaggcttttgctgttgtggcaacgggggagacggccctctacggaaacctcatcctcaggaagggggtgcttgccctcaaccccctgctgtaggcctggtgaagaccacctgggccggaagaggaactgggggcaccctgagctccagtaccaccactcacaacaggcctcccagtggcagctcccagacctgggccctggccagggctctaggggccggcagtcttggggtgggccctgccaattgggacgagtatccctgatttgtgaaaatgatggaaaaacgttcagtctcaaaaaaaaaaaaaataaaaaatataagaacacaaattacactacaatacacaaaccctcgcggggggtattattatcgggggggggcggaaacaaggggtatgtatacaggcggacagtgtgaactagcggtgttgcgggacccgagagttttgtgtacacaaaaggggggaaaagcgcgggcccccaataaggggcgccggttaaagttacggaaggcggtgttaccgggtaag

SEQ ID NO: 55310 - DNA, 531 bp, Homo Sapiens
  misc_feature (478)..(478): n is a, c, g, or t
gcacgatgcagtcaaagatgttttgactgtgcctttttttgttcccctgctgtcccttatgtagacttctgtcagtacccatggcagcctgtcatcttgttgacatctccttctggactgtgagctctgtatctggcttgtttttcatccccagcttctagttcacaattaggtagaaccctattactctttgaagaaggaacaagaaaatgtgggccagttttcatttgccattcttccatgtgagttagtatggttcgtaagtattcctggtgatacgctagtattggcaattctgtgaggttgaacaaaggggtggtatggtgtgctagcgtgggaattaggagacctctgggtcttgacagtgccctggccactaagcaaaggcagttcatccttggagtctcaatgtgcttttttgttaattgagatatgcttgaagtatcagccctaaatagtctgattctgtgacctacanacccttacttaattcagtgttactataaatgattcttcccttaaacctacttt

SEQ ID NO: 55311 - DNA, 745 bp, Homo Sapiens
  misc_feature (13)..(13): n is a, c, g, or t
  misc_feature (23)..(23): n is a, c, g, or t
  misc_feature (42)..(42): n is a, c, g, or t
  misc_feature (655)..(655): n is a, c, g, or t
  misc_feature (709)..(709): n is a, c, g, or t
  misc_feature (734)..(734): n is a, c, g, or t
tctttgaccaggngaaacccatncttatcaccatgtccaagnacctgggatctgggcccagcatctcttcctcctttgtagatgctggagcccagccaaggtctgggagctatatgggaagtgggggctgggatctgggtgggaatatgtgtttgtatacaaaggggccctccttaaaagggacaggatgaccttcccgaggaactcattggcctggggtagtttaagaagtaatgttctttctttctttctcttttccctacctcctgctaacccaaccagagatccccttccttgctgagagggttgggggcaggaggagatttggcagtgcctgcaggttgcctggccaggtggagagggggaaagaggaagggcaccgtgggtgtaagatgcctttctcctccacccatcgaaaccagccaccccttccctgtgccaccaagacagccttttccagtggccatcctaaggggaactcccaaatgggtgttgctggtggacacagatgctccccccaatggaagccccaagctctgaggtatgcgggtagaggctttggataggttttcttctgctcccctcttttatagatctaggctgcttggctgcctgtctttctaggcagtccccctagaggaaaaatgtaggaatntattttttctttaactgctgtgaactcactttgagggggtaggaggaggggagnacagcctgtgttttttatgcaatanagtcatcaact

SEQ ID NO: 55312 - DNA, 674 bp, Homo Sapiens
gccgtgataaagaaaagcatggagctgtgtctgcagacaatggtggctgcatctgtaagtggcttcagaggcagcagccctggggaaattgatgggtgtggcagtggacctgtgaagagggagaatctagccttcagcctgtccagtgttaaccactagagaaactgagctttatatccttttttaatgcctgtgaattttagcatattgaaacattagagcaaatactcaggggatttttcattaaacatccctcagataatttagctatatatcattagaaagggaaagctatcatttttattttaaaactaaacaaggccatcttataaactgtcaccaaagtcttcccttttttattgcatgtgtgccttgaatttcataaaacattaattcacaatgggggtcagaatgtactcttgttgaaacacttcttgtaccattttatgttcatattatgtttgagagggtaaaaatgtatgagcagcttaactgaagtagaactattcatgatgcttttcacacattgtggcataagatgtaaagtttgtaattaatgttaatttctgtgcattttaatattcttttataattattaatgttaatttctgtgcattttaatattcttttataattatgagcattttaataaattcatttttacaaacaaaaaa

SEQ ID NO: 55313 - DNA, 544 bp, Homo Sapiens
tgtcagcatgtttggcattggagcgggttgcagctggccaagggctgcctactgaatcactcttctatcgtgctgttcttcaggatattattaaagattgttatggcatcaccaaatgtgatcggcatgttggtaaaatttattccaaatgttcttcttttctggattatgtcagacggtctctaaagaagcttggattagatgagtccaagctgccagaaaaaattataatgaactactacgagaagtataagcctcgaatgaatgagctggaagcttttaatatgttgaaagttgtactggctccctgtatagagactttgattcttctggatcgactttgttacctgaaagagcaggaagatattgcatggtctgctcttgtgaagttgtttgatcccgtgaaatctcccagatgttatgctgttattgccctgaagaagcagcagtgatttccattgaagcaaattattagatgtatttctctatgagacctgttgctgagattgcttttctaaacatatatgtcctgttatacaaaaat

SEQ ID NO: 55314 - DNA, 964 bp, Homo Sapiens
ggatgcgtctgcgacccccgcatccccgcaccctcaaggcacctccaaagatgatgatgggttgtggggagtcagagctgaagtcggcggacggggaagaagccgcggcggtcccggggccacccccggagccccaagtcccgcaactccgagccccagtgcccgagcccggcctggacttgagcctgagcccgcggcccgacagccctcagccgcggcacggcagccccgggcggcggaaggggcgggcggasggcggggcgcggctcggcagcggcggcaggtgagcgggggaggctggcccccggcccgcgacggcctcgcgcccacctggtcactgccctgccctctgctcccaggtccgcttccgcctgacgccgccctccccggtgcggtccgagccgcagcctgcggtgccgcagagctggagatgcccgtgctgaagagcagcctggccttgggcctggagctgcgggccgcagccgggagccactttgatgctgcgaaggccgtggaggaacagctgagaaagtcgttccagatccgctgcggcctggaggagagcgtgtccgaggggctgaacgtgccgcgctccaagcggctcttccgggacctggtgagchtgcaggtgccggaggaacaggttctgaatgccgcgctcagggagaaattggctctcctgccgccacaggctcgagccccgcacccaaaggagccacctgggcctgggccagacatgaccatcttgtgtgacccagaaacgctattttatgaatctccacacctgaccctggacggtctgccccctctccgacttcaactccggccccgcccttcagaggacaccttcctcatgcaccggacactgaggcgatgggaagcgtagaccccaaagakccctggagggckagttcgtatttttgtgtkaaactatttgtkagaataaagtaatttkgckaataaa

SEQ ID NO: 55315 - DNA, 711 bp, Homo Sapiens
agtagcgaggcctgggtggcggccgcaagacgctgaggaggtttctgtccagcgtggagctcgaagccgcggagctcccgggcagcgacgacctctctgatgaatgctgacccagcaggctgggctggggtcggaccggctctcccgctgtcctgcccccgactgccctggccaagctgggcgaccttacccttcacgtcattccagccccagaggagtctaacctagagatacctccaagcgcggccgggggaagagaaaaaaaagaaaaaatcactgcatctcataattattgagatctttgtgttgtaattttcaagctgtttttagagggaatatatgtcctggtttgctgctgtgttgtttccccaaagtctcaatcagatgaggcaacaaaaagaccaccagaattgcaggaaagcagcagcagtctgggatagggaggggggaggagagctctccctccgtggtcagtttgtcagaagaaaagcatggaaaaagtgagatttaagaaatctcagccacgggtgtcttcactgcacaaaagtggtgctaattcagtaaacagtgacacctgtgtgggttcaatctgtggagagttgagttccattcctttgtttttaaatttccacctccatttgtgtttcctattaacctaaactcttgtaattctctaaatcttttttcatgatataaaaaaaaaaaaaaaaa

SEQ ID NO: 55316 - DNA, 725 bp, Homo Sapiens
gtaggtcctggcctttcgggtggtcaggaagatggcggcctctggggcggagccgcaggtcctggtacaatacttggtgttacgaaaggatctatcacaagctccgttctcctggccggcgggcgcactggtagcgcaggcttgtcacgcggccaccgcggccttgcacactcaccgcgaccacccgcacacagccgcttacctccaagagctggggcgcatgcgcaaagtggtcctcgaggccccagatgagaccaccctaaaggagctggccgagaccctgcaacagaagaacattgaccacatgctgtggcttgagcaaccagagaatatcgccacttgtattgctctccggccctaccccaaggaagaagtgggccagtatttgaagaagttccgattgttcaagtaactgctgctttgatgtgtttgaatacgcaggccacccagtccaaagcatcatgtgttccttgcagtgtcagcttgctcccgtctttcagttgtgacaatttcttgagggttaagcgcagtgttccatattaaaacggtgtcattactaaaacacgacaaaaacaaaaacacttaaaaaacaacacagaacacacggaagacaaggacagagcaaacccccaaccgcaaccactaagcgagaccgtacaaacggagaataacagacaaggcgaacagagtctcgcgagcaaaatcaccaagggagaaacagcacc

SEQ ID NO: 55317 - DNA, 749 bp, Homo Sapiens
  misc_feature (749)..(749): n is a, c, g, or t
cacgaggtgaggtgccactcatgggcttcccagggcctggcctccagtcacccctccacgcaaagccctacatctaagccagagagagacagggcagctggggccgggctctcagccagtgagatggccagccccctcctgctgccacaccacgtaagttctcagtcccaacctcggggatgtgtgcagacagggctgtgtgaccacagctgggccctgttccctctggacctcggtctcctcatctgtgagatgctgtggcccagctgacgagccctaacgtccccagaaccgagtgcctatgaggacagtgtccgccctgccctccgcaacgtgcagtccctgggcacggcgggccctgccatgtgctggtaacgcatgcctgggccctgctgggctctcccactccaggcggaccctgggggccagtgaaggaagctcccggaaagagcagagggagagcgggtaggcggctgtgtgactctagtcttggccccaggaagcgaaggaacaaaagaaactggaaaggaagatgctttaggaacatgttttgcttttttaaaatatatatatatttataagagatcctttcccatttattctgggaagatgtttttcaaactcagagacaaggactttgggttttgtaagacaaacgatgatatgaaggccttttgtaaaaaaaaaaaaacaaaaaatggcctaatcgcggcagctcgcttacttaagaacgtatagataggtccttn

SEQ ID NO: 55318 - DNA, 535 bp, Homo Sapiens
cgtccgcttcaggattgtgtggctgacatggtgacggcagatgactcaggcttgctgtgtgtctggcggtcagggccagaattcacattattgacccgcattccaggatttggagttccgtgcccctctgtgcagctgtggcaggggatcatagcagcaggctatgggaacggacaagtgcatctatatgaggccactacaggaaatctacatgtccagatcaatgcccatgcccgggccatctgcgccctggacctggcttctgaggtgggcaagctactctctgcaggtgaggacacctttgtgcatatctggaagctgagcagaaacccagagagtggctacattgaggtggaacactgtcatggtgagtgtgtcgccgacacccagctgtgtggtgctcgattttgtgattcctcaggcaactcctttgctgtgactggctatgaccttgcggagatccggagattcagcagtgtgtgagaagagcagccttcctttgtccctgtggtattcataaagtacccgctccacc

SEQ ID NO: 55319 - DNA, 615 bp, Homo Sapiens
  misc_feature (571)..(571): n is a, c, g, or t
gtgatcccctttggaaagtggattgatcctctcccctgtggaatgacagcttaacctgattaacccactggggcttgctattttatgagcatttttaaacagaaaggaaagatgatatcccagtgcaggtagactttatttttgaaagcatcgtggcccctcgcctctccctctcccccagaaccttggccagaattgagtcttcgcgttggggaggccacgctggaaccattgctctagggctgaaggtggaagtagggccactgccgcagcttcagccagagccctcgctgcttcgcagaatttaacaagcacacgactgggattcctttggatatgagaaaggaaggcaagtgcgggcaaagggaagctcctcccgtttttcataaacagaagtaagatgtcctctttcccaggtttgcacaatcacttctggcaaattaattgaaggtccttgaattcagccagtgcacgaaacctttgcatgttcttctgaaactgtacttcttccctattctgtctacccacactctgcgaactttgccttttccttaaacacattccagaccanacactgttcagtttgttaaaaaaaaaaaaaaaaaaaaaaaggac

SEQ ID NO: 55320 - DNA, 617 bp, Homo Sapiens
  misc_feature (483)..(483): n is a, c, g, or t
  misc_feature (530)..(530): n is a, c, g, or t
  misc_feature (539)..(539): n is a, c, g, or t
  misc_feature (542)..(542): n is a, c, g, or t
  misc_feature (567)..(567): n is a, c, g, or t
  misc_feature (576)..(576): n is a, c, g, or t
  misc_feature (585)..(585): n is a, c, g, or t
  misc_feature (588)..(588): n is a, c, g, or t
  misc_feature (614)..(614): n is a, c, g, or t
tttgaaggaaatatttgaaggctgaattttacatccagctaaactatcaaaggcatgcaaagtccatgttattcttaggccttcaaggcctcggccatttttctacagaaaagcctgattttaaaatgctcttagagacgttctccagccagaagagaaagaagccaggagggtgctctgagatattcagtcaccacagttcccaaatggcctaggaattcagagagtcagaatatcaccattactccccaatgggaacccccgacagtctcagcatggtgtgagggtgtggacggggggcctggcaggtaccaatcactcatcccgctcagtgaagacacagtgttcagctacggaagccataaggcaggccgagcttctgcccatccggaggaaatctcagctatccaacggcggtcaggagcagaggaaaataaagcagaataactagaaaacacgctcacagatcctaatgttaacggntacaaatgacgacggaaaaacaaactcctgaccatatattatatagnttcaagcancangaaggaggatattgaacattctcancacacatantaaacgctnganatgatgatatgctcattacccctganttg

SEQ ID NO: 55321 - DNA, 556 bp, Homo Sapiens
atctccactcagtattccaatggcaaaccctgatgatgtaacacctgcgatgagacatcggactctccggaactttctcatctgacacgtctttttcccagggttcgtacttctcctccattggtcccaggctaactcccctgttcctctgtggtgtctgtcagtccgtctgtcttctctttcctctgcccttcccacagggcagtatctgctgatggattcagtcctggtgtgtgattgttgtratttgttcttccgtgcgcaaaaggaagagggctttttgagtcccttccaagtgagattgtaaatgtagaattttccactgttggatctagattttttttccttttttttgggggggtggggttacagagctgagaccttgtgcatgcatgtagaaaattgtaaaatgtaaattttttttaatatataaaaagcttgtttctacagtttgcagtggatctaaacattacggcaattttaggatttttttcttaaacataggaactaaaactgtacaaattttttttatataaaataaagacatttgactttt

SEQ ID NO: 55322 - DNA, 904 bp, Homo Sapiens
  misc_feature (720)..(721): n is a, c, g, or t
gaagtttgtgaagtcaacttgctttctggggagtgaacagtgggcagtgattcacattgtggaccaacgggtgcgcttctacccagtggccttcttttgctgctggggcccagctgtcattctaatgatcataaagctgactaagccacaggacaccaagcttcacatggccctttatgttctccaggctctaacggcaacatctcagggtctactcaactgtggagtatatggctggacgcagcacaaattccaccaactaaagcaggaggctcggcgtgatgcagatacccagacaccattattatgctcacagaagagattctatagcaggggcttaaattcactggaatccaccctgacttttcctgccagtacttctaccattttttgaaactacaatactggaacatccaggaactggagttattctacgctaatggattggaaagaatgttgggaaaggacatcttaaatcttttctaactatggcctaaactgcagaactcaaaggaaatatagtgccattgttagtagtcattctagatgaattgggagtatctctccagttattcccagattcactagtgatccttaaagtctctattcagggagaagaagacactttccatctcaaaaatagactcgtgttaccttgatggatattggaatttgtctaaatctccttctaaaaaaataaattctagattttttgggcgnnccgcctatacccagataccgatacaaagagaagggggaagcggatgacaggaaagaggagcggtttaaaaataaactagaaaaaaacaaaagaaataattagaaaggggggcgcgcccgccccaaaaaaaagaaacccctcccgagggaggggggcccaaaagattctttattaacgcctgaa

SEQ ID NO: 55323 - DNA, 622 bp, Homo Sapiens
ctgcagtctgtttcttcctcgcagcaagcggctggagatagagaagagcttactggtgcgagcgtccgtcgaccccgtcgccgctgacctagagatggcagccggtctcaccgacatatttcagcaggatacatactgtggtgatgtctggaacaccaacaaacgccagaatggcagactcatgtggctctatctcaaatactgggaactcgttgtcgaactgaagaagtttaagagagtagaggaagccatactagaaaagtaagacaagagtgaaatcaaactgcttttagtgactcgaggccaggcagtcatgcgccttctgggtctccggcgtcttccgttcccgtgctgcccgtgtcatggccacaccgtcacccttcagcagcgacctccactcccgccaccgtctgagcagaagtgcaccgaagcctcagagacagagggtctcctcccgatgctctgccgctgttggggatatggtttcttgaagcatttttaggctgccagtattgtattaagcagaacagtataacctcgtatttttagctccagggtaaaaatggttttttaaaaagtcaaatacaatactggtccttaaaaaaaaaaaaaaaaaaaaaaa

SEQ ID NO: 55324 - DNA, 632 bp, Homo Sapiens
ttttttttttttttgattggaagaaggagacagaaattggaggaaatgggattattatcctagggaagggccgttggcaaggagttgagccggcccctctgagccctgggggctatctgacctgaagcctggacactgggcccttcaggtcgcaagaaaaagttccctcctaaattctattaggattttggagaatttttgcacagtaagaagctctgggttgctccttgggcttctcaaaagggaaaagttcaattcaaagattgtaaactacgaagtattccagccgtgttgctgatctagttggatagttgtacctcaaaaaagtaggtgagaactggcttcctcattgtcccaggatgtcaaatactaatgacataagagctcacttacgtgccaaaattcacttttatactagtttttcagtgctttaatatttgtaacttaaattttaaaactcgtatttacaaacactactgtaacttcagtgaaactgaattgtgcgattgaagctttttgcttatcatagtatttattacactacttaattcagtaaatatataaaagtagccttcaatttatttttatattattttacatgtttttacctgcagttgtgtatgtgaatttac

SEQ ID NO: 55325 - DNA, 1050 bp, Homo Sapiens
cttgtcatagccattgactatacatttgctactggtgattcagtttttaattttttagtcacaggaaatttttaactctactgtagatgcatgtccatgcattttctgtgttatggaaatccactgattttttttttttttttcaaatggtggtacttgcaatctgttttataattagtgctccatttaaatctaatttataatttttattttaagcagcaaatgaaacaaaaatggccagttttaagattgtgttgcctgtaacacaaaatgttacgaaggtttaggaaagcctctttgatttttgtttggccttgcattgccttggtaaagtaaaaggaaacagtacacttggagctaggaaaccaaagcaagctttgtgaaactggcacagtgatagagaattgctgtggagagttatagagcaaagggatgggtccttgaggcctgccagtgtgtaaaggtgttcaaataaagggctgtttctacaggtaacattaaatgtgaactcaacacttccagagtctttaaagggtttctatgtgtatcagtgtaatagtgttttaccaccaactgcctttctttgttcctagttactgtaacaaatatttgatgatagaggtttattaattttgtttatccagaccattaattttatttgtttttgttctatgtaatcaaataaaatttgagtaacatgtaatggtaaggattaatgcatggttatttggaccagaaaaaagtgccatagaagaccaataactgtttagttgaggctagtctggaacctttcattagagcaatatttggttattgcacttcatttttatttacaaagaaatgcaatttgggaatttttaatctgttatgctttgtttatcaaccttgattttaattaaaattttataagactaacttaaaacaccaacaaaaattttttttgcaaaagtgagttggactcacttttccttttttgctagtcaaaattaaagaggcagcccttttaaaaaaaattgtgaaacccaaatattgccccttcttttcaaaaat

SEQ ID NO: 55326 - DNA, 604 bp, Homo Sapiens
  misc_feature (503)..(503): n is a, c, g, or t
  misc_feature (521)..(521): n is a, c, g, or t
  misc_feature (526)..(527): n is a, c, g, or t
  misc_feature (534)..(534): n is a, c, g, or t
  misc_feature (536)..(537): n is a, c, g, or t
  misc_feature (539)..(540): n is a, c, g, or t
  misc_feature (543)..(547): n is a, c, g, or t
tgccaggccccccttctctttccagccgcctgctgagcagacccctcggagagctttctgctcccttcccatcagcagcttgctttctgggaaccttttatctgccttactcccctttaaacacctgcggcatcgtcacatggcttgtgattaccgttttatctcccttgctcccctttaaaacacctgcggcattgtcacttggcttgtgattaccatttcgtctttaaagcaggtttgttaacagttttaacactcggagtatttaaagccagccaggtgtgggcgtgcctgcacccagatgtggaggtttattttaaggctgtgccccaaggggacccagtttggggggggctgtgcccgccctggtcctagcatagccctggcccagagcactgctcccacaccctcgggcctcggagctcggctgtgttcatctacagggatctgtcacctgtccctccaggaaagctccttacgcctttgctctcctgagataaaanctgctctggatccttctncaaannaaaaaanannannggnnnnnaaaactcgagggggggcccggacccaattcgcccctatggtgagcgtttacgcgccg

SEQ ID NO: 55327 - DNA, 723 bp, Homo Sapiens
  misc_feature (21)..(21): n is a, c, g, or t
  misc_feature (29)..(29): n is a, c, g, or t
  misc_feature (46)..(46): n is a, c, g, or t
  misc_feature (72)..(72): n is a, c, g, or t
  misc_feature (131)..(131): n is a, c, g, or t
  misc_feature (149)..(149): n is a, c, g, or t
  misc_feature (169)..(169): n is a, c, g, or t
  misc_feature (198)..(198): n is a, c, g, or t
  misc_feature (218)..(218): n is a, c, g, or t
  misc_feature (226)..(226): n is a, c, g, or t
  misc_feature (277)..(277): n is a, c, g, or t
  misc_feature (657)..(657): n is a, c, g, or t
  misc_feature (716)..(716): n is a, c, g, or t
gggattctaccatcaggaaangaggccanacttctatcatcatggnggatgtgaagtgtctgagtgactgtnaattgcatgaaccaacttgagaagcttggattttcacctggcccaatactacagcttantatcattttgcaaggaantatcatactctcaacagaanaaagcaagaaactcaaaaaatggcctgangcttccaccactaaacgcanagctgtanatacctattgcttggattataagccttccaagggaagaaggtgggctgcangagcaccaagcaccagaatcacatatgggactatcaccaaagagagagactactgcgcggaagaccagactatcgagagctggagagaagaaggtttcccagtgggcttgaagcttgctgtgcttggtattttcatcattgtggtgtttgtctacctgactgtggaaaataagtcgctgtttggttaagtaatttaggagcaaagcaatgctccaagcgaggcctcctgcttcaggaaagaaccaaaacactaccctgaagggccagcctagcctgcagccctcccttgcagggagccttcccttgcactgtgctgctctcacagatcggtgtctgggctcagccaggtggaaggaacctgcctaaccaggcacctgtgntaagagcatgatggttaggaaatcccccaagtcatgtcaactctcattaaaggtgcttncatattt

SEQ ID NO: 55328 - DNA, 610 bp, Homo Sapiens
gggtcccttaatttcaggactcagaattcatgattgaagaaatgcaggttagtttaaactttgaaggaaatttttaaggtggcaaaaggttttggtggcatatacaccttaatctgtagatgggagtgattagctgtttaaaagttaaaatgtgactgagaaggaaattgagtagggcaaattttaaatgggtattatttttcatcttcaaacaggcagacctgttatcctaaactaggtgagtcagcttttggtacatgtgatgattttcagtgtaaccaatgatgtaatgattctgccaaatgaaatataatgatatcactgtaaaaccgttccattttgattctgaggttactctactaacaagcatcacacatttgtattttgccctgattaatatgttggcttcgctttcagggtttttaatgaccacaacaagcaagcatgcagcttactgcttgaaagggtcttgcctcacccaagctagagtgcagtggcctttgaagcttactacagcctcaaacttctgggctcaagtgatcctcagcctcccagtggtctttgtagactgcctgatggagtctcatggcacaagaagattaaaacagtg

SEQ ID NO: 55329 - DNA, 813 bp, Homo Sapiens
  misc_feature (728)..(728): n is a, c, g, or t
  misc_feature (756)..(756): n is a, c, g, or t
gcaggtcttacattatatttaaattttttttaatgatgtcttttttggcagtgcacagccagagaacaacacatcacacacaagaaacagttgtgctcatgtgatgggggcctcagcactaggaaggagtggactgttggtgcacgcagcagcttgaataaatctgaaagtcactatgctgcgtaagagaagccaaataaagcgcatgctgtgtacagagggtgtcgagaatgcctcctacgtgacggaaagcagatccgtggttccctgcagactggcaggagcagattccaaaggcacaggaagaagcttgcaggtagaatgtgttcattaccttctgcgcattataccacaaaaaagctgggaataaaaatgctaaccaaaaaaaaaggtgaaagtagataaaatttctcaactgtgtgatgggtaaacgtgcaggtttgctgtcatgctttgtttatgaagctgtggggtacaaggactctcatggtcactgtggaatgcagaacgttgcagcctcatggaagaggatttggcagcatctaacaaaacgacatggcatttgcccttagactcagcaattccagaatctgcctcaaaaaaaactctggcaaagaaatgaaaggactttacccacagagttcttttcacagcctgaatgtgtttgccacaaagttcttcactgtggcatttgtaaaactggaaacaatcaaaatgtccatcagtanggggattgggaacattaattcgtgcagngggggaactccgtaccagaaggaggaatgaggaacgcctattgataaggggcagagt

SEQ ID NO: 55330 - DNA, 530 bp, Homo Sapiens
  misc_feature (6)..(6): n is a, c, g, or t
  misc_feature (51)..(51): n is a, c, g, or t
ggagangagaaaggcaagagcaggaagtgaagggtcctgtgtatactgggnttacttgttgagttggagaactattgccgtattcctctgctaagctcagggtgcattcgtggaaaccctactgcaactggcccattgtgcatacaaagctggaactgagatgtgaacagatttgcattgccttgatcaccttccgtgggaaatatagctaggcccacttattggtaggagctactgacatgttaaaactaggttaaactgaattggaagtaatggtgtatttggaatcatggctgactgattccattacatgttctagcatgataccagtcctgaggttattccccttgaaccaccgacttagtagagtttaatgcacaatgtgatggtcttagttccttgtactgttcttcagtgtcaaagttgttcaactaccagttaagttttttgggctttgtttctcagtagtgacaataaatttgtgttgatctatttacaccttttggactgaacaccttagcaatcattga

SEQ ID NO: 55331 - DNA, 717 bp, Homo Sapiens
aggcggaccacctgttgggactgcgagattctcaaggggaaggactgggtctcatttctcccatctcagcgcttagcaggatgacctggtatagagcagggaactgggaaatgtgggtcaggggatcagacactccagttgggtcttttatataaattaaatggcaaaaggctccatacccttctccttctttcctaccctccactttatctgcaaaatgggaatgatgataacacccacttcatagaatggtcatgaagatcaaatgagagaataaaagtcaagcacttagcctctggtgcacaataagtattaaataagtatacctattcctccttttccttttttaaaaataatattaccaaatgtccagcttatacacatttacaagacttagctagtgggctatgttagagctactaaaagatctttgacaagctaaaactaagatgcaatgaatgaggtgtaacgaacaagagagttttaagttcagaaatggttacagaagtataagacagctgtgtgggtgttttttggtttttggtttctggtttacaatctcgtcattcaacaaagatgggagttttatagaactaaaagcaccatgtaagctactaaaaacaacaacaaaaaaggctcatcatttctcagtctgaattgacaaaaatgccaatgcaaataaaaatgattactttttattttaaaaaaaaaaaaaaa

SEQ ID NO: 55332 - DNA, 501 bp, Homo Sapiens
cgcgtccgggaattgctggagactttgcacctgggcttggccagctcccggctcagacctgaagctgagccagagctaggtgtgaagactccagaggagggctgcctcctgaacactgcccatgttactggccctgaggcccgctgtgctgcccttcgggaggaattcctggccttccgccgccgccgagatgctactagggctcggctaccagcctatcgacagccagtcccccaccccgaacaggccactctgctgtgaacatccctaatgtgaggctgtgaaaaggcatatggacctgcaaaggaggcccccaaccagacagacctagtttcaaacgagggcactgcccctgcctgcccctttggtgcccaggcacagaccctgatagtgggtttgggtcaccttggtatggaatgtatgtgctgaccccctaggtgagtctggggattggaacagggatcttaggtctgcctctctctctctctctctctctctctc

SEQ ID NO: 55333 - DNA, 629 bp, Homo Sapiens
ctgagacctgtataaatggactaataagaatcggctcacccactctaaccacagcctttattgcttccccactttcaaagaccttgagagcttttgaaactatggggaaactgaggctgggaacatctgatacacccagtcagcttagtcacttagtaaataactgctgaacaacttacgtggcacaaggacgaaaacagaggtctgtttgatcgaaattttcacttccaagctgtgtacactgtgggtacttaataaatcctcctagacttaattgattttgacttaattcaccacttctgctgaatctcctcaaacctcatcacgtagacgtctcataattctcagaacatacctggaccattgccaacatacatccctggtgtcactttttactgtaactgttgtttcatgtggctttccccttttactagattaggagcattcaaggagaaaatagatctggaaaaaatatagataacaatttacgtttcttcctgagcaactcctgctctaacaactgtcagaaggagttgagatataggaacaggatcacccctatttgacagatgagaaaattgaggcacaggcacagactattatacgttatttgtaaaaaaaaaaaaaaa

SEQ ID NO: 55334 - DNA, 612 bp, Homo Sapiens
agatgacaaaagtccactacaccactttccttggctatctgatgcacccccatcttcccatgcgcgcacctcagaaatcaggctcccacctgacataacacaaccatgcctcacaaaaagacagtggtttatcccttccctaggagaaaagagaggcaatgccaagctgcttcatcaactgttaatacttcttccagcccgcaacccaggatatctgcaggtgtctctccctctggtttggtcatggctctctctgttctagaatgtatgggttaaagtcggctgccacaccatgccctcggcagtgtggtccaaggacccctgagggtcctcaaggtccttcctttcccaaccccacgtggttttcttcagtcaggataccatactgcaacagaccgaaggcggaagcagctatgaggatgcagcagccttctgttaagccaggctttaaggatctgcaaaaatgtaaaacgatgccactcctactgatgaaatatattgttttggaaaatataggtttaaaaatttttttaaggtaacatgtaatggatgtatagtcttcaaatggatgaataaatgtttttcagagttattggcaaaaaaaaaaaaaaa

SEQ ID NO: 55335 - DNA, 662 bp, Homo Sapiens
  misc_feature (662)..(662): n is a, c, g, or t
ggaataatgtttgtaacattttgttgtgtcaattagagggtcacttgtttgtattgcaataaacactgggaccagttccggggttaagaattaatttttgtttttaatatttcacatgaaaagaatcaaagtaattgtaatggctagaagagacctgccagaagattaaaaaaaagaatgagagaaaagcccagttagtggtgtgcaaacttacttcctttaaatgtcccatggatgtaggacagtgccatgtttcaagatgcctgtgagctaggtcttcaagatttatagaatgttacttatgaacaaaatataattatttatggtacaattcttgtactttagcaaatctggagttagttcatagtcaaagtcagttaatatttcttagaggaaagttttgctttttgtggcaacatttttatagcttgtgtgagttcttttttatttaatgatttaaaagcagtatttttgcacagtcgtgaccgtgtgtggtggcgtcactgtaaccaaagtatatgcaccagcccttgtgcatttattgtttctcctgattttgtggatttaaatgtccaaatgcaaacctttgtgacttcctttggaggacttggcagcacagcatgcccccgtgacctgcctgctgtggtatgagctatgaccan

SEQ ID NO: 55336 - DNA, 756 bp, Homo Sapiens
  misc_feature (597)..(597): n is a, c, g, or t
  misc_feature (690)..(690): n is a, c, g, or t
  misc_feature (731)..(731): n is a, c, g, or t
ttttttttttttttttataagtacagtattctttattataaacaatcagataacagtataagtgtgcatttgatggataaccgaagccaagttattataatagaaagcatgacttcactcaaatagacagtttctttgttgttgttaatctgttttacattaatttgaatttaacatatgctaggatcacctaaacttgtcatacagttctgctattaaaatcgtaacagggaaagacaaaatgtgaaatgcatgttatattttgctttatttgttgaatatatatgtgtgtgtgtgtgtatatatatatatatatatacacactaaatatttgggacacaaagttaagcaggtgcttacagtctatcaagtgatatttatgaaatgtttttgttgctgttttgttgctgttatgggaacatccatatccttagaagacaataaaaaagaggattctaaatgctagatggttggctaacttctcctgatttatactgagtgtaaaacaaaacaaaacaaaacataaggtatatgtgttaagtagtgacatctttatagttccaaagcactcgcagctattaaaatatcatctagctnaaacaaacttttcacaattttttaacagaaaaataataaaccaacaacaaaaactgatcaatgttctgggtcttgtgagcagaccgaaatgtnactacagtgttctctattgtgtgatccttgtccgtggcaancttaacgtgtgctgcagtgctgatg

SEQ ID NO: 55337 - DNA, 465 bp, Homo Sapiens
ggaaatttactttactgtttcaatgtgttaagtgccttgttgtaaagtaaaattttaagtctagattcattattttcctgacatatatttttcattatgatatctactgtatgctattgtgatagttttatgaaatgcttacattttaatcaaatatgtaaatttcagaagctcttttttcctacccaccagtaccttaatcattggtttatcacattggattcaaattcaggttccttttttgataaagaggaaatttgttttccatgcttgtgattttgtgtttgtaaacatttcaggaggaatttaggagtgtaactatagtttatacttctataatgttgtcttacatttacatttttaagtgcctaattgttaaaactgatttatgtttctcttctaaagaggatatgtgtacttggtttctaatctctgtggtttattaggtaaatacaaagtataggc

SEQ ID NO: 55338 - DNA, 634 bp, Homo Sapiens
tgctgtttgcaatattcttgctttcatcaatttatactgagtgtaactttaggatttctgctattaaatgcatgctctctatcctgcttcagtttctggctttgctttgtctgtttcaaaatatgtagcttcctcttttgtacaacaaaaaactcattctcacttttactaaatatactgtaggagtcatcattgatgttatttttctcttatatatctgtaaagatttttggcatatgaatgtaatattaaagtcaatgatgctataacttgcgatgtttgcatcatgtcaacctttttgaaggagtgaaaaagccctactatgtttttaaatagcaagtgtaagctcagtgctagagtggatatacacaccgcatgttttcatatgtggcacttttatgtatcatgttgggttattgttctagactggactgttaaatactatgtttgaggctgggttgtcatttttataactgtcttggtgttttatggccattatttattacttttgatacacagaatgagctgcatgcatttatagagcaataagaggatgtatttaatgtgccttgtttttaactgaataagaactggaagcatgaatcaataaaactgattaaaatggtctaaaaaa

SEQ ID NO: 55339 - DNA, 659 bp, Homo Sapiens
cgcgtccgggccaagtcgcacctgactgcatgaacacctgttcaaacgtgtgttctctgttctctaagatgggtgaaagtcgatgccttctagtctcagtgaatttaacctgtgattttatgtctacgtatattgttcctttactgaacccaccacatgcgggccataaaatgagtgaaatcacagtgcaccctgttctcttatttttgaagtgtttcacgatttccagcatgtccatcagatggggggattgctaacttctctcttactcatgtacttacattctgtagttctcattgcatcactttggatgtttactttgaaaagcagaaactgtctctttaaacttggccctcaatgtcatttgcgtatctctgagaacaatagctatgtcccaccccagtttgtatttccgttggttgttggcacttttttctcattcccccatctcattaccttgtctgttttctggcactcactataatcagccttgcactagagctgtttgtggacttggcttcaccccctcctcctcagccctcccccacccattaaattgtgagctcttagaagacaggggtggcctttcatgtctgatcccctaccaaatctagcacagtgccttgcatcaagtagatttcaataaatatatgttaaat

SEQ ID NO: 55340 - DNA, 774 bp, Homo Sapiens
gactgaacgaaacccagaggctggttccagagctctgtccctgagaacacatccctgtggaaaatacttgagtttgtaatttttttttccccccttctgggagtggaggtctcaggctcaatccggaaccatgtacgtacagttttgcttattatttgatgtgacatgaactcaaaatcctgcatttttagattccttttagttctaattgaggcctcactagatgctcttcagttctgtgtattttgaggctgggtggagaagtatatgattctgctgttgattctttcagtcttccccccttctccttttatcaatcattccagagttattttctattagtcaaacttttttgtagaaccttctttcccttaccctggcaaattgcttctttacttgctggtttccttacgtttggggcacatgttgtaagaaactgattggaaggggaaatgtgcagctctccactggaaaggaactctccacccctcccatcctgataaaacaaacaaggtttacatttacaactaaaaggattcagatgcaattttcaactattctgaaaccagcaggacacacctgactttaatagttttagctgaaattgtagatgttttgcttcagtttaacttatgagaaaacgattatctgacggatttcgtgtgacttcccctttagtggtttattttgtctttttctgcccatctgtctactaataacaatgtgaaataaaatacctgtattgctacttccccatgaaaaaaagaaaaaaaa

SEQ ID NO: 55341 - DNA, 485 bp, Homo Sapiens
ctagacacagatgctcacagccgacctgtggcctcttgctctgaagccatcccccatcttccctagacacagcagacatctgagaaagcttcagcatttctcttgctaacagattcagaaaagtgtctcaaagcagagcacagagttatcttggtgtttgctgaagacagcctttgtgccacaatcacttattaaataagcgatcaatttcccattgaactgaacatgcaacatttatcatacattcagttctcattcacactccttaagatttggtcagaatttttatttctgttcatgtcttctacttttctactcctgtatgaataaaatattgatttgattacagtggctttgactataatgtgggagccaatttttgcctcagtcttcatttttatatttaccttgttattctcaggcatttttttcttctatgtgagagttaaaatcattctgtaatttccccccaaaatcatattcgg

SEQ ID NO: 55342 - DNA, 1026 bp, Homo Sapiens
  misc_feature (1010)..(1010): n is a, c, g, or t
cccctgcagaagccctcacattgcaccatctatgtggcaaagaactatccaccttggcaacataccaccctgtctgttctacgtaaacactttgaggccaataacggaaaactgcctgacaacaaagtcattgctagtgaactaggcagtatgccagaactgaagaaatacatgaagaaagtcatgccatttgttgccatgattaaggaaaatctggagaagatggggcctcgtattctggatttgcaattagaatttgatgaaaaggctgtgcttatggagaatatagtctatctgactaattcgcttgagctagaacacatagaagtcaagtttgcctccgaagcagaagataaaatcagggaagactgctgtcctgggaaaccacttaatgtttttagaatagaacctggtgtgtccgtttctctggtgaatccccagccatccaatggccacttctcaaccaaaattgaaatcaggcaaggagataactgtgattccataatcaggcgtttaatgaaaatgaatcgaggaattaaagacctttccaaagtgaaactgatgagatttgatgatccactgttggggcctcgacgagttcctgtcctgggaaaggagtacaccgagaagacccccatttctgagcatgctgttttcaatgtggacctcatgagcaagaaaattcatctgactgagaatgggataagggtggatattggcgatacaataatctatctggttcattaaactcatgcacattggagatttatcctggtttcttaggaatactactactctgattgtgtctactgattggctatcagaaccttaggctggacctaaatagattgatttcatttctaaccatccaattctgcatgtattcataattctatcaagccatcctttggattcctggacctaataaaattttttttccccctttccttggggggcccaaaaagaaatgagttttttggcaaactccttttttaaaaaacaaaattggntggcttaatttcccca

SEQ ID NO: 55343 - DNA, 754 bp, Homo Sapiens
tgctgtggagtcttcaaaaagcccgaccactctggattacaaatttacaggaggatgaaacagaagaaatggaaggcccacagtcacctggtcagctcttaaaccctgccctagcccattctatctctgtggcttcgtgtggtaatatttttagttgtggtgcagaagatggtaaggttcgaatctttcgggtgatgggagttaagtgtgaacaggaactgggatttaagggccacacttcaggggtatcccaggtctgctttctcccagaatcctatttgctgcttactggagggaatgatgggaagatcacgttgtgggatgcaaacagtgaagttgagaaaaaacagaagagtcccacaaaacgtacccacaggaagaaacctaaaagaggaacttgcaccaagcagggtggaaatactaacgcttcagtaacagatgaggaagaacatggcaacattttaccaaagctaaatattgaacatggagaaaaagtgaactggctcttgggtacaaaaataaagggacaccaaaatatattagtagctgatcaaactagttgtatatctgtataccccttaaatgaattttaaatccaataaaaacattggaagaattgtggaaaaaaaaatatagaacataaaaaaaaagattaaagaaaaaagaaataacaaaaataaatatatacacgcaaatcagaggaagaggtgaaaaaaaataagacaaaagaggggggtgggccattattcgagtg

SEQ ID NO: 55344 - DNA, 708 bp, Homo Sapiens
cttacctggaagggatagggccggggccattagaaaaaagatcatgcagtaaatggactttgagcatggccctaaaggatgagtagagtttaaaagctgtggagtgcacactgcagatgagcaaagcctatgggtataggcaaacatggtgtgtgtaggaggctcagtgagagtgaaggctttgctttggtatgtagtgaagaataagattgactacactggctggagctagcttttgaagagtcaaatccaggcagcatttagatcaggggttatagcccagcagcccatgggccacatctggtctgcagatgtatatagtttggcccacagaatgactaaaaacttgggctccaaatcaggagattgtacaagcagtatcagatattctggattactcagaatctggattactgagtggtggaatatctgatactacttgtccaacatttctacagggcatcaatgaactagggctgagatagtagctgccttgttagatgaggcatggctatccagtgcgctacagtttccacaactgcttgtataatagtttccctgacactcaaatcatttaccacttaccagctgaggtcacttgccctttatcaggacacttgcactgttgttttcctattctaattaggtatttctctgtgcccatgtccctatcaatagtagggaagatagaccaaaaaaaaaaaaaaa

SEQ ID NO: 55345 - DNA, 647 bp, Homo Sapiens
attctgatgttggagcggccgaatgccgcattttttttttttttttgatcgagctgtggacatccttcttaattcgattctgaggatttgtttaactaaaaagttcccaaacacagaaagggcctccccacctgctttggggagctgtctgtgctgggagtgccaggcatcccatgggacccatcactgccagtgtctgtgcctcccagaggtcagccgtgtctgccctggctctgtctcctctgtgacagggcagagcatttctggtcagtttctccatggtgcctcccacccctttgtaaagtggatggacatgatggaattcagttgtctcaccctgatagcctgggtgttgatattcactttacccgcactcagacacaggcgaccttgaagcagttctcggtgtgtagagtccacgtgacagtccccacagcctccccagatagctgtgtgcctgtgcgctactgctgtgccattttcccaacttggcgtttcactaaatgcagctgatctctctctctgtgcactcgtgatccatgttgaacaatacatgtaggttctttttccacgcaatgtaagaacatgatatactgtacgttggaaagcatttaccttatttatatacctgaatgttcctactacac

SEQ ID NO: 55346 - DNA, 489 bp, Homo Sapiens
cttaagtgcccatctcgtttgatataaactgtagaaaaggcaagcactttgttctgagtcttttatctccaaatacatagttgtctcaaaccaagcaagctttatcaaaatggcttatttgcagaatagttccaatgatataaatgccaactggaagtcattccaaactgcttgaaggagtagatgaaccagaatctgagaatttggaaataggtcacagaaaaagcctccatttggctaaatatgacaattatctgagtatggttaaatacatacaattaaatgtctgaagccaatgagttgtttattctaacttgaaatatatttttgtgagaataaatgttagaaaagttagtttattttggaaacctgccgtgaaaggaaattctaaaggcttaacatgaaactgtctgcatttctacctgttagacaatggttgctcttgggctcttgttatacagtcatatggctacacgtttatgtaaagtg

SEQ ID NO: 55347 - DNA, 491 bp, Homo Sapiens
cacattttgccaggtcaggcattttgctagtaagcaggatgcccccaactctccctgccatggaggattcttttttttaagctttgggtgcttttttaatacttttttttttaatgtggggaaggagcttgctctgacgtcaccctcctctcccctgactcctgtcctgagagctgtggatgccgcctcctgccctgcctacccctgaaacgtggggaatgggggccccaggacagcatcaggacttttgagtccagcttgccagcatggttccaactcgaggcagcgcctcttggtccccatttctgtatagcaggcgtgtgtgtgtgtgtcgaggttttttattttttgcttaatcaaactccattcccaaatgcactccatctctggctctgagggcgctccctcctctcagccgggcagcctggcctctcctgcccagacctgcggtcccagcatcccccagagccagggaacaggcccagcgggag

SEQ ID NO: 55348 - DNA, 623 bp, Homo Sapiens
gtaatgtctgtggtgctaccagtatagcttggaagatggttctgaattaatacctcagaatgatatcaaaagtaaaagagtggttctattgctaaatatattgactagctttcttataacaattttactttgaaattcaaagttccaaagctaaatgtctaaaagaagtaactgcagcttgttctgctgattttggaaaatagtattaaccatgtaagatctttggggttggagtgaaggtcttatctgcattaattttgttaatgcacattgtagatgtggagaacatcttgacctgcataaggattgcgtctcattttattgtgtagtgctttttcgaaatatttacatttctttggttcccatgttcatgtattctggagaagtaaaatttcttgattactgggcagaccctaaaactactaagagaaacataacatgtagttagctgtctgctcatggtttgttcaaatctaagctaaccttaatggtgctgtgtccgctgtccacagaaaacgcccttaagtagccctaccttactccttagagcttattttgcttttgtatttaataaaagctgtcttaaatgttaaaaaaaaaaaaaaagggcggcccgctctaaa

SEQ ID NO: 55349 - DNA, 791 bp, Homo Sapiens
  misc_feature (791)..(791): n is a, c, g, or t
agaggtaatccacaggctttaccctttgagaaaaaggcagccctccagattttgtagacatttttcttaatatttttaacattgtgtcttttaaaagaaatgttttacacagttcatccaaagagcagagaactgaacttctcactattgccttggccctgacagctgttaccagcacccttttcccaagaaaagtcaattcccaggtgcttattggacatccttcgagggggaagaggagggaagcggccagctcacccttccgggaccctagtgtggggcgaatctcacggacctgacctcagaggtgcaccagtgccgcccaggtagataagagctgcagcattgactgtgcttccgttcttccctcggggattgctcatggcatgggcctcttacgtgctgtcagcttgatgtgaagatcaagttcagtgctgtgggatttttaggaacaaaaaactgtgacgtctggatttggggttgatttttgtgctggggtgggattatgggtcaatgttgaagaatttttaagtctgtattatgtttaaaacatgaatgatttgaaagtttaaatttttaatttttatatgtggaaattcttcctgttggctaaaggggaagctcaagtggtgtcgtcttttgtgctgttaaatatatattctattctatggaagaaggcagagagaggagtcttattatttttaatgctctaagtgtatagtctgtctgttgacatagagttcacctgttttttggctcagtaggaaaaaaatccatcatctgagaggggn

SEQ ID NO: 55350 - DNA, 1082 bp, Homo Sapiens
tccagcagvtrtttattaagccagatgaaagtgaaattacaaacacaggtcaacttttaaactcagcactctgttggagtggaggtgcacggtccttcatcataggcagcctatgcgagatgcatcttaggaagggagctttcgctgctcagaaatcaaagctccatcggaggtgtcctactggaggcatcagacaacaagctaaatgacgttagggctacacaacacaaaggggaaagttgacaacaattcaggggctttgagtagtcaagacaattagcttagtacttcaggtcaataaatgctacaatttatgggcaattagctgtaaaatggcctacagctgaaacactattcttgtcttatttcacgatttcatggagattaaagataatctaaacagattaaggccttaatctttaatccaggtgagtaattttgtttgtagtaaaaagcataagaaataattctcagcatattatgtaaaagaaaaagcagtgaaaaccttgtttggtcttccagtggcaaggatagttgaacaacttcaagaagctgagagaagtttgttcccaatttacaagtattttgacatatagataaacaaaagcaaaaccagttaaaccttaaaagatcatctgaataagatcctgacaattataattttacatccatgtgaatttcaagcaattgttaatggggaccagcagggctgcattaagaaaaccacttttcactgatctctcccccacatattttwaatttgtcttgctttgtttattttggttatgcaagtcctttctcttcatgaaacaagtgtaaggctctaaggctaaaawaatagtwatttttgtgggccccaaatagctacttttgaatttctttctttagtatatctcaaatctggggaacatggaacttgaagactcctaaccatgaagcatttgggaaaatacatatcattcacttttcmcagaccattttcttaaaawaagrggsatatcckgatycmcwgcakgvtccwaawaagccttgttttacacaaaycmccccgcatattttcggctatattktggcccacccca

SEQ ID NO: 55351 - DNA, 755 bp, Homo Sapiens
  misc_feature (24)..(24): n is a, c, g, or t
  misc_feature (716)..(716): n is a, c, g, or t
atgatttctgcctgtgtctcaagnatgcgtgcaaaaggctctgaagaaagctgataagcaagttttggagcctctgatgaatcttgaggttacagtagctagagattatctcagccctgtcctggcagatctggcacaaagaagaggaaacattcaggaaattcagactcgccaggacaacaaagttgttattggatttgttcccttagcagaaattatgggttattcaactgtgcttcgaacgctaacatcaggctcagctacttttgccttagaactatctacttatcaagccatgaatcctcaagatcaaaatacactgctcaaccggagaagtggtttgacctaaatgttttagtttttggagagaaattcaggagcacctagctacttcattttcagtaagaacaatttttattgctttatttattggacgaataaagtactgtttcagtacattcagagaactagataaaagatataacttaagctttgatagtggcactggagccacccgttttaatttatataatgagaaatgtgctttgatgtttaaagccactgtacctgaatcatgctgttcatctatgaagttattactataagtagccttcagaagagtggtatcacaaagttgtgtttcttttgtgtccttaagcttgtctcacaagaaagatgccaggcctctaaatgtaataagatagagggtcaaaggntcaatcaataaaaatattttattcaaaaaaaaaaaaaaa

SEQ ID NO: 55352 - DNA, 719 bp, Homo Sapiens
ggcacactccccataagagtttactgcagagaaagaacagcaaaacagccaccctccttgaatttacaactcattatctgcaacaggttttctttaaatccaagacacaggatgggaaatgggtttccccaccaggtactcagaggtctgcaggaagtgactcccgggcaaggcagacttcagtaatccctgaagcgtgagcatgtggactgcatggctgggtggggactggtggatgtctctggagctccagaaccttggagaactcctcatggaattcccctcccagctcttagtgggctctgtggggtcaggaggagcccttcctccaggttttccttctttcctcctcagcagagaaactggagaaaggacattaaactcagtgcagtcgatttgagtgctgaaatatttccagaaccaatggtggtgctaaactatctccatgtttctagcatttttaatagtggagttggtttgtttttaatctcatcacaaaaatgcagtgcccttggggaagggaccagccccttggcctgccactttccaggtgtcctttatcactttgacgggactctttggtctgcagaaaatgctctgtcttggcatgcttctagactgtaagatttgggttttgttttgtattttatgtttacatgcatcttatatttccctgaaaactaaataaagtttttgggcctttttaaaaaaaaaaaaaa

SEQ ID NO: 55353 - DNA, 777 bp, Homo Sapiens
agcggagcagtgatttagaactggccagaccttagaagagtcttcagcaagctgccctagggtaggggcatattctctgtttgttttgtactggtaccccaggaggatgccttgtaactgctctttggtcatgatagtggtaatgaatccattcatgtaaaatgcaatatgtctgttagtttggggcacccgaggctcagtagaggtttagtatgatgccttccctttcttctttgagttatgaagaaactaatttctggcacagtgtgactgcttcaaacctatgttctgatgctatctcctatagaggagggcagacttttttttcttagtgcatttgctggtaggtcaaggaggggtggactttgaattagtgttcagagtcacagatcctacgtatgtgctcttcagtagaggattttctgtgatcctacaatgaagggaaagctatataatttattggtacttcctaaagatagagactaaagtcatggtagtattggccaaattaattttaaaactgaacaagtcatgaattttcatataaatcaaagaactttttccttataaaagcttccatttttgaaaagttggatcagttgtaagacctttcatctttagtattgtatgatattaattctacattgaaaaattaaacacttggcattaaatgggaacttggagtccaaagatctggttttatggtccatctttaccaatcatttgctgtggaatctctttaaagggtcctggaacctttgagcctcaagttacctc

SEQ ID NO: 55354 - DNA, 648 bp, Homo Sapiens
  misc_feature (601)..(601): n is a, c, g, or t
ggctaaaagttctccccatctattttaggggctgtctgcttttctagtctgtccacacagggattacctgtcatcttgcatgcaatcaggagaatctcataggggcaggaccttcccctactctgcctcttcctccatactaggttggaaaaatctggtttagcccactttttgcaacactcctgccaagtggtcttctacccattgcttgaaaatctctcttgacagggagctcactacctcacaaggcaggtcatttcattgtgggatctatagaaggttaagtaccacattctcctctaaaccttgcctacgacatgtttaatacttcatctacatagcagcccttcagataatcacaaccactttgcccccaagttttcaggttaagtagcatgaatttggtcattccttaaagacagggtttcaatttccacacatgatctctgcaaacaggcactgggttttcagtgtcctttttgaagggtcatataaaaataaggtaacaccacagtgccactacaccttctggggctggacttgtttcagcagctttggttgcactgaatttgggggagctgcatggtaccagggtttatgngttgcagatatataaatgccctaaacttaaaaaaaaaaaaaaaaaac

SEQ ID NO: 55355 - DNA, 500 bp, Homo Sapiens
tttttaaatggttgaaagaatcaaagaatattgtgacacatgaaaattatatgatattcaaatttcagtgtccataaataaagttttgaaaacatgaatacaaacaaaaaacacctatttatgtttgacctgtggctgtctttgcactaccccagcagagttgagtagttgtagcagacaccacatgcccttgagcctaagatctagcactttacaaagtaagtttttctgttacttagagctgaaaataaaagcaatgtagagttacgcttttataagtatttcatgtttcagaaatgatgcatacagcaatttgtaggtgggtggttttttgcagtatatttattttgtgcattatatttatatgttaagagcctgagcttagaagtatttttttcaaagaaatgtgttttttacttgctaaattgtcataacatcaaaacaagaaatttcttgatggaatgtagcagtaaacatatgaaataaacattgtctaaatt

SEQ ID NO: 55356 - DNA, 651 bp, Homo Sapiens
tcctgaaactcattcatccccttgagccagccaatggggaggaataggataatgcaaacacatgttttgttttctcattttcaataatttaccatgttaaaataaacttttctttgttttttatttgtagagtcagctaagtacccatatttaaatgccgtctttattatttttttgaggtctttgtttttgtctgtttttgttttgttttgttttgtaaataaggtaactgggcaatcaaacaccttttggggattctggctttagtattttatcagccattttaaaattaaatataaaaatcctttgtaagaaacttgcatcctaatttttctttattgcaattgaaagtgtaaataataagacaatgtaagtaagaccttcctaatgtctaatacaaactgggctccagcaagtggccctatttttattagggttttgaaggtttgtgtgtgtgtgtgcgtgcgtgtgtgtgtttttcttttttaaatgtatagtagagtggtgtctgtataagtgttacctgtagctggggttttgtccagcaagcctgaaatttatactttgaaactaaactactggggtttttaaacacacacacacaaacaaaaaacaacacaaaaaaaacaccaaacaaaaaaacaacaacac

SEQ ID NO: 55357 - DNA, 474 bp, Homo Sapiens
ccacgcgtccgaaaacaaatgaggcagaattgctatgtgtggttgatcttcagataaattgactgatcacagttatttttgtatcagtctatgttattaggaaaaattgtttagttgttttctcccctgattaatggtgatattcaagtatgatacaaaaagaattgtaccaccaaatatttttgtgaggtctgctgttttccatattcattttatgctactgcctttaagaaagaactagtgtatccttgaaatagcacaaaaatgttttaaaattcataattgcaaaacaaatctgtgactaacttaatgtcttcagatctaaagggtgtaaaaatattgatacttcaatatttcacttgctgccaggaaaaacaaaattctcaatcttttgtaaatgggaggaggacttttgcatacatttttactctttaaataacgacaacgacacttatactgtcataataacaatta

SEQ ID NO: 55358 - DNA, 556 bp, Homo Sapiens
ataatttgcagaaattagttttatttctagatttctaggtggtattaatgtgatagcattaggtgggaccagagaactcatttgttttgtagctttcattatacagattatttaggaaatatatcagcaaaggattttttgttatgcttatctcttgaaacaaaatatttattgtacagattatacattgtgatttttttgttactgagtatattgtttgtgcccagaaaaatctaaaaagatgtgggttgacttctaagagatttaagaacaagtcacctctagtttttaagacagttcccttgatatttacctatccagtaccatctcataagaataactgcctgtaagtatcagaaagttgagaaatgctggtaatgtgacataaacttctcactgttcttcactgagataggactgcttatcttgttattgataaattatttaatttctcctgaataattagcataatctcatgtgatacagaaacatcttaattagcaaataaatttatacaaaggaaaaccaataaaaccttaatgtgcgtttaataaag

SEQ ID NO: 55359 - DNA, 577 bp, Homo Sapiens
cctccacaagtcaggccgggaagtgctgggataccaatggaagttggcagttatccaaatatgccccatcctcagccatctcaccagccccctggtgccatgggaatcggacagaggaatatgggccccagaaacatgcagcagtctcgtccatttataggcatgtcctcggcaccaagggaattgactgggcacatgaggccaaatggttgtcctggtgttggccttggagacccacaagcaatccaggaacgactgatacctggccaacaacatcctggtcaacagccatcttttcagcagttgccaacctgtcctccactgcagcctcacccgggcttgcaccaccagtcttcacctccacaccctcatcaccagccttgggcacagctccacccatcaccccagaacaccccgcagaaagtgcctgtgcatcagcattccccgtcggagccctttctagagaaaccagcgccggatatgactcacgttagtggaccgaatgctcagctagtgaagagtgatgattacctgccatcaatagaacagcagccacaacaaaaaaaaaaaaaaaaaa

SEQ ID NO: 55360 - DNA, 606 bp, Homo Sapiens
tgaattctggcgtcagcttcctcaggattttcttcagttgcaagtacctttccactgaaaatatgagcatgcccgcctggctagtaggcatctgtaagagtgtcgccaggcccgcgccagctgaggcctcagactagccaggcaagagccgtctgaccagttggctggcggtggttctggtggagcacgagggagcccgggtggtgccctgagcctcgagctgctctctgtcactgtcttgaatcagactcagaaatggcttcttcccagccctgcctacaagtttttctctggggtcctctttcaaggatgtccacggtaccttcctcctgaaacttgaggaagtcttttgtcttccagctgctcagggttctctggtccaagaccctgctttaaagagagtctttggcgtgctcagactccagcgctccgttcttcaaggaggttgacttgcctctcgggccccgtaggtaccaagagactgtttacctcccagaatgtttgggcttgaagttacattaaagtgaagttatttgaaagaaagaaaacctcatcatttctaaggatgacttaattactgtgccttttcctttctttttacacatc

SEQ ID NO: 55361 - DNA, 635 bp, Homo Sapiens
agaaatgaaaatgttacactacattaatcctggaataaaagaagccgaaataaatgagagatgagttgggatcaagtggattgaggaggctgtgctgtgtgccaatgtttcgtttgcctcagacaggtatctcttcgttatcagaagagttgcttcatttcatctgggagcagaaaacagcaggcagctgttaacagataagtttaacttgcatctgcagtattgcatgttagggataagtgcttatttttaagagctgtggagttcttaaatatcaaccatggcactttctcctgaccccttccctaggggatttcaggattgagaaatttttccatcgagcctttttaaaattgtaggacttgttcctgtgggcttcagtgatgggatagtacacttcactcagaggcatttgcatctttaaataatttcttaaaagcctctaaagtgatcagtgccttgatgccaactaaggaaatttgtttagcattgaatctctgaaggctctatgaaaggaatagcatgatgtgctgttagaatcagatgttactgctaaaatttacatgttgtgatgtaaattgtgtagaaaaccattaaatcattcaaaataataaactatttttattagagaaaaa

SEQ ID NO: 55362 - DNA, 703 bp, Homo Sapiens
aaacaaaaaatattaaaaaaaaacccacacaaaaacaaaacacacaaaaataaaaagcccacactttttattcctgcttcgaaatgcaaatggatagagcacggtttctctgacagtataatgatagctttgtgagttagtttcatgtcatgctgggaactctctatgaggtggccataagcagcaaccagcccaaacacccacttgcgttctattagtatggaaccatttgcatttgttttttttaagctttatctttccttgtgcatcctgaccaagaaatatctttgattatgattaatgtattatgtcaaaatgtaggctagttaaacttttgtaaagttgcctggaatgtcatttgttaggttataaacacaagatctaaatgaagggttttatgtgttgtgtacaaatcttattttgaaatggacaaacttgtcattacatttgtaaccttgtacagaggatttttcactatgtgcctagcttggtgtccattcagctaaaattgaaaaaaaaaaaggtgcatgaagagttaaaaatcaaagtatatgtagagatgactattttatattacatgacccaatcctgtatttatttctaccccctttttgaaagtatttataaaactagttgaggacagctgtatttttttgttgaactatttagtagaattgtgcctttttgtctgtatgtgaataaa

SEQ ID NO: 55363 - DNA, 624 bp, Homo Sapiens
  misc_feature (378)..(378): n is a, c, g, or t
  misc_feature (587)..(587): n is a, c, g, or t
gggtccagggcagtggccttcaatcaagacctcccattgctgaacccacaaccagggctacccagaggcctgaccctgccagagtccatggctgcactgctgcccagacactagctgaacccaaggacaccagcgcccaaggacagctcctggaggaggccagcccagcaggaaagtctgtgagcaggaccccattcaccctgcggcagacgggcaccgtactggccacgggctgacgccggccacacttcccctccgagggccagctgagcacagcaggcatgaaagcaaacagagatacagcagtgagtcagttccttggagagggcagggactccgcccaccctgtgttcagataagggccagtgtgtgtccctnaaggtcaggccagccgggggaggggtccatgctgcgaaaattcagcctgcaaaggctcctctccccacttgatcaggcccagaccaggtgggggttggcgctggcctgtgttgcaggggacaagggcccacccaggccttggaacataagctctgcccctgcacaccctcatgtcaccacacctgggatggagacatcaggtggcccancgagagatggaggactgatcctggaacgtgaagcagc

SEQ ID NO: 55364 - DNA, 1073 bp, Homo Sapiens
tggtctcttcatcatttatgctctcactttagatatccaaatattaaaaggcaggctgacctgtatcacacagaattaaggcagtaattttctgcttcagtagatcaagggtagggctaaggcatcctgtggtaattctgattcacagctagatttgggaaacacaaagttagggaatggctatatgtgatttgctagttggagcagtcaaagtcttagctatcaagagttgtgaatttgaatcatggcactaggtcaggggtgctatggattgamatgaccttagttctcaaggagtgatttgtcctcatttgtcaaatgaggaatgagacacttaccatcatctcaggttgtttcttaaagacctaaatacaaatacaatttgttaaaaacttacagagggcctattttgaatgctttaagatgtaggccaagtaatgtatttttctcttagtgtagaaagttaagagaaaaagagctggtaccataaattttttcaatcttagtgtaaaatctgtatctcattgtaggcttctggtcaatacctatacataacaacttaatgtgatctaaccaactcaactgatagaaagctgaattgttcccagtggacaagtggtatttgatgtttagcaggtttttttgttgttatttttttggtaaactctgtggtaaaatctaaaataatgttaaaaccctaaaagtaactattgaatattctgtaatcttagacatgtatttttcaagctaaccctttgaagaaatgtgttcaaggtaggaaaatataaaattttttggttatttgtaaatttattttttstgtgtttatatttaatgaaaagatgtaatttcatttgtgatagctgaaaaaaaggctttccataattaagaaatamctttatmagtagctatgaactctgaaaataatttttaaaaacytttaagaaaaaamyacttgagwaaawattymagagttgtttaaaawctccttaaamcttamwttctgcmcactmytttttggtgsatagttgyggtgrggggattacactmyttcactttytmcmctaaggttt

SEQ ID NO: 55365 - DNA, 605 bp, Homo Sapiens
atggtattttttacatgcaatgcatgtggtgaatcagtgaagaaaatacaagtggaaaagcatgtgtctgtttgcagaaactgtgaatgcctttcttgcattgactgcggtaaagatttctggggcgatgactataaaaaccacgtgaaatgcataagtgaagatcagaagtatggtggcaaaggctatgaaggtaaaacccacaaaggcgacatcaaacagcaggcgtggattcagaaaattagtgaattaataaagagacccaatgtcagccccaaagtgagagaacttttagagcaaattagtgcttttgacaacgttcccaggaaaaaggcaaaatttcagaattggatgaagaacagtttaaaagttcataatgaatccattctggaccaggtgtggaatatcttttctgaagcttccaacagcgaaccagtcaataaggaacaggatcaacggccactccacccagtggcaaatccacatgcagaaatctccaccaaggttccagcctccaaagtgaaagacgccgtggaacagcaaggggaggtgaagaagataaaagagaagaaaggaagacggcagaaaaaaggaaagagaaagaa

SEQ ID NO: 55366 - DNA, 646 bp, Homo Sapiens
attactgaattttcagagtgaaaaaaaattgacagggtaatatataggccatattatagtgaagatcataagtataaatgtcctcgtttaatctttccatattgaggacagcctctgcatataaaaatgttcattgggagaaaaattatttttaaaactaaatttttatagtagtcctccattactggcaattaaggagcaacccacaaaatgtcattatgtggttctttgattaggcataaaaagtattgcaaacagctgttctattccttggaatatgaatctttttaatgtctaaagttaacctgcaacattttctagtaggacaagtcaatgtaaattaggtaatttttgcctgttttataccttctgtgcatttgttcaaatgaaaacattttttaaaacatgattgaatttttacttctcagataatggttgagtgtggaatttcttttttaacactttgatatgtaagttagtgtaaattaatacttttataacactactaggctttatattttatggaatgtcttaaaatctgaaatttttgaactgttaatttagcagtactttatcattatgtgccaatactgacagaaaaacaattttttcatgtatttaatatactatggtatccataaattct

SEQ ID NO: 55367 - DNA, 412 bp, Homo Sapiens
ttttttttttagaatcaatataagtctgtgcttgtaaatgcagtaagtatctttggaagtatacctaaaaattggtaatagtgtttgactccagggaagaacagatgggtgccagagtgaaaaaaagatagcttttgctttttatgacttttggattctgtaccacgtaataattttgatgtaaattttgctgtgtgtgtttttacttgttcatgtagtgattttataaattactcttttaattttctaccaatgaatatcctgggataaacccctcatgatcataatgaataatgatgtgtggagagtggggagggcttacatatcaaaaatgtagaaaatacaaaaagtgtctatatatacaaaaatgtaagtgttaacatttttagagttgcttcaagcttttttttta

SEQ ID NO: 55368 - DNA, 582 bp, Homo Sapiens
aaggaccttgaagtactaggaggaaggtgctttgtgtgtggagttttccatgaagtgcagtcccaactaaaaggctgcgttaaagattcactgcgtgctgtcctcacttgttctacaatgagtgccaaatctgctatcagcaaggaaatttttgcacctcttgatgaaaggatgctgggagctgtccaagtcaagaggaggacaaagaaaaagattcctttcttggcaactggaggtcaaggcgaatatttaacttatatctgcctgtcagtgacaaacaagaaacccacacaggcgtccatcacaaaggtcaaacagtttgaaggctccacatcatttgttcggagatcacagtggatgctcgagcagcttcgccaggttaatggtatcgatcctaatggggattcggcagagtttgatttgttgtttgaaaatgcttttgaccagtgggtagccagcacagcgtcagaaaaatgcaccttcttccagatcctccaccatacctgccagaggtacctcacggacaggaagccagagtttattaactgccaatccaaaattatgggaggaaacagcatcctc

SEQ ID NO: 55369 - DNA, 579 bp, Homo Sapiens
  misc_feature (563)..(563): n is a, c, g, or t
  misc_feature (577)..(577): n is a, c, g, or t
tcttcctgcagggaccctgggcatcctgctgctgggcctgggcctatagactgccctgccccttcttcccaaacactgagaagaccccgctggagatgaccccaaagccacgcctgctctacggccctaagcaatagacgcctgccctggctgctgatgatggtgatccctttgtcctttgacttggcagtcaaaaatggagtgacaccccagactcagtcaggaagagaacctgcagcctgcctcagctcaggctaccacgccaggctccactcgctggtatttccaggcttgctaagtactaaccaactcatccccagtaacactgcatgttcatatcctgaattacaaatcaaaatgagcaaacacgtgcataagcaaatgagaaaaaagaaggcacacatcaaatgatgagatgtgcagccagtgcaggtaccccgggagtgttgcaagttaaactgatgaaaagacgtttagtatttaattgctcctcatgtaacattactctgcttcagaaatgttttgtattttgatataaataaacatttgctaaaaaaaaaaanaaaaaaatggcggncg

SEQ ID NO: 55370 - DNA, 555 bp, Homo Sapiens
cgtccgcctcagcagaaaggaggcactactgagcaactatgcattgtcattgtcgggtttggggctttcggtggttccttggtgactgggaattgcttgtgtgcatgtgttgggtgcatgcttccgggtctcagctgccccaggcccgcacaggcaaccccttcccatccaaagccattggtggagcttctctggaatcatttgccaaaagcccaaggcagaatccaagggtccaagaccatttccatggagctcatgtttttcttttctgtaggaacttttttttaaccagcacccaccataattccgaaggccacgtttcatctttcctggatcactacagtgaagtattacagttgtacagttcccagtctggccttggcttgctcggataaaactttgtatgtattttgtatggcatagattctatattgtaatgatgtcctatgcaaaaagaaaaattaacgaaattgtaaattttattgttttaacgtgtatgcatgtttagtgacgtttacattttgaaataaaatttatgattcattaaaaaaaaaa

SEQ ID NO: 55371 - DNA, 605 bp, Homo Sapiens
acaaatgctccccaaaaggctgagtggctgactgaattaagtaccagtgacatgcagtaactgctaagatagatgagccatctgtatgctctgacagttacagactgaataagttggagacttccctaaagggtggcatttccccagggtaacaacgcagagctcaggtgtgggaaggtgccaggggcaggggtgcagaggggctgaggctgaggggggtgcagaggctggagaaaggataacaggagagagtatacaggcatgccttgatttattgcacttcacaggtagcagaatttttaaagaaattgaaggttttgggacatatatgtgacagcaataggttaagaaaagcaaagcagagaaattgaagatttgtgtcaacactgctttaagcaaatctgttggcaccatttttccaatagcatgtgcccattttgggtctctacattgcattttggtaattgcttgcaatatttcaagcattttcattgttattatatgtgttatagtgatctgtgatcagtgatctttgatatattattgtaattgtttcggggcgccatgaaccgcacccatataacacggtaaacttaatcagcatt

SEQ ID NO: 55372 - DNA, 623 bp, Homo Sapiens
aaaaatcttgatgctgtattgatttgtttgcatttaagatgacagtgagaaaatgataagcataaagagaagtatcaggttatttgctttttccaaacttttcagatgaactattgtttagtacagagactgagcaaatactacaaaattcaacttaaccttcatttcattggtttaaatgcgttattaaccatcttaagtgcaaactaatcattgtaaattatattttatcatggtgctgcctcaaatagtaatgtatttttctgcattcacttggatatatttagaatcacttttttcctcctgtatcaaggaagaggtatgtgctgatttgtttggatatttgacaaggcactctgatgtgacttccctgactactaccttcatatttcatttcaaattcaaacttctgaggttgcagcatatatgaattgcattttcaaaagaagatttgtaagaattaaactatatttatgagtaaacttttgaggtctctgctgtattgtttcaaatgtaataaactttacttctgtaaaaattgagcagttgtatcttctgaccaccaacagattttcagcttgccatgatagtctgacctcattaattactgctactgaagttca

SEQ ID NO: 55373 - DNA, 615 bp, Homo Sapiens
cgggcgccaacttttaggtcatactttagtcgttgaatttgcaaaagagcaagatcgagttcactccccatgtcccacttcaggttctgaaaaaaaaaaaaggtctgatgaccctgtcgaagatgataaagaaaaaaaagaacttggttatttaacagtagaaaatggaattgcaccaaaccatgggctgacttttcctttaaattcatgcctcaagtatatgtacccaccaccttccagcacaatcctagcaaacattgtaaatgccttggcaagcgtgcctaagttctatgtacaggtccttcatcttatgaataaaatgaatttgcccacaccttttggaccaattactgcgcgacctcccatgtatgaagactatatgccattgcatgcacctcttccacccacatctcctcagccacctgaggaacctcctttgccagacgaggatgaggaattatctagtgaagaatcagaatatgaaagcactgatgatgaggaccgacagagaatgaacaaattaatggaactagcaaatcttcagcccaaaagacctaaaacaataaagcagcgccatgtgaaaaaaaaaaaaaaaaaagttcgctcctcgtgccg

SEQ ID NO: 55374 - DNA, 543 bp, Homo Sapiens
ggctccggcccaggaccctcccctgctcgatcctctccagtaaatagaccttcctcagccaccaataaggcactatctccagtcacttcccggaccccaggggtggtggcatctgcccccaccaaaccacagagtcctgctcagaatgccacctcgtcccaagacagttctcaggatacgctgacagaacaaatttttttggagaaccaggtgcatcagcgcattgcggagctgaggaaagcaggtctgtggtcccagaggcgtctgccaaagctgcaggaggccccacgccccaagtcccactgggactatctgctggaggagatgcagtggatggccacagactttgcccaggagaggaggtggaaggtggctgctgcgaagaagctcgttagaactgcggtgcgccatcacgaggagaagcagctccgtgaagaaagggggaagaaggaagagcagagcagactgaggcggatagccgcctccacggcccgggagatagagtgcttttggtcgaatattgaaccggttgtggaaatacaa

SEQ ID NO: 55375 - DNA, 530 bp, Homo Sapiens
  misc_feature (10)..(10): n is a, c, g, or t
ttaaagacanttttatgactatttatgcacattataatggttacatctgctttttgtctttaaaataaaaaaaaaaatcagagaaaagcccacctttgaatacgtggctgaagataacagccaagaattggtctttcctaaaaatgcaacagataatgctgctagattgttattttgtttgcacttttttttgattggcattttaaaatcggtatttaaactgaagacattgtcatgttttattaatttaacaaagttgaaagtgactgctctgtacatcatgaccttaacaatgttaatgctgtaagtgaaagttcactgtcgtctgtatactaaatttattggtgtttctaacttaaaagtaagactgcagattatcccccaccagccttagtccaggggtgtggctctgtccgggtgcagtatgcagtcatgtggaaccttgctttctagtcctgggaaaaaaagatgtctctaattactggcttcaataaacacgaatccagactgcttacaaaaaaaaaaaaaaa

SEQ ID NO: 55376 - DNA, 631 bp, Homo Sapiens
tggtctttaagctcccttccgattctaacatttggtggtagcaggattgtgcacaaagctcctaatttagagaaagatctgggttttagtcttttctcctctatcgccgccttaccggttgtacaacattggaccagccattctccccaaggcctcggcattttcattgttaaatgggaacactcctaattcacactgttgctgtgaggattacatttggtaatgaatgatagaatgctttgtacatggaaaaggactatacctttcttttttaactacaaaggcgaacatgtaaccctctacctgtgggcgcacatttgctgtggtgttacgttccactggtagcgcccaacctcccttcattcaagcacattttacgggcctacagggaaggctttcttcctgtcctctcctaagacttgtctatgttcatcatctcttctatactagagctgcagtcttacatttgcttacttcctgacatccacccccaccccagtgatttctacccatctccacctctatattatttgaactaatgaattcatgaatgaccaacagagtggattaatgaatcggcaagggatatgtggcttaatccctaatcttacactctcctaacatctctctc

SEQ ID NO: 55377 - DNA, 599 bp, Homo Sapiens
aacggacgtcattgagtgcagaggatgctgaggtgaccaaagcttttgaagaagatatagagaccccaccaacaagaaacattccttctcccggacagctggacccagacacacggatccctgttatcaatcttgaagatgggactaggctggtgggggaagatgctcctaaaaataaggatttagttgaatggctgaagctgcaccctacttacactgttgatatgccaagttatgtaccaaagaatgcagatgtgctgttttcctcatttcagaaaccgaaacagaaacgacatagatgtcgaaaccctaataaattggatataaacactttgacaggagaagaaagggtgcctgttgtcaataaacgaaatgggaagaagatgggtggagctatggcgcctccaatgaaggatctacccaggtggctggaagaaaatcctgaatttgcagttgctccagactggactgatatagttaagcagtctggttttgttcctgagtcgatgtttgaccgccttctcactgggcctgtagtgcggggagagggagcgagcagaagaggaagaaggcccaaaagtgagatcgccagagcagcc

SEQ ID NO: 55378 - DNA, 824 bp, Homo Sapiens
  misc_feature (801)..(813): n is a, c, g, or t
  misc_feature (815)..(821): n is a, c, g, or t
gcaccgtgagccacccgcaggagaccaggagggcacagcactgcacctgcagacaagcctgccagccctttctgaggcagatacccaggaactaacccagatcctgaggaggatgaaggggctggccctggaggccgagagtgagctggagagacaagacgaagccctggatggcgttgcagcagctgtggacagggcaaccttgaccatcgacaagcacaacaggcggatgaagaggctgacctaggggcagaacgtccctgcattcctgtctcaccctgcacatcccgctgagatggagggctgggcggcagtgccagggctgcagaggcctgtggccctccggagtggtcttcctctggatggggctgctactgtggggctgcttctgcaccaggggcctccccaggtgtgcaccatgcctgcctcccacttggctgtccctgctgctgggcaggacccggccacatgttctgcggatgctgcagaagtgtggaccatggcgggaccccaaggacacttggcacaggcctggaagaggccgccctcgtcttgtctcggctccctttcatggacagactggccttcttagctgtactataaattttgtgaggtgagttagagcccagctcacttagccagctcactttgagggcatcctataaacacccaactgttcttttatcgtctccgttttagcccaaagtgaaattaccatgactgcatctttcaaaacaaaatattgatttctgcttttagggcccccgtttccctccagaaataaagggaaatggctggccnnnnnnnnnnnnnannnnnnngag

SEQ ID NO: 55379 - DNA, 712 bp, Homo Sapiens
aaagactctttacggaaggttcgcaccaactcaatgaacaagctgaagaaatccaaggatacagtctcagaggacaccattaggctaatagagaaacagatcagccaaatggccgatgacacagtggcagaactggacaggcatctggcagtgaagaccaaagaactccttggatgaaagtccactggggccagcaatactccagagcccagtttctgctggatcccatgggtggcacattgggacttctctccctcccccatctacacagaagactgtcaccatgctgacagaagcctgtccttgtaaggcccagccttccaggggaacactcagacatgttcattctcttcctgcttctgctctgggccggtgggtggctctcagaaaatacttgctgctggcaaaaggcctgtactcaggcatttgctttgacttgatgttgccaagggactgaggccattggcaggcttagtaccacctgctcctcatcttaggagtctccttttcaaataattaggctctgttcccattttaaaactctgatattggccttcacctgtgactggacactttactagaggcccattttcactaaacaataaaatctaaataaattggaaggaataacaaccacaaaggaaagaatagagttggtctggattgatgatcactgaggatctgtatgtgaggcacccataacagtagtttt

SEQ ID NO: 55380 - DNA, 558 bp, Homo Sapiens
cgggcagggggtggggggagattatattcactcctgccaaggactcccagcccaggactctctttagagcaaggaagcctcgttctctttcttctcaagaggctctcttgttctccatcaggagagccttgatttaggctacggcctcactctctatggccaccctaagaggaaaggctacttcacctcattacctccagagggctgggcagggccaagtgcctcataggactcatgttctctccaaccagggctggcatcactgctttgcaaagtggggcctgaggtagaagaaggtgtctggtttctccagctgctgtaggaggctaatgggcagggtacttgccctttgtcccactagactctaacccagcaccagggtgcccacctaggacctttcctggacatgagtttccttcactatcatagtcatgagcctcctacttctgggattgcagatcaggggtggggggagaatgttgcatgttgttttctggtgcttgttattatatatttgaataaacagtgctgcaagtacttgccaaaaaaaaaaaaaaa

SEQ ID NO: 55381 - DNA, 729 bp, Homo Sapiens
  misc_feature (185)..(185): n is a, c, g, or t
ctggctctttatcccttggggcagacatggaaccatctctgagggaccaggtggatgctgaagctcacccagtcagggcccctctcctagctccttttacactgaaattaatctgaaagctttcatagccaaggctttgcctaggtgctattattccagctggccaaagagaagtcttgggccangatgggattctcaatggattttatagacataattcccctgcaaacttaaaaaaataaataacccctactttataggactaattgtttgaatcgtatctttctctgtatgttaaaccagatttaaaactattttataaccacaatatgtaatcagagcaatatagtgttttcagatatataccttgttttataccttatgtaggtgtcctacataagggtggcatgcccactggctgtggtaaaatttaatcctcattgctttgggagtgacttaaggccttttgaagtggagcttttgcactttatactttttctgtgaactatgataactatattcgatattaaagctgtaagtggcattttcagcaaatgaatatgtacatgttgtgtctatttccaaaatgatttctgaactatctgcagtgaaaatgtatctgatggatcgtagacgcaaagcacattgcctaaattcatctgttaatgaattgggtaccattgttattaaaaatgcgtaaagaaaagaaaaaaaaacaagaaacattgc

SEQ ID NO: 55382 - DNA, 675 bp, Homo Sapiens
ttttttggaacgttgaggaggacttcaaaccagctccggagtgctggataccagcaaaggagacagaacaaataaatgggaacccagtgcctgatgaaaatggacacattcctggttgggtaccagtagagaaaaacaacaaacagtattgctggcattcctctgtagttaattatgaatttgaaattgccctggtactaaaacatcatcctgatgattctggacttttggaaattagtgcagtgccactttcagatctcttagaacaaacactggaactcataggaacaaatatcaatggaaacccatatgggttagggagcaagaaacatccattacatcttcttataccacatggagcatttcaaataagaaatctaccttcattgaagcacaatgatctcgtgtcctggtttgaagattgcaaagagggtaaaattgaaggaatagtgtggcattgcagtgatggctgtttaataaaggtccatcgccatcatcttggcttatgctggccaattccagatacttacatgaattcaagaccagttattatcaacatgaacctgaacaaatgtgactctgcctttgatattaagtgtttggttaatcattttttaaaaatagataatcagaaatttggtagactcaaagatataatatttgatgtataaaatg

SEQ ID NO: 55383 - DNA, 549 bp, Homo Sapiens
agagtatccttttggtttgggggtaagtgctcattgaagttcatggctataaccattgcaggataatctcactgacatttggaatcctgttagtaacagagcatagctctttagattaagagctctgtattaacgagctactcattgaggctgttccaggataagctggtcactgagaagggcgggtgaagaaaggaacattgcataaatgtagaagggaactcagcaatgccaagtcttcctcacctgtgattagcctgctaatgtgccccccaaaattacagacaggtcttgctttctttgtacatcagaatattcttagaggtggccacttggcctattgtcttcctaagattccttcatattcctatttaagaggtcagaataccttattgtttgcacttgtcaccattaatttctgatgtagtcacttctctactggagagcacccacttttttttttaaatcactttctgtgttgtatatcctaagccatgtgtgcctttcaagtatttttaaaaatatgctagtcataaaaaaaaaaaaaaa

SEQ ID NO: 55384 - DNA, 581 bp, Homo Sapiens
ccgccgtgtggggtgaagatctgtgccagctgggcagggctgctcctctacctgtggaccctggtagccccactcctcctgcgcaaccgcgacttcagctgaggcagcctcacagcctgccatctggtgcctcctgccacctggtgcctctcggctcggtgacagccaacctgccccctccccacaccaatcagccaggctgagcccccacccctgccccagctccaggacctgcccctgagccgggccttctagtcgtagtgccttcagggtccgaggagcatcaggctcctgcagagccccatccccccgccacacccacacggtggagctgcctcttccttcccctcctccctgttgcccatactcagcatctcggatgaaagggctcccttgtcctcaggctccacgggagcggggctgctggagagagcggggaactcccaccacagtggggcatccggcactgaagccctggtgttcctggtcacgtcccccaggggaccctgcccgcttcctggacttcgtgccttactgagtctctaagactttttctaataaacaagccagtgcgtgtaaaa
